United States Patent Application Publication US 2011/0183924 A1 - sequence listing, part 36

SEQ ID NO: 82194 - DNA, 1642 bp, Homo sapiens
  misc_feature (114)..(114): n is a, c, g, or t
  misc_feature (293)..(293): n is a, c, g, or t
  misc_feature (295)..(295): n is a, c, g, or t
  misc_feature (298)..(298): n is a, c, g, or t
  misc_feature (433)..(434): n is a, c, g, or t
  misc_feature (510)..(510): n is a, c, g, or t
  misc_feature (599)..(599): n is a, c, g, or t
  misc_feature (801)..(801): n is a, c, g, or t
  misc_feature (1456)..(1457): n is a, c, g, or t
ggatccgctgtcatgggtaaactttccagtagttcttaaataaaaataaaataaaaaaccttgtctcttgtatctgctttttcatctatttattccaggtttctgtcattcttnttgaccttgccgtgtgtgtgtgtgtgtgtgtgtgtgtgtgtgtgtgtgtgtgtgttgagacaggatctctctcttttgcccaggctggagtgcaacaatgcaatctccactcactgcaacctcaacctcccgggctcaagaaatcctcccacttccgggcgtcctaattgagaagattnanaanaaaacccagcgggaaaagtttgcctgccattggcatggctgatgaagactagaagttttagccagtctcaaggggcagggttctgtgaaaaggaacagtgtggtttgggagaaatggataaactgagcctcgctnnccctcgtgcctgggggagagaggcaacaagtcttaacaaaccaacatctttgagaaaagataaacctggagatatnataagggagagctgagccagttgtcctgtggacaacttatttaaaaatatttcagatatcaaaattctagctgtatgatttgttttganttttgtttttattttcaagagggcaaatggatgggaatttgtcagcgttctaccaggcaaattcactgtttcactgaaatgtttggattctcttagctactgtatgaaaagtccgattatattggtgtgttcttacagttggggttttgcaataacttctgtattttaatataaataaattcctaaactccctcccctctcncccatttcaggaatttaaaattaagtagaacaaaaaaaccagcgcatctgctacagtcgtcactcattgtcatggggatcaatcttcactaaacttgaagcagtcgtagctttggcagtgttttggttcagacacctgttcacagaaaagcatgatgggaaaatatttcctgacttgagtcttcctttttaaatgtgaatttgtattctttttaattattttaaaatatttaaacctttttcttgatcttacagatcgtgtagattggggttggggaaggatgaagggcgagtgagtctatggataatgaaataatcagtgactgaaaccattttcccatcatcctttgttctgagcattcgctgtactttaagatacccatctttttctttttaaccctaatctttcacttgaaagattttattgtataaaaagttccacaggtcaataaatttagaggaaaatgagtatttggtccaaaaaaaggaaaaataatcaagatttagggctttatttttctttgtagttgtgtaaaaaatggggaaaaaaagcagaattttaatgtgaagacattttttgctataattattagttttagaggcattgttagtttagtgtgtgtgcagagtccatttcccacatctttcctcaagtnncctctatttttatcatgaattcccttttagtcaactgtaggttatttaaaataaattccttcaacttaatggaaaaaaaaaaaagaaaccctcccacctcagcctcctgggttcaagaaatcctcccacttcggcctccagagtagctggaactgcaggtgctgccactactctggctaattttt

SEQ ID NO: 82195 - DNA, 814 bp, Homo sapiens
tttcaaacacaggaagcagtttcagaaagaaatacgagagagtaaagagtggttaatgttgaggctgggtagcagcgacttgatctgtgctctccgagagagcgtgccaggttctgcagtgtggctgctctctgctcagctcttttttttttttaattattattattattatactttaagttttagggtacatgtgtacaacgtgcaggttagttacatatgtatacatgtgccatgctggtgcactgcaccactaactcgtcatctagcattaggtatatctcccaatgctatccctcccccctccccccaccgcacaacagtccccagagtgtgatgttccccttcctgtgtccatgtgttctcatccgctcagctcttatcctgggtgatggagcccaggcttggggttccatagattgagggagaagtaggagtgtctctgtcagttaacttctatctggacaagtcagcctctctgaacttactgcctcacgtgtgaagtggggctgacacttgctcacagcagttgagcagattatatgagctgaatgttaagtgcctggaatggtgtttgttgccaataccactgggataaatgtcagtggataaaagactgtgatgattatggttcttgttcatggtcttgatagagtagaataatgttctttaaaagttcacaggaaccagtttttttttttggcttgtgtgaaataatatgcgtaaatggtcataacaaaagtagccaacattttatttatttatttatttatttttatttttatttttttgacacggaatctcactctgtcgc

SEQ ID NO: 82196 - DNA, 402 bp, Homo sapiens
atttaccttctagagttcctttagtaaagtgtcccactgccttgaaataaggaagttctccttcatttctaacctaaattactcctgttaaaattgaaatttatttctttagaagacattcaaggcagcaaattagcatcctgtgtcattatttctcaggttattcatgcacactaatgcttgagactcacggctctacttcctaaccattagaagcttcaggtttcatttctccagtgctaataattctaattttttcttttttaataggttccatgatttcccttctccatctctttatacctatctcaggtttctttccacccttagattgttctttccacctcaacctttattcctcttccccctaccttcccatccctaaatatcctctcttaaatg

SEQ ID NO: 82197 - DNA, 428 bp, Homo sapiens
gctgctttttcttttttttgaaggagcccccaaaactcacacatggggaaaaaggagacttttggagttaagagtgaaaatgcccaaactccacggccggcgctctgctctgcccgccaaggatgtacaagaggatttttatcaaattcggctcaatgtgccccagtgtcaattaatcacccccgtggtgcgtaagacaacttggcacttctgggtgtctgggatctttgagaacaaatcgaaaggaagaagagacatttactaaaaatggcaacctctttttaaggacggagccctgcaactcagccaggggtgaggacacatttttcagaagttgtgtttggtggggggattgttaatttctcaataccgctgacgcacagactcgacaatatcaagaaggcacgtttctgcgcccgcttgcttgg

SEQ ID NO: 82198 - DNA, 447 bp, Homo sapiens
gggaacctctctggggtccctttagaaagcactagcctcattcatgagggttccagcctcatgacctgttaatactcaaaggctactcctcctcataccatcgcattgcgggttaggatttcaacatacgaaatttagtggggacacatttagtccattgcactgcccttgagcagtttgcagggagaaagattcgcctacctgcaatggcacctccagccctagaggttaaagagacacatactgacctgcagcttccaccagacagcaggttatcacagcaccacttgggagcctgatgtcacaggaatggttattgatttagcccctcctataggctatggaatatgtgtctcctgcggacagactttgtctctttttaaatttatttttggttcatgggtgtattcccagcaccaagaacagcgaacagcacatagtacactt

SEQ ID NO: 82199 - DNA, 693 bp, Homo sapiens
tcattctctgggtgtcactcctgtttgtcttcactcttgctctccacttttccccatccaatcttaactgactggtaagtttgggaagaggaaccagacacatgtagccccatgccttccattctccttctctgtgggactcctgtccacaggaagtatatgctcttatctaagcttccatactgatagcatcccaggctggctctgcccttggggaaggcctgtggatttcagccctgtctgggacttgaggggtctaattcttgggtgaaatattataatcacagggttatggtacatttaagccacattcttacatatgtgcttaaagaatagtaaggtggtacttcaacccaaaagcatcttacttttttgtgttatttttcaaatgcctcagaaagccatttggatgtggagagataggtgtaaattattgagttcacctacagcccaactgtagccatagaaaacactgattataaaaagcatatttaaaacatatctgctttaaaggaggactaagtaacataaaattattcttatatcccaattgtcaacatgattactgcctgttcttttgtttcccacaatgatattgtttgaataagggtagtactggaatgaaaaattaggggattattttgtgtttaataattggcatctaattcctctttggcctttactacatatacc

SEQ ID NO: 82200 - DNA, 938 bp, Homo sapiens
gactgggtggatgaggctcaccccggcggggagaagggacgaggaggggcggacagcggagggtccgggagtgtccgccataaagtcgtttgaggtgaccgttgcgtaattgtgagtctgtgagagaagatgtgaagtatggcctcgtcccggtcatctgggcgtgcgggtcccgggttttgatcgcgcgtttgtgtagaataaaagaaatgacagccaccatagaggaactagccaaagttaatattagtcggccagcccagagtcccttcaggagttctgtgtgactgggaaaggaaatctgacagcaccgggcacgtgacagtagactacagggaattcaataagagtttgactcttcgtcaacaataatctggcgcccaaacgtggggcctcagagaagactcaggacccctaaggagttgcctgaaaccggagctaaggtaccagcaggggcccattgaagtcccactgagttcaagcttctcctccggtggaactggtaagtcctcctgagccccagacctctccttgaccagacttttcttaggcttccctgagccctcttcttgagtaggcctggaccttggatttctgtgtccatccttgctgcacccagttttagcaagaatcctgttaagtaggtttagtgagaattcccttatccttgatcaggttcctcatcttccacccttaatgtctaagtccttggcctgcctttagcaggattctacccttaatacctaatcaagttcctgtttgtgatttcccacccattgacccccttactcttatagttggctacaaaaccaactgttgttgctatattggggagttgagttcactgtctctcccccattgcaattgtcttgaacagtattacttaccgtttacacacgtgtattcttttcctgtttccctcatttgcatgagaaatg

SEQ ID NO: 82201 - DNA, 486 bp, Homo sapiens
gtgagaccctgtctctaaaaacaaaacaaggacccagcctagggtgaaggcagttctggaagtggagctaggatgggaggcgtagccaactgagtgaaggaagacggcagggaagctgtgccacatcctgggttcttgtgggaagaacgggaacaagctccccaccataagcagaaaccaaactcagaaaggcagagcagagcccagtgtgtggtggctcacacctgtaaccccagcactttgggacgccacagtgggaggattgcttgagcccgggagtttgagacaagcctgggcaacatagtgagaccttctcccctcttcaaaccgacagaaaaaaattaaccgggcagctggacgtggtggtgcaggtctgcagtcccagctactcttgaaggctgagctgggaggatcacttgagcccaggaggtcgaggttgcagtgagcagtaatcccgccactgcactctagcctgggtgacagata

SEQ ID NO: 82202 - DNA, 147 bp, Homo sapiens
aggccaaggagaatccagataggccttgctgggtttcttgcctgtttgcatcagagtgttttttgtccagtcattttttttgagacggagtctcgctctgtcgcccaggctggagtgcggtgacgcaatctcggctcactgcaagct

SEQ ID NO: 82203 - DNA, 162 bp, Homo sapiens
atatgtaacaaacctgcacgttgtgcacatgtaccctaaaacttaaaaaaacttaaaaaacacatagcccaaggggcaccttctatgtagcaaaggctaaaaaataaataagtagaaattaaaaaaagaaaaaaattagcccggtgtggtggcatgggcctg

SEQ ID NO: 82204 - DNA, 416 bp, Homo sapiens
cctggccgggtccagcattccagactggaaatcagagaggacaacatcctagatacagggaccagcactgaccaggagttcacagaaaggccatccctgcccctagacacactgttatatgtaaatgcttgttccccggtgctgcaaagaaatagcacttgaacataaatttaatcctctcagcaaggccttttgtactttctgcagaaagggtgctcatcgcagatggaataatggcgagagcacatccgaacaaaggagggaagcaatttttattcctcacgcagtttgtcccagctactgcgtcctgtctcccaaatttatttttggggggggccccaaaggggggggattggcaggagccagaccgcacaatctaaactaaaacctgattggctaacagtttaaaacttttc

SEQ ID NO: 82205 - DNA, 370 bp, Homo sapiens
tggcgggcgcctgtactcccagctacttgggaggctgaggcaggagaatctcttgaacctggaaggcagaggttgcagtgagctgagatcatgccactgcactccagcctgggcaacaagagtgagactccctctaaaacaaaacaaaacaaaacccacaagtgggctaatcacaaatatatttgaatatatgtacacccttaatactaccaattactacacactactaaagcaatctaggcagatcacaattcaagttcctaagaatgcgaccataaggaaaatggtcgggctgcaatgaaacaccttcacatcaataattagaatgctggatgacaaccccaacagtcgagacccaaactgacttggc

SEQ ID NO: 82206 - DNA, 773 bp, Homo sapiens
aagaaaaagtagacctccaaacaagcaatattacaacagacagctatttcataatgataaaatgtcaagtaattatgaagacataatgctgtattactgacagaataactaaagaaaattaagataaaataattttgacaacagcttgacctaatcgatattgaccaagacaatagaatatatgttctattatgctacacatgaaacatttatcaataggctatagaccacaaaatatctctcaagaagtttcaaaacactgtaatcataaaaagtatgctttctgaccataatgaaaatgagttgaaatgggtaaaaacaagctacccaggaaagtctacactattggaaattttaaatacaccttaaaatgccctttagctcaatgaagaaatcataagaaacacctttaaatacattgaactgaatacaaataaaaatatactatatcaaaatgtatgggataaagttaagcagacccagattaaattttttgtataaatgcttattctagaaaagagaagttcaaaacaagtgaactaattttctaccttaaaaagaaaatctaaaacaagagagcaaattaagtccaaaacaagtagaagaaaggaaataaaacagaaattagaaatcaatgagacagaaaacagaaacaggagaaaatcaacatggccaaaagttagttctgtgagaaagaaagaaaacgcaaattataaatatcagggattaatgagattgtacagttgtagacacaagagacattaacaagataa

SEQ ID NO: 82207 - DNA, 571 bp, Homo sapiens
ggagattgctgaagtcctcattgtgaatctgtgacttgggactggaatggaaaacacaaagcagatgtcagcttctgtgcatgaattttctcatacagagtagtgctaggataattttagaagagtagcgaaaaggcaacatatgattacagttcagatactgagggtgtttgagctagaaatagtccaagaaacaattataattttatattggtcaacacatgacctagctcaaagagagcttgatttgttaaatgtgtcccctaaggaaagatcactgaaccaattggagttggagtccctctcttctgactgaatcttaagggaaaagaagaaaagggaagcaagctcccccatttctgtcataacaggcattggggagaaggagagaaaccactgggaatggaaaattttctctgatctacaggagctttggagttgagttggggaagtggtgagttgaggataaaacaagctgactctgatatactcaagctggcccagaatttgttctatatcagtgtggcaaacaatacagcaaatcatttttgtattgacacatgtcccaaac

SEQ ID NO: 82208 - DNA, 167 bp, Homo sapiens
tttataaaggtagtttttgtgtctatttttgtaacacctactgatccttactaaaacatctgaatatctaagacctcctgtaacacagttgatcagtttgtttcaatcatcccagtagctaatgtgcattactttactgttacccaggctgtgataattagttataa

SEQ ID NO: 82209 - DNA, 392 bp, Homo sapiens
gtctgagcttcaggaaggcagggttaagccaaacacagatggcattgtgttgggcagtttctctgttctttcactgagaaagacttcctcctcacctcacctctctaaggaacagaatggcattggtaagaagaggattggatttagaagaaataaaagcagttgttcacacctgtgctgtgtgctgaggccctgccctccccatgatgtcattcctcagaacagcctaagttggaggaattactaaactcatcatgacatgaggaggcaggtttggagagcctaactgccccagaaaaataataatgaataataatcagtataatttattatgcacttaaggaccaggcttcatctgtcctataccgctgaatcctcccagcaaaccaatg

SEQ ID NO: 82210 - DNA, 193 bp, Homo sapiens
ggcacttaagacaatgttaaaagagtcaaaattaattgaaggaagaattattgcaatgtctcagtcagacttaagagttttcacaactcatttcaagctgtaataactcctgtcgataccctcttctcatccactaaggaatattaaatatgtaaatattgctcaagttctatttcaggactccttttagtgg

SEQ ID NO: 82211 - DNA, 399 bp, Homo sapiens
catctgctccctctcagcttccctaagtgctcatgactgagcaggacataaggcagggatgtgctcgctgttcacgacagatttccaaggagtgaaatcaaagactccttagaaatatttcttggcatcctccccaaaacataaatgctattgattgaagatttaatgactcaaatgaatgcaatggctctgactggctttcttgaatgtaccactgttattttttaaacccatgaataattaaatagttcatacccatagtatcgagatggacaaaggcagcaatctttttcaaatttcacgatcctttcaacaaacactgcattgactaaatcttagcccttccctgacccagggctctatcataaactaaagctcagggcactgcagaggaggccc

SEQ ID NO: 82212 - DNA, 266 bp, Homo sapiens
agccaaggtcacacatacatgactaagaggcagcacagagaacaaacccaggtcgggtctggctctaaggcccattttcttagctaggagggctcagtctgagcttcaccttgggcttcacttacaggccctgcttaaagagggggaaaggaaaaggagagaacgaccctcgtctctcaagcactatacaccctcattgtgacaacacgcccatgaaggaccctggccagtagggcccccactgatacaatctggtgattcccgag

SEQ ID NO: 82213 - DNA, 389 bp, Homo sapiens
tccccaagctgatctatagaggcaatacaactaaaggaaatccaaatcaactttttttgtaaaatctgacaagcagattcaaaaatatatatatgaaaaagcaaagggcatacaatagttaagacactcgtgaagaatactaaggtgaggggacttaccctaccagttatcaatacctaccataaagcatagttattaagatgttgtcatggccgggcatggtggctcacaactgtaatcccagcactttgggaggccgaggtaggccgatcacctgaggtcaagagttcaataccagcctgaccaatatggtgaaactctgtctctactaaaaatataaaaattagctgggcgtggcagcatatgcccgtaatcccagctacttggga

SEQ ID NO: 82214 - DNA, 412 bp, Homo sapiens
ggatgagttccttgaaagacacagaaactattaaagctctctcaagaagatatagataagctgattagccctatatctattttattgaatttaaatgtaaaaatcaatatttagttactggaaaacttttaagtgtggttggaaatggtatacgaactttttcaactgaattttatgaagtctaatcacaggtaaaggttttctgatgaaaatttagtgtctgaattgagatatactgtaaaaaatgttatatatcttaattatttcttcacattaattacatgttgaaataatactttgggtgtattgggttaaattaaatattatgaaaatcttgcctgttttctttttacttttgatgcgtcagctaggaaatataaaagtgtagctcacattctgtttctgttgacag

SEQ ID NO: 82215 - DNA, 379 bp, Homo sapiens
aaagtttaataaaaggtagggattatgtcatatttgtaattgagaaagtagtttcacttcttttaagcctgaggttttttcttttcactttacaaagttagaatttttttgtccattgttacaggcaaatattgggttgcttaagctatggcggtgcagtaaggagagtacagacttttaattagaaacaactgtgtttagattgtctctaatgaaacctgcgactttggcaagtaaattatttaacttgtgctattaaaatataatcctgggttcatactagaattttactaaatgtacatgtcatggtttagcagcatgcctacaaactgtactgaattaggtaagaacaaagacagaataaatgaaatttcaaagt

SEQ ID NO: 82216 - DNA, 411 bp, Homo sapiens
actgctcaagtcagacacctgggagtctggatccttacccccacatctaacatattactggcaagttctgttgattcatcctcagaaatatacctcaaacccattaacttctcttcatccccaatgccaccttagtccaagctagcagtctcccactgcgatgactacaaccacctactcttttagtctcctactcttgcctcttcccaaattattcttcacacagcagccacagtgatcttctaaaataaaaattcagagctctaaccatgagttgtaactatttctctctgtttatttgattatagtctagctcctgtaacccccataaggcagggactatgtttgtcatgttcactgctatatccccagagctgagcatagtataatacctgacacatagtaggggtt

SEQ ID NO: 82217 - DNA, 375 bp, Homo sapiens
aaatagtattttagctgtttctgacatgtaaggactttagaagtcatcactgtgtcctaacaagtaaaaagctgaacaaactgaaaaatcaacaaatcttagctccatcagagaggtgtgaggtcagaggacaaatcactgctctcaaaattggagaggtatgtgctgggattacaggaatgagccactgtacccagccaataatcccctttttaaaaagttatttatttatatttttagagatggggtctcactctattgctcagactagagtgcagtagcttgatcatgactcatggcagcttgagcccaggaagttgaggttgtagtgagctgtgattgcaccactgctctgcagcctgggcaacagagcaa

SEQ ID NO: 82218 - DNA, 400 bp, Homo sapiens
gatcgacctttgacctcccaggctcgagtgatcctcccaccacagcctcccaagtagctgggactacaggcatgtactaccacacctggctgatttttgtgttttgtacagacagggtttcaccatattgtccaggctggtcttgacctcctggtctcaagacatccacccaccttggcctcccaaagtgctgggattacaggaatgagccactgtacccagccaataatcccctttttaaaaagttatttatttatatttttagagatggggtctcactctattgctcagactagagtgcagtagcttgatcatgactcatggcagcttgagcccaggaagttgaggttgtagtgagctgtgattgcaccactgctctgcagcctgggcaacagagcaa

SEQ ID NO: 82219 - DNA, 1026 bp, Homo sapiens
acataaaattgccgttgataattggaacatctgaacacaacgtagaacttttacttatactttaacatgttgacatttcatcctctgcaaactgtcttggccttataagggcttactcattgagcaatagatcttggtggtttgccttggaaatagaagaccggtactaccccatcccaggcagaatgactggatccagaaggggtacaactaggaaatgcagaaagaggctttgttcctggaagatgctgttctggtctagttttaagtgctgtccacataagtgtgaaatgaaaatcaatcttggggcccccaaatcactaagctaaaggcaaaagtcaagctgggaactgcttagggcaaacctgattttattcaaagtcaccgctctgcttgcttatgagataaatctgtatcagattgcctcttttagagaggctcattagaaacgcaaaagaatgcaacctttcgtctctacctatgacctggaagccccctcccaccttccagttgtcccaccttcgcctggcattgtcccacctttccagatggaaccagtgtacatcttatacatattgattgatggctcgtgtgtccctaaaatgtataaaaccaagctgtgcccctaccaccttgggcacaggtggtcaggactcgcctgaggcggtgtcacagacgtgcatccgcagccttggcaaaattcactttcctaattaactgagacctttctctagatattcggggttcaaataaggatgaataagaagaggcagagtgggaacaatgcagtcttgggctaaggaggcttcttggaagctctgctaaagcggggtcttgcccttagctgcagtctagagccccctgggaagctttcaccagcctgggccccactctagatgttccgatttaattggtctggggtggggcccgggaagtggcacttttacggactcttcaggtgattctagtttatacctggggttaagaaccaccacattctagcctcaccatttgctggtttcagaa

SEQ ID NO: 82220 - DNA, 306 bp, Homo sapiens
catatttctaggaatttgtgcatttcatctgttttctagtttgttggtatattgttgttcatagtattcctttataattcactgtatttctatgaggttggtagtaatgtcccttcttttatttcttattttagtaacttgactcttccctctttatgcttgtgtcttaagtctcagttttcttttctataaaatgggtatagtaaaatctgccttgcagagttattgacattgtcagtaatcaccttggatcttgttaaaaagcagattcagtgggtttgccatttctatcaagtgtccaggtaa

SEQ ID NO: 82221 - DNA, 409 bp, Homo sapiens
cctctcttctttgctgttttgcatattcctctgtaagacattctcatgtgagaaagatcatacattaacaatataaggtgtctgttgctttaatagaatactgagaaatgaaagataaatgtcagattgtcatttgatggtgtactctatcccaggattaattaatgcattactgtgcttatgcaatacctatttggatgtactgtctgggaagaatatgattaacatgatgcaaacatccccccgtctaaaacctgtaggttttaagttatctgggacaggctaccatttgctctaagcaaagacacacatttgctatagctgtaaactgtcttgagggccaggaaatatcaaacctgatagattgtttcaaactaactcaatcctggaaaaaggtcagtctgcaaaa

SEQ ID NO: 82222 - DNA, 340 bp, Homo sapiens
aacaccagagaaactggttcctgcaggagaaactggggtggctggtggccctactgcactcaggagggctcagggctggtgctggtcccctggagatgctgtgctgtctcaaactcacttctccttcttcctcctctctttgaactcacccgggcctcatttctccccattgggatgcagccaccaacagccccagttagaaattccagtcaaatgagacctctgtctccttgggcctctgaatcagtcccagggaaggcggctgattggccttgtttgagtcacgcactctccctctgatggacatctgttattgccacgggaaactggctctgggcat

SEQ ID NO: 82223 - DNA, 303 bp, Homo sapiens
tccagaacggtgagaaataaattgctgttgtttataaagtaacctgtttatgttatttttttatagaagcctgatcagaataagacaatattggatagaatattcaggaatgtcttgcctccaatgttggcccccctgtactgagctctaatctacactcacctaaaaaattataaaatcataataaaactgaaaaagtcaaactctcaattgcatcccagcacaaatatcacagatgtttatttaaaaaattatgtcaagcccctaaaaagctaaaatccacagttctgctaatatttctct

SEQ ID NO: 82224 - DNA, 208 bp, Homo sapiens
agaggataaaagtgaacataggtatcaatttatatataaagagggaagcatgaatctgacttggtactcactctatgagcagcacggaaacaggtatagggatttatcagcttcatatcagctgaccaccacaagaacccataaatggaagatacatgttgttttagacacttgcaagggaggataagtgaaagagaggcctgagcaa

SEQ ID NO: 82225 - DNA, 402 bp, Homo sapiens
tattatggctactgggtacaaagctcatggagtgcatttgatcgaccacagcatggacatggaattttacatggctctggccatagtgccccagactgaaagaagagtttaccatcaataaacccactggaagaggcctgaagaatggcacacagcacagagaggtccgtcctgcttttacatctgtaggaatgtcttctcagcagcctctcctgcatgacttcagatttcgtaggatctgaacacttactaggcttggggatggtaatgtcatcagggttttactagaggttggagtgcttgttttctcccttccttattttagttccctggtattattcatgcattaattggtctcctccatggtaacttccttggaaagctggaaatgtgaatttctat

SEQ ID NO: 82226 - DNA, 341 bp, Homo sapiens
gtccaataggcatccccaacttaagacggccaaccctgaactcctaatcatcttccccaaaatctgcttccctcaccaagatgctttatctcatctcaataaatgacaactgtgtcctttcatttgctcagactgaaatccttgactccagtcttcttctcataacctgtatctggcccaccagcaattgccgtcagccctatcttaataatatttccagaatctacacacttcacatcatcttcaccactattactttggcccaagttcccattatttgctgtctggaatatattaatagcctcttaactagacttactgcatctgttttttcctgtttt

SEQ ID NO: 82227 - DNA, 748 bp, Homo sapiens
cgaggcgctcccttctggacactcagagaaacgggggcatttctcattttgtgttttcacattttataattatctgtatttttcttttccatctagaccaccagctctaagagggcaagggatgtgtattagtcagagttctacagagaaacagaactaataggataaatgtacatatgaaagggagtttattagggagaactggctcacacgatcacgaggtgaagtcctaccatacgccatctgcaagctggggaagaaggaagccagtaatggctcagtctgagtccagaaacctcaaaaacaggaaagtcgacagtgcagccttcagtctgtgacccaaggcccgagagcccctggcaaaccactgatataagtccaagagtccaaaggcggaagaacctggattgtgatgtccaagggcaggaagcatccagcacgggagaaagatggaggctggaagactcagcaagtcggcttatcccaccttcttccagtatgacaggctgataggctgtgtcacagtcagctgtaactcagtatgataggctgtgtcacagtcagctgtgactcagtatgataggctgtgtcacagtcagctgtgactcagtatgataggctgtgtcacagtcagctgtgactcagtatgataggctgtgtcacagtcagctgtatacactgaactgaacacctgctattctggcaggcactgtgcgcaatttgtgtctacgtatttcatctaatccta

SEQ ID NO: 82228 - DNA, 812 bp, Homo sapiens
gtctggagaggcgaggccgcagcccagggctggaggtggggttgggggaactcggcccggggcccccagaggtaggtggcagtgggtgggggactggggagcagccaggccctcccagggacctgaatgggaagggggctggtggcttgggggctggggacggtccagaaagatttgaagctgggccgacacagcccttgatgtggggaatgtcctagaaaggaggaagccacgggggcagggagcacggggactcggaggccttggggtccaaggggagccgaggggagctgtcaaggcccacagtggctgaaccatgaggagctgctccccagcaaggccggctgcagggcttggtgggcctgggctgggcggaaggctcctcccagcgtgggggctgctgtggggacagcaaggaggggtgcagcgagggcctggagaaggctcaggtgcagaccctcagccgtggggcctcctccagtcgccccacagcctgggcctggcacccccccaccaagccagaggggccgaatgccagggcacctcagctacacaaaggctcggacccctagcaggacctgggcaccgcggctgactggctgcctgacggagaatggagcctctctgtcacctgggccaacatgaatgacccttcgtctggtgtctctggggttctggctggagagccaaaggctggaaggtctggacccgctgctcactggggtctggatgccaccgtggagctgcctctggcgcagcgggagaacaagcagagccaccctggtcgtggggacggcacccgtgtggccggg

SEQ ID NO: 82229 - DNA, 435 bp, Homo sapiens
aactcctatctccagcccagacctctcctctcagctccagatctgtgaatctaactgccaacctgactttgcctctcagattccccaaaggcatctcaaactcagcatgtccaaaagtgagctcacaatctctacgctcaaattggcctcttcaagcatctgccaccttgaaagaaataatccactatccagaaggtccaacagccaggaacttaggagtcatccttgtccctcacccacatcgaaccaatcactgaggcctgttgactatacccgtctaaacagctcttgaatccacgcactcttcttcagctccattgttgcccaagatactctcattactggccaggactacagcaagagcctcctaactgagctgctcacatccacctccacccacttaacagtcccctccatgaaatagccaaagtgagc

SEQ ID NO: 82230 - DNA, 723 bp, Homo sapiens
agatgagaaaatggaggcagagtggttaagtaatttgcttaagatcacccagctagtaagtgacagagctggtatttgaacctaggcattctagcttcagcagttgagctttttttttctttaggttggtatcaagttaacttaaatatgcgtagtggcaatttgtatttcttgtttgtttgactatatcctggttcatgtttgtttgtcaggatggttaaatgtatatccatattgtagtagaattttttttgattatttaaaaaaatgtttaggggctgagtttttcatcacaaccctctccttcctctcagaaatagtaactggtgcatgggctgtggtgagggagcctgctgtgccatgtcagtcaaatctgggctgtcttcatgattcaacttggtgatgtgatgcaaccttgggcctgggttgaatggacagactgacattagaatctacactgagcacaccttaaaggggtgtgtgtgtgtttaatgtagatgtacgtataaggctcatttctgactttgattactgacatgagcagttgattagccgtagtaaatattaaattcatagtctggatataatttttaaaaaatagcaagacatcaccccccccccaaaaaaaaaacttaacagtcaatgtctttcctgaataaaattaataaaatttgaaacaataaataataaaaataggaagtagcaaactacacaaaaaaaaaa

SEQ ID NO: 82231 - DNA, 352 bp, Homo sapiens
ttgcagttttcagcatctacatcagcctttagggtgaagatgctgcatctccagcaggcccttatgacaatgccaagctgtccttagatgtcaaggcagtttcatggtgtcctggacatctcagcctttcccctttactgctctctagtccactttctctgcgatgatgttaggacaacatattctagggcagctatttcgagggagaaaatacttgtctagagtctaaggactcacagagagcaagccacatatgagtggataagctgccagcacacagctcaagcccagctctgtggccactgatagatgtgtgatcttgaccaagtccttcaccttctttgagcttagt

SEQ ID NO: 82232 - DNA, 756 bp, Homo sapiens
  misc_feature (670)..(670): n is a, c, g, or t
agcggaataagtacacattttattttaaactgttaaaaaaaatattgcgtcacatttttatgtcaatctaacattaaaagtagactgaaaaaagtaaattatccctagttttcagtctcttaaaagatacctgagaactaaaaaaaaaaaaaaaggaaatacgagcaagcaatatataaaaaagcaaaaaataataaaaattactagaatccgagagtattagcaggtggcagaaaacagatgatcctaattggtaaagaatttgtacatggaggcattttaagattaaaggaggaactacaaaggcaccaagttacacagaacgtagtttggtgagatactccaacagctgccagggaggcttgaatccatcaaaacctaagatgaagaaaataggtgttaggtttaagaaaacgtcatcatatgtaactaacctgcacatggtgcacattgtaccctaaatcttaaagtataataataataaaaaaagaaaatggtcatcaatagtaaatgaatagtggtttaaaaatactctttttggtcaggcgctgggattacaggcgtgagccaccgacccagccttcattcactttctttaaatgcctccaagttgattattctcctagctcatatctccttgatgtgcatgagggagcctgggtctaatttngggggctgaaaaggtaagaaggtgaggtcagttttcccaggagtcctaaaaaatctggtaccttacattgagggtgtggaaaaaag

SEQ ID NO: 82233 - DNA, 789 bp, Homo sapiens
cggggagccaggggcatgctggggaagagcattccagcagagacatggacacgtgcgaaggccccgaggtagggacgagctttgggaacacgaggcatgtcaggaaggccggggccccgagggagtgaagaccaggcgagtgggagggcctgagcttgttccaagtggccctggaggacttcagcccacacaccctgagagaagaggaagggagctcacactggctatgggctgcccttgccaggagtttggtacaatctggaggcagcagagactcagaggttcagcaacttacctaacaacacacagtggggctgggggcagcgcagcccacctccagggtaagctcatcgctggatgctgttgccaggtaggcctcagcgcattctacccactagatctgagttgtcttggttggggaggggggcataattaagactgaaggaagaggcagtccctaaggtcctggatcccagccctagccagggagctgttgtacacacagctcagagacaaagaccatccagagtgaagaggccaactgttaactgggttgcttgtgtgattggacagactcaggttgtcagctccccagccctgccctgagaaggcagtctcatgactgtctctgcactcccatccccaacaggccccacagctaaaaaccacccctgaggtggggtgggcattggcagggccagggcttcacctggagctcaatgtggcagtgcctgccggagccttctaatgggtggtgcctgcaggcctctagccatgtggggctcctgg

SEQ ID NO: 82234 - DNA, 491 bp, Homo sapiens
gtaaaacacttaaaagatggtctgtttactctttctctgttgcctggaagaggtggattaacaacggctgggttcagtggctcacacctgtaatcccaacactttgggaggccaaggtgggaggatcacttgagctcaggagttcaagaccagcctgggcaacatagcgagacctcgtctctaataaaagtaattaaaaatcagccgagtatggtggtgcatacctgtagtcttacctgcctgagagactgagatggaaggattacttgagccctgcaggtcgaggctgtaagtgagctgtgatggtaccactgtgctccagcctgggcaacagaacgagaccctgtctcaaaaaaaaaaaaaaaaaaaaaaggaatggtattatttctgacttaaatgctttgtagaatcagctgtgaaatcagctaggccccatagttgtctttgtaggaaagtttcaaattttagtaagttgtatttttctagaaatt

SEQ ID NO: 82235 - DNA, 379 bp, Homo sapiens
ttattttttctttcacctcctgatactgaataatctcagttaacctgtctttaagttcactgactattctgcctgcttgaatctgctattgaaatcctctagtgatttttttattaaaaaaaaaaaatggagacacagaagctgggcagcctccatggggcttccacacactggggcttgcttccggcccccagcgactccaaggggatgagtgaatttaactggcaaggagcaatctgctgtcaccctgggcctctggaatcctggcaggaagaggccccacgaccaccacggacactcgagttgcagggaaagctgcttagagaagtggtggggcagcaagccagctgatgtggagcccagagggtttggtgcagga

SEQ ID NO: 82236 - DNA, 609 bp, Homo sapiens
aacacaaagaaaataagttatttgaaaaaatagcaaattatgtaattttgagcttttctatgtaattcatcaatatttaaaaaattacaaactcttaaatgttagattcatattttagtttgacttcagtatggagcatacagtgatgttatataaatgtagatgcttttaaaatgctggtctaattctaagaatgattaaattatttcttcatgtgaaagattatggtcttaattacaattaaattataaacatgatttattctggtgaggactgaccattgactttcttattcagcaaaatgattatcattgctatttacctttcagaattacattacaagaaaaaaaagtaaggagattgaactcttcaaaccgatccaacagtaaagccttttaaaaaaattcatccttggaagtaattcataactaacaggtgtgatctccaacctctggaagaccctaaaataattacagatgcaccctgggatttcctagaatttgtgctggactggcttccaaaactactcatcattgtcatccaaacaaagcagtgagcagctggaagttgttggtattgtactaaataaatctaaagaaaattagaaca

SEQ ID NO: 82237 - DNA, 278 bp, Homo sapiens
cttcattatatccctttctgaaggcctgtgacttccttggagtccacaagaaagcccagtatgctggctgggcgcggtggctcacgcctgtaatcccagtactttgggaggccgaggcaggcggatcatgaggtcaggagatcgagaccatcctgactaacacagtgaaaccccatctctaataaaaatacaaaaaaattagtccggcgtggtggtgggcacctgtagtcccagctactcgggaggctgaggcaggagaatggtgtgaacccgggaag

SEQ ID NO: 82238 - DNA, 574 bp, Homo sapiens
ctttgggcctcagggcgcctagaaggcgaggacgcagacctgaaggcggccggtgagcggggcgggttctgctgggtcgggaagaaaaataattctgcaaggtattttgttttttattaattcgcgcttggccacctcatctgtaaagagattctaaaagcaagatctggaaaagtgcttcgtagactccttgacggagtttgcctcctttgtacgctgcgtgaacatgcctcacctttaagagagtcttaaaggtaaagacacgaaaacacttcctccagggaccttcccgaaaacgttctggctctcatctggtgcggcatgtgtccactttgcctttaaggagttcttaaaggcaagggcctggaagtgctgttcctgagatggattctcttgacttaccagtccaccacggcacttcccctttaaggttattaaaggtaaggggtggacagactttctgcattcagataatgagcagtggcaaccccttttggccagggccaggggggcaccagcaaggggccaccctttcccttttcaataaataatttttgtactgcctctgttcaaa

SEQ ID NO: 82239 - DNA, 123 bp, Homo sapiens
tcatcattaagatgtcagtactactcaaagtaatctacagattctgcataatccttatcaaaattccaacagcattttcatatgaaattgcaaggggccccgaatagccaaaagaatcttgaa

SEQ ID NO: 82240 - DNA, 316 bp, Homo sapiens
tagtagcactaaagccccgttttggtcacactctcacctaggtgagaacctgaccaaaaatgtggaattattaaacaaaatgatgggaagccaatgttctgaaactgagctcttgcactaggcccccacagaccaaattaaaatggagtcactagtgctaaatgctttggagtcaaacagaaatgttaaagaagatagatcccaaaacagagcagtgttttatttttctccagaaaacaggagattccagcataataagaaagtctcctctgttgtaacccttacaaaaaagtaacctgaagtaaccatttttttt

SEQ ID NO: 82241 - DNA, 952 bp, Homo sapiens
caggcatcacacttcatacaactatgtccaagatggaaaaaaaaaagtagttttcttctcacatagttcttttcatcgggaaggaaagcatttcaaaacctccttatcaaacttctatggggccatttctcagaatcaggtcacatgtcctggctgcaaggactgagaaaatgagtagatggtattttaatcctctatagtaagagatggttttggtagcaagaaagtgatattttggaatgttatactttgtggtaagaaaccagtggtgtttaccacaattaactctttaaatttaccttctggtcttgagctccagactcatataaccagttgctactggaaatttccactaggaagacccactgatgccttaaattcaatgtatctgccctttctccctgcccctggctcttctccatactccatttcagggaacagcaccaccatctatgcagtggtcaagccaagaacctcggtgtcatctttgcctcctctctttcttatcctttttcatcaccttatatgattgcctccatcacctaaaggcccctcacatccgcccatttctctccatctttatgtcctcattgtctctattctgtattgtccatttctgaaccacaaaacagtgcttaactcagagcagtaagtcagtttgtgggatgaatgtttccaaatgggaaacaaacattttaaggtaaacaatgactaccatcttgccttatcaattagcctcttttcacccattttttgttgggtgggtggaaggccagatgcagcaggatgggttattgacagaagagaattataaaggatataaagtattttaactctctgtctgtcctatactagcctatgcctctctccttgtgctctcctcatattaagaaacagaggatgttgtccgggaggtcataataacctaagtgagtaaaattctgaaagccaa

SEQ ID NO: 82242 - DNA, 379 bp, Homo sapiens
acagtggcacagtcactgcttactgcaaccttgacctcctgggctcaggtgatcagaaagttttaaagtggaaaaatcatcagactggataattcctaggaaataatttggtatacagttttcttctcccactttccagttctgcaccttttgtgtaaatccatagatcacagtgtaggttttcagatggttgtcccagctcagtgaatttatggctaaatttgttccattacattcatagtctcctgattcacttggttaaactgataagcattgccctacattctgtggcttctttgtttacttgttgtcctctgttgttacttgacccatcttagtaatcttcctttaattccttccagaaggggaaatgtggtgg

SEQ ID NO: 82243 - DNA, 491 bp, Homo sapiens
tagaataaaactggaaaccaactccaaaaggaaccttcaaaaccatgcgaatacatggaaattaaataatctgctcctgaataatcgttgagtcaacaatgatatcaaaatggaaatttaaaaattcttcaaactgaacaataacagtgacacaacctatcaacacctctgggatacagcaaaggcggttgatatggtttggctgtgaccccacccaaatctcaacttgaattttatctcccagaattctcacgtgttttgggagggacccagggttaggtaatcgaatcatgggggccagtctttcccgtgctattctcatgatagtgaataagtctcacaagatctgatgggtttatcaggggctcctgcgtttgcttcttcctcatttttctcttgccactgccatgtaagaagtgcctttcacctcccaaggcctccccagccatgtggaactgtgtaagtccaattaaacctctttttgttcccgg

SEQ ID NO: 82244 - DNA, 269 bp, Homo sapiens
ggccaccagctctctgtgctcacatgaactctttttttgtaagcaggagagagtgaactctggtttctcttcctcttcttttaatgatactagttctattggatgaggaatccacccttatgatgccatttcacctcaattacttccataaaggacctacctccaaatacagtaacattgggagttagggctttaacatattaatttggggggaacacacacattcagttcatagccactagtatcagccttttaactgggaagttgct

SEQ ID NO: 82245 - DNA, 503 bp, Homo sapiens
tgattataatggattgaggtaaaccctatacagatagaaggaacatcagtgtggcccatgccaatctaagctgtatgtggataaagttcgctaccaaaattaaacttaacagaagggagaacctggatttgaaccagggacctcttgctctacagtcaaaaagctctagccctgagctatacccccatggcacactgaggttacctagttaatacctttcatcagtgtgggagcactcagctttgtaaaattaaataatggcttccctctaggactgactttctggaagctgccagacctgattcacagctagacaccttccctcagctctgcagctcaccagtcctgtctctggtggagccgtgaacaggagaaaaggatggaggctgcctgtggaacccccagccatttcccattgttttttggggttaacccaagagccggccactggtctccaaaacagtccacagattccaatctgacctcccagcccaaattccttt

SEQ ID NO: 82246 - DNA, 694 bp, Homo sapiens
atagcacgttacagtttgcaacagattttcacttccattggacccttgctccttggaacagccctgagatgtgggctgcacagaaacccgcattgcgtgtttgaggaaactgaagcccacagagattaagtgacttaagtacacagagcagagccgagacttgaactcggctttgccgatggccagcactgggctacttgtgagttaatatttaatcacatacaggttgaggagccgttatccgaaatatttgaaaccagaaaagttttggatttcggactctttcagatttggagatatttacagaatacctgccagttgaacatccccaacccaaaactctaaaatctgagatgctccaatgagcatttgctttgagcatcatgttggtgttcaaaatgttccagattttgggtttcagatttttgaaatccaacctgtgataattaattttaatgactgcggctgctactcttataatcaccactgctacaactgccaccaccaccactgctaccactgtagaaccaatggcagcagcaaggtctggtcctgtgtgggccccttgatagcagacctcaccccagatggagacgccattacccaaagagagaaaggggcttggtcaaggtctccaagcaagtctaccccaggctgggaggaggaccacaaggatcactaggccaccagctgg

SEQ ID NO: 82247 - DNA, 984 bp, Homo sapiens
gttcagatgatgaaacctgatcaacataccacagaacacgactggctgaacaggttgtgtagttcggcacagagtagctgtattctcaaggctgttaaagcaagggtctgacaccactaagtgttagtagtgggttgatatctattatggaaatggatatgtaaagcagccaaaacccgatggcatgaaatagttacatagtcaacctctcttgagatctaattcatattccactcaccaataaactctgatacttggacttcccatatagcttgtctagacccttgctgtttaaagtggggtccatgggccaggagcactggcatcacctgggaacttgttagaaatggagactctcagaccccactccagcaagcctagcatgttgggtttgcctgatgatgtggcatcctgtttttctatatcatactcatttctattagtgtgagtcagcatccatgagtttgattaacgtcaagacactgatgaagtcattgctgagcttgtgaggctgagagccgaccctgggcagaggtgaatttatcaagagaatatccctaaaggggtggcccattggctgccttcaggtgacctcccttcttgtggggtgtactttaattttagcattgagacccactacaaattgcctcagataacagcagggggctcatttccattctggcatgtgcactccagtgaactccccttgttcccagatgcatgaacatgcttcctcaagctgcttttcagccagcctggacttcagcagtttgtgagagtctttgcaaatggtgaagaaagagtcttgttgaaatcctattcggtacatctgtctatgaattattataactttttttcaggctgggtaccgtggctcacaaccataatcccagtactatgggaggctgaaggtggaggattgcttcagtccagaagtttgagactggcctgagcaacatgcaaaaccccatctctaaaaaaaaa

SEQ ID NO: 82248 - DNA, 776 bp, Homo sapiens
cgcatgctgcatgctacaacatggatgaatcttgaaaacatgctaagtggaagaagccagacacagaagactctatgtactatgattccattcatatgaaagtccagcagagggagctctctagtgacagaaagtacattagcggttgctcaggactggagggtggaggggatggggaaggcagtaacagctaaaaggtacaaggtttctttctgaggtcacgaaaatgttctaaaattgtgctgatggatgcctgtatctgtgaatatgcttaaaaccaataaattgtacactttgggtgaaaaaaaaaaaaaaaaaaaaaaaaaaaaaaaaaaaaaaaaacaaaaaaaaaaaaaaaaaaaaaaaaaaaaaaaaacacaaaaaaaacaaacaaaaaaaacaaacaaaataaaggcggcccccacaaacaaaacagcaagaggaagcaggcgaagcagcagagcgagaggcccgccggcggagggggtagaagagaggaggaggggggccctcgacgagggggagaggagagggagacgcaggcgaatggggaggggggggcgaggaagaagacgggcagcagggggaaaaggaagagaggagagcagaagggagaagagtaccagtgtaaggggtgcgcggcagagcaaaaagggggaggaggggggggggacgagagatgtcggggagggcgaaggagagccaagcgcggtatgtggaaggggggaaagtgggactgagaacgtagcgggacagcatgggtgaagggcggaggg

SEQ ID NO: 82249 - DNA, 889 bp, Homo sapiens
tctgatatctagtgccattactaaatagtggaagtcttcatttttaatctagagaacacagtctaagaaggaagttgaggattgtagaagataattttttgtttgtttgagacggagtcttgctttgtcgcccaggctggagtgcaatggcgcaatctctgctcactgcaacctccgcctgccgggttcatgcagttctcctgcctcggcctcccaagtagctggtactacaggcgcgctccaccatgctcagctaattttttgtatttttagtagagacgggtttcaccatgctggccaggctggtttcgaactcctgaccttgtgatccgcctgcctcggcctcccaaagcgctggattacaggcgtcagccaccgtgcccggcctgtagaagatgcacatgtaagaaaaatctgattaggtaagaaaaaataaaaagacaaaacaagcctgccacccagagacgtacaacaaaatgcgaactgtagttatttttctagacctttggatagccattaatatggttccacgttaataacagtggaaccatactgtatgttctgtttgtgttttcagtggaaaaacattacagaaatactctgaacaaccttctgtcaagtaaatttttcgagaacttatatgattatagatctgaactaatttatttaatcaatctgttatttgccttcctttttattttctagtttctggcttttataaatattgaaaatatcctcataggtcagtctttgagtgttcttattttcttgggataaagtgaattgctgagtcaaaagaatttgctcattttcaatgcatttgatacatactaccacattgctttcagaaaagttatgctagttttcccaaccagtgtttgatgggcaa

SEQ ID NO: 82250 - DNA, 434 bp, Homo sapiens
tgattcaaaaggaattattaagtaaataacactagctatggcaaagggaaatggtaaaatcatgaaggtaaactgcaaatgactaggtttgggatggttgtgaagcacctggagtctggaagagccgggttcaaattctaattccactagctgtgctgcagaaactctctgaggctccattatctcatctgggaaatggggactgtggtctcaaccacctgagaggctggctctgagaattgtcacacatacacacacagcgaacactcacaaaatgatcccattttctttgtctccctgctcagtgttcctttcctaaccccatgatgcttccctttcctgcctctgacatggtcacattcagcaaaaacaccttaggggttgggtgtggtggtttatgcctgtaatcccggcactttgggaggccaagacag

SEQ ID NO: 82251 - DNA, 348 bp, Homo sapiens
cagatgtcttggtagtcgcggctctggcgctccgcaccctccgtctgcggcagcgggggctggcggccccggcccctgcccggccccgtcctccaacctcatgcctcagccctaataccgccgccctcccctgcggggggcctttctccgtgtcccccgcccgccccgtccacttcgggcgccatgaacgaccagtaccaccgggcagcccgggatggctacctggagctcctcaaggaggccacccgaaaggagctgaatgcccccgacgaggatggcatgacccccactctctgggctgcctaccatggcaacctcgagtcgctgcgtctcattgtgagccgcggg

SEQ ID NO: 82252 - DNA, 264 bp, Homo sapiens
ctgtttttaaattttttattcaaattctaaaattatctgaagagctggaattaagtttatcaagcaagtaagacaaagaatctcttaaagatgacttctttagctttagaagtaatcttaaggattattactcatttggatgggtttgtgaggaaagataaagcagcacctctggagatttctcagtgaaagatggattctcattgttgagggaagagatttgtgtggcctccctttatgtctattaccttaaagatggtgaat

SEQ ID NO: 82253 - DNA, 3512 bp, Homo sapiens
agcaggaggagccgggcgcgcctgccacgcaaaactaccgggctggcagggcggcgggcgcggtgcgcgatcccgggtggcggcggcaacggcggtggtgacggcggcgactgcagcggccggctctcacctctcccctgtgcacccgcatctcgccgcgccgccgagcagccagcagtccccgggtcgcccagcccacgcgcgcacggccgagcccagcgcacaatagcggcgacagccatggggaaaccggcgaggaaaggatgcgagtggaagcgcttcctgaagaataactgggtgttgctgtccaccgtggccgcggtggtgctaggcattaccacaggagtcttggttcgagaacacagcaacctctcaactctagagaaattctactttgcttttcctggagaaattctaatgcggatgctgaaactcatcattttgccattaattatatccagcatgattacaggtgttgctgcactggattccaacgtatccggaaaaattggtctgcgcgctgtcgtgtattatttctgtaccactctcattgctgttattctaggtattgtgctggtggtgagcatcaagcctggtgtcacccagaaagtgggtgaaattgcgaggacaggcagcacccctgaagtcagtacggtggatgccatgttagatctcatcaggaatatgttccctgagaatcttgtccaggcctgttttcagcagtacaaaactaagcgtgaagaagtgaagcctcccagcgatccagagatgaacatgacagaagagtccttcacagctgtcatgacaactgcaatttccaagaacaaaacaaaggaatacaaaattgttggcatgtattcagatggcataaacgtcctgggcttgattgtcttttgccttgtctttggacttgtcattggaaaaatgggagaaaagggacaaattctggtggatttcttcaatgctttgagtgatgcaaccatgaaaatcgttcagatcatcatgtgttatatgccactaggtattttgttcctgattgctgggaagatcatagaagttgaagactgggaaatattccgcaagctgggcctttacatggccacagtcctgactgggcttgcaatccactccattgtaattctcccgctgatatatttcatagtcgtacgaaagaaccctttccgatttgccatgggaatggcccaggctctcctgacagctctcatgatctcttccagttcagcaacactgcctgtcaccttccgctgtgctgaagaaaataaccaggtggacaagaggatcactcgattcgtgttacccgttggtgcaacaatcaacatggatgggactgcgctctatgaagcagtggcagcggtgtttattgcacagttgaatgacctggacttgggcattgggcagatcatcaccatcagtatcacggccacatctgccagcatcggagctgctggcgtgccccaggctggcctggtgaccatggtgattgtgctgagtgccgtgggcctgcccgccgaggatgtcaccctgatcattgctgtcgactggctcctggaccggttcaggaccatggtcaacgtccttggtgatgcttttgggacgggcattgtggaaaagctctccaagaaggagctggagcagatggatgtttcatctgaagtcaacattgtgaatccctttgccttggaatccacaatccttgacaacgaagactcagacaccaagaagtcttatgtcaatggaggctttgcagtagacaagtctgacaccatctcattcacccagacctcacagttctagggcccctggctgcagatgactggaaacaaggaaggacatttccgtgagagtcatctcaaacactgcttaaggaaaagagaaacactaatggccaagtgtacatttgatttgatatacagacctccagattattttctatatttggattcacagcctttgcgctctgggttttgggatttgggtgtggggtaagttgaagggaaatcaatttaaaggaaagttctattatctgggttttagaaattctataagagacaaagtttggaagtacataaagtaataactgttagaattaggtaatggatatgaaagagaaaatgctttctcatgcatagacaagtgttttgggtttttaaaaaaaatattctgtcattggttacaaatttttactcaggctttctattggcatggatttcctttgacctctcacttttttataaattataatgcatctaaaccacctgtccccagttaatgtgccaaaatgtcaatttttaacttatctccagccaatttcaaagaaaacagaccagcatagttctgcaataacagttttaagatgggcatagggtttggaagaaagggagaaggattcttttttcaatgtactgtattgggacgctggtaactgttaacccagtgttcagcatagagctatatatatatatatatgtatatatttattattttcatataatttgccagacagagatcagaattgaaccgtcaatgtgaaataaagagttctccttgtacttgaataataaccacgattccaacccaggtctgctttggggcttatcagaactcctttctaaggagcactagaatgagaaatcatgttgttcgatcgtttcacatctgtatatcagctctaaagcagagatgtattatggtgatactccaaggtggcatagccattcatttacaacttccagatttgagctgcctggagggaatccatatcagctctgcataagattatatacaaagctgtcactcacaaaaggctggatgtgctttcatccaactggaaggctttattcttccaagttcattcatactcaaagaggccagtactttgccatccttgcacttctgttatcagggcccaaataacagtggcaagctaccaactaagttgtattttaataaagattccatgggttgaacaagccacgttgcagaaaaagagcttcccctaacctgggttgttgcagagtaaatcccacgacataagctggtatcagtggttcgggggaaatagttccattctatgactcttgtctcctcctccaggaggactgttctaactagtaatcttggccctattcattacatcctctgcttgtcattctgctaatttatgaagatagtttattatagtctgtacttcagttctcatcttgtaaataatgcttaacataaacttgtacttacactgaaatccaaaatagtcatgtttctgcagtattctgtagccaacttaaacctgtgctttcatgtttaagaaatgagaaattgtgccaaagatagcagaagagtagataagtgctcagtattgacgacctacatctgaaatctacaacataatgatactgaattgttatgtaaacatcataaatagtaaataatgattcaatgtgaattttaaaatgcaaatattgctattgtttataggaaataaatctaaatat

SEQ ID NO: 82254 - DNA, 3591 bp, Homo sapiens
agcaggaggagccgggcgcgcctgccacgcaaaactaccgggctggcagggcggcgggcgcggtgcgcgatcccgggtggcggcggcaacggcggtggtgacggcggcgactgcagcggccggctctcacctctcccctgtgcacccgcatctcgccgcgccgccgagcagccagcagtccccgggtcgcccagcccacgcgcgcacggccgagcccagcgcacaatagcggcgacagccatggggaaaccggcgaggaaaggatgcgagtggaagcgcttcctgaagaataactgggtgttgctgtccaccgtggccgcggtggtgctaggcattaccacaggagtcttggttcgagaacacagcaacctctcaactctagagaaattctactttgcttttcctggagaaattctaatgcggatgctgaaactcatcattttgccattaattatatccagcatgattacaggtgttgctgcactggattccaacgtatccggaaaaattggtctgcgcgctgtcgtgtattatttctgtaccactctcattgctgttattctaggtattgtgctggtggtgagcatcaagcctggtgtcacccagaaagtgggtgaaattgcgaggacaggcagcacccctgaagtcagtacggtggatgccatgttagatctcatcaggaatatgttccctgagaatcttgtccaggcctgttttcagcagtacaaaactaagcgtgaagaagtgaagcctcccagcgatccagagatgaacatgacagaagagtccttcacagctgtcatgacaactgcaatttccaagaacaaaacaaaggaatacaaaattgttggcatgtattcagatggcataaacgtcctgggcttgattgtcttttgccttgtctttggacttgtcattggaaaaatgggagaaaagggacaaattctggtggatttcttcaatgctttgagtgatgcaaccatgaaaatcgttcagatcatcatgtgttatatgccactaggtattttgttcctgattgctgggaagatcatagaagttgaagactgggaaatattccgcaagctgggcctttacatggccacagtcctgactgggcttgcaatccactccattgtaattctcccgctgatatatttcatagtcgtacgaaagaaccctttccgatttgccatgggaatggcccaggctctcctgacagctctcatgatctcttccagttcagcaacactgcctgtcaccttccgctgtgctgaagaaaataaccaggtggacaagaggatcactcgattcgtgttacccgttggtgcaacaatcaacatggatgggactgcgctctatgaagcagtggcagcggtgtttattgcacagttgaatgacctggacttgggcattgggcagatcatcaccatcagggaccggttcaggaccatggtcaacgtccttggtgatgcttttgggacgggcattgtggaaaagctctccaagaaggagctggagcagatggatgtttcatctgaagtcaacattgtgaatccctttgccttggaatccacaatccttgacaacgaagactcagacaccaagaagtcttatgtcaatggaggctttgcagtagacaagtctgacaccatctcattcacccagacctcacagttctagggcccctggctgcagatgactggaaacaaggaaggacatttccgtgagagtcatctcaaacactgcttaaggaaaagagaaacactaatggccaagtgtacatttgatttgatatacagacctccagattattttctatatttggattcacagcctttgcgctctgggttttgggatttgggtgtggggtaagttgaagggaaatcaatttaaaggaaagttctattatctgggttttagaaattctataagagacaaagtttggaagtacataaagtaataactgttagaattaggtaatggatatgaaagagaaaatgctttctcatgcatagacaagtgttttgggtttttaaaaaaaatattctgtcattggttacaaatttttactcaggctttctattggcatggatttcctttgacctctcacttttttataaattataatgcatctaaaccacctgtccccagttaatgtgccaaaatgtcaatttttaacttatctccagccaatttcaaagaaaacagaccagcatagttctgcaataacagttttaagatgggcatagggtttggaagaaagggagaaggattcttttttcaatgtactgtattgggacgctggtaactgttaacccagtgttcagcatagagctatatatatatatatatgtatatatttattattttcatataatttgccagacagagatcagaattgaaccgtcaatgtgaaataaagagttctccttgtacttgaataataaccacgattccaacccaggtctgctttggggcttatcagaactcctttctaaggagcactagaatgagaaatcatgttgttcgatcgtttcacatctgtatatcagctctaaagcagagatgtattatggtgatactccaaggtggcatagccattcatttacaacttccagatttgagctgcctggagggaatccatatcagctctgcataagattatatacaaagctgtcactcacaaaaggctggatgtgctttcatccaactggaaggctttattcttccaagttcattcatactcaaagaggccagtactttgccatccttgcacttctgttatcagggcccaaataacagtggcaagctaccaactaagttgtattttaataaagattccatgggttgaacaagccacgttgcagaaaaagagcttcccctaacctgggttgttgcagagtaaatcccacgacataagctggtatcagtggttcgggggaaatagttccattctatgactcttgtctcctcctccaggaggactgttctaactagtaatcttggccctattcattacatcctctgcttgtcattctgctaatttatgaagatagtttattatagtctgtacttcagttctcatcttgtaaataatgcttaacataaacttgtacttacactgaaatccaaaatagtcatgtttctgcagtattctgtagccaacttaaacctgtgctttcatgtttaagaaatgagaaattgtgccaaagatagcagaagagtagataagtgctcagtattgacgacctacatctgaaatctacaacataatgatactgaattgttatgtaaacatcataaatagtaaataatgattcaatgtgaattttaaaatgcaaatattgctattgtttataggaaataaatctaaatataaatgaaattgaatcagtaatttatcttgggctaaatggttctaccccttactaggttgccccaattagtggcactagttggcagagctgttcatgagctgccagttatcattttggagtcagtttgaaaccagcctcttaacacactgctgttaactcataaaagagaagagtgttccatttcagtctcaataaacacttccctcattctttc

SEQ ID NO: 82255 - DNA, 3726 bp, Homo sapiens
agcaggaggagccgggcgcgcctgccacgcaaaactaccgggctggcagggcggcgggcgcggtgcgcgatcccgggtggcggcggcaacggcggtggtgacggcggcgactgcagcggccggctctcacctctcccctgtgcacccgcatctcgccgcgccgccgagcagccagcagtccccgggtcgcccagcccacgcgcgcacggccgagcccagcgcacaatagcggcgacagccatggggaaaccggcgaggaaaggatgcgagtggaagcgcttcctgaagaataactgggtgttgctgtccaccgtggccgcggtggtgctaggcattaccacaggagtcttggttcgagaacacagcaacctctcaactctagagaaattctactttgcttttcctggagaaattctaatgcggatgctgaaactcatcattttgccattaattatatccagcatgattacaggtgttgctgcactggattccaacgtatccggaaaaattggtctgcgcgctgtcgtgtattatttctgtaccactctcattgctgttattctaggtattgtgctggtggtgagcatcaagcctggtgtcacccagaaagtgggtgaaattgcgaggacaggcagcacccctgaagtcagtacggtggatgccatgttagatctcatcaggaatatgttccctgagaatcttgtccaggcctgttttcagcagtacaaaactaagcgtgaagaagtgaagcctcccagcgatccagagatgaacatgacagaagagtccttcacagctgtcatgacaactgcaatttccaagaacaaaacaaaggaatacaaaattgttggcatgtattcagatggcataaacgtcctgggcttgattgtcttttgccttgtctttggacttgtcattggaaaaatgggagaaaagggacaaattctggtggatttcttcaatgctttgagtgatgcaaccatgaaaatcgttcagatcatcatgtgttatatgccactaggtattttgttcctgattgctgggaagatcatagaagttgaagactgggaaatattccgcaagctgggcctttacatggccacagtcctgactgggcttgcaatccactccattgtaattctcccgctgatatatttcatagtcgtacgaaagaaccctttccgatttgccatgggaatggcccaggctctcctgacagctctcatgatctcttccagttcagcaacactgcctgtcaccttccgctgtgctgaagaaaataaccaggtggacaagaggatcactcgattcgtgttacccgttggtgcaacaatcaacatggatgggactgcgctctatgaagcagtggcagcggtgtttattgcacagttgaatgacctggacttgggcattgggcagatcatcaccatcagtatcacggccacatctgccagcatcggagctgctggcgtgccccaggctggcctggtgaccatggtgattgtgctgagtgccgtgggcctgcccgccgaggatgtcaccctgatcattgctgtcgactggctcctggaccggttcaggaccatggtcaacgtccttggtgatgcttttgggacgggcattgtggaaaagctctccaagaaggagctggagcagatggatgtttcatctgaagtcaacattgtgaatccctttgccttggaatccacaatccttgacaacgaagactcagacaccaagaagtcttatgtcaatggaggctttgcagtagacaagtctgacaccatctcattcacccagacctcacagttctagggcccctggctgcagatgactggaaacaaggaaggacatttccgtgagagtcatctcaaacactgcttaaggaaaagagaaacactaatggccaagtgtacatttgatttgatatacagacctccagattattttctatatttggattcacagcctttgcgctctgggttttgggatttgggtgtggggtaagttgaagggaaatcaatttaaaggaaagttctattatctgggttttagaaattctataagagacaaagtttggaagtacataaagtaataactgttagaattaggtaatggatatgaaagagaaaatgctttctcatgcatagacaagtgttttgggtttttaaaaaaaatattctgtcattggttacaaatttttactcaggctttctattggcatggatttcctttgacctctcacttttttataaattataatgcatctaaaccacctgtccccagttaatgtgccaaaatgtcaatttttaacttatctccagccaatttcaaagaaaacagaccagcatagttctgcaataacagttttaagatgggcatagggtttggaagaaagggagaaggattcttttttcaatgtactgtattgggacgctggtaactgttaacccagtgttcagcatagagctatatatatatatatatgtatatatttattattttcatataatttgccagacagagatcagaattgaaccgtcaatgtgaaataaagagttctccttgtacttgaataataaccacgattccaacccaggtctgctttggggcttatcagaactcctttctaaggagcactagaatgagaaatcatgttgttcgatcgtttcacatctgtatatcagctctaaagcagagatgtattatggtgatactccaaggtggcatagccattcatttacaacttccagatttgagctgcctggagggaatccatatcagctctgcataagattatatacaaagctgtcactcacaaaaggctggatgtgctttcatccaactggaaggctttattcttccaagttcattcatactcaaagaggccagtactttgccatccttgcacttctgttatcagggcccaaataacagtggcaagctaccaactaagttgtattttaataaagattccatgggttgaacaagccacgttgcagaaaaagagcttcccctaacctgggttgttgcagagtaaatcccacgacataagctggtatcagtggttcgggggaaatagttccattctatgactcttgtctcctcctccaggaggactgttctaactagtaatcttggccctattcattacatcctctgcttgtcattctgctaatttatgaagatagtttattatagtctgtacttcagttctcatcttgtaaataatgcttaacataaacttgtacttacactgaaatccaaaatagtcatgtttctgcagtattctgtagccaacttaaacctgtgctttcatgtttaagaaatgagaaattgtgccaaagatagcagaagagtagataagtgctcagtattgacgacctacatctgaaatctacaacataatgatactgaattgttatgtaaacatcataaatagtaaataatgattcaatgtgaattttaaaatgcaaatattgctattgtttataggaaataaatctaaatataaatgaaattgaatcagtaatttatcttgggctaaatggttctaccccttactaggttgccccaattagtggcactagttggcagagctgttcatgagctgccagttatcattttggagtcagtttgaaaccagcctcttaacacactgctgttaactcataaaagagaagagtgttccatttcagtctcaataaacacttccctcattctttc

SEQ ID NO: 82256 - DNA, 3530 bp, Homo sapiens
ctgaaacctccaatgacagcttgccgaaagatgattcagttgtttctcaacttggcccattccccacgtccaagtccaattggagaacggcttttgactccgtttatatgagcatctttgatagagagcaaaggtttctggcaaggcgggatgcctgccttccacctctaatccagctgtccttgacactccagacagccctttcaaatctgggcaacacttagtcatcttactggtagccaaggaccatttgaagtgagatctaacaatatgatcgtgttgctgcactggattccaacgtatccggaaaaattggtctgcgcgctgtcgtgtattatttctgtaccactctcattgctgttattctaggtattgtgctggtggtgagcatcaagcctggtgtcacccagaaagtgggtgaaattgcgaggacaggcagcacccctgaagtcagtacggtggatgccatgttagatctcatcaggaatatgttccctgagaatcttgtccaggcctgttttcagcagtacaaaactaagcgtgaagaagtgaagcctcccagcgatccagagatgaacatgacagaagagtccttcacagctgtcatgacaactgcaatttccaagaacaaaacaaaggaatacaaaattgttggcatgtattcagatggcataaacgtcctgggcttgattgtcttttgccttgtctttggacttgtcattggaaaaatgggagaaaagggacaaattctggtggatttcttcaatgctttgagtgatgcaaccatgaaaatcgttcagatcatcatgtgttatatgccactaggtattttgttcctgattgctgggaagatcatagaagttgaagactgggaaatattccgcaagctgggcctttacatggccacagtcctgactgggcttgcaatccactccattgtaattctcccgctgatatatttcatagtcgtacgaaagaaccctttccgatttgccatgggaatggcccaggctctcctgacagctctcatgatctcttccagttcagcaacactgcctgtcaccttccgctgtgctgaagaaaataaccaggtggacaagaggatcactcgattcgtgttacccgttggtgcaacaatcaacatggatgggactgcgctctatgaagcagtggcagcggtgtttattgcacagttgaatgacctggacttgggcattgggcagatcatcaccatcagtatcacggccacatctgccagcatcggagctgctggcgtgccccaggctggcctggtgaccatggtgattgtgctgagtgccgtgggcctgcccgccgaggatgtcaccctgatcattgctgtcgactggctcctggaccggttcaggaccatggtcaacgtccttggtgatgcttttgggacgggcattgtggaaaagctctccaagaaggagctggagcagatggatgtttcatctgaagtcaacattgtgaatccctttgccttggaatccacaatccttgacaacgaagactcagacaccaagaagtcttatgtcaatggaggctttgcagtagacaagtctgacaccatctcattcacccagacctcacagttctagggcccctggctgcagatgactggaaacaaggaaggacatttccgtgagagtcatctcaaacactgcttaaggaaaagagaaacactaatggccaagtgtacatttgatttgatatacagacctccagattattttctatatttggattcacagcctttgcgctctgggttttgggatttgggtgtggggtaagttgaagggaaatcaatttaaaggaaagttctattatctgggttttagaaattctataagagacaaagtttggaagtacataaagtaataactgttagaattaggtaatggatatgaaagagaaaatgctttctcatgcatagacaagtgttttgggtttttaaaaaaaatattctgtcattggttacaaatttttactcaggctttctattggcatggatttcctttgacctctcacttttttataaattataatgcatctaaaccacctgtccccagttaatgtgccaaaatgtcaatttttaacttatctccagccaatttcaaagaaaacagaccagcatagttctgcaataacagttttaagatgggcatagggtttggaagaaagggagaaggattcttttttcaatgtactgtattgggacgctggtaactgttaacccagtgttcagcatagagctatatatatatatatatgtatatatttattattttcatataatttgccagacagagatcagaattgaaccgtcaatgtgaaataaagagttctccttgtacttgaataataaccacgattccaacccaggtctgctttggggcttatcagaactcctttctaaggagcactagaatgagaaatcatgttgttcgatcgtttcacatctgtatatcagctctaaagcagagatgtattatggtgatactccaaggtggcatagccattcatttacaacttccagatttgagctgcctggagggaatccatatcagctctgcataagattatatacaaagctgtcactcacaaaaggctggatgtgctttcatccaactggaaggctttattcttccaagttcattcatactcaaagaggccagtactttgccatccttgcacttctgttatcagggcccaaataacagtggcaagctaccaactaagttgtattttaataaagattccatgggttgaacaagccacgttgcagaaaaagagcttcccctaacctgggttgttgcagagtaaatcccacgacataagctggtatcagtggttcgggggaaatagttccattctatgactcttgtctcctcctccaggaggactgttctaactagtaatcttggccctattcattacatcctctgcttgtcattctgctaatttatgaagatagtttattatagtctgtacttcagttctcatcttgtaaataatgcttaacataaacttgtacttacactgaaatccaaaatagtcatgtttctgcagtattctgtagccaacttaaacctgtgctttcatgtttaagaaatgagaaattgtgccaaagatagcagaagagtagataagtgctcagtattgacgacctacatctgaaatctacaacataatgatactgaattgttatgtaaacatcataaatagtaaataatgattcaatgtgaattttaaaatgcaaatattgctattgtttataggaaataaatctaaatataaatgaaattgaatcagtaatttatcttgggctaaatggttctaccccttactaggttgccccaattagtggcactagttggcagagctgttcatgagctgccagttatcattttggagtcagtttgaaaccagcctcttaacacactgctgttaactcataaaagagaagagtgttccatttcagtctcaataaacacttccctcattctttc

SEQ ID NO: 82257 - DNA, 2068 bp, Homo sapiens
agcaggaggagccgggcgcgcctgccacgcaaaactaccgggctggcagggcggcgggcgcggtgcgcgatcccgggtggcggcggcaacggcggtggtgacggcggcgactgcagcggccggctctcacctctcccctgtgcacccgcatctcgccgcgccgccgagcagccagcagtccccgggtcgcccagcccacgcgcgcacggccgagcccagcgcacaatagcggcgacagccatggggaaaccggcgaggaaaggatgcgagtggaagcgcttcctgaagaataactgggtgttgctgtccaccgtggccgcggtggtgctaggcattaccacaggagtcttggttcgagaacacagcaacctctcaactctagagaaattctactttgcttttcctggagaaattctaatgcggatgctgaaactcatcattttgccattaattatatccagcatgattacaggtgttgctgcactggattccaacgtatccggaaaaattggtctgcgcgctgtcgtgtattatttctgtaccactctcattgctgttattctaggtattgtgctggtggtgagcatcaagcctggtgtcacccagaaagtgggtgaaattgcgaggacaggcagcacccctgaagtcagtacggtggatgccatgttagatctcatcaggaatatgttccctgagaatcttgtccaggcctgttttcagcagtacaaaactaagcgtgaagaagtgaagcctcccagcgatccagagatgaacatgacagaagagtccttcacagctgtcatgacaactgcaatttccaagaacaaaacaaaggaatacaaaattgttggcatgtattcagatggcataaacgtcctgggcttgattgtcttttgccttgtctttggacttgtcattggaaaaatgggagaaaagggacaaattctggtggatttcttcaatgctttgagtgatgcaaccatgaaaatcgttcagatcatcatgtgttatatgccactaggtattttgttcctgattgctgggaagatcatagaagttgaagactgggaaatattccgcaagctgggcctttacatggccacagtcctgactgggcttgcaatccactccattgtaattctcccgctgatatatttcatagtcgtacgaaagaaccctttccgatttgccatgggaatggcccaggctctcctgacagctctcatgatctcttccagttcagcaacactgcctgtcaccttccgctgtgctgaagaaaataaccaggtggacaagaggatcactcgattcgtgttacccgttggtgcaacaatcaacatggatgggactgcgctctatgaagcagtggcagcggtgtttattgcacagttgaatgacctggacttgggcattgggcagatcatcaccatcaggtggggcatggtgtcacattcattgtcatcactgatacagggattaccgccagtaaaaattgtccatgaagggacaccaagaatgtcgcagtgatgaattctttttcttgatctataaagtcccttcccaagattaaatacgactatatcctggtatgcaagatttctgcttcggggtctgggtagccaaagccatcactctgtgctcagtttactgaagccagtaggatctaggcacaggctagcacaaagactcaaggctgagtaagggccagtccctgctttcaaactatccctgctagatgggcatgcacatatccaaatgaatgctgaagaccatgatgagggatgtaagagaactctgtatggtgttcacagaggactccagagagggaagggctggttctagctgggaaggtgaacgatggcttcccagaggaggggaacatttagctgaatcttagaagaataggaatttagcaggcaaaagaaaagctaggagcatttggagtggcagaaatagcttgtgatgcagccatgggctagttacagcatacagatttcttgctatggctggcataaaggatacataaacattcctttatgtttaaacgaatgaggaggcaggggtcatg

SEQ ID NO: 82258 - DNA, 1648 bp, Homo sapiens
ccagtctgctgctcaagacatcctctcctctggaatgtagagataatacatatcatgctcctttttgttaaaacgtttttttttccccttcaaacacagtccattcatttttcagtttgggttgaaacatccttttcttgatcttgagcttataataacctagtcatattgctcagctcagatatttttactccctctccttaggcattctggttccttaaatatagttagtgtcacagaggataaataaccaaccttatttctaaggtctgagaacacttggaccacatattggttgagctcagccaccttctgattaaagttttcagacttgtaagaactgaaaatttttatggtggaagttctctgagccctcatccattctgtttttaaaaatgcattgcagatgggctatgtgaatatgtttttaaacatctgatatgtgcatgaaacaaaaaacacttgaagttattatgtatacaattctgtgggatgggacttcatgcaggattggttttcaagtttgatttcctgagggattttttagttgtttgtgaaagaaccccaggtctacttttgaaattttgtattataattgtaatgttgcccatggttaaaaaaaaaaagtgttcagtgatctatgtctcctactactcctatttctctgtttttcctctgcaggagcttgctgctgttaacagttattcttccaagttgttttctttgtggggagatgggaggtgggaggaaatataaacatatatgtatagatctttcaaaatatatgacggtatacccgtatgttctgagtcttgctgtttttacctggtaatatttagaaacatttattttgagataaaggagagcacttttaagttgaacctgtagttttaaaaagtacatttcaagtaagccaaagcagagaagtaaatgtatttttcattgttgtatcagaattttgaatttactattttaaaaattcaagagttttgtagctgatctatttcttcccctcagccatcccaaataggtcatttgtcaacagatttaagaatgtttagaaacaacaactttgggaaacgggaaacaatttggtataagtgggtgtgccataacctctctcgtagccattcattcccggatacataccctagagaaactcttacacatgcgtaccaggggatggatttaagcatttgtgtgtaataggaagaaaagaagaaaaaacccgggaagatcccaagtgtccaccaacagtgtgttggataaatactgtggtatattccaacagtggaattccacagaagtgaaactgaactgcagctatgtatgtgaacatggacaaaactcaacaatagaaggatcaaaaaaagcaagtcacagaagaatacatcactatggttccatttcaatgaaagtcaaaaacaggctgtcaaatacatgataaaaggaaacgattaagacaaaatttaatgttagccgttttgatggagggagaggtgatcatgagggcacaggggtcttcagaagaactggtgagggtctgtttctgaagcctgtgggcatttccttttttaatctgtatgtttatgtgcttttgtatgtatgatatttcttaataaaatttaaaaagaagaatgggaaaaaa

SEQ ID NO: 82259 - DNA, 737 bp, Homo sapiens
ccagtctgctgctcaagacatcctctcctctggaatgtagagataatacatatcatgctcctttttgttaaaacgtttttttttccccttcaaacacagtccattcatttttcagtttgggttgaaacatccttttcttgatcttgagcttataataacctagtcatattgctcagctcagatatttttactccctctccttaggcattctggttccttaaatatagttagtgtcacagaggataaataaccaaccttatttctaaggtctgagaacacttggaccacatattggttgagctcagccaccttctgattaaagttttcagacttgtaagaactgaaaatttttatggtggaagttctctgagccctcatccattctgtttttaaaaatgcattgcagatgggctatgtgaatatgtttttaaacatctgatatgtgcatgaaacaaaaaacacttgaagttattatgtatacaattctgtgggatgggacttcatgcaggattggttttcaagtttgatttcctgagggattttttagttgtttgtgaaagaaccccaggtctacttttgaaattttgtattataattgtaatgttgcccatggttaaaaaaaaagcatcctgactcttttcaactcaaatcccagcttaaaagatactcaaaacatttgtgtctattcctagggagcacaattctaaaattattgcacagatttttttaatttatta

SEQ ID NO: 82260 - DNA, 601 bp, Homo sapiens
  misc_feature (457)..(457): n is a, c, g, or t
  misc_feature (477)..(477): n is a, c, g, or t
tatttttaatagtgacggggtttcaccatggtagccaggatggttttgatctcttgacctcgtgatccacctgcctcggcctcccaaagtgctgggattacaggtgtgagccaccgcgcctggcctactatagctgtttaatatgtgaaatctaaatggcatttttgacttgacagctcagacttgtacttcatgtattcagaagtttttagacaacaattagtttattgtctagttcattattaaagataatgaactaggccgggcgtggtggctcacacctgtaatcccagcactttgggaggctgaggcgggcagatcacttgaggccaggagttccagaccagcctggccaacatggcaaaacctcacctctactaaaaattaaaaaattagccaggcatggaggcatgtgcctgtaatcccagctacttgggaggctgaggcagaagaatgnttgaaccaggaggcagagantgcagtgaggtgatcattggtcactgaggctccacctccggttcaagtgatctcgttcctaagctctgagtcaggtggagtgcgggctgccaggcgggtatgagaattaagggcgggccccagg

SEQ ID NO: 82261 - DNA, 739 bp, Homo sapiens
  misc_feature (595)..(595): n is a, c, g, or t
  misc_feature (615)..(615): n is a, c, g, or t
cagggtaaaagaaagagacttttttctgaagaatggcttgaacccaggaggcagagattgcagtgagccgagatgggccactgactccagcctgggcaatagagtgtgactctcaaaagaagaaagataatgaactggtttgcatttcttttaaaagagatgatagaggaaagtatagtttcgtaggaatgtgtatctctcttaaaagataatcttttaattttgcttcagataacaagttattattattttttaagaaagcctactatagctgtttaatatgtgaaatctaaatggcatttttgacttgacagctcagacttgtacttcatgtattcagaagtttttagacaacaattagtttattgtctagttcattattaaagataatgaactaggccgggcgtggtggctcacacctgtaatcccagcactttgggaggctgaggcgggcagatcacttgaggccaggagttccagaccagcctggccaacatggcaaaacctcacctctactaaaaattaaaaaattagccaggcatggaggcatgtgcctgtaatcccagctacttgggaggctgaggcagaagaatgnttgaaccaggaggcagagantgcagtgaggtgatcattggtcactgaggctccacctccggttcaagtgatctcgttcctaagctctgagtcaggtggagtgcgggctgccaggcgggtatgagaattaagggcgggccccagg

SEQ ID NO: 82262 - DNA, 2408 bp, Homo sapiens
  misc_feature (9)..(9): n is a, c, g, or t
  misc_feature (306)..(307): n is a, c, g, or t
  misc_feature (448)..(448): n is a, c, g, or t
  misc_feature (1274)..(1274): n is a, c, g, or t
  misc_feature (1774)..(1774): n is a, c, g, or t
  misc_feature (1861)..(1861): n is a, c, g, or t
  misc_feature (1895)..(1895): n is a, c, g, or t
  misc_feature (1900)..(1900): n is a, c, g, or t
  misc_feature (1917)..(1917): n is a, c, g, or t
  misc_feature (1920)..(1920): n is a, c, g, or t
  misc_feature (2030)..(2030): n is a, c, g, or t
  misc_feature (2403)..(2403): n is a, c, g, or t
gtgatagcncttaatgttcatttatttatttactcactgaatgaatgaatgattgacattgggacatcatgaaagtttactgacagaaataagtaaacttcatgaaaagtagaacatcgtggaagtttactgacaggaataagtaaataagtaagtttactgacagaaataggtatgaataatgccttcatattaatatataatatgctcatatctgtggaaagttcagtccacgtacaccaagtatggccttctcaactcacaattcacaccaataaaaaaatttaggtacatatgatgctttcnntcatgttcattcattcaacagctgttctatttggactgatcagacgttgttctcacatcaaatccaagaactgaaaacattatttaaagtttctctcgagtttttaagaacctacaactatttatggagaaaaagcagccnaaggatgatctttttgatagactcaatactggtattctgaataagcatctccaggatctcatggagagcttgacagccaaggtattccatacatacaatgcctccatcacgctacagcagcagctagaagaactcacagccccggatgagaacatcccagcgaagatcctttcttataaccgtgccaatcgagctgttgcaattctttgtaaccatcagagggcaccaccaaaaacttttgagaagtctatgatgaacttgcaaactaagattgatgccaagaaggaacagctagcagatgcccggagaaacctgaaaagtgctaaggctgatgccaaggtcatgaaagatgcaaagatgaagaaggtagtagagtcaaagaagaaggctgttcagagactggaggaacagttgatgaagctggaagttcaagccacagaccgagaggaaaataaacagatggccttgggaacctccaaactcaattatctggatgctaggatcactgtgccttggtgcaagaagtggggtgtcccaattgagaagatttacaacaaaacccagcgagaaaagtttgcctgggccattgaaatcgctgatgaagactacgagttttagccagtctcaagaggcagggttctgtgaaaaggaacagtgtggtttgggaaagatggataaactgagcctcgcttgccctcgtgcctgggtgagagaggcagcaagtcttaacaaaccaacatctttgcaaaaagctaaacctggagatattataagggacagctgagccagttgtcctacggacaacttatttaaaaatatttcagcnatcaaaattctagctgtatgatttgttttgaattttgtttttattttccagagggcaagtggatgggaatttgtcagcgttctaccaggcaaattcactgtttcactgaaatgtttggattctcttagctactgtatgcaaagtccgattatgttggtgtgtttttacagttagggttttgcaataacttctatattttaatagaaataaattcctaaactcctccctctccccatttcaggaatttaaaattaagtagaacaaaaaacccagtgcgcctgttagagtcgtcactgtctattgtcatagggatcaattttcattaaacttgaagcagtcgtcgctttggcagtgttttggttcagacacctgttcacagaaaagcatgatgggaaaatatttcctgacttgagtgttcctttttagatgtgaattttattcttttaatatttaaaatattaacctttctgatcttaaagatcatgtagattggggtgggnagggatgaagggcgagtgagtctaaggataatgaaataatcagtgactgaaaccattttcccatcatcctttgttctgagcattcgntgtacactttaagatatcctctttttctttttanccctnatctttcacttgaaagnttntattgtataaaaagttccacaggtcaataaatttagaggaaaatgagtatttggtccaaaaaaattaaaaataattaagattttagggcttttattttttcttttgtaantgtgtaaaaaatggaaaaaaacataaaaagcagaactttaatgtgaagacttttttgctataatcattagttttagaggcattgttagtttagtgtgtgtgcagagtccatttcccacatctttcctcaagtatcttctatttttatcatgaattcccttttaatcaactgtaggttatttaaaataaattcctacaacttaacggaaaaaaaaaagtttctcttccatctctagtaaaattaattgcctccttttaccatctctagtaaaattaattagcttcacagataccctctgtagataaactcctttaatttcttcctaacatacaaaacattcccaaatatggtttgatttccccaaaaaatgtancaaaa

SEQ ID NO: 82263 - DNA, 619 bp, Homo sapiens
ctggctgacctgaggacccaacaccgcaatctcatgttccagatgaaacccaccatattgcagctgacaacttttcatccagaatgaatgctgcttacctaaagctattatagttttactgaggttgttataggtagataggtaataatgaaggtactgtttgatagcaattaattgtatgatggcttttccatttgtagtcaagattggaaacaacatgaaatatattctaaaacatttcactatatagttacatcctgtttctaagtatgaagaatgtgggatgtaagaagtttgcatattactttgaagaaataaaaatcatgaaaacaaagaaatcattataaaatgaattattactaccagagttttttctccccagcgaaaggttgtcatgagcagagttttaagtagagaatggaatctgattttgtgaaacagattccatttagaattatattattgaaatttgaattcgcatagagtgaaccagtaagagaaaaatggcattattaagaaaataaatcaaacacagatttattaggatatgaaaatttttaggaataatagaaaagaaagagctatgttttaaggaaaaggcctagattgtccatattac

SEQ ID NO: 82264 - DNA, 239 bp, Homo sapiens
ttcttcacttgtagtatgaggaagcagaagtgaacagcactgctgctcagctgcagttgcttccataggcttgctagaagcaccagaagtctcccactgggcaccagaatctttgggttgtgtgccatcaggtcttattccatatatggaatattattgctcctcaaaagaaaaacatgttgagacagtagttattaagaagtcaggctttgccacaatcccttttaaatacagtacct

SEQ ID NO: 82265 - DNA, 732 bp, Homo sapiens
tttttgtatttttagtagagacggggtttcaccatgttggccagtctggtctcaaactcctgacctcatgatttgcccacctcagcccccccaaagtgctgggattacaggtgtgagcctccgtacccagccccctttctgtctttcataaggaaaataataactataatctaatcatactgtttctcaatccatgggagtgagaggaagtttctttaaaaataaaatgtataaagaagtgagtcacgttagattatctgagtgttagataagctgaggtggtgtggggatatggtaaagctcatgacactggtatgtgaaggactgaagtttgtcaagcccttcactagactagctgagactcagtaaataatcactctaagattggaaacttgaaatcctaacactggaaacttgaaatcctagaaatgcttccaaaattatgccagctgatttcattttcaaatgctgcacacagaggggctctcatctgtaaggaacggagcaccctcttcaactcctcatcatccttctctgttagtggtgtgagcactgtcatggcatcctctgttgactggcactgtggacagacatactcatcaatgagctctgcctcactctgcaagatgccaatgcagcacccatggtaccaattctgacaccgatcatggccaataaaaaatctgcaagatccgaaatggaaatgtgagttcaaaacagatgggatgatgt

SEQ ID NO: 82266 - DNA, 1256 bp, Homo sapiens
tttttgtatttttagtagagacggggtttcaccatgttggccagtctggtctcaaactcctgacctcatgatttgcccacctcagcccccccaaagtgctgggattacaggtgtgagcctccgtacccagccccctttctgtctttcataaggaaaataataactataatctaatcatactgtttctcaatccatgggagtgagaggaagtttctttaaaaataaaatgtataaagaagtgagtcacgttagattatctgagtgttagataagctgaggtggtgtggggatatggtaaagctcatgacactggtatgtgaaggactgaagtttgtcaagcccttcactagactagctgagactcagtaaataatcactctaagattggaaacttgaaatcctaacactggaaacttgaaatcctagaaatgcttccaaaattatgccagctgatttcattttcaaatgctgcacacagaggggctctcatctgtaaggaacggagcaccctcttcaactcctcatcatccttctctgttagtggtgtgagcactgtcatggcatcctctgttgactggcactgtggacagacatactcatcaatgagctctgcctcactctgcaagatgccaatgcagcacccatggtaccaattctgacaccgatcatggccaataaaaaatctgcaagatccgaaatggaaatgataacttcctgctatgagtcagctaaacattcctgaatccaaccattctaccgccggcaaactccagtatctgatgctctatcacatgtggaaacaaagtcactcacatgggtttcaacaagtacactgcttagtgaaatatggatctttaaaaacatactggaatttgaaaaaataaaccacacactgatggtaatgtcttcctctgaatgaatgtgtgtaaaactgtaacaggcacaaaaaccaaagccaaagaatcaaagacttacatctgtcaaacctattccacagaagccatttcaatatcagggctatttcttagataggtttaaaaatgtatctcacaatttaaatttgaaaacaaagcaaagcgcaaacaccaagtagaagttacactacacggaccatgcaggtcagccaggtgtagaagataaatggtcaaaatatgctaagaagaagaaaactaagaaaggtacatagagcaattcaatctctaccaggttttctgaataaacattggaatttaatcgaattaaaaataatttctcat

SEQ ID NO: 82267 - DNA, 1178 bp, Homo sapiens
  misc_feature (7)..(7): n is a, c, g, or t
  misc_feature (55)..(55): n is a, c, g, or t
  misc_feature (65)..(65): n is a, c, g, or t
  misc_feature (71)..(71): n is a, c, g, or t
  misc_feature (77)..(77): n is a, c, g, or t
  misc_feature (96)..(96): n is a, c, g, or t
tggactnaaaaacaccgggctcccttaaaatttaaaaacagctcaaagacaaccnagaatcttgnctgtgntttaangttaggttaaaaacgctgnaactttaaagaagctgtagactgcaagtttgttgttatgaagacctgctagctttgaagcctttcaatttctgtacaaagaatgattcgagaacttctgcacactggtaaaatggggagtcacttggattgtagtaacgacagttatcaaaaattttggtcatatctgccacaaattccgtcagcttttcataatatcgtctttgtactctttcttccatggtggcaaggtacataggttccttaataacaccataataatctggtgcatcattagggtctactggttcaaggaaaggccaggccatcttatgggcctgtaaggaacggagcaccctcttcaactcctcatcatccttctctgttagtggtgtgagcactgtcatggcatcctctgttgactggcactgtggacagacatactcatcaatgagctctgcctcactctgcaagatgccaatgcagcacccatggtaccaattctgacaccgatcatggccaataaaaaatctgcaagatccgaaatggaaatgataacttcctgctatgagtcagctaaacattcctgaatccaaccattctaccgccggcaaactccagtatctgatgctctatcacatgtggaaacaaagtcactcacatgggtttcaacaagtacactgcttagtgaaatatggatctttaaaaacatactggaatttgaaaaaataaaccacacactgatggtaatgtcttcctctgaatgaatgtgtgtaaaactgtaacaggcacaaaaaccaaagccaaagaatcaaagacttacatctgtcaaacctattccacagaagccatttcaatatcagggctatttcttagataggtttaaaaatgtatctcacaatttaaatttgaaaacaaagcaaagcgcaaacaccaagtagaagttacactacacggaccatgcaggtcagccaggtgtagaagataaatggtcaaaatatgctaagaagaagaaaactaagaaaggtacatagagcaattcaatctctaccaggttttctgaataaacattggaatttaatcgaattaaaaataatttctcat

SEQ ID NO: 82268 - DNA, 900 bp, Homo sapiens
tttttgtatttttagtagagacggggtttcaccatgttggccagtctggtctcaaactcctgacctcatgatttgcccacctcagcccccccaaagtgctgggattacaggtgtgagcctccgtacccagccccctttctgtctttcataaggaaaataataactataatctaatcatactgtttctcaatccatgggagtgagaggaagtttctttaaaaataaaatgtataaagaagtgagtcacgttagattatctgagtgttagataagctgaggtggtgtggggatatggtaaagctcatgacactggtatgtgaaggactgaagtttgtcaagcccttcactagactagctgagactcagtaaataatcactctaagattggaaacttgaaatcctaacactggaaacttgaaatcctagaaatgcttccaaaattatgccagctgatttcattttcaaatgctgcacacagaggggctctcatctgtaaggaacggagcaccctcttcaactcctcatcatccttctctgttagtggtgtgagcactgtcatggcatcctctgttgactggcactgtggacagacatactcatcaatgagctctgcctcactctgcaagatgccaatgcagcacccatggtaccaattctgacaccgatcatggccaataaaaaatctgcaagatccgaaatggaaatgataacttcctgctatgagtcagctaaacattcctgaatccaaccattctaccgccggcaaactccagtatctgatgctctatcacatgtggaaacaaagtcactcacatgggtttcaacaagtacactgcttagtgaaatatggatctttaaaaacatactggaatttgaaaaaataaaccacacactgatggt

SEQ ID NO: 82269 - DNA, 2228 bp, Homo sapiens
gagctcgcggcagtacggggagcgcccgcccgccccgccctggacccaaccaagcgtcccgcggaggggtgcggccacttgggggcaggagaaagcggagtacgccacccctctagggacccaggaagcgaggcgagcctcaggtggacgcggtggtgtggaccacggcgatcagggcctttccccctgctgtggagacggaggtgcgaggggacgccggcggctccccaccttctggccgagtggccttctccgcctccggctggactccctcggggcgctccctccagagccgagtcgggctggccgggggcggctgtttggcctgagtgtcgtcttactaaagcggaacgccggaggggaggccactccgagagaaggcggtccccggcggaggtggcttcgtgaatcctgcagccccctgcccgcccgccactcgagacgccgcgcctcgtgggtttcacgctggatggagggggcgccgccgaggatgcccagcctccccctctaattctacctctccagttcctcaggtagacacagcctctgtctgctgtggttttagtgcccatggcccctcagaaattatttttgtcccctcccgatagtggctttgggggatggagggcgagagatgcaaagggccagtggaagattttttatagcacaaggaatcaagccaggagatggaggtttcattgccacctcggggtctggggagggggcgagccacacctctccggtcagtctgcgcccaccaggacctgctgctgggaaccgcacacgaaaggagagacacccagcacctggcccctagacccgcagggcgtcaacctcctgggcttctgcctttctaggtttcctctgactttgctgacccaatgacccctggccacgggtggcaaaaacgccctcactgagcccttcgctaaaggagtgccggggtttatgtgtctggcttttaaaatgggatgaggagacaaggaaacaggacctgagaaaggacactatccaaaatctgatgctctcagaagtcaactttaaaactgccctgctccgcggtggctcacgcctgtaatcccagcactttgggaggccgaggcgggcggatcacgaggtcaggagatcgagaccatcccggctaaaacggtgaaaccccgtctctactaaaaatacaaaaaattagccgggcgtagtggcgggcgcctgtagtcccagctacttgggaggctgaggcaggagaatggcgtgaacccgggaggcggagcttgcagtgagccgagatcccgccactgcactccagcctgggcgacagagcgagactccgtctcaaaaaaaaaaaaaaaaaaaaaactgccctgctcttttcatccaaagatgaatatatgaagccagctgttactggttgaaagtgtgcctcttgtttgcatggcaaaggaattcagttttgtgtttatttacagctgaagctctcttgaaataattgtctcagtcacagcttttacattttggggaaccatgccattagaactgaatattaggaactgtgatcttttgtcttttcacaattgacaatacattcagaacttatttctgataaaactgggcagtttctaaggatactgtacttatgatttaaagtcataactccatgatgcaaaagagaacaagaaatatgtttcaatgactgccttttaaattagcggtactccagcactttgggaggccgaggtgacaggatcgtttgaggccgggagttcaagacagcctgggcatcatagccagaccttgtttctactaaaaataaaaaataaataaattttccgggcatggtggcccatgcctgtagccccagctactcaggaggctgaggtgggaggatggcttgggcctaggaggttgaggccacagtgaattatgattacaccacgggactctagcctgggtgacagagtgagaccctgtctgaaaaagaaaaaaaaaaaatgtagctgtacttaatgtactaaagttaaaaattggataacaatagttgaggacagtgtaggcatttaaaggtagaggattgccactttttttctcatttttgtcttttatatgcatcagaatgagtgcatattgtatactacttggtaaggtcttaaattaatttggtacctactgagataatccggcatttcatgtgtaaagataaattagataaatgaataatatatcactatcttgga

SEQ ID NO: 82270 - DNA, 277 bp, Homo sapiens
  misc_feature (84)..(84): n is a, c, g, or t
  misc_feature (86)..(86): n is a, c, g, or t
  misc_feature (91)..(91): n is a, c, g, or t
aaatctgccctcattactggtgggcactatctagtaggccagagaggacaaatactgaaggtgaattggtctgtgtctcagagnanagggnacagccttttctcctgctgccttagacattaaaattccaggtttgacatcctttgggctccaggatttacaccagcagcccgccgggtcctgaggcttttgatctcaaactgagagttgcatcattggcatccttagttctgaggccttcagactgggactgagccacactgtagatatcccagcg

SEQ ID NO: 82271 - DNA, 648 bp, Homo sapiens
ctgggtaagaggagacgggtgccccccacccactcctcccggccgcgcggacctctcccgctcagacctgcatctgcattcctttgagtttaccacggacttggggcgggatcaaagggaaagtggcctgagcctgtttcatcaaggggttgtggaccgaaaccaaggccgggggtggcggagggcacgcggatgaggggctcaggcctaggaagggccggtcctggacaccgcgccctcccctgcagccaggcgccgaggcctgcagcacccggagcgccgcactgacccgcgattctgcccgaaggccggcccgggtgcgccccggcgcggggagacaccaacaaggccagcttttccacgagaggctgcttagctcttgtgaccatatttggtctggcgaggaggcatcttggctgcctggctctcaattgtctgctagagcacagacggtgcccagaaagtgcctctgtcactggagatgcggcttcgccaacgggcttgagtgcaatagctccatctcagctcactgcaacctccgcctcccgggttcaaacgattctcctgcctctgcctcccaagtagctaggattaagacgcctgccaccacgcccagctaatttttgtattttttaaaagcaaaaatgg

SEQ ID NO: 82272 - DNA, 239 bp, Homo sapiens
gtcattctagaggatcccggcccccctgtggattggaggaggttgcacacagtggggggatttgaggaggctgcacacagtgtgggggatttggggaggttgcacagagtgggtgggatttggggaggttgcacaaggtaggggggatttggggaggttgcacacagtggtggatgtggtgaggttgcacacagtgggggggatttggggaggtttcacagactggggtagatttgggg

SEQ ID NO: 82273 - DNA, 529 bp, Homo sapiens
tctgggtagaaaccagaacatgctctccacagcctgggggagtattctatacctttgcagaggatgacctgatttcccacccataaagagaaatacgattttcctactctccaccagtttcacggataatgctatcaggcagcctgattccagggaggacccttaatttagaaaggaaaaagctaagacctaacactttgtctctcactaagggagtctggaattctgattcctgtttcaggtctataatgtgctctatgtaggaggcaaaaagaagaggatctgaatcctttggtgagtctgggactccaggagattgcaaataagctctgcaggagcactcttcccaggaggagggggtctatggccccctggggacctcatatgctgagcccacagctctgatgcctctgcaatttctcagaggtccactctggaggccatcgtccctgctgagccccccagagacacagggagcttcgatctcagcaatgggacattgatttttacaactccagcaacaagagaa

SEQ ID NO: 82274 - DNA, 268 bp, Homo sapiens
gctcagtaattgtcagctgtgagtattagtagtagctaatacactactactattcttggctaacaagccagctcaaagctttgatggttttccattacctgatgatggtgatgatggtttccacttcctgaacactcacacccctgggctaggcacttaacccaaatccaaggtcagcgttattgtttgggggtgggggagacacctcctgctctgactcgtgtgtttgggttcccgtattttcaccagagggtgttagtcctgccca

SEQ ID NO: 82275 - DNA, 350 bp, Homo sapiens
tttcttttcttttctctctctttctttctttgtttctttttcttttgctgttgtgtcatccccataaaatagtcatccttaagagtttttctattttctgctcaggaggggttggcacttcaaaataacagctgacaaaaaggtacaaactatttcttggttttgttttggcaactgtatggctgaaagtgggagagcagcacagagctgtgtgtggatgtcagcagctgccagagacttcgcagagggttttgtcacagtcgccacaaaacactatgtgtttaaactggaagccagtcacaatgagagaccctagtaacctttatgctagagaaaagcaaattgccatt

SEQ ID NO: 82276 - DNA, 633 bp, Homo sapiens
aaaataaaaaacttaataaagacaacacaggaaattatcttgataaaacataaaatctttgtttcgtaggccagttaccaaaaaggtaaagaaaaacctcctgtggtgtgattgcttctcctcatgggaagcccgtttggtttgcctggaagtagaagctgatgaaaagtacttgaatttaatgagacataggaagagggtgtccagtattacgagtgcgcaccgtattatagaggaatgtcaatgtgacagttagtggcttgagcagggcagtacagggctctaagtcacagtatgggaagttttctggttccatggaacaattcagacacatccagaaaagccgaatgtacagaatcgagttatacaggcggaaaacagtgcatcagaccatagtaacacagttaaaactggagaaaaaagttccaggagctgacaaaaaagttgaaggaaagagtccttgccctagccaagcaagcagctgcagcttctcaaggggagagagtggaaggcagtgatatgcggccagcaggtcacacgcagcaaggccaagcccaagccgaggctgtcagattcacctggagaggaagaccctgcctggagaaatgaaattgccattctaaatgaagacag

SEQ ID NO: 82277 - DNA, 157 bp, Homo sapiens
tccaacgtggataccctgggaggtcactctccccaggctctgtccaagtggcataggggagcttagggctctgcccatgatgtacagtccctttccacaacgttgaagatgaagctgggcctcgtgtctgcgcctgcatattcctacagcttcccag

SEQ ID NO: 82278 - DNA, 914 bp, Homo sapiens
gtttgcctgtctggctgcctgggtctttggtttgctgagggctgcatggaggctatgccctcctctccagcccctgcgttgggaagtcacaggagaccggagctgcgcacgacatcacagcgccgaattctgacccaatctgaatcaaatgtcacccataccctgtcttcaacaaacaaaagagcaacgaagccagagacatcatcttcagctgccttggcctgtgtgccgggggtcccgtcagctgcaggacacgggagggatggagtgaagcagaaaggccccgccgtgaccacactcatcccagaagagcctctctgttggcatgaaaggaaatcacaaggaaagggacttttcaaggtcagactgcaccagtggaaagtcagcaccagcccccagggctcgaggcagcctgtgccctttccactaactgtgccaactctcaccaggggaaggctgaccaggaacaaaggcccttagaggagagcagaactcctgcagcctgcacttccgagagatcctgctccacggagcccggctctactcctgcaggcagaacctgccagcccgcagatgctgggggctgaaggatcccggcgacaccaagcgtcaggtcaggcgtcagaatccagcgcgtttgctcctcgagaacagcgcgccacctgctcccaagtgtgtgaggggctgcagtgccgagctccacttcacaagactcactcctgccccgccacctcctgagcagacgcagtcaagcccgacctacctttcaacaaacatgtattagcactccctccatgccaggcactgtgccaggtgcgagggtaccatgaccaagccaaggccccaggctcagagcactcacacgccagtggagggggcagccctgtgcgacccagcagggcacaccccacctc

SEQ ID NO: 82279 - DNA, 906 bp, Homo sapiens
gaacatggatctggtttttactctggggatgtagcctattaaagaaaaccgaagactgagggggtcttgggcattgacgtggttgacatgggcatttcttaaagcagagcccccccaaaccccactcatttcctttcctaagaatttccaaacccaaactcaagtggagccgggcgatgcttggggttgagtcagtgctcagctgtagagggttgggggagggcccttccctctctccccctctgcaggcagcaaccctgtacccagtcacagggtacagttttccagtacaggaggaggaggattctctggtcaatggtgtatctgctgctgcattccacctgagtgagtcttcagggcctatttgtagcctgaaagcagaacatgctttgaatttccatcttcagtgctcctgagcctgcaccagtgaagtcttcctggggacttggtgatggacttgaaagagccaggctctagagtctctgcagagggtgacccaggatgagtctctcaccatttctgagcctcagtttcctcattcaccttcgttgtcatgtggctgcagggagtattgttatgagataatggacataagaagctttctgaaaagaagcaagaccctcattctttaataaaaatttgatcaactttcccagtagaacagggctttaatttcaatcaccattatccatttccttttgcagtggtgctcaatcttggtggtgcattagaatcccctaggagcactgacaacgggcagattcctgggtcccacgataggcaatgagagcagaatttctaaaagtgaggcctgggccatccagagtttcagaacctcccaaggtgattctacctaccttgccaggactgagagccatggggatctggggaaagaaacagtagtta

SEQ ID NO: 82280 - DNA, 371 bp, Homo sapiens
gtcaatacaagccaaatacagatgagaatctgggccaggcttacctggggattctgtccaatggttgaaaagacggtacagtgtcagtgacgtttttggtgatggaagtcctcagtgtgtcttttgatgtcaaagatgtcttgtctttggactgacaggagcatgtgatctgtggtccaactgtttgttatcctggtatttccctttactgtcatcttggggatattatttacttctctctcctccatttgatctcccaatgcatattatgtcatgtctttctctctctctgtttattctttcattttgctggagtatatcttatagtaacaacttggggaaggatgtctggcaggtaaattttgagattt

SEQ ID NO: 82281 - DNA, 676 bp, Homo sapiens
tccaagtcaaactcctgagctgggttaagaaattggaattcctgaggctctggttcaggttcttactacctctgtgacattgggaaagttggttaccatcatagcgcctcagttttcttatctgtaaaatggggaaaatacatgagttaatatatgtcaagtgcttagtgaactgtctgggtcatgttcagtgctataaaaatgttcattgttgttgttgctgttgtttctatcgttgttattattaaatgggtcccaaatcttgaggcaagtcatttggaaaaccagcttgttcgtgctttgccacatatagtcatgtgccacataacaatgttttggtcaacaactgaccacatacaggactatatagcctaggtgtgtagtagactataccatctaggttgtgtaagtatactggacgatgtttccacagcaacaaacccacctaatgatatatttctcagaacgtgtcgttaagcgacatgtgaccgtattatacgtccagcaattgagatgaattaccgttgcacacagtgctgaagctcaggtgtggacaccctcttttaaaatatttttcccatgaacatgtcctccaggaagcaggctccagtgtgtcacagccagatgagtgattgttagggaagacaaagcctgtgtttagagttatgcaagtata

SEQ ID NO: 82282 - DNA, 405 bp, Homo sapiens
tttaaatattaagttaagtatataacttgccctatgccatattgctttaatcaggggactgagcatcacatttagatttgatgagtttgggaaaagttctcaaacatccagacccatggaccttaagaattactgcagaaatctccttcaatatagttatagggagcattaatgcttttgtggtactaaacatatttttgagcttagatacaaatccttcttgtcctgaactgatagggtaggaattgtttaggtgcttcaaatccagatctttcaggggttgccacctaaactcatctttatgagtaactctagataataatacactttggtatcttccaaagtgcttatctaggcatggaaaagttcagtaattatcatgaggactgtttgtagtttagttct

SEQ ID NO: 82283 - DNA, 332 bp, Homo sapiens
gcaatttaaaagcatttgaaaggaaatcatttttaatagaggaattgcaaaccagagaataataagctcctggaaggataagggtaaagagttttgtgtttgttattacttctcctatagcaagaaattcttattcaaattgaaacggtctaacagttgtttgtttgggtgttttgtttggttagttggttttgttttgtttttttctaattaaaaagtccttgttacatcaagggactcataaccattccctattggcccctggatactttgcatatcctgaaacaaccagcactgatcagaaagcattcagtccagtcagaattcaaggt

SEQ ID NO: 82284 - DNA, 310 bp, Homo sapiens
gccccgggcttgctgtcatttttctcttttatattgatttcatgttcaccaactcctataaatttctgcaaacaccttgcctctctatagaaacaccttgccattatgtcttccttttcttgccctcaacagaaaagtaaagtgcaacatacaatctcattcagggcctctagaaacatctgtgcctccaaaagttaaacacagcttataaatattatctgatatacagatcaattgcaggatagagagcagggttgtgcattaataaaagcatggagtttagagtcaaaagtccttcagaaaattctgc

SEQ ID NO: 82285 - DNA, 1002 bp, Homo sapiens
  misc_feature (20)..(20): n is a, c, g, or t
gccaagaattcggcacgagncggcacgaggcggcacgaggcggcacgagggttgaattcagcagcaaagtcgcaagaaatggttctccagccaggagaggttatgtttatcctctgattgcccgttttctctgcacacagtgatatcgtattcagtgagaggtgctgttggcacccagcagcaccctgggcacacagcatttcatgtcatgtcacagtgtacaagctaccctctaattcagaaagaagagcattttgcacagagaaaaataaaaagatccatgaatgtcatcttttatcttttattttcagttggctgatgttggaatttttgttcttgtcatgaacttgtaaaccaatcttgccaagatacaagttgttttggtttttcactacaatgacctcttgttcctcctgtcttgactgctgacgttcctcaatgattctattgtctattttatgggaagcagccttcccataggtttccttttacacactgcagggctatctttatactttaaaaaaaaaaaaaaaaaaaaaaaaaggacaagaactgtcactaacctcatggaggggtttgcgtaaaaccatttagcccaccttgagcaaagggtagattccgtgttgtttttttaagctcactgtaataaaataaatctaattcagcattattgtgctacctcaaaggtaaaaaatgttttaaggtcttcttttggtcctgagttctatatacagtgtttgaaatgtctttcatttggaattattttttaaattcttggagtgaattttattttaatctgttttaatcttgtattttaatctcagaagaataagtgattgaaacgtgatcaattcttgctctgtggtgttaaacatataatgaacagtcattaagaattaagtcactgtttgccataaacaaggttgatgttctttttgttgttgttaaggaaaccctagggctcggctttactcttgattaataaaggctgacaaatcatga

SEQ ID NO: 82286 - DNA, 1017 bp, Homo sapiens
tctgtaacaataatggcgtaagcctcagaaatcagggtagagcttttcctttgagcagtttaatgagtgaattcagcagcaaagtcgcaagaaatggttctccagccaggagaggttatgtttatcctctgattgcccgttttctctgcacacagtgatatcgtattcagtgagaggtgctgttggcacccagcagcaccctgggcacacagcatttcatgtcatgtcacagtgtacaagctaccctctaattcagaaagaagagcattttgcacagagaaaaataaaaagatccatgaatgtcatcttttatcttttattttcagttggctgatgttggaatttttgttcttgtcatgaacttgtaaaccaatcttgccaagatacaagttgttttggtttttcactacaatgacctcttgttcctcctgtcttgactgctgacgttcctcaatgattctattgtctattttatgggaagcagccttcccataggtttccttttacacactgcagggctatctttatactttaaaaaaaaaaaaaaaaaaaaaaaaaggacaagaactgtcactaacctcatggaggggtttgcgtaaaaccatttagcccaccttgagcaaagggtagattccgtgttgtttttttaagctcactgtaataaaataaatctaattcagcattattgtgctacctcaaaggtaaaaaatgttttaaggtcttcttttggtcctgagttctatatacagtgtttgaaatgtctttcatttggaattattttttaaattcttggagtgaattttattttaatctgttttaatcttgtattttaatctcagaagaataagtgattgaaacgtgatcaattcttgctctgtggtgttaaacatataatgaacagtcattaagaattaagtcactgtttgccataaacaaggttgatgttctttttgttgttgttaaggaaaccctagggctcggctttactcttgattaataaaggctgacaaatcatga

SEQ ID NO: 82287 - DNA, 726 bp, Homo sapiens
gtaagatgcatgatgaaaatttaagtagagaggatctttatggttaacttataatatcgagtgatgcatgaggtagatgttcagattaatattctgcattattatgaaagaaaaacattcttaattttagttaaagtttagtatgatttattgtatttttatgaaatatatgtagcatatttttaaattataaattgcatgtgaacttttcaaccaaacagttttaacatgttaaatactatcatgaattcaatgaagtgttattatgccagtaactttaacctattccaccttactcaagggtgtaggtaaaagatggtaaaaatacactatttggtaagataatggactgacatctctagtgattttttttgccagtgagttttaattgccattaagttaaagaatattgttcccataggctaaatttttatttttattttctcatttaaatgtatttgacttaatttttgtggatacctaatatgtgtacatattatgccatatgtggcatattttgatacggacacacaatatataacaatcgcattagactaaatgcggtctccattacctctagcatttattctttgtattacaaataattcaattctacagttttagttatttttaaatgtacaattaaattgttgttgactacaggattatttttatggtcataataaaacttatatacaaacataagtaaaatccatatatttctga

SEQ ID NO: 82288 - DNA, 372 bp, Homo sapiens
gtggtcctgctctggagtccacattcgtaaatattatgctgcagtaaatattaatcttgagaactaggtgatatggtttggctgtgtcccactcaaatctcatcttgaattgtagttcccataatccccacatatcatgggagtaacctgatgggaggaaactgaatcatagggcagttatttctatgctgtcctcataatagtgagttttcactatatctgctggttttataaggggctttcccccctccctttgctctgcatttctctttccggccattatgagaggaaggacatgtttgcttccccttctgccatgattgtaagtttcctgaggcctcttgagccatgctgaactgtgaattaattaaa

SEQ ID NO: 82289 - DNA, 686 bp, Homo sapiens
cggagtctcaggccctgcccactcccagacacacactgtctgcagcccagggcccgtgggtgccccctgccaggctgagggacagtgacacaggtgagggaggtaatgggggagccctgctgccctgggagaggggacgaggaccccacaggggccaggcctggccaccactcgccccaggctgggaaaccaggacatgaccctcccccaccctgctcgcaggttgtcgcaggacacgtgttcgtgtccaggtgcgctgggaagggtcctggcggtgctcctctcagcgcaggtcccgaggagctacaggcatgacgctgccttcagaactcccccgagcctgctccttcccagccttggctcgtgaggctcctccgaggaccacgggccttccacggcgtagccctgccacgaagcctccccatgtcttgcctccagcatcacctggccgagacggacctagggcgtccttctccagcatcatctggccgagacggacctagggcgtccttctccagcatcacctggccgagacgggcctagggcgtccttctccagcatcacctggccgagacgggcctagggcgtccttctccagcatcacctggccgagacgggcctagggcgtccttctccagcatcacctggccgagacgggcctagggcgtccttctccagcatcacct

SEQ ID NO: 82290 - DNA, 574 bp, Homo sapiens
agcacacactgacaagacaaaaagctcaggaaaaggcagaaaaattactcctttataatcaagtattatatataagtcagtgctcataattttgctcaagaaaatattgacttacattcaaaatatatctgttctggcatagagagattatgttgttaaaatcatgttattgaaaaaagttatttcagtggggaaagaggttagttaacaaagagattcacagtaacaaatcctcctttctggagggactcttcctgaccctgagctgcacaactttgcaacaaattaaagcctaaccgaagatgacctcacaatggcaatttagaactcatgggagtcaacttacataaacggtatttgatttctgataagatagtggaattattggttatagatgacaaaataagtatgtttaaagtgatgatggacataaaaaagttttaaatataaaacatgagaaaagaaggagatactattcaaaaagactggcaaatttgaaaaactagaaataaaaaaaaaactcggtgggggctgtgtgcagtggctcatgcctgtaatcccagcattttgggag

SEQ ID NO: 82291 - DNA, 768 bp, Homo sapiens
aaaagatcttctaccttctacccttgctgccttggaaacctgggaccaccatgctgtgaagactccagggacatgaggccatggaagaaagtcccaacaaacacaaccaccccagccatttagcctgatcccccacactgagtctgttattggtgttcttgtaatctcccaggatagaaatcaagagagatcaccagccacagcagcaaagaaaaagagaaagcttcatttagctggtgcacagggaaaggcagcaccatggaagtagttaacagttctgcagaacattttagaaatggtaacataagtataaacaacaaaacagtgagattctgataccaacttccagttcctcctcaccaagacttcgtgaaaactcttcagctcatctggcaaaacaaacaggcaaagacgcagataccaggacacttccttttgaacacttggctgcagaagctaagagacatgggatacgcgaattgattcttacataatatgagagatatagggctggaccacacgtgattcccgtggcacgctgcttctgagcactctacagccgccctctagccaaacccagcaccggtcagatggggagaaaccagagataggaaagtgctcgcacgtgggaggtcacagtggagcctccgtgagaaccttcaccagaagaaggttacaggccatgaactgcagactcaggaagataaattggcaaagcagcaccgcgatggaagagctcctggcagcaatgtaaatactggagcccag

SEQ ID NO: 82292 - DNA, 1019 bp, Homo sapiens
cactgtgacggatgagtggatatttctttgtaccctgagctctttcatcctaccttggtggtcaaatgtgagagcaagtgctttggggctcagagggcatcactccaagcattctgcatggagtctgttgtggtgaatgttcttgctggcatcttgatcaaggactttgtcatcattagccatcaaatgcttgttggtccttctcaaccctgtaatgttgatacttaaaaaactggaaacatcctgacagaaacagtcgagaagtggttgtgtgagctctggttatcgcattacagttaaagttggcagataggttctgtattcagtgccccatcaaaaacagaacacagactatataaggggaatattgtttgtaagtaactctgtgggctaattgtgcaaataggtgctagaatgctgggcagcctttttccttcttcgtggctttgttgcattttattgtattgttgtattgcattttattgtaatgacagttactccttttgataagatgatctcagtagataggctgaattgtcctgtttaaggctacttttctcctctgaatctaaaggtgttcgctgtcagagctagtacggagttttgaatttggcactgtgttgcctaaccgtcttctccccccgccccatccccgcataggcaaatagttttactagtttgacatttaatcaaaatttaaacatggggccaaggaaggtcctccaggaagcattagtatgaaaaatattgtaaacagtagctttgttctagccacacaatttggatttctcaagattaactgtctgtacataaacactcttgaatagctatgtattaactttcccctactttgagctggaaatagcttctcttctccagttgatgtgaatgcaggggtagtgtaccctacatggactgtgtattactcctttaagattgttggtcttgctgctttgttctctcagtgtaaagcacaagtcacagaaccatggtttaccttaactagagccctcctttca

SEQ ID NO: 82293 - DNA, 325 bp, Homo sapiens
gttgacctgatttgagactaaattttattttaccttcctatctatctgaatccaaagcctcctctgtcagtcatcaacagagcccttgctatcgcctaccccgaacctctttcttcttagacaaatagcaatcccagcaataaggatgtactctgtaactcttggataattttccaaagatggaatggactaactagggaagcaaggagttcctcatcactgaagaggagttaaggaagctgggtgatcatttgtgaactatgtacgaattaagtaagtaaataaaaatcatagctatcatttatttagtgctaggcacaatgtt

SEQ ID NO: 82294 - DNA, 439 bp, Homo sapiens
acacatacaaaaaaggcctcatctgaacagtcattatcatcataaagatgacaggggtttgctggccacatctaaacaaaatgcaaatactgaaaaccaggcagccttccaattaaaaaaaaacaaaagactttcatcaagcaagaactgtataatgaagagtctgctgagactaaaatagttttgtgattttatcagatcaacatgagtgaaaaaagggggccagcctgggcaacatggcaagaccacgtctctactaaaaatcaaaaaaattaaccgtgtgtggatagtggtgtgcctagagtctcagctacttggaagcttgaggcaggaggatcgcttagagaggctgcagtgagctatgatctgccactgctctccaacctgggtgacagtgtaagaccctgtctcaaaaaattaaataaataaaaatgagtga

SEQ ID NO: 82295 - DNA, 314 bp, Homo sapiens
ttgtcttttatagtgccagcaaatttgtaccttctggaggcttttcaagattgtttcagagtgagactccatctcaaaaaaaaaaattttcttgccccacccatactcagcctttgactcttttagtgtttaatagtttgattaattgttaagttgtggtcataaatattaagattatggagtttaatataagtcctaaaaagcttagtatttgaatataatagaaatggtagatgcacctaatggggaactttcaaacctgcacatttgtattctttttccaaagcagggatctgtcctttccttacagaatg

SEQ ID NO: 82296 - DNA, 323 bp, Homo sapiens
  misc_feature (21)..(21): n is a, c, g, or t
gtcctaacccccaccgtgtangtcatactgcacacacatgtggctatacacatgtgcttcctttgccttgctactaaaacttcgacttgtgcctgtactccctgtaccccaagatcactccactgcctccagcctgggtgacagaatgagatcctgtctcaaaaaaaaagatataaccatggcagttagccaggtgtggtggtgcatgcctgtaatcccagctatatgggaggttgaggcaagagaatcgcttgaacccaggaggtggaggttgcagtgagccgagatcgtgccactgggcaacaaagcgagactccatctaa

SEQ ID NO: 82297 - DNA, 465 bp, Homo sapiens
gttaaaaactatttcaaattatacactgtatgtgttcttatcctgaatttatttttttcttcaaggttttgtctctgatttttacttttttcttgcttccagaaagagaccaagaatgataagtgttaaaggggaaaagtttaaaggggggaaaagttactgtagttttctaccacattttaagacctatgggaataaagtttattgctatgctaatagtttactaggaaacttagaaagaattatgtatagttcagtttgcaaataaaatatattgaaagaaacatctgaaatattcttccctaaactgcaaaaaatgacgaataaacaagtctctaaaaaagggaaaagacctcatagttaccctccttattactaatttgaagttttaatggcatttatttgacacataatattaaaaaaaattggaacacttattagatgaatcatttgagctaggagaga

SEQ ID NO: 82298 - DNA, 294 bp, Homo sapiens
  misc_feature (274)..(274): n is a, c, g, or t
caaaaatgccactttgctagtatccacacaaatgttttgattggcagttgtgagacttttttgctaatacatctattagaagtattgttttcaaatcctggttctgccatttagtagccgtgtgacttttggcaagtggtttaacctcaggttttcatctgtaaaatgaaggttagtgagtaattgtatttatttatatttttttatttttgagatggagtttcactcttgttgcccaagctcatgtcattgcactccagcctgggcaacaagngcaaaactccctctcaaaac

SEQ ID NO: 82299 - DNA, 517 bp, Homo sapiens
ttgtgggagttcagtcaggctggtgggaaaaactttaagatgaagttataggatatagacacaaatcttcttggaaggctggaaggttttgcaaaagtctcaggatagggttatggctgaaagctgcctaatccttaccttgagtaaatggcttaaagtaggtacaaaggaatgcagtttatctaaatagcttgtttactcatgtgatcctaagaccaacctttgatcaacctcgggtgcataactgctctctactaggggtgtcgggaaccaggtcaattttcctatagtggtgtttactcaaagcctttgtcattgaatgtgtgctgaataaatgccggcagggccagtgagtcagggcctcggctgcaactctttacagcactctccttggagtctgtaagtggcgcagatgctcagctggactgacaggcatactatctgtgtcagtgtatgttattcatttgttgctgggtcagggtctgtgagttagatccccgcagtgcatacatgtctt

SEQ ID NO: 82300 - DNA, 152 bp, Homo sapiens
gtgacatttttacaccctaaaagggcagttgcaaacttgtgaaattttaaggtatagtgatagtgtttttctaagaggaatgaggttaaaaaaaaatttttaactgaataaaattcaaaataaagcacttaactgtgccaatgttagaaaaa

SEQ ID NO: 82301 - DNA, 229 bp, Homo sapiens
accgcacccagccagaacagactcttttacgtctggtaacaaacatttacactcattgttctctccctccaaagcctgttacctggaggcttcacctgcataaaaccttggtctccacaaccccttatctcaacccagatgttccaaagtttttagacgataacgtaactctttcagccaattaaaaaaaaatttttttcttttgacacagagtcttgctctgtcacct

SEQ ID NO: 82302 - DNA, 428 bp, Homo sapiens
gtgtacatttcagctatcgtagtgtcagctctttggtatctctttgtttttatgtccactatgttttgttgatgtctcctcttagtggttggtcagtaaatctgcctacctactgtttttttccaagcttagtgctgattttgtatatatatttgcttaaaatgacaactcaactaccccaaacacaatatagattatataaatttgagtactagatttcacgtgttttattctagcatagacagttcgttagtttttcatcaaagcttctttatccttagaataaacaattctagcatatcataaatcattctaacccagagaaaattagaaaccatgaagcagataaacaatatagttagctagaagagtgtgaactacctgacagcctgataataagagaggagaaagggaagaaacataaactt

SEQ ID NO: 82303 - DNA, 747 bp, Homo sapiens
cggtggacccctccttgtccagcacgctgcctcccgcctgctgcgacctcactctcttctgctgtcctgggacctcgtgggcctcctcccgggtccccttcctgctcctcatcctctgtttggccgtctggttgttagagcgctccccaggcctcaggaggatgaggaataaatgaaccaccccggtcccccaggctccccttcattcattcaaccagcgagtgttcccagggagctcactgtggatggggctccccatgggagctgcagacacagcagggagcaaagccgcccccgcctcctgagctcacctcatggtgggagacaaaatgcaaataaatgcatcgtgtccaggagtgcaacgtgctgtaaggaacataaaccagggaaagggcagagagtgtggggcagtggggccagtctgaatggaaggggagggctgtctgctcagctgtcatctgagaagcctggacagagtggggcacacgatcctctgatggacgagcccctgcaggcagaggaaacagccgtgcaaaggcccccaggcagcagcgagctcttgcaggaaggcctgtgaggctgcagccaaatgggcaaggtcagagtgaggagcagaggccagaaccacagggagggagcggccagaccctccacggccttagggcgtccctgagattccatcaggaaagggatgtaatcggatcaccccgggaacagtgaggaaaattgactccaggaggtcagggg

SEQ ID NO: 82304 - DNA, 716 bp, Homo sapiens
tcaaccccttgcctaggactgttgatattcatgaacccacttaaagacctgaaaacaattataagctccaaaatgaagacatccgcaatgccaacacgattaactgcgtaattgaatatgtataaaataccacatgttgtcactttattcttaaatttaatattcaagaaatcactataacactttagaataatttgtaggatatattttcttcttttgaaaggtttccagagtgtgcgtgagcaatatcattgccaatagttaattaaatgagtgacttgtagcctcgtcatttcaaaagcaaaattataaaaattctttcaagttcttttggagcaaaagtagatttttatgtgagatgtggacatattttaatatttttggtatgatatgggatggggcctcataaacacacattcagagagtttaccaccaccgaatgcttttgcacagggcacacaattggaaaaaataaaatatgccattcaaagttgggtctttaacagctcaaagatggtgaaaggctttcagggcctctctccattgtgtgactgtctctgaagggtgtagtctacttcctgctacaccagaattgtccttagggaacttgaggacagtagattctactctgcctgaattcaggtgaggccaatggtgagctgctgcatccagttgcataggatgtgcactgtgtaagggcaccacataccaagggg

SEQ ID NO: 82305 - DNA, 131 bp, Homo sapiens
cagttaccccagaattccaggtccctatggctatgggcaaatgggctgagcacccccaggctaatgcctccaaaatctcccctttcgctatcttgaccaagttatgtaacacatgtgctaatatctttctt

SEQ ID NO: 82306 - DNA, 382 bp, Homo sapiens
atttcaaaaaacacacggtttcaaaattcttccactcatacaacttgtggttcatcaaactaagggaataaatcaagaatgaagatagcatgagattcagaaattggaggattcagtgcagaagagaggcaaaggtaatcccagaacaatgaagttgaagaaagggataacacctgaataccagtcccatacagcagccagtcctgagttttggaggagaagggaggattccaggggaaggtctttcagagaaaaaagataagttgcaataatggattatcctatatgttctattgtagagagttatagaagaattaatgacaagaacacagaaaattgtgcagttttcttgaagaggtgctcaattatacaaaaagaaaaa

SEQ ID NO: 82307 - DNA, 257 bp, Homo sapiens
cctattaccatgtgtagaaaacattgaagacttgtaagcaagtgagaatcatgaataggccctggttctctttagaaaatgtattacatttggaagctcaagagattgtattggtaatagtttgcattagggtggtgacgtaagggacatttaagagaactaacttatggttcagcgtggcagagtagagaggaaaatgtcaagggtaactcagatttcttacttgagcagtaaagtagatgatgtgccattggctg

SEQ ID NO: 82308 - DNA, 475 bp, Homo sapiens
ctggctggcttgtaaaaacccaggaaaaggttttgtgcctttatggtgaatgaaaaaaaggcaggatacacaattgtattatacattatgaccaggttaaaatgcctagaaaaccttagtatcaaacacaacaaaatcttaatgtcagttacctgtgtgaatcaggactgtcaggattttttattttctgttttatatttttctgtatttttcaagtactctgcaatgaagaggtgttatttctagcgtcagaaaaacaaaatcctttgtttagtacttgagaactaattgaactgtgggccccacccccttccctactctgtgtttcttctgggcccctggatctccctgccagggccttgttcccaggaggtggttgagaaatttcggtaaacgcatgacgtcttgcttgaagagtcagacaaataagtgattctagggcaggaaggagagccctagcccactctcaggtgga

SEQ ID NO: 82309 - DNA, 616 bp, Homo sapiens
ttcagcctcactggacttgactcaggggcaagaatcccttatccatgagcctaagccccacaccttgacctcccccatcatccacgtttgtggggcacaatctccctacatccccaggtaatattttccccaggtgagtgcctcaaggccttatgcaagtcatgagacctcagaagaactttcctgcccctctctgacctgccacctgcactcaggaggggacttcggcctatctggggcaaaaacactgtaatagtagcaagaggagccactgtcattacaccaagccctgggctcgtattaactgggctcccagccaagcaaataacctggcaggaaccagaaatctaacaatatcaactcttgttcctgaggcacttttcctttttcaaaacacattttacatcagttatttgatcctcagaataaacttgtgaaatactaccgtccccatttatagaagcaaaagatgaggcaaagagaaaagcagcctgcccaatgtcacacgagtctcccgggtcctgtttagggatctttccattgtacagcccttcctcactccccagagcagtgaggaagggtgtctggttcatttattcatgccaccaatgtcaga

SEQ ID NO: 82310 - DNA, 388 bp, Homo sapiens
aaagcagaaaggatataaagtttagtgtggaaatagagaattaaaaataattgagaaacacagcacttcgttgacttattcataaaataaagctttattaaaatgagaaatgtaaaacgtgatgttcctaatgaccttattccatacaagggattagtattttgacaaatatctttgtggaagtagacaaattcctagaaagacactgactaccacaactcattcaagaacaaagtgaagacaataaattggtaatttaaaaactctcacccctgcccctgacacacatgtaaattcccagttcaaatgtattcttttgtatattataccaaacacatgaaaattaccaattcgataaaaatgtcttaaaaacttggaagagcatgta

SEQ ID NO: 82311 - DNA, 369 bp, Homo sapiens
aacatgtcaaaaataactatattttataacaaaacatttagttaaaagaatggcaaatttctttaatacttgggttaggaggacacagctatactcatgtcttctgcatttaattcctcatggggtttttgaagtacatgaagaaatctagcctcatacaaatatgtagcaaaaaaaaaagacaagattatcttaatagccttttcagataagtgtggatagtcttctttgatgacttaccaaaatttgaaaaatggcaatttctgaaaggttggttgtgatgtgaaatctttgtttggtattctgttatattaaaaattaaaatcaattcatgtatcttgctatttgaatggatcttttacccatgta

SEQ ID NO: 82312 - DNA, 476 bp, Homo sapiens
ttgtgagccaggagggaagagaggctgttaggagattatttaatgggccaagttgcaggtagtagtgatgggaatgcagaggaaagcctctatggaatgaccaggtactgaccgcagtcaccctcctggatatttggctatggataaggagaaggagggatattcctaaaacaggtggaaattggaaaaaaaatccacaaatggaatctctcctttgtagaaggaggaacaggaatacatgcatctaacttataactcagatgattacaaggcaaacccttatttaaacatacactaaaagtcctcatgtaatatttgtccactttttgctttgagttatgcaagatgtgcttttgaaccactgccagcatcagatacttcctcactttctaactcacggcaagagagtgggcacctgctgtttcaggttggtttaatattggagggcgggcttttatgttcccagctggctcagc

SEQ ID NO: 82313 - DNA, 2672 bp, Homo sapiens
tccttcttcattctgcagttggtgccagaactctggatcctgaactggaagaaaatgtctatccaggttgagcatcctgctggtggttacaagaaactgtttgaaactgtggaggaactgtcctcgccgctcacagctcatgtaacaggcaggatccccctctggctcaccggcagtctccttcgatgtgggccaggactctttgaagttggatctgagccattttaccacctgtttgatgggcaagccctcctgcacaagtttgactttaaagaaggacatgtcacataccacagaaggttcatccgcactgatgcttacgtacgggcaatgactgagaaaaggatcgtcataacagaatttggcacctgtgctttcccagatccctgcaagaatatattttccaggtttttttcttactttcgaggagtagaggttactgacaatgcccttgttaatgtctacccagtgggggaagattactacgcttgcacagagaccaactttattacaaagattaatccagagaccttggagacaattaagcaggttgatctttgcaactatgtctctgtcaatggggccactgctcacccccacattgaaaatgatggaaccgtttacaatattggtaattgctttggaaaaaatttttcaattgcctacaacattgtaaagatcccaccactgcaagcagacaaggaagatccaataagcaagtcagagatcgttgtacaattcccctgcagtgaccgattcaagccatcttacgttcatagttttggtctgactcccaactatatcgtttttgtggagacaccagtcaaaattaacctgttcaagttcctttcttcatggagtctttggggagccaactacatggattgttttgagtccaatgaaaccatgggggtttggcttcatattgctgacaaaaaaaggaaaaagtacctcaataataaatacagaacttctcctttcaacctcttccatcacatcaacacctatgaagacaatgggtttctgattgtggatctctgctgctggaaaggatttgagtttgtttataattacttatatttagccaatttacgtgagaactgggaagaggtgaaaaaaaatgccagaaaggctccccaacctgaagttaggagatatgtacttcctttgaatattgacaaggctgacacaggcaagaatttagtcacgctccccaatacaactgccactgcaattctgtgcagtgacgagactatctggctggagcctgaagttctcttttcagggcctcgtcaagcatttgagtttcctcaaatcaattaccagaagtattgtgggaaaccttacacatatgcgtatggacttggcttgaatcactttgttccagataggctctgtaagctgaatgtcaaaactaaagaaacttgggtttggcaagagcctgattcatacccatcagaacccatctttgtttctcacccagatgccttggaagaagatgatggtgtagttctgagtgtggtggtgagcccaggagcaggacaaaagcctgcttatctcctgattctgaatgccaaggacttaagtgaagttgcccgggctgaagtggagattaacatccctgtcacctttcatggactgttcaaaaaatcttgagcatactccagcaagatatgtttttggtagcaaaactgagaaaatcagcttcaggtctgcaatcaaattctgttcaattttagcctgctatatgtcatggttttaacttgcagatgcgcacaattttgcaatgttttacagaaagcactgagttgagcaagcaattcctttatttaaaaaaaaaagtacgtatttagataatcatacttcctctgtgagacaggccataactgaaaaactcttaaatatttagcaatcaaataggaaatgaatgtggacttactaaatggcttttaattcctattataagagcatattttaggtacctatctgctccaattatatttttaacatttaaaaaccaaagtcctctacacttgatttatattatatgtggctttgctgagtcaaggaagtatcatgcaataaggcttaattactaaatgtcaaaccaaactttttctcaaaccagggactatcatctaagattaattacagtaattattttgcgtatacgtaactgctcaaagattatgaatcttatgaatgttaacctttccgtttattacaagcaagtactattatttctgattttataataagaaaatctatgtttaatcaactgaggcctctcaaccaaataacatctcagagattaagttatatattaaaagcttatgtaacataaaagcaagtacatatagtagtgactatatttaaaaaaacagagcataaaatgcttaaaaatgtaatatttactaaaatcagattatgggataatgttgcaggattatactttattgcatcttttttgtttaattgtatttaagcattgtgcaatcacttgggaaaaatattaaattattaacattgaggtattaatacattttaagccttttgtttttaaatttcttttgttccagagattgtttaaaaataaatattgacaaaaataatgttttatatcttaattctagtatctgttttatgcttgaaagcattacagatcatgatac

SEQ ID NO: 82314 - DNA, 334 bp, Homo sapiens
cggcacgaggacattgtaaagatcccatctctgacttgcttattggatcttccttgtctgcttgcagtggtgggatctttacaatgttgtaggcagacaaggaagatccaataagcaagtcagagatcgttgtacaattcccctgcagtgaccgattcaagccatcttacgttcatagttttggtctgactcccaactatatcgtttttgtggagacaccagtcaaaattaacctgttcaagttcctttcttcatggagtctttggggagccaactacatggattgttttgagtccaatgaaaccatgggggtaagtcttagatatatttgtca

SEQ ID NO: 82315 - DNA, 651 bp, Homo sapiens
gttgttctgcagaaaaacattaattattattattattggttttgagatttttgtttggtttttgtttttttgtttttcagaggcctttctttggagccctaaattttcttcaaggatggtctcattttactgaagagaaaattgatggcctaagaggttatgtgactttcccagtgatacatagccagtgactgacacaggcacagatagcttgcccagtcgcgtcccagggtccctcatctatagcttcctgcagttcctccctgcatgttgacctaaaaaagaacttaggagccaagacttaagaactctgcatttctggctgtttgaattctttcctgctcactgaggtttctgttatcttctctcctaggctgacacaggcaagaatttagtcacgctccccaatacaactgccactgcaattctgtgcagtgacgagactatctggctggagcctgaagttctcttttcagggcctcgtcaaggtgagatgatctagagaaaacttcacacgggagtgaacaaatgtttctttcaaagagattaagagttttcctaagcatgtgctctatttcgtagcatttgagtttcctcaaatcaattaccagaagtattgtgggaaaccttacacatatgcgtatggacttg

SEQ ID NO: 82316 - DNA, 320 bp, Homo sapiens
ggcgtgagcccgtgcctggccccaaaccgaaactcttagctcttaaaaactgagtccccattgtcccctttccctggtccctggcaaccttttttctactttctgtctctgtgaatttgcatatgctagatgtacctcatgtaagtagactcagacattatttatccttttgtgtctggcttattttacctagcttaatgttctcaaggttcatttgagttgtaccatgtgtcaaaatttggtacatatttttatattttatttttatattttatatatgtaattaatattttataaatattatatataatataaaatat

SEQ ID NO: 82317 - DNA, 382 bp, Homo sapiens
cccgtttggctaatggtgatgataaagagaggtgaaatctcttgcaaaggatcaggcacaggttatctgaccctaaagcaaaagcccagatgtaaagtttcctcagtgatgtttaagtgccatagctatcaaaacatcactattacggaaattccacaggaaacttaactttgttattgtgaaattgaaactctccaacactctaagcctccctttccctcattggaacagtggtttttataatgggattttgcttttgtttttgtttctgttggtttttgtttttaatgttaggaaagacaattgttctgttccacagtcttaatcttgaatttgatatcaaacctcaaacccctctgtagacacaccatctacctcaagg

SEQ ID NO: 82318 - DNA, 122 bp, Homo sapiens
cttgtgttcacatgggcaggacctgacatggctctgcatccaccaggcttgtcctgagctcagctgtcccctctcagagcgccacactccccctgggagctgctgccccgtatgccggggta

SEQ ID NO: 82319 - DNA, 819 bp, Homo sapiens
ggcttatacatataatacagcagtttatggaaaaagactccatggtatggtggaaaaaacacttttctaacagagcaacctggatcccagtcctggtctgccacggtttagcaacatgaccatgggtaactcacaaaaacactgagtctcagtttcctcatctatgaagcaaaacatccttatctgaggagtttttctttgtcaaattactatatcaccatgaccaatgcatacatatgtattacatatgatagtgatacgattattcctttcatatagatagacagaagatatagatagaaaatagataatagaagatattgatggacgaaagaagatatagacatgaatagatgatagaggatatagacacgtatagttgtgataatgtagcatagttttttcccaaaatgtgataaaataaagaaatgtttgacctaaagacttcccattttattgaaaagtatgaaatatattgaaaaatacaataaaactaaactgagccaaagttgttgcagcaactttacaattgcctaagttaaagtcgttttcaaatacttaagtggcaatatgcactaaaaaatagaatctttgaaatacaaaattgaagaaatgatgcactgaaagttataaaattatttgtgaattaaaaatacataaaacaatgtagtgaattaatctttaaatgtaacatatatttattcacttatttatttcattggtattcgtgcagcacctactatgtgccagatgttgttctgggggtaccacaagagattaaaaagaataagtccaaaaaacaaaacaaacaaaacacac

SEQ ID NO: 82320 - DNA, 439 bp, Homo sapiens
agctacccttcacccaaaagaggggtgggggtgaacactcagacaatctgagagggggtagtctaatagagccatctggagaagggagtggcagagccagtctgtgctgaccagtctgtgtcccgggacgcatccccacccgtctgtccaaggctttgtcccaccagctgcagccagcagcctcagaacccaaaatgagggtagcatagataagactgctgagccccctttctgtggtctttcctttccatgacctagagaaaagagctttgctggagggagacccccaaaaagaattagggtgctaacatcccaccaaaagcatcatcccacccaaaatgttgcttttcattctatgtcaataatttaaggtggaatttctctcaccctgtggagatgaaagtggcaaaaggttgtcccagcagtgttgggggatggg

SEQ ID NO: 82321 - DNA, 396 bp, Homo sapiens
tgccatctcggactggtggcatggtcttgggagtggtggcatcctctcagatcagtgggtgccctcttggatcagtgggcaccatcttggtttggtttggtgggtgtcaactgacacagagccactgaagtctggctacttcatggctgaagggaggttatgagctgagtcaggatgagcaaggcagctggggtgtagcataaaagagatggttgtatcaccgtcctcctcctctggtctttggaagggtgcagtacacaccaggagggcatgctgagttgttgacttcccaatggaaacccagggcattggtggcacatcgagacaccccaggtttgggcccagaattccaaacacgctcagctgcccatctgggcagtcatgggccagcctgcc

SEQ ID NO: 82322 - DNA, 242 bp, Homo sapiens
tcggcctccctacgtgctgggattacaggcgtgagccaccacgcccagccccttcctagctttctgatggtcatgtttttagtctgtctccttagatctgcccactaagttgttttataaaatctgaaccttaacagataaatccactgcataagtttactgtatccctcctggcctccacaggtctgagtttctgagaccccctaaaccactgactgaagcatgtcctccattgcacagca

SEQ ID NO: 82323 - DNA, 843 bp, Homo sapiens
cttatatagataatgtatgtcataggcatacatggctcagctactgaggcaatcttctctctgtaaaattaaaataaaagttttgccagcaattaatctccttagccgttagaatagattatacaccagtccttggagtgcaaggaagtgagcatgtgagagtgtttgaagacctggcactaaatgattacaatgtcaccaggagagagctcagttacaaaatagtacagttggagcagcttatttcttctcaagtacaattactttgttctcagaaccaatgtaatcattggagcacgtttatttcttctttgttctcacattgtgagtatgtgttagcatgtagcctaatgcaaatatggtaaaatatattatatttgaagctagctagcaatagtttgatatattttcagatatgaagatataaaaaacaaataaaaaacttttaaaaagtcattgctaactttgtaaaaacgtaatatatactcaagactcagcctgctgggctcaggttctggccctggccccatcacagaacagctgtgtgacttcgatacaataacttaacctctctgagactatgtatcataatttataaaatgggaagagtgaaagtgtctacctcacaggtttgccatagagattaaatgaattaaccattattgataaatgttaataatggtgtctaatacatattgaatgtttaagtgtttgtttgcaagtattttcctgacatttttgaaatatatgtgttttatatgttccctaaacttttgtatatcttcttacctcatttattagccacaatttgatcatctgaattcctagctgaataactggtac

SEQ ID NO: 82324 - DNA, 546 bp, Homo sapiens
ttcagacttatgtatccaaccacctcctagacctctgtatctctatttgtcccacatatatcttcattatgtacaaaatagatcttatcttcccttgatcagttatcgactcctttcaatgcttcctcccaaacattgtttgaaccttcttctccttctcatccctactgccactgacttagcaataattttaaggccaggggttagccaactatatagcttgtgggttaaatccatcctgttgcctgtttttatagggtccgtgagctaagaatggttttaacacttttcaaggacgttttaaaactgtctttaaacaaaatattttgtaccatgaggaaattatatgacattcaaatttcagtgttcataagttttattcaaacagccatgttcatttgtttatgtactatgactgtttttgtgctacagcggcagagttgagtaattcgacagagaccatgtgaccacaaagcctaaaatactatctaattcttatagaagaagtttgttgttctttgttctatagtaaacaggatttttaca

SEQ ID NO: 82325 - DNA, 287 bp, Homo sapiens
cacaccttaacctctgaaagtgcagggattataggcatgagccaccatgcccagcctacttgtgctttttttaagtttggaatcctttgactcctttttgggctgccagaatcctactcgttatccaaggtttagttcagacaccgttcacttcgtagccttttgtctaagatcaggtatagttctatcacgccttccatgaacacctcctacctctctgtgaggattaatcaactctatgcttgtgctatagtgtcattttgtgcagcttgtgtctggtgtgttat

SEQ ID NO: 82326 - DNA, 442 bp, Homo sapiens
tctcccctcccccctgcacaaggcaggccaaggctggtctggagggctgccggggacacaggccacatccagacctctgaggggaagacccttcttggtctccgctccctctgccactgctgacctggtggacgaggaggagccccttgccttagcccggaaggcggccaccgtgggtgcctgtgaggagccaggggatgtggcgcagcttcgtgcagcacagctgtccgctggggtgggcgtgggggcaggcaggccatctcagagtcccccggatatcccttctcctctgctcccgaataactcagccctgctcagacagggccccacattccaaaacactttctccgttgccagaaagaaagcaagcccagtatctgcctacccaccagtgcccatctccaaagggcagggtacccgagtcctgtgcacaggcccatcg

SEQ ID NO: 82327 - DNA, 296 bp, Homo sapiens
atgggggttccctcttatgtggtttattaatgtgttcagaaaacggggtaacttattgaatagagatgcatgcagtgtttctcaaggggagtcaggttgggaattgttttaagtagatgttagatggggtgcttattttgttccacgtaaatgcgtatagccaataaaagttcatagatcgatgtactttaaactttttgtcagctgagttccaaggaaccatgtaccactgatacctgctgcttgctcttttctggcatcagggtgactccaaatcttctagcagcacattccca

SEQ ID NO: 82328 - DNA, 464 bp, Homo sapiens
ttatattctcaatcataacactttatttcctgtatagcacatatcaaaatttgtgatcatttcatttgttgaatattttacctcgtggcaaaatcacacgccatcctccaaggggcgagacccctcagtgtgaaaggggcaagagacacagaacaagagtgacaaacgcataggaaagcccagaggccgctgccttgaccacagtgggtcggtctgagcagttcagtggttaggtctcttaaccaagaaagatagagcaaaccattcatgctcatgctggacttctggtttccttctttttagtcaactaggttcaaccctgatggtccaagaaggatatgccattttcatcctaagaacctctctaggaaccccaagtgggctccccacttggtatttttgctaagcaatcactgttggggggggtacaattacaggcagaaaggatctgagccccacccctc

SEQ ID NO: 82329 - DNA, 3365 bp, Homo sapiens
gtaggaatcgcagcgccaacggttgcaaggcccaagaagccatcctgggaaggaaaatgcattggggaaccctgtgcggattcttgtggctttggccctatcttttctatgtccaagctgtgcccatccaaaaagtccaagatgacaccaaaaccctcatcaagacaattgtcaccaggatcaatgacatttcacacacgcagtcagtctcctccaaacagaaagtcaccggtttggacttcattcctgggctccaccccatcctgaccttatccaagatggaccagacactggcagtctaccaacagatcctcaccagtatgccttccagaaacgtgatccaaatatccaacgacctggagaacctccgggatcttcttcacgtgctggccttctctaagagctgccacttgccctgggccagtggcctggagaccttggacagcctggggggtgtcctggaagcttcaggctactccacagaggtggtggccctgagcaggctgcaggggtctctgcaggacatgctgtggcagctggacctcagccctgggtgctgaggccttgaaggtcactcttcctgcaaggactacgttaagggaaggaactctggcttccaggtatctccaggattgaagagcattgcatggacaccccttatccaggactctgtcaatttccctgactcctctaagccactcttccaaaggcataagaccctaagcctccttttgcttgaaaccaaagatatatacacaggatcctattctcaccaggaagggggtccacccagcaaagagtgggctgcatctgggattcccaccaaggtcttcagccatcaacaagagttgtcttgtcccctcttgacccatctccccctcactgaatgcctcaatgtgaccaggggtgatttcagagagggcagaggggtaggcagagcctttggatgaccagaacaaggttccctctgagaattccaaggagttccatgaagaccacatccacacacgcaggaactcccagcaacacaagctggaagcacatgtttatttattctgcattttattctggatggatttgaagcaaagcaccagcttctccaggctctttggggtcagccagggccaggggtctccctggagtgcagtttccaatcccatagatgggtctggctgagctgaacccattttgagtgactcgagggttgggttcatctgagcaagagctggcaaaggtggctctccagttagttctctcgtaactggtttcatttctactgtgactgatgttacatcacagtgtttgcaatggtgttgccctgagtggatctccaaggaccaggttattttaaaaagatttgttttgtcaagtgtcatatgtaggtgtctgcacccaggggtggggaatgtttgggcagaagggagaaggatctagaatgtgttttctgaataacatttgtgtggtgggttctttggaaggagtgagatcattttcttatcttctgcaattgcttaggatgtttttcatgaaaatagctctttcaggggggttgtgaggcctggccaggcaccccctggagagaagtttctggccctggctgaccccaaagagcctggagaagctgatgctttgcttcaaatccatccagaataaaacgcaaagggctgaaagccatttgttggggcagtggtaagctctggctttctccgactgctagggagtggtctttcctatcatggagtgacggtcccacactggtgactgcgatcttcagagcaggggtccttggtgtgaccctctgaatgggtccagggttgatcacactctgggtttattacatggcagtgttcctatttggggcttgcatgccaaattgtagttcttgtctgattggctcacccaagcaaggccaaaattaccaaaaatcttggggggtttttactccagtggtgaagaaaactcctttagcaggtggtcctgagacctgacaagcactgctaggcgagtgccaggactccccaggccaggccaccaggatggcccttcccactggaggtcacattcaggaagatgaaagaggaggtttggggtctgccaccatcctgctgctgtgtttttgctatcacacagtgggtggtggatctgtccaaggaaacttgaatcaaagcagttaactttaagactgagcacctgcttcatgctcagccctgactggtgctataggctggagaagctcacccaataaacattaagattgaggcctgccctcagggatcttgcgttcccagtggtcaaaccgcactcacccatgtgccaaggtggggtatttaccacagcagctgaacagccaaatgcatggtgcagttgacagcaggtgggaaatggtatgagctgaggggggccgtgcccaggggcccacagggaaccctgcttgcactttgtaacatgtttacttttcagggcatcttagcttctattatagccacatccctttgaaacaagataactgagaatttaaaaataagaaaatacataagaccataacagccaacaggtggcaggaccaggactatagcccaggtcctctgatacccagagcattacgtgagccaggtaatgagggactggaaccagggagaccgagcgctttctggaaaagaggagtttcgaggtagagtttgaaggaggtgagggatgtgaattgcctgcagagagaagcctgttttgttggaaggtttggtgtgtggagatgcagaggtaaaagtgtgagcagtgagttacagcgagaggcagagaaagaagagacaggagggcaagggccatgctgaagggaccttgaagggtaaagaagtttgatattaaaggagttaagagtagcaagttctagagaagaggctggtgctgtggccagggtgagagctgctctggaaaatgtgacccagatcctcacaaccacctaatcaggctgaggtgtcttaagccttttgctcacaaaacctggcacaatggctaattcccagagtgtgaaacttcctaagtataaatggttgtctgtttttgtaacttaaaaaaaaaaaaaaaagtttggccgggtgcggtggctcacgcctgtaatcccagcactttgggaggccaaggtggggggatcacaaggtcactagatggcgagcatcctggccaacatggtgaaaccccgtctctactaaaaacacaaaagttagctgagcgtggtggcgggcgcctgtagtcccagccactcgggaggctgagacaggagaatcgcttaaacctgggaggcggagagtacagtgagccaagatcgcgccactgcactccggcctgatgacagagcgagattccgtctt

SEQ ID NO: 82330 - DNA, 1425 bp, Homo sapiens
gccggccctcccggaagcgcagagctccgctggtgccacgtttatccccttacatcctcctaggacccggtcggtagtcgtcgccccagcccgccgggggcgcagcgcccgagccgcggccctcgagacgggaccgagagcatcatgggcagcactgtcccgcgctccgcctccgtgctgcttctgctgctgctcctgcgccgggccgagcagccctgcggggccgagctcaccttcgagctgccggacaacgccaagcagtgcttccacgaggaggtggagcagggcgtgaagttctccctggattaccaggtcatcactggaggccactacgatgttgactgctatgtagaggacccccaggggaacaccatctacagagaaacgaagaagcagtacgacagcttcacgtaccgggctgaagtcaagggcgtttatcagttttgcttcagtaatgagttttccaccttctctcacaagaccgtctactttgactttcaagtgggcgatgagcctcccattctcccagacatggggaacagggtcacagctctcacccagatggagtccgcctgcgtgaccatccatgaggctctgaaaacggtgattgactcccagacgcattaccggctgcgggaggcccaggaccgggcccgagcggaagaccttaatagccgagtctcttactggtctgttggcgagacgattgccctgttcgtggtcagcttcagtcaggtgctactgttgaaaagcttcttcacagaaaaacgacccatcagcagggcagtccactcctagccccggcatcctgctctagggcccctcatgccccaggctggagcagctctcctaggtcacagcctgctgggctgggtcgcgtagcccagggtggaggcagaacgatgctgctgtggtagccctttgcctttcatgcccatgcttgattcttgcacctcagcagctgaaggtctcagagaccagtaatcagaaggcatccgactgcattaagtgtgcagcgctgaaaagacatttacaactaggccagggattagccactgtgggagggtggacaggcaatggttcagtggcctggctgttggcaggaactccaagtgcccaggcctcttgggcagcttagggccctgcctctgtttcatgatgcatgggtcatttgtcttgggtgtcctatcccatatggagaagaaaggggctctaagttctggctcttctttctttggggttctctgtacctgaggaaaccaggccctgggtgactttgcagatctgctcaccctcggtgagcaacagtgtcagccatgcaagcaggacagaatggtgactgggtgcccttggtgagctgtgtatttcctaggaggtagaaaactgtgggaaactgtggctaataaaaactaagtgtgagcgtcc

SEQ ID NO: 82331 - DNA, 1466 bp, Homo sapiens
  misc_feature (1441)..(1441): n is a, c, g, or t
  misc_feature (1449)..(1449): n is a, c, g, or t
  misc_feature (1452)..(1452): n is a, c, g, or t
gccggccctcccggaagcgcagagctccgctggtgccacgtttatccccttacatcctcctaggacccggtcggtagtcgtcgccccagcccgccgggggcgcagcgcccgagccgcggccctcgagacgggaccgagagcatcatgggcagcactgtcccgcgctccgcctccgtgctgcttctgctgctgctcctgcgccgggccgagcagccctgcggggccgagctcaccttcgagctgccggacaacgccaagcagtgcttccacgaggaggtggagcagggcgtgaagttctccctggattaccaggtcatcactggaggccactacgatgttgactgctatgtagaggacccccaggggaacaccatctacagagaaacgaagaagcagtacgacagcttcacgtaccgggctgaagtcaagggcgtttatcagttttgcttcagtaatgagttttccaccttctctcacaagaccgtctactttgactttcaagtgggcgatgagcctcccattctcccagacatggggaacagggtcacagctctcacccagatggagtccgcctgcgtgaccatccatgaggctctgaaaacggtgattgactcccagacgcattaccggctgcgggaggcccaggaccgggcccgagcggaagaccttaatagccgagtctcttactggtctgttggcgagacgattgccctgttcgtggtcagcttcagtcaggtgctactgttgaaaagcttcttcacagaaaaacgacccatcagcagggcagtccactcctagccccggcatcctgctctagggcccctcatgccccaggctggagcagctctcctaggtcacagcctgctgggctgggtcgcgtagcccagggtggaggcagaacgatgctgctgtggtagccctttgcctttcatgcccatgcttgattcttgcacctcagcagctgaaggtctcagagaccagtaatcagaaggcatccgactgcattaagtgtgcagcgctgaaaagacatttacaactaggccagggattagccactgtgggagggtggacaggcaatggttcagtggcctggctgttggcaggaactccaagtgcccaggcctcttgggcagcttagggccctgcctctgtttcatgatgcatgggtcatttgtcttgggtgtcctatcccatatggagaagaaaggggctctaagttctggctcttctttctttggggttctctgtacctgaggaaaccaggccctgggtgactttgcagatctgctcaccctcggtgagcaacagtgtcagccatgcaagcaggacagaatggtgactgggtgcccttggtgagctgtgtatttcctaggaggtagaaaactgtgggaaactgtggctaataaaaactaagtgtgagcgtccaaaaaaaaaagtcgancggccgcnaanttagtagtagtagt

SEQ ID NO: 82332 - DNA, 919 bp, Homo sapiens
  misc_feature (823)..(823): n is a, c, g, or t
gccggccctcccggaagcgcagagctccgctggtgccacgtttatccccttacatcctcctaggacccggtcggtagtcgtcgccccagcccgccgggggcgcagcgcccgagccgcggccctcgagacgggaccgagagcatcatgggcagcactgtcccgcgctccgcctccgtgctgcttctgctgctgctcctgcgccgggccgagcagccctgcggggccgagctcaccttcgagctgccggacaacgccaagcagtgcttccacgaggaggtggagcagggcgtgaagttctccctggattaccaggtcatcactggaggccactacgatgttgactgctatgtagaggacccccaggggaacaccatctacagagaaacgaagaagcagtacgacagcttcacgtaccgggctgaagtcaagggcgtttatcagttttgcttcagtaatgagttttccaccttctctcacaagaccgtctactttgactttcaagtgggcgatgagcctcccattctcccagacatggggaacagggtcacagctctcacccagatggagtccgcctgcgtgaccatccatgaggctctgaaaacggtgattgactcccagacgcattaccggctgcgggaggcccaggaccgggcccgagcggaagaccttaatagccgagtctcttactggtctgttggcgagacgattgccctgttcgtggtcagcttcagtcaggtgctactgttgaaaagcttcttcacaagctgagcagttctagtacagctgctggctgtcgcgtaccaggtgaggcgacgatctgtgngtagccttgcttatgccatgctgtctgcactacagtaggctagagacatatagaggatcgctgatagtgcacctggcatacactagcaggttactg

SEQ ID NO: 82333 - DNA, 165 bp, Homo sapiens
gcggccgcctactactactactgctcgaattcaagcttctaacgatgtacggggccatgcaagcaggacagaatggtgactgggtgcccttggtgagctgtgtatttcctaggaggtagaaaactgtgggaaactgtggctaataaaaactaagtgtgagcgtcc

SEQ ID NO: 82334 - DNA, 2071 bp, Homo sapiens
gccggccctcccggaagcgcagagctccgctggtgccacgtttatccccttacatcctcctaggacccggtcggtagtcgtcgccccagcccgccgggggcgcagcgcccgagccgcggccctcgagacgggaccgagagcatcatgggcagcactgtcccgcgctccgcctccgtgctgcttctgctgctgctcctgcgccgggccgagcagccctgcggggccgagctcaccttcgagctgccggacaacgccaagcagtgcttccacgaggaggtggagcagggcgtgaagttctccctggattaccaggtcatcactggaggccactacgatgttgactgctatgtagaggacccccaggggaacaccatctacagagaaacgaagaagcagtacgacagcttcacgtaccgggctgaagtcaagggcgtttatcagttttgcttcagtaatgagttttccaccttctctcacaagaccgtctactttgactttcaagtgggcgatgagcctcccattctcccagacatggggaacagggtcacagctctcacccagatggagtccgcctgcgtgaccatccatgaggctctgaaaacggtgattgactcccagacgcattaccggctgcgggaggcccaggaccgggcccgagcggaagaccttaatagccgagtctcttactggtctgttggcgagacgattgccctgttcgtggtcagcttcagtcaggtgctactgttgaaaagcttcttcacagaaaaacgacccatcagcagggcagtccactcctagccccggcatcctgctctagggcccctcatgccccaggctggagcagctctcctaggtcacagcctgctgggctgggtcgcgtagcccagggtggaggcagaacgatgctgctgtggtagccctttgcctttcatgcccatgcttgattcttgcacctcagcagctgaaggtctcagagaccagtaatcagaaggcatccgactgcattaagtgtgcagcgctgaaaagacatttacaactaggccagggattagccactgtgggagggtggacaggcaatggttcagtggcctggctgttggcaggaactccaagtgcccaggcctcttgggcagcttagggccctgcctctgtttcatgatgcatgggtcatttgtcttgggtgtcctatcccatatggagaagaaaggggctctaagttctggctcttctttctttggggttctctgtacctgaggaaaccaggccctgggtgactttgcagatctgctcaccctcggtgagcaacagtgtcagccatgcaagcaggacagaatggtgactgggtgcccttggtgagctgtgtatttcctaggaggtagaaaactgtgggaaactgtggctaataaaaactaagtgtgagcgtccaaaaaaaaaaaaaaaaaaaaaaaaaaaaaaaaaaaaaaaaaaacaaacaaaaaaacaaaacaaaaaaaagaagaggagggcggcggcgcgcgctgaacaagagagatttcccccgcgagaggagagcgcccacagagacgtcagcgagcgcacccgccgactttttgtgtgagcaaccaacggcggtgcgcccccatagaaggagcagcgcagctattaatacagcgcccgaggcgcgggggggggccgcgcgtgttgtaaaccaaccgagcgccgcgcagcgagagaggcaaaaacgacagcgcgcccgaccgcggggaaactatcgggggggaggaagagagaaccaccactatcagcgcgggggggggggggggagaccacagctgggggggccgcaaaatcccccatcttctccacgaaagattaatatagaagaccagccgcgccgggggggagacataaatgatctaaaacaaatctttctctacaaaggaggagcgtctagagtgagtgcgtgtgtacaaaaccaccacacgcgggatatatatgaagtcgccgtcagcgctcgagagaataatattgtgcgccctcagcaaggaacagccagctacacattctggcacaaaaatttttttttcacgga

SEQ ID NO: 82335 - DNA, 1465 bp, Homo sapiens
gccggccctcccggaagcgcagagctccgctggtgccacgtttatccccttacatcctcctaggacccggtcggtagtcgtcgccccagcccgccgggggcgcagcgcccgagccgcggccctcgagacgggaccgagagcatcatgggcagcactgtcccgcgctccgcctccgtgctgcttctgctgctgctcctgcgccgggccgagcagccctgcggggccgagctcaccttcgagctgccggacaacgccaagcagtgcttccacgaggaggtggagcagggcgtgaagttctccctggattaccaggtcatcactggaggccactacgatgttgactgctatgtagaggacccccaggggaacaccatctacagagaaacgaagaagcagtacgacagcttcacgtaccgggctgaagtcaagggcgtttatcagttttgcttcagtaatgagttttccaccttctctcacaagaccgtctactttgactttcaagtgggcgatgagcctcccattctcccagacatggggaacagggtcacagctctcacccagatggagtccgcctgcgtgaccatccatgaggctctgaaaacggtgattgactcccagacgcattaccggctgcgggaggcccaggaccgggcccgagcggaagaccttaatagccgagtctcttactggtctgttggcgagacgattgccctgttcgtggtcagcttcagtcaggtgctactgttgaaaagcttcttcacagaaaaacgacccatcagcagggcagtccactcctagccccggcatcctgctctagggcccctcatgccccaggctggagcagctctcctaggtcacagcctgctgggctgggtcgcgtagcccagggtggaggcagaacgatgctgctgtggtagccctttgcctttcatgcccatgcttgattcttgcacctcagcagctgaaggtctcagagaccagtaatcagaaggcatccgactgcattaagtgtgcagcgctgaaaagacatttacaactaggccagggattagccactgtgggagggtggacaggcaatggttcagtggcctggctgttggcaggaactccaagtgcccaggcctcttgggcagcttagggccctgcctctgtttcatgatgcatgggtcatttgtcttgggtgtcctatcccatatggagaagaaaggggctctaagttctggctcttctttctttggggttctctgtacctgaggaaaccaggccctgggtgactttgcagatctgctcaccctcggtgagcaacagtgtcagccatgcaagcaggacagaatggtgactgggtgcccttggtgagctgtgtatttcctaggaggtagaaaactgtgggaaactgtggctaataaaaactaagtgtgagcgtcctcagagccaggcctaagttcagagcacagggtaccgagcc

SEQ ID NO: 82336 - DNA, 1410 bp, Homo sapiens
gccggccctcccggaagcgcagagctccgctggtgccacgtttatccccttacatcctcctaggacccggtcggtagtcgtcgccccagcccgccgggggcgcagcgcccgagccgcggccctcgagacgggaccgagagcatcatgggcagcactgtcccgcgctccgcctccgtgctgcttctgctgctgctcctgcgccgggccgagcagccctgcggggccgagctcaccttcgagctgccggacaacgccaagcagtgcttccacgaggaggtggagcagggcgtgaagttctccctggattaccaggtcatcactggaggccactacgatgttgactgctatgtagaggacccccaggggaacaccatctacagagaaacgaagaagcagtacgacagcttcacgtaccgggctgaagtcaagggcgtttatcagttttgcttcagtaatgagttttccaccttctctcacaagaccgtctactttgactttcaagtgggcgatgagcctcccattctcccagacatggggaacagggtcacagctctcacccagatggagtccgcctgcgtgaccatccatgaggctctgaaaacggtgattgactcccagacgcattaccggctgcgggaggcccaggaccgggcccgagcggaagaccttaatagccgagtctcttactggtctgttggcgagacgattgccctgttcgtggtcagcttcagtcaggtgctactgttgaaaagcttcttcacagaaaaacgacccatcagcagggcagtccactcctagccccggcatcctgctctagggcccctcatgccccaggctggagcagctctcctaggtcacagcctgctgggctgggtcgcgtagcccagggtggaggcagaacgatgctgctgtggtagccctttgcctttcatgcccatgcttgattcttgcacctcagcagctgaaggtctcagagaccagtaatcagaaggcatccgactgcattaagtgtgcagcgctgaaaagacatttacaactaggccagggattagccactgtgggagggtggacaggcaatggttcagtggcctggctgttggcaggaactccaagtgcccaggcctcttgggcagcttagggccctgcctctgtttcatgatgcatgggtcatttgtcttgggtgtcctatcccatatggagaagaaaggggctctaagttctggctcttctttctttggggttctctgtacctgaggaaaccaggccctgggtgactttgcagatctgctcaccctcggtgagcaacagtgtcagccatgcaagcaggacagaatggtgactgggtgccctggctttctcgatcccaccctacgggtttccattgcgtcggccctgccccaccactttcag

SEQ ID NO: 82337 - DNA, 1194 bp, Homo sapiens
gagtctgatcacagtgtctggttggcatttggtaagtggtggttgctcctttgataacagcaatttttttatggttgtcaggtcatcactggaggccactacgatgttgactgctatgtagaggacccccaggggaacaccatctacagagaaacgaagaagcagtacgacagcttcacgtaccgggctgaagtcaagggcgtttatcagttttgcttcagtaatgagttttccaccttctctcacaagaccgtctactttgactttcaagtgggcgatgagcctcccattctcccagacatggggaacagggtcacagctctcacccagatggagtccgcctgcgtgaccatccatgaggctctgaaaacggtgattgactcccagacgcattaccggctgcgggaggcccaggaccgggcccgagcggaagaccttaatagccgagtctcttactggtctgttggcgagacgattgccctgttcgtggtcagcttcagtcaggtgctactgttgaaaagcttcttcacagaaaaacgacccatcagcagggcagtccactcctagccccggcatcctgctctagggcccctcatgccccaggctggagcagctctcctaggtcacagcctgctgggctgggtcgcgtagcccagggtggaggcagaacgatgctgctgtggtagccctttgcctttcatgcccatgcttgattcttgcacctcagcagctgaaggtctcagagaccagtaatcagaaggcatccgactgcattaagtgtgcagcgctgaaaagacatttacaactaggccagggattagccactgtgggagggtggacaggcaatggttcagtggcctggctgttggcaggaactccaagtgcccaggcctcttgggcagcttagggccctgcctctgtttcatgatgcatgggtcatttgtcttgggtgtcctatcccatatggagaagaaaggggctctaagttctggctcttctttctttggggttctctgtacctgaggaaaccaggccctgggtgactttgcagatctgctcaccctcggtgagcaacagtgtcagccatgcaagcaggacagaatggtgactgggtgcccttggtgagctgtgtatttcctaggaggtagaaaactgtgggaaactgtggctaataaaaactaagtgtgagcgtcc

SEQ ID NO: 82338 - DNA, 1015 bp, Homo sapiens
ccgcccgcctctctacctccaagcctctattcgccctctcagtaatgagttttccaccttctctcacaagaccgtctactttgactttcaagtgggcgatgagcctcccattctcccagacatggggaacagggtcacagctctcacccagatggagtccgcctgcgtgaccatccatgaggctctgaaaacggtgattgactcccagacgcattaccggctgcgggaggcccaggaccgggcccgagcggaagaccttaatagccgagtctcttactggtctgttggcgagacgattgccctgttcgtggtcagcttcagtcaggtgctactgttgaaaagcttcttcacagaaaaacgacccatcagcagggcagtccactcctagccccggcatcctgctctagggcccctcatgccccaggctggagcagctctcctaggtcacagcctgctgggctgggtcgcgtagcccagggtggaggcagaacgatgctgctgtggtagccctttgcctttcatgcccatgcttgattcttgcacctcagcagctgaaggtctcagagaccagtaatcagaaggcatccgactgcattaagtgtgcagcgctgaaaagacatttacaactaggccagggattagccactgtgggagggtggacaggcaatggttcagtggcctggctgttggcaggaactccaagtgcccaggcctcttgggcagcttagggccctgcctctgtttcatgatgcatgggtcatttgtcttgggtgtcctatcccatatggagaagaaaggggctctaagttctggctcttctttctttggggttctctgtacctgaggaaaccaggccctgggtgactttgcagatctgctcaccctcggtgagcaacagtgtcagccatgcaagcaggacagaatggtgactgggtgcccttggtgagctgtgtatttcctaggaggtagaaaactgtgggaaactgtggctaataaaaactaagtgtgagcgtcc

SEQ ID NO: 82339 - DNA, 1370 bp, Homo sapiens
gccggccctcccggaagcgcagagctccgctggtgccacgtttatccccttacatcctcctaggacccggtcggtagtcgtcgccccagcccgccgggggcgcagcgcccgagccgcggccctcgagacgggaccgagagcatcatgggcagcactgtcccgcgctccgcctccgtgctgcttctgctgctgctcctgcgccgggccgagcagccctgcggggccgagctcaccttcgagctgccggacaacgccaagcagtgcttccacgaggaggtggagcagggcgtgaagttctccctggattaccaggtcatcactggaggccactacgatgttgactgctatgtagaggacccccaggggaacaccatctacagagaaacgaagaagcagtacgacagcttcacgtaccgggctgaagtcaagggcgtttatcagttttgcttcagtaatgagttttccaccttctctcacaagaccgtctactttgactttcaagtgggcgatgagcctcccattctcccagacatggggaacagggtcacagctctcacccagatggagtccgcctgcgtgaccatccatgaggctctgaaaacggtgattgactcccagacgcattaccggctgcgggaggcccaggaccgggcccgagcggaagaccttaatagccgagtctcttactggtctgttggcgagacgattgccctgttcgtggtcagcttcagtcaggtgctactgttgaaaagcttcttcacaggcccctcatgccccaggctggagcagctctcctaggtcacagcctgctgggctgggtcgcgtagcccagggtggaggcagaacgatgctgctgtggtagccctttgcctttcatgcccatgcttgattcttgcacctcagcagctgaaggtctcagagaccagtaatcagaaggcatccgactgcattaagtgtgcagcgctgaaaagacatttacaactaggccagggattagccactgtgggagggtggacaggcaatggttcagtggcctggctgttggcaggaactccaagtgcccaggcctcttgggcagcttagggccctgcctctgtttcatgatgcatgggtcatttgtcttgggtgtcctatcccatatggagaagaaaggggctctaagttctggctcttctttctttggggttctctgtacctgaggaaaccaggccctgggtgactttgcagatctgctcaccctcggtgagcaacagtgtcagccatgcaagcaggacagaatggtgactgggtgcccttggtgagctgtgtatttcctaggaggtagaaaactgtgggaaactgtggctaataaaaactaagtgtgagcgtcc

SEQ ID NO: 82340 - DNA, 1480 bp, Homo sapiens
gccggccctcccggaagcgcagagctccgctggtgccacgtttatccccttacatcctcctaggacccggtcggtagtcgtcgccccagcccgccgggggcgcagcgcccgagccgcggccctcgagacgggaccgagagcatcatgggcagcactgtcccgcgctccgcctccgtgctgcttctgctgctgctcctgcgccgggccgagcagccctgcggggccgagctcaccttcgagctgccggacaacgccaagcagtgcttccacgaggaggtggagcagggcgtgaagttctccctggattaccaggtcatcactggaggccactacgatgttgactgctatgtagaggacccccaggggaacaccatctacagagaaacgaagaagcagtacgacagcttcacgtaccgggctgaagtcaagggcgtttatcagttttgcttcagtaatgagttttccaccttctctcacaagaccgtctactttgactttcaagtgggcgatgagcctcccattctcccagacatggggaacagggtcacagctctcacccagatggagtccgcctgcgtgaccatccatgaggctctgaaaacggtgattgactcccagacgcattaccggctgcggggaaatgcccccagggaacccgggggcccccgaaagcccgcggaaaaagaacccctttttaaatttaaggcccggaaaaatttcctaccctttttataaccctggctggtctgttggcgagacgattgccctgttcgtggtcagcttcagtcaggtgctactgttgaaaagcttcttcacagaaaaacgacccatcagcagggcagtccactcctagccccggcatcctgctctagggcccctcatgccccaggctggagcagctctcctaggtcacagcctgctgggctgggtcgcgtagcccagggtggaggcagaacgatgctgctgtggtagccctttgcctttcatgcccatgcttgattcttgcacctcagcagctgaaggtctcagagaccagtaatcagaaggcatccgactgcattaagtgtgcagcgctgaaaagacatttacaactaggccagggattagccactgtgggagggtggacaggcaatggttcagtggcctggctgttggcaggaactccaagtgcccaggcctcttgggcagcttagggccctgcctctgtttcatgatgcatgggtcatttgtcttgggtgtcctatcccatatggagaagaaaggggctctaagttctggctcttctttctttggggttctctgtacctgaggaaaccaggccctgggtgactttgcagatctgctcaccctcggtgagcaacagtgtcagccatgcaagcaggacagaatggtgactgggtgcccttggtgagctgtgtatttcctaggaggtagaaaactgtgggaaactgtggctaataaaaactaagtgtgagcgtcc

SEQ ID NO: 82341 - DNA, 939 bp, Homo sapiens
tgatgaattcttccaggagtcaggaaggcttcacttgaaaatgtagaagcttggccttctaggtgaagagaacagatggagtccgcctgcgtgaccatccatgaggctctgaaaacggtgattgactcccagacgcattaccggctgcgggaggcccaggaccgggcccgagcggaagaccttaatagccgagtctcttactggtctgttggcgagacgattgccctgttcgtggtcagcttcagtcaggtgctactgttgaaaagcttcttcacagaaaaacgacccatcagcagggcagtccactcctagccccggcatcctgctctagggcccctcatgccccaggctggagcagctctcctaggtcacagcctgctgggctgggtcgcgtagcccagggtggaggcagaacgatgctgctgtggtagccctttgcctttcatgcccatgcttgattcttgcacctcagcagctgaaggtctcagagaccagtaatcagaaggcatccgactgcattaagtgtgcagcgctgaaaagacatttacaactaggccagggattagccactgtgggagggtggacaggcaatggttcagtggcctggctgttggcaggaactccaagtgcccaggcctcttgggcagcttagggccctgcctctgtttcatgatgcatgggtcatttgtcttgggtgtcctatcccatatggagaagaaaggggctctaagttctggctcttctttctttggggttctctgtacctgaggaaaccaggccctgggtgactttgcagatctgctcaccctcggtgagcaacagtgtcagccatgcaagcaggacagaatggtgactgggtgcccttggtgagctgtgtatttcctaggaggtagaaaactgtgggaaactgtggctaataaaaactaagtgtgagcgtcc

SEQ ID NO: 82342 - DNA, 529 bp, Homo sapiens
ctttgcctttcatgcccatgcttgattcttgcacctcagcagctgaaggtctcagagaccagtaatcagaaggcatccgactgcattaagtgtgcagcgctgaaaagacatttacaactaggccagggattagccactgtgggagggtggacaggcaatggttcagtggcctggctgttggcaggaactccaagtgcccaggcctcttgggcagcttagggccctgcctctgtttcatgatgcatgggtcatttgtcttgggtgtcctatcccatatggagaagaaaggggctctaagttctggctcttctttctttggggttctctgtacctgaggaaaccaggccctgggtgactttgcagatctgctcaccctcggtgagcaacagtgtcagccatgcaagcaggacagaatggtgactgggtgcccttggtgagctgtgtatttcctaggaggtagaaaactgtgggaaactgtggctaataaaaactaagtgtgagcgtccgtcctggagacttgtgcctttat

SEQ ID NO: 82343 - DNA, 841 bp, Homo sapiens
atctgccattcgattcctaacacagggagtggagttggagtgagagaacatgaagccagctctacaatttttgcattgtataatgttttccacgaacttggcagaagcccacaaaggaaagacagttggtgcttaggagctagccttgattttctgcttgggacgggattccagttttgaatgtttcccaagatgtgtttcacgggagagtttattttgtctacagtatccccaaggaagcttgtggttaatgatgtgctcctgcaggcgcctggcagccaaggggaccagaagaacagaagaggcgccctgattggctcctgggattacagctttattaatgcgctctgacagcctgtctgtcactagcgccaagcggagaacattaacttgaacctgacagctccaccccccagagaaaatgagggcctaatgtgttataaatcaagctggcttttgaaatcaatattcctaaaaaaatactactggaagaaaacacattcctattactcagagtgttgacatatttattaaagtagcataaaggccactgagttagtcactaaaaaatagaaatgaaaatgtgactatcaattgaaacttagacgtttctacctttatgtttctcttttttttttttttctgtatcaggttcacacattgcaaagtaaatgggagctatttagcaaatggccagttcctttcatcaatggagtatgaaattctggtagctcaaggctcaaggctcaggttttgaataggcaccatttttggctgactactttgcctaaatcatgcagtgctcaatagacctgaatgtagatagactgtacactaagaa

SEQ ID NO: 82344 - DNA, 352 bp, Homo sapiens
aggtgcctgtagtcccagctactcgggaggctgaggcaggagaatggattgaacctgggaggcggagcttgcagtgagcccagattgcgccactgctctccagcctgggcgactgagcgagactcgtctgaaaacaaaaacaaaaacagaattgcatggcctcattggtattttgtcaaagccgtctttgccactaaggtgcaaatatcattctaaattaactataactctcctctggagagggacagatatgaatgacataaactctctttgtttaaatgttttcagttataaaatatgtaaattgaaaaatgttaaaatttataaataaagcctactttgtatttttgta

SEQ ID NO: 82345 - DNA, 514 bp, Homo sapiens
gaggactgaggaacaggaacactccttcagcttagttatgtagatattcccacagccctgcctcaagctctttctttgtaccctagaactctacagcagcctcgctgctgggcttttctggtcccccaaccatcaagcatcccccttgcccttttcccttatgttctacaaatatgggatccttcttgccacaagcattgtcctcaaggctccctgtgccttggattgctatcatgtacccccatcatcacctgattctcccgtactcagccttcaggtctctgctgaaagtcatgtgctcagggaggcatcccttaatccccccatcctcactcacctgtctctattggaacccctgtggcagtgcctgctcctttacatttcttgttcagattcctcttctgacttccccactgtcctctaggactcgcttagacagagatcgtctcagtcttgtcagtgttctgagtgcttagttccctgcctgatgcatagtgcgaactcaatacgtaat

SEQ ID NO: 82346 - DNA, 3857 bp, Homo sapiens
cgcctggccggcgggctgaggcgtacgggtcgcacgcagcgccatgcgaggcccccctgcctggccgctgcggctgctcgagccaccgagccctgccgagccaggtcggctcctgccggtagcctgcgtgtgggccgcggccagccgcgttcccgggtccctatcgccgttcactggcctgaggccggcgcggctatggggcgcggggcccgcgctgctctggggcgttggagccgcgcgccgctggaggagcggctgccggggcgggggtccgggcgcctcgcggggcgtcctgggcctcgcgcggctcctggggctgtgggctcgcggccccggcagctgcaggtgcggggcttttgccgggccaggcgctcctcggctcccgcgcgcccggttcccgggcggtcccgcagccgctgcctgggcaggggacgaggcctggcggcgcgggccggcggcgcctcccggggacaaggggcggctgcgccccgcagcggccggactcccggaggcccggaagctcctggggctggcgtaccctgagcgccggaggctggcagctgcggttggatttctcacgatgtccagtgttatctccatgtctgcccctttcttcctggggaagatcattgatgtcatctataccaaccccactgtggactacagcgacaacctgacccgcctctgcctagggctcagtgccgtgtttctgtgtggtgctgccgccaatgccattcgtgtctacctcatgcaaacttcaggtcagcgcattgtgaataggctgagaacttcattattctcctccattctgaggcaggaggttgctttctttgacaagactcgcacaggagaattgattaaccgcctctcatcagacactgcactcctggggcgctcagtgactgaaaacctctcagatgggctcagggccggggcccaggcttctgtaggcatcagtatgatgttttttgtctcacctaatctggccacctttgttttgagcgtggtgcctccagtgtcaatcattgctgtaatttatgggcgatatctacggaaactgaccaaagtcactcaggattccctggcacaagccactcagctagctgaggaacgtattggaaatgtaagaactgttcgagcttttgggaaagaaatgactgaaatcgagaaatatgccagcaaagtggaccatgtaatgcagttagcaaggaaagaggcagtcgcccgggctggtttctttggagcaactgggctctccggaaacctgatcgtgctttctgtcctgtacaaaggagggctgctgatgggcagtgcccacatgaccgtgggtgaactctcttccttcctaatgtatgctttctgggttggaataagcattggaggtctgagctctttctactcggagctgatgaaaggactgggtgcaggggggcgcctctgggagctcctggagagagagcccaagctgccttttaacgagggggtcatcttaaatgagaaaagcttccagggtgctttggagtttaagaacgtgcattttgcctatccagctcgcccagaggtgcccatatttcaggatttcagcctttccattccgtcaggatctgtcacggcactggttggcccaagtggttctggcaaatcaacagtgctttcactcctgctgaggttgtacgaccctgcttctggaactattagtcttgatggccatgacatccgtcagctaaacccagtgtggctgagatccaaaattgggacagtgagtcaggaacccattttgttttcttgctctattgctgagaacattgcttatggtgctgatgacccttcctctgtgaccgctgaggaaatccagagagtggctgaagtggccaatgcagtggccttcatccggaatttcccccaagggttcaacactgtggttggagaaaagggtgttctcctctcaggtgggcagaaacagcggattgcgattgcccgtgctctgctaaagaatcccaaaattcttctcctagatgaagcaaccagtgcgctggatgccgaaaatgagtaccttgttcaagaagctctagatcgactgatggatggaagaacggtgttagttattgcccatcgtctgtccaccattaagaatgctaatatggttgctgttcttgaccaaggaaaaattactgaatatggaaaacatgaagagctgctttcaaaaccaaatgggatatacagaaaactaatgaacaaacaaagttttatttcagcataaggaagcaattactggtaaacaatatgagactttaatgcaaaacagtgttgcagaaaaaaaactcagagactatgaaatacataaaccatatatcaagttatttgaaaaatacctatttttttccaaagtgtgtaaaagattgttttgaaacgtacctgttctcaagatctttttattcagagttttaataattgtaactttttaaatgtctatagcactgaagttattttcaggttttgtattttcttttcttgtggaatattttaattaatatagcatggcacctcattttcttttgcctgctgttaaagattgaagctattgtcaaatgacaactttaaaaaggcaattataaataaaaagcctgattattttaggccagtttaccaatcactgtgtaattcttctggtagtattctacctacttttaagtctaattttacagatagaataatggaaattgaaaatttaaccctttattccgataatctcatgaagcaaacctaactatttaacatcagctggaaagaagggaacatttatattgcccatctcctgtgtcttcaaaggtgtgagagctgaggaatatgtgttcctatgggaactatgtttgaatatgtgcagttttcaacattttggcacatgaaagcctgacaagtttttaaaagggcagaagctttattttttgaacaggaaaacatgttttttaaattcacatgtttgtatgagtacttttgcgaagcaaggcatgaactgctaggtattattaagaatgaatgatttttgcatttaagttgtttgaaggcatgtattttgaaaaatatctgttacaaatttataatttcaagacaaattgaatcttattttataatacttttggaatttcattaataaggctaaaatttgaggaatataactaattttcagccttaagacatttaagtttggaagtccttgctattcaacagaataacaagaaaacttcagaatgtatcactctcctgaaaagaagatattaataagcccttttatttatggttatagttttatttatagtctcaaaattcctaaagcaatgctacaaccattgaatttgccatattttgtatcagtgctgttaatttgctgttgcctcaagaaaaagtgctttttctccatggatgaggctagaccctaagaagtaattaagtcaatgtaaatcaaatggaagttttcccatgaactaagcatttattagttccctgattagactggaagaagaaaccactatttcatgaaaagcatggaatattatattttattgttcataattaatgaataaaattgatatgaatgaatatagtgttctttgaattagtaaacagtacatctgtgacaatcatttttaacaagctctacttgtgttctttataaagtgtgattttcagaaagcaaacaacacaattacaaggttgaatctgaggaaaataatccttgtgccatagaagtatttacgaaattgcatttcattgttatgttttattttctgatacatgatgttcaattttatctttaggtaatattttatatcatagattaaaatttatagtgaacttta

SEQ ID NO: 82347 - DNA, 3436 bp, Homo sapiens
gacctcaggtgatctaccctcctcagctcccaaagtactgagatacaggcgtgagcaccacaccccacccgataatggggttttttggtggcttcaccatcttggtcattttgatgggacgtgttgctgtggttgttcagtgcctgcaggtggttcagacctgaatatacaactcctgaggtggactggagcgtggagcagaatgggcctctgccaaacccccatcctgtctcttcccactctgttgttaaaccgcgtggtctgatctagtattggcctgaggattctttcttcagcaatttcttgtcacatttcttctatgtggcatgctgaatatttatggggttttgtgaagaataaagatgtctgtaaaattccatcaaaacaggatgtaacaacttggggacagtaccttcaagcctgctgttaatttaaacacacacacacacagacacacccacacacactcccctttcgtaggtaatgagaatgtcttgccacccaatgtaacaaacacctctgaattttttttgtttttgacagttttttgtctcacctaatctggccacctttgttttgagcgtggtgcctccagtgtcaatcattgctgtaatttatgggcgatatctacggaaactgaccaaagtcactcaggattccctggcacaagccactcagctagctgaggaacgtattggaaatgtaagaactgttcgagcttttgggaaagaaatgactgaaatcgagaaatatgccagcaaagtggaccatgtaatgcagttagcaaggaaagaggcagtcgcccgggctggtttctttggagcaactgggctctccggaaacctgatcgtgctttctgtcctgtacaaaggagggctgctgatgggcagtgcccacatgaccgtgggtgaactctcttccttcctaatgtatgctttctgggttggaataagcattggaggtctgagctctttctactcggagctgatgaaaggactgggtgcaggggggcgcctctgggagctcctggagagagagcccaagctgccttttaacgagggggtcatcttaaatgagaaaagcttccagggtgctttggagtttaagaacgtgcattttgcctatccagctcgcccagaggtgcccatatttcaggatttcagcctttccattccgtcaggatctgtcacggcactggttggcccaagtggttctggcaaatcaacagtgctttcactcctgctgaggttgtacgaccctgcttctggaactattagtcttgatggccatgacatccgtcagctaaacccagtgtggctgagatccaaaattgggacagtgagtcaggaacccattttgttttcttgctctattgctgagaacattgcttatggtgctgatgacccttcctctgtgaccgctgaggaaatccagagagtggctgaagtggccaatgcagtggccttcatccggaatttcccccaagggttcaacactgtggttggagaaaagggtgttctcctctcaggtgggcagaaacagcggattgcgattgcccgtgctctgctaaagaatcccaaaattcttctcctagatgaagcaaccagtgcgctggatgccgaaaatgagtaccttgttcaagaagctctagatcgactgatggatggaagaacggtgttagttattgcccatcgtctgtccaccattaagaatgctaatatggttgctgttcttgaccaaggaaaaattactgaatatggaaaacatgaagagctgctttcaaaaccaaatgggatatacagaaaactaatgaacaaacaaagttttatttcagcataaggaagcaattactggtaaacaatatgagactttaatgcaaaacagtgttgcagaaaaaaaactcagagactatgaaatacataaaccatatatcaagttatttgaaaaatacctatttttttccaaagtgtgtaaaagattgttttgaaacgtacctgttctcaagatctttttattcagagttttaataattgtaactttttaaatgtctatagcactgaagttattttcaggttttgtattttcttttcttgtggaatattttaattaatatagcatggcacctcattttcttttgcctgctgttaaagattgaagctattgtcaaatgacaactttaaaaaggcaattataaataaaaagcctgattattttaggccagtttaccaatcactgtgtaattcttctggtagtattctacctacttttaagtctaattttacagatagaataatggaaattgaaaatttaaccctttattccgataatctcatgaagcaaacctaactatttaacatcagctggaaagaagggaacatttatattgcccatctcctgtgtcttcaaaggtgtgagagctgaggaatatgtgttcctatgggaactatgtttgaatatgtgcagttttcaacattttggcacatgaaagcctgacaagtttttaaaagggcagaagctttattttttgaacaggaaaacatgttttttaaattcacatgtttgtatgagtacttttgcgaagcaaggcatgaactgctaggtattattaagaatgaatgatttttgcatttaagttgtttgaaggcatgtattttgaaaaatatctgttacaaatttataatttcaagacaaattgaatcttattttataatacttttggaatttcattaataaggctaaaatttgaggaatataactaattttcagccttaagacatttaagtttggaagtccttgctattcaacagaataacaagaaaacttcagaatgtatcactctcctgaaaagaagatattaataagcccttttatttatggttatagttttatttatagtctcaaaattcctaaagcaatgctacaaccattgaatttgccatattttgtatcagtgctgttaatttgctgttgcctcaagaaaaagtgctttttctccatggatgaggctagaccctaagaagtaattaagtcaatgtaaatcaaatggaagttttcccatgaactaagcatttattagttccctgattagactggaagaagaaaccactatttcatgaaaagcatggaatattatattttattgttcataattaatgaataaaattgatatgaatgaatatagtgttctttgaattagtaaacagtacatctgtgacaatcatttttaacaagctctacttgtgttctttataaagtgtgattttcagaaagcaaacaacacaattacaaggttgaatctgaggaaaataatccttgtgccatagaagtatttacgaaattgcatttcattgttatgttttattttctgatacatgatgttcaattttatctttaggtaatattttatatcatagattaaaatttatagtgaacttta

SEQ ID NO: 82348 - DNA, 2106 bp, Homo sapiens
agttgaaaaccagtgggcagactgagtcctagttgagagttctaggtccacttcagacatggttgccatcaatcctaatcactctgtaagctgtaactgtgcagaatgcttttctccttacatcacagtatagttttatggagatcagaaagtcctaaacagttgaaattttgatcatggtaaaaattcattgctcaggaagggctgctgtgtgtatcaggaagcacatgggtgtcactgacgtctttgctttcttgtgtgtgtgctcctgtgtcagtgcgctggatgccgaaaatgagtaccttgttcaagaagctctagatcgactgatggatggaagaacggtgttagttattgcccatcgtctgtccaccattaagaatgctaatatggttgctgttcttgaccaaggaaaaattactgaatatggaaaacatgaagagctgctttcaaaaccaaatgggatatacagaaaactaatgaacaaacaaagttttatttcagcataaggaagcaattactggtaaacaatatgagactttaatgcaaaacagtgttgcagaaaaaaaactcagagactatgaaatacataaaccatatatcaagttatttgaaaaatacctatttttttccaaagtgtgtaaaagattgttttgaaacgtacctgttctcaagatctttttattcagagttttaataattgtaactttttaaatgtctatagcactgaagttattttcaggttttgtattttcttttcttgtggaatattttaattaatatagcatggcacctcattttcttttgcctgctgttaaagattgaagctattgtcaaatgacaactttaaaaaggcaattataaataaaaagcctgattattttaggccagtttaccaatcactgtgtaattcttctggtagtattctacctacttttaagtctaattttacagatagaataatggaaattgaaaatttaaccctttattccgataatctcatgaagcaaacctaactatttaacatcagctggaaagaagggaacatttatattgcccatctcctgtgtcttcaaaggtgtgagagctgaggaatatgtgttcctatgggaactatgtttgaatatgtgcagttttcaacattttggcacatgaaagcctgacaagtttttaaaagggcagaagctttattttttgaacaggaaaacatgttttttaaattcacatgtttgtatgagtacttttgcgaagcaaggcatgaactgctaggtattattaagaatgaatgatttttgcatttaagttgtttgaaggcatgtattttgaaaaatatctgttacaaatttataatttcaagacaaattgaatcttattttataatacttttggaatttcattaataaggctaaaatttgaggaatataactaattttcagccttaagacatttaagtttggaagtccttgctattcaacagaataacaagaaaacttcagaatgtatcactctcctgaaaagaagatattaataagcccttttatttatggttatagttttatttatagtctcaaaattcctaaagcaatgctacaaccattgaatttgccatattttgtatcagtgctgttaatttgctgttgcctcaagaaaaagtgctttttctccatggatgaggctagaccctaagaagtaattaagtcaatgtaaatcaaatggaagttttcccatgaactaagcatttattagttccctgattagactggaagaagaaaccactatttcatgaaaagcatggaatattatattttattgttcataattaatgaataaaattgatatgaatgaatatagtgttctttgaattagtaaacagtacatctgtgacaatcatttttaacaagctctacttgtgttctttataaagtgtgattttcagaaagcaaacaacacaattacaaggttgaatctgaggaaaataatccttgtgccatagaagtatttacgaaattgcatttcattgttatgttttattttctgatacatgatgttcaattttatctttaggtaatattttatatcatagattaaaatttatagtgaacttta

SEQ ID NO: 82349 - DNA, 365 bp, Homo sapiens
cactagcgcccacagtctgtagttaataagagaaaagtagtgttagtagtgcatgacagttaatgtgcctggtttgggaaagtctctttccacccatgggatacagtgcagcagacacgctcagaggctgcattgctcaggagggttacaactccaggccaagctgctgcacagtaagtggctgccccataatggtaatggatgtctttacccttggtgagcctgttcgtgtttgcttttgcaggtcagcgcattgtgaataggctgagaacttcattattctcctccattctgaggcaggaggttgctttctttgacaagactcgcacaggagaattgattaaccgcctctcatcagacactgc

SEQ ID NO: 82350 - DNA, 3812 bp, Homo sapiens
cgcctggccggcgggctgaggcgtacgggtcgcacgcagcgccatgcgaggcccccctgcctggccgctgcggctgctcgagccaccgagccctgccgagccaggtcggctcctgccggtagcctgcgtgtgggccgcggccagccgcgttcccgggtccctatcgccgttcactggcctgaggccggcgcggctatggggcgcggggcccgcgctgctctggggcgttggagccgcgcgccgctggaggagcggctgccggggcgggggtccgggcgcctcgcggggcgtcctgggcctcgcgcggctcctggggctgtgggctcgcggccccggcagctgcaggtgcggggcttttgccgggccaggcgctcctcggctcccgcgcgcccggttcccgggcggtcccgcagccgctgcctgggcaggggacgaggcctggcggcgcgggccggcggcgcctcccggggacaaggggcggctgcgccccgcagcggccggactcccggaggcccggaagctcctggggctggcgtaccctgagcgccggaggctggcagctgcggttggatttctcacgatgtccagtgttatctccatgtctgcccctttcttcctggggaagatcattgatgtcatctataccaaccccactgtggactacagcgacaacctgacccgcctctgcctagggctcagtgccgtgtttctgtgtggtgctgccgccaatgccattcgtgtctacctcatgcaaacttcaggtcagcgcattgtgaataggctgagaacttcattattctcctccattctgaggcaggaggttgctttctttgacaagactcgcacaggagaattgattaaccgcctctcatcagacactgcactcctggggcgctcagtgactgaaaacctctcagatgggctcagggccggggcccaggcttctgtaggcatcagtatgatgttttttgtctcacctaatctggccacctttgttttgagcgtggtgcctccagtgtcaatcattgctgtaatttatgggcgatatctacggaaactgaccaaagtcactcaggattccctggcacaagccactcagctagctgaggaacgtattggaaatgtaagaactgttcgagcttttgggaaagaaatgactgaaatcgagaaatatgccagcaaagtggaccatgtaatgcagttagcaaggaaagaggcagtcgcccgggctggtttctttggagcaactgggctctccggaaacctgatcgtgctttctgtcctgtacaaaggagggctgctgatgggcagtgcccacatgaccgtgggtgaactctcttccttcctaatgtatgctttctgggttggaataagcattggaggtctgagctctttctactcggagctgatgaaaggactgggtgcaggggggcgcctctgggagctcctggagagagagcccaagctgccttttaacgagggggtcatcttaaatgagaaaagcttccagggtgctttggagtttaagaacgtgcattttgcctatccagctcgcccagaggtgcccatatttcaggatttcagcctttccattccgtcaggatctgtcacggcactggttggcccaagtggttctggcaaatcaacagtgctttcactcctgctgaggttgtacgaccctgcttctggaactattagtcttgatggccatgacatccgtcaggaacccattttgttttcttgctctattgctgagaacattgcttatggtgctgatgacccttcctctgtgaccgctgaggaaatccagagagtggctgaagtggccaatgcagtggccttcatccggaatttcccccaagggttcaacactgtggttggagaaaagggtgttctcctctcaggtgggcagaaacagcggattgcgattgcccgtgctctgctaaagaatcccaaaattcttctcctagatgaagcaaccagtgcgctggatgccgaaaatgagtaccttgttcaagaagctctagatcgactgatggatggaagaacggtgttagttattgcccatcgtctgtccaccattaagaatgctaatatggttgctgttcttgaccaaggaaaaattactgaatatggaaaacatgaagagctgctttcaaaaccaaatgggatatacagaaaactaatgaacaaacaaagttttatttcagcataaggaagcaattactggtaaacaatatgagactttaatgcaaaacagtgttgcagaaaaaaaactcagagactatgaaatacataaaccatatatcaagttatttgaaaaatacctatttttttccaaagtgtgtaaaagattgttttgaaacgtacctgttctcaagatctttttattcagagttttaataattgtaactttttaaatgtctatagcactgaagttattttcaggttttgtattttcttttcttgtggaatattttaattaatatagcatggcacctcattttcttttgcctgctgttaaagattgaagctattgtcaaatgacaactttaaaaaggcaattataaataaaaagcctgattattttaggccagtttaccaatcactgtgtaattcttctggtagtattctacctacttttaagtctaattttacagatagaataatggaaattgaaaatttaaccctttattccgataatctcatgaagcaaacctaactatttaacatcagctggaaagaagggaacatttatattgcccatctcctgtgtcttcaaaggtgtgagagctgaggaatatgtgttcctatgggaactatgtttgaatatgtgcagttttcaacattttggcacatgaaagcctgacaagtttttaaaagggcagaagctttattttttgaacaggaaaacatgttttttaaattcacatgtttgtatgagtacttttgcgaagcaaggcatgaactgctaggtattattaagaatgaatgatttttgcatttaagttgtttgaaggcatgtattttgaaaaatatctgttacaaatttataatttcaagacaaattgaatcttattttataatacttttggaatttcattaataaggctaaaatttgaggaatataactaattttcagccttaagacatttaagtttggaagtccttgctattcaacagaataacaagaaaacttcagaatgtatcactctcctgaaaagaagatattaataagcccttttatttatggttatagttttatttatagtctcaaaattcctaaagcaatgctacaaccattgaatttgccatattttgtatcagtgctgttaatttgctgttgcctcaagaaaaagtgctttttctccatggatgaggctagaccctaagaagtaattaagtcaatgtaaatcaaatggaagttttcccatgaactaagcatttattagttccctgattagactggaagaagaaaccactatttcatgaaaagcatggaatattatattttattgttcataattaatgaataaaattgatatgaatgaatatagtgttctttgaattagtaaacagtacatctgtgacaatcatttttaacaagctctacttgtgttctttataaagtgtgattttcagaaagcaaacaacacaattacaaggttgaatctgaggaaaataatccttgtgccatagaagtatttacgaaattgcatttcattgttatgttttattttctgatacatgatgttcaattttatctttaggtaatattttatatcatagattaaaatttatagtgaacttta

SEQ ID NO: 82351 - DNA, 3963 bp, Homo sapiens
cgcctggccggcgggctgaggcgtacgggtcgcacgcagcgccatgcgaggcccccctgcctggccgctgcggctgctcgagccaccgagccctgccgagccaggtcggctcctgccggtagcctgcgtgtgggccgcggccagccgcgttcccgggtccctatcgccgttcactggcctgaggccggcgcggctatggggcgcggggcccgcgctgctctggggcgttggagccgcgcgccgctggaggagcggctgccggggcgggggtccgggcgcctcgcggggcgtcctgggcctcgcgcggctcctggggctgtgggctcgcggccccggcagctgcaggtgcggggcttttgccgggccaggcgctcctcggctcccgcgcgcccggttcccgggcggtcccgcagccgctgcctgggcaggggacgaggcctggcggcgcgggccggcggcgcctcccggggacaaggggcggctgcgccccgcagcggccggactcccggaggcccggaagctcctggggctggcgtaccctgagcgccggaggctggcagctgcggttggatttctcacgatgtccagtgttatctccatgtctgcccctttcttcctggggaagatcattgatgtcatctataccaaccccactgtggactacagcgacaacctgacccgcctctgcctagggctcagtgccgtgtttctgtgtggtgctgccgccaatgccattcgtgtctacctcatgcaaacttcaggtcagcgcattgtgaataggctgagaacttcattattctcctccattctgaggcaggaggttgctttctttgacaagactcgcacaggagaattgattaaccgcctctcatcagacactgcactcctggggcgctcagtgactgaaaacctctcagatgggctcagggccggggcccaggcttctgtaggcatcagtatgatgttttttgtctcacctaatctggccacctttgttttgagcgtggtgcctccagtgtcaatcattgctgtaatttatgggcgatatctacggaaactgaccaaagtcactcaggattccctggcacaagccactcagctagctgaggaacgtattggaaatgtaagaactgttcgagcttttgggaaagaaatgactgaaatcgagaaatatgccagcaaagtggaccatgtaatgcagttagcaaggaaagaggcagtcgcccgggctggtttctttggagcaactgggctctccggaaacctgatcgtgctttctgtcctgtacaaaggagggctgctgatgggcagtgcccacatgaccgtgggtgaactctcttccttcctaatgtatgctttctgggttggaataagcattggaggtctgagctctttctactcggagctgatgaaaggactgggtgcaggggggcgcctctgggagctcctggagagagagcccaagctgccttttaacgagggggtcatcttaaatgagaaaagcttccagggtgctttggagtttaagaacgtgcattttgcctatccagctcgcccagaggtgcccatatttcaggatttcagcctttccattccgtcaggatctgtcacggcactggttggcccaagtggttctggcaaatcaacagtgctttcactcctgctgaggttgtacgaccctgcttctggaactattagtcttgatggccatgacatccgtcagctaaacccagtgtggctgagatccaaaattgggacagtgagtcaggaacccattttgttttcttgctctattgctgagaacattgcttatggtgctgatgacccttcctctgtgaccgctgaggaaatccagagagtggctgaagtggccaatgcagtggccttcatccggaatttcccccaagggttcaacactgtggttggagaaaagggtgttctcctctcaggtgggcagaaacagcggattgcgattgcccgtgctctgctaaagaatcccaaaattcttctcctagatgaagcaaccagtgcgctggatgccgaaaatgagtaccttgttcaagaagctctagatcgactgatggatggaagaacggtgttagttattgcccatcgtctgtccaccattaagaatgctaatatggttgctgttcttgaccaaggaaaaattactgaatatggaaaacatgaagagctgctttcaaaaccaaatgggatatacagaaaactaatgaacaaacaaagttttatttcagcataaggaagcaattactggtaaacaatatgagactttaatgcaaaacagtgttgcagaaaaaaaactcagagactatgaaatacataaaccatatatcaagttatttgaaaaatacctatttttttccaaagtgtgtaaaagattgttttgaaacgtacctgttctcaagatctttttattcagagttttaataattgtaactttttaaatgtctatagcactgaagttattttcaggttttgtattttcttttcttgtggaatattttaattaatatagcatggcacctcattttcttttgcctgctgttaaagattgaagctattgtcaaatgacaactttaaaaaggcaattataaataaaaagcctgattattttaggccagtttaccaatcactgtgtaattcttctggtagtattctacctacttttaagtctaattttacagatagaataatggaaattgaaaatttaaccctttattccgataatctcatgaagcaaacctaactatttaacatcagctggaaagaagggaacatttatattgcccatctcctgtgtcttcaaaggtgtgagagctgaggaatatgtgttcctatgggaactatgtttgaatatgtgcagttttcaacattttggcacatgaaagcctgacaagtttttaaaagggcagaagctttattttttgaacaggaaaacatgttttttaaattcacatgtttgtatgagtacttttgcgaagcaaggcatgaactgctaggtattattaagaatgaatgatttttgcatttaagttgtttgaaggcatgtattttgaaaaatatctgttacaaatttataatttcaagacaaattgaatcttattttataatacttttggaatttcattaataaggctaaaatttgaggaatataactaattttcagccttaagacatttaagtttggaagtccttgctattcaacagaataacaagaaaacttcagaatgtatcactctcctgaaaagaagatattaataagcccttttatttatggttatagttttatttatagtctcaaaattcctaaagcaatgctacaaccattgaatttgccatattttgtatcagtgctgttaatttgctgttgcctcaagaaaaagtgctttttctccatggatgaggctagaccctaagaagtaattaagtcaatgtaaatcaaatggaagttttcccatgaactaagcatttattagttccctgattagactggaagaagaaaccactatttcatgaaaagcatggaatattatattttattgttcataattaatgaataaaattgatatgaatgaatatagtgttctttgaattagtaaacagtacatctgtgacaatcatttttaacaagctctacttgtgttctttataaagtgtgattttcagaaagcaaacaacacaattacaaggttgaatctgaggaaaataatccttgtgccatagaagtatttacgaaattgcatttcattgttatgttttattttctgatacatgatgttcaattttatctttaggtaatattttatatcatagattaaaatttatagtgaactttatctgtgtctgtcactttttttttttttatgacccaggaaccaaagatgcagtctgtcatttcttataaaacttctcactacattgtttcttagtagaatttggctg

SEQ ID NO: 82352 - DNA, 1167 bp, Homo sapiens
agttaacataatgtatgatgatgatatctattccccaaggaatacaaagtgctttgcagaaattattttttaacctctgtccacttgtgagtcaaagtctacaggaaatggtgatagttccagtttgaaaaacagaagcaggcccagcatggtggctcacacctatgatcctaacactttgggaggctgaggcgggaggactgcttgaggccagaaactcgagtcagccagagcaacatacattgctatggcaacaaaagaaaatatgacttcacagagaggaatgttgaagtcaattcacagcaaaatgaacactttggccaatcgttttcctgctgtaaacagcctgatccagaggatcaacctgaggaagcggcgggactcgctcatcctagggggtgttattgggatctgtaccatcctgttgctgctgtatgcgttccattgatgggacatcttcagggactcttgacagccaccgctttcacaccctggtctggaataaggaaacatcggagggagaagttgactgtcttgataattagcctgaccagcaggatgaatgcaagactgacagtgatggactctgtgacatggtcaggttgagctgaagccacagtttctctgtgctgtgttttctaacacatttttctgtttttaattaaaaaaaaaaaaaaaaggttttcagttgcttttgtctccctaggaggcaggtaaaccaatcaaaaacagagttttctgtgtttccatgatagtgttgaagcctaatgacaagccaggtcttacagctgggctcttcagaaaaccaggtttctacatccaaagactgcttttcttttagctgccagattggattgtgaataaaaataattcttccctctccctctccctctccccacggtctccctctttccacggtctccctctgatgccgagccgaagctggactgtactactgccatctcggctcactgcaacctccctgcctgattctcctgcctcagcctgccgagtgcctgcaattgcaggcgagcgccgccacgcctgactgcctcggcctcccgaggtgccgggattgcagacggagtctcgttcactcagtgctcaatggtgcccaggctggagtgcagtggcgtgatctcggctcactacaacctccacctccca

SEQ ID NO: 82353 - DNA, 1040 bp, Homo sapiens
  misc_feature (14)..(14): n is a, c, g, or t
  misc_feature (36)..(36): n is a, c, g, or t
  misc_feature (142)..(142): n is a, c, g, or t
  misc_feature (148)..(149): n is a, c, g, or t
  misc_feature (152)..(153): n is a, c, g, or t
ggcatcgggaaggngatcatggatcagtcgaaagtnttgagtcatataaagtggtctggagtaacacggagactgagctgaagacctgaccacttcgaactcagatcgtctgatagagagacataagcattgctatggcaanaaaagnnttnncaggaggaatgttgagtcattcacgcaaatgaacactttggccatcgttttcctgctgtaaacagcctgatccagaggatcaacctgaggaagcggcgggactcgctcatcctagggggtgttattgggatctgtaccatcctgttgctgctgtatgcgttccattgatgggacatcttcagggactcttgacagccaccgctttcacaccctggtctggaataaggaaacatcggagggagaagttgactgtcttgataattagcctgaccagcaggatgaatgcaagactgacagtgatggactctgtgacatggtcaggttgagctgaagccacagtttctctgtgctgtgttttctaacacatttttctgtttttaattaaaaaaaaaaaaaaaaggttttcagttgcttttgtctccctaggaggcaggtaaaccaatcaaaaacagagttttctgtgtttccatgatagtgttgaagcctaatgacaagccaggtcttacagctgggctcttcagaaaaccaggtttctacatccaaagactgcttttcttttagctgccagattggattgtgaataaaaataattcttccctctccctctccctctccccacggtctccctctttccacggtctccctctgatgccgagccgaagctggactgtactactgccatctcggctcactgcaacctccctgcctgattctcctgcctcagcctgccgagtgcctgcaattgcaggcgagcgccgccacgcctgactgcctcggcctcccgaggtgccgggattgcagacggagtctcgttcactcagtgctcaatggtgcccaggctggagtgcagtggcgtgatctcggctcactacaacctccacctccca

SEQ ID NO: 82354 - DNA, 640 bp, Homo sapiens
ttggcgaagctgagcgccggttaactcagctctaagttcgtaatcttagacctacctgtccactttatacgcctcatctctagtgaaaatacaaaaattagccaggcatggtggcgggtgcatgtattcgcagctatttgggaggctgaggcaggagaatagcttgaacctaggaggcggcagctgcagtgggttgagattacactactgcactccagcccaggtgacagagcgagactctgtcttaaaaaagaaaaaaattagagtccagaattttctccagatgctttgaaaaagctagacattctgtatacataaatgactaaaaagtttatagatgtagaaaaattaatacaggttttacatgtgcatttagtaaattcagaatttgaatttttctttttatttgcagctcagatcgtctgatagaagagacaataaggtaggaataagtttttgttttgctttgttggtttttgtttgtttgcacgtaaatttaatgaacagtgttacagctgttttagaattaaagaaaaaacattttaatgaacagatcaaagttcgtttatcctccttaaataaatttacattcttcttcaaaattgacccagtaattctatcttaataacgtctagtattc

SEQ ID NO: 82355 - DNA, 331 bp, Homo sapiens
agttaacataatgtatgatgatgatatctattccccaaggaatacaaagtgctttgcagaaattattttttaacctctgtccacttgtgagtcaaagtctacaggaaatggtgatagttccagtttgaaaaacagaagcaggcccagcatggtggctcacacctatgatcctaaagtgcagagattacaggtgtgagccactgcgcccagccacatttgtattcttaccatggatattggacctgtgctaaaagtactttgcatgcattattttatttgattttctcaataacccattagatagacacaaatcattaggaactatctccaa

SEQ ID NO: 82356 - DNA, 2038 bp, Homo sapiens
ataacccctaatcgcgtagagattttttttaaaaaccagcctagcagcaataggtatgtgctgtggatgcttctccatgatgataaaggatgagtttgtgctgggatctccttatgaaaagataactggccaagcccatgaggaacaagaatgttatgctaatcagacccaaggtaaacagcctgcagtgcacctcctgactgattagcactgaacccacttggaatcatcaaccacaggcacgtggtaattggatgttcttctaatacacatagtgagattgtaaaatgaggatgatatatgaggaaagtcagacggagaaactaaagttcagttcttaaatacaagccaagggaacagactaagtgaatggtacagccaggattgaagcctggttttcacaaggtggtatgtcatgataaaacaagccaaagaaaaggttgggtagtgtttggaggctaaaagagaccaaagagtcttagtgaatcaaccttgatgcgattagggtagtactaaccctaatcgcggacgttggacgacaaagatggcggcagggaccagcagttactgggaaggtgagggcgagaaggcctccggatctcaggaaacaggctcgacagctggaaaatgaacttgacctgaaactagtttccttcagcaaactatgtacaagttacagtcatagcagtacccgagatggaagacgcgacaggtatagttctgatacaacaccccttttaaatggatcaagccaagacagaatgtttgagacaatggcgattgagattgaacaacttttggcaaggcttacaggggtaaatgataaaatggcagaatataccaacagtgcaggtgtcccctccttgaatgcagccctgatgcatacattacagcggcatagagacatattgcaggattatacacatgaattccataaaaccaaagcaaactttatggcaatacgggaaagggagaatcttatgggatcagtacgaaaagatattgagtcatataaaagtgggtctggagtaaacaacagaagaactgagctatttttgaaagaacatgaccaccttcgaaactcagatcgtctgatagaagagacaataagcattgctatggcaacaaaagaaaatatgacttcacagagaggaatgttgaagtcaattcacagcaaaatgaacactttggccaatcgttttcctgctgtaaacagcctgatccagaggatcaacctgaggaagcggcgggactcgctcatcctagggggtgttattgggatctgtaccatcctgttgctgctgtatgcgttccattgatgggacatcttcagggactcttgacagccaccgctttcacaccctggtctggaataaggaaacatcggagggagaagttgactgtcttgataattagcctgaccagcaggatgaatgcaagactgacagtgatggactctgtgacatggtcaggttgagctgaagccacagtttctctgtgctgtgttttctaacacatttttctgtttttaattaaaaaaaaaaaaaaaaggttttcagttgcttttgtctccctaggaggcaggtaaaccaatcaaaaacagagttttctgtgtttccatgatagtgttgaagcctaatgacaagccaggtcttacagctgggctcttcagaaaaccaggtttctacatccaaagactgcttttcttttagctgccagattggattgtgaataaaaataattcttccctctccctctccctctccccacggtctccctctttccacggtctccctctgatgccgagccgaagctggactgtactactgccatctcggctcactgcaacctccctgcctgattctcctgcctcagcctgccgagtgcctgcaattgcaggcgagcgccgccacgcctgactgcctcggcctcccgaggtgccgggattgcagacggagtctcgttcactcagtgctcaatggtgcccaggctggagtgcagtggcgtgatctcggctcactacaacctccacctccca

SEQ ID NO: 82357 - DNA, 1959 bp, Homo sapiens
  misc_feature (1102)..(1102): n is a, c, g, or t
  misc_feature (1108)..(1109): n is a, c, g, or t
  misc_feature (1112)..(1113): n is a, c, g, or t
ataacccctaatcgcgtagagattttttttaaaaaccagcctagcagcaataggtatgtgctgtggatgcttctccatgatgataaaggatgagtttgtgctgggatctccttatgaaaagataactggccaagcccatgaggaacaagaatgttatgctaatcagacccaaggtaaacagcctgcagtgcacctcctgactgattagcactgaacccacttggaatcatcaaccacaggcacgtggtaattggatgttcttctaatacacatagtgagattgtaaaatgaggatgatatatgaggaaagtcagacggagaaactaaagttcagttcttaaatacaagccaagggaacagactaagtgaatggtacagccaggattgaagcctggttttcacaaggtggtatgtcatgataaaacaagccaaagaaaaggttgggtagtgtttggaggctaaaagagaccaaagagtcttagtgaatcaaccttgatgcgattagggtagtactaaccctaatcgcggacgttggacgacaaagatggcggcagggaccagcagttactgggaagatctcaggaaacaggctcgacagctggaaaatgaacttgacctgaaactagtttccttcagcaaactatgtacaagttacagtcatagcagtacccgagatggaagacgcgacaggtatagttctgatacaacaccccttttaaatggatcaagccaagacagaatgtttgagacaatggcgattgagattgaacaacttttggcaaggcttacaggggtaaatgataaaatggcagaatataccaacagtgcaggtgtcccctccttgaatgcagccctgatgcatacattacagcggcatagagacatattgcaggattatacacatgaattccataaaaccaaagcaaactttatggcaatacgggaaagggagaatcttatgggatcagtacgaaaagatattgagtcatataaaagtgggtctggagtaaacaacagaagaactgagctatttttgaaagaacatgaccaccttcgaaactcagatcgtctgatagagagacataagcattgctatggcaanaaaagnnttnncaatcgttttcctgctgtaaacagcctgatccagaggatcaacctgaggaagcggcgggactcgctcatcctagggggtgttattgggatctgtaccatcctgttgctgctgtatgcgttccattgatgggacatcttcagggactcttgacagccaccgctttcacaccctggtctggaataaggaaacatcggagggagaagttgactgtcttgataattagcctgaccagcaggatgaatgcaagactgacagtgatggactctgtgacatggtcaggttgagctgaagccacagtttctctgtgctgtgttttctaacacatttttctgtttttaattaaaaaaaaaaaaaaaaggttttcagttgcttttgtctccctaggaggcaggtaaaccaatcaaaaacagagttttctgtgtttccatgatagtgttgaagcctaatgacaagccaggtcttacagctgggctcttcagaaaaccaggtttctacatccaaagactgcttttcttttagctgccagattggattgtgaataaaaataattcttccctctccctctccctctccccacggtctccctctttccacggtctccctctgatgccgagccgaagctggactgtactactgccatctcggctcactgcaacctccctgcctgattctcctgcctcagcctgccgagtgcctgcaattgcaggcgagcgccgccacgcctgactgcctcggcctcccgaggtgccgggattgcagacggagtctcgttcactcagtgctcaatggtgcccaggctggagtgcagtggcgtgatctcggctcactacaacctccacctccca

SEQ ID NO: 82358 - DNA, 1369 bp, Homo sapiens
ttggcgaagctgagcgccggttaactcagctctaagttcgtaatcttagacctacctgtccactttatacgcctcatctctagtgaaaatacaaaaattagccaggcatggtggcgggtgcatgtattcgcagctatttgggaggctgaggcaggagaatagcttgaacctaggaggcggcagctgcagtgggttgagattacactactgcactccagcccaggtgacagagcgagactctgtcttaaaaaagaaaaaaattagagtccagaattttctccagatgctttgaaaaagctagacattctgtatacataaatgactaaaaagtttatagatgtagaaaaattaatacaggttttacatgtgcatttagtaaattcagaatttgaatttttctttttatttgcagctcagatcgtctgatagaagagacaataagcattgctatggcaacaaaagaaaatatgacttcacagagaggaatgttgaagtcaattcacagcaaaatgaacactttggccaatcgttttcctgctgtaaacagcctgatccagaggatcaacctgaggaagcggcgggactcgctcatcctagggggtgttattgggatctgtaccatcctgttgctgctgtatgcgttccattgatgggacatcttcagggactcttgacagccaccgctttcacaccctggtctggaataaggaaacatcggagggagaagttgactgtcttgataattagcctgaccagcaggatgaatgcaagactgacagtgatggactctgtgacatggtcaggttgagctgaagccacagtttctctgtgctgtgttttctaacacatttttctgtttttaattaaaaaaaaaaaaaaaaggttttcagttgcttttgtctccctaggaggcaggtaaaccaatcaaaaacagagttttctgtgtttccatgatagtgttgaagcctaatgacaagccaggtcttacagctgggctcttcagaaaaccaggtttctacatccaaagactgcttttcttttagctgccagattggattgtgaataaaaataattcttccctctccctctccctctccccacggtctccctctttccacggtctccctctgatgccgagccgaagctggactgtactactgccatctcggctcactgcaacctccctgcctgattctcctgcctcagcctgccgagtgcctgcaattgcaggcgagcgccgccacgcctgactgcctcggcctcccgaggtgccgggattgcagacggagtctcgttcactcagtgctcaatggtgcccaggctggagtgcagtggcgtgatctcggctcactacaacctccacctccca

SEQ ID NO: 82359 - DNA, 995 bp, Homo sapiens
ataacccctaatcgcgtagagattttttttaaaaaccagcctagcagcaataggtatgtgctgtggatgcttctccatgatgataaaggatgagtttgtgctgggatctccttatgaaaagataactggccaagcccatgaggaacaagaatgttatgctaatcagacccaaggtaaacagcctgcagtgcacctcctgactgattagcactgaacccacttggaatcatcaaccacaggcacgtggtaattggatgttcttctaatacacatagtgagattgtaaaatgaggatgatatatgaggaaagtcagacggagaaactaaagttcagttcttaaatacaagccaagggaacagactaagtgaatggtacagccaggattgaagcctggttttcacaaggtggtatgtcatgataaaacaagccaaagaaaaggttgggtagtgtttggaggctaaaagagaccaaagagtcttagtgaatcaaccttgatgcgattagggtagtactaaccctaatcgcggacgttggacgacaaagatggcggcagggaccagcagttactgggaagatctcaggaaacaggctcgacagctggaaaatgaacttgacctgaaactagtttccttcagcaaactatgtacaagttacagtcatagcagtacccgagatggaagacgcgacaggtatagttctgatacaacaccccttttaaatggatcaagccaagacagaatgtttgagacaatggcgattgagattgaacaacttttggcaaggcttacaggggtaaatgataaaatggcagaatataccaacagtgcaggtgtcccctccttgaatgcagccctgatgcatacattacagcggcatagagacatattgcaggattataccacctgtattccatcaactccaagccaactttatgtctatacgcgcaacggcccaatcttatggactccctactaaagattcgctcagtttgcgt

SEQ ID NO: 82360 - DNA, 828 bp, Homo sapiens
ataacccctaatcgcgtagagattttttttaaaaaccagcctagcagcaataggtatgtgctgtggatgcttctccatgatgataaaggatgagtttgtgctgggatctccttatgaaaagataactggccaagcccatgaggaacaagaatgttatgctaatcagacccaaggtaaacagcctgcagtgcacctcctgactgattagcactgaacccacttggaatcatcaaccacaggcacgtggtaattggatgttcttctaatacacatagtgagattgtaaaatgaggatgatatatgaggaaagtcagacggagaaactaaagttcagttcttaaatacaagccaagggaacagactaagtgaatggtacagccaggattgaagcctggttttcacaaggtggtatgtcatgataaaacaagccaaagaaaaggttgggtagtgtttggaggctaaaagagaccaaagagtcttagtgaatcaaccttgatgcgattagggtagtactaaccctaatcgcggacgttggacgacaaagatggcggcagggaccagcagttactgggaagatctcaggaaacaggctcgacagctggaaaatgaacttgacctgaaactagtttccttcagcaaactatgtacaagttacagtcatagcagtacccgagatggaagacgcgacaggtataggtactaccagattctgtctcctatgccttaactgtgtttttaaagcattaaaaaataaactaaaatatataacttctgtaagttggtctattggtgaatttttggtgttttgttttgccattcattgtttta

SEQ ID NO: 82361 - DNA, 1150 bp, Homo sapiens
tggcttactgccttgtataaaaagatatcagagaacagtggagtcatttggaaaaagcgcagtggtaaagtggcttcggaagtgattttttccccttattttctggcacagtgctttctaagatgatgttgctcactgtagttttctttcacttttaaaggcatgatggttccaggcaggataatcttaaatggtgatttgtcatctttttttccccttgcagcattgctatggcaacaaaagaaaatatgacttcacagagaggaatgttgaagtcaattcacagcaaaatgaacactttggccaatcgttttcctgctgtaaacagcctgatccagaggatcaacctgaggaagcggcgggactcgctcatcctagggggtgttattgggatctgtaccatcctgttgctgctgtatgcgttccattgatgggacatcttcagggactcttgacagccaccgctttcacaccctggtctggaataaggaaacatcggagggagaagttgactgtcttgataattagcctgaccagcaggatgaatgcaagactgacagtgatggactctgtgacatggtcaggttgagctgaagccacagtttctctgtgctgtgttttctaacacatttttctgtttttaattaaaaaaaaaaaaaaaaggttttcagttgcttttgtctccctaggaggcaggtaaaccaatcaaaaacagagttttctgtgtttccatgatagtgttgaagcctaatgacaagccaggtcttacagctgggctcttcagaaaaccaggtttctacatccaaagactgcttttcttttagctgccagattggattgtgaataaaaataattcttccctctccctctccctctccccacggtctccctctttccacggtctccctctgatgccgagccgaagctggactgtactactgccatctcggctcactgcaacctccctgcctgattctcctgcctcagcctgccgagtgcctgcaattgcaggcgagcgccgccacgcctgactgcctcggcctcccgaggtgccgggattgcagacggagtctcgttcactcagtgctcaatggtgcccaggctggagtgcagtggcgtgatctcggctcactacaacctccacctccca

SEQ ID NO: 82362 - DNA, 2016 bp, Homo sapiens
ataacccctaatcgcgtagagattttttttaaaaaccagcctagcagcaataggtatgtgctgtggatgcttctccatgatgataaaggatgagtttgtgctgggatctccttatgaaaagataactggccaagcccatgaggaacaagaatgttatgctaatcagacccaaggtaaacagcctgcagtgcacctcctgactgattagcactgaacccacttggaatcatcaaccacaggcacgtggtaattggatgttcttctaatacacatagtgagattgtaaaatgaggatgatatatgaggaaagtcagacggagaaactaaagttcagttcttaaatacaagccaagggaacagactaagtgaatggtacagccaggattgaagcctggttttcacaaggtggtatgtcatgataaaacaagccaaagaaaaggttgggtagtgtttggaggctaaaagagaccaaagagtcttagtgaatcaaccttgatgcgattagggtagtactaaccctaatcgcggacgttggacgacaaagatggcggcagggaccagcagttactgggaagatctcaggaaacaggctcgacagctggaaaatgaacttgacctgaaactagtttccttcagcaaactatgtacaagttacagtcatagcagtacccgagatggaagacgcgacaggtatagttctgatacaacaccccttttaaatggatcaagccaagacagaatgtttgagacaatggcgattgagattgaacaacttttggcaaggcttacaggggtaaatgataaaatggcagaatataccaacagtgcaggtgtcccctccttgaatgcagccctgatgcatacattacagcggcatagagacatattgcaggattatacacatgaattccataaaaccaaagcaaactttatggcaatacgggaaagggagaatcttatgggatcagtacgaaaagatattgagtcatataaaagtgggtctggagtaaacaacagaagaactgagctatttttgaaagaacatgaccaccttcgaaactcagatcgtctgatagaagagacaataagcattgctatggcaacaaaagaaaatatgacttcacagagaggaatgttgaagtcaattcacagcaaaatgaacactttggccaatcgttttcctgctgtaaacagcctgatccagaggatcaacctgaggaagcggcgggactcgctcatcctagggggtgttattgggatctgtaccatcctgttgctgctgtatgcgttccattgatgggacatcttcagggactcttgacagccaccgctttcacaccctggtctggaataaggaaacatcggagggagaagttgactgtcttgataattagcctgaccagcaggatgaatgcaagactgacagtgatggactctgtgacatggtcaggttgagctgaagccacagtttctctgtgctgtgttttctaacacatttttctgtttttaattaaaaaaaaaaaaaaaaggttttcagttgcttttgtctccctaggaggcaggtaaaccaatcaaaaacagagttttctgtgtttccatgatagtgttgaagcctaatgacaagccaggtcttacagctgggctcttcagaaaaccaggtttctacatccaaagactgcttttcttttagctgccagattggattgtgaataaaaataattcttccctctccctctccctctccccacggtctccctctttccacggtctccctctgatgccgagccgaagctggactgtactactgccatctcggctcactgcaacctccctgcctgattctcctgcctcagcctgccgagtgcctgcaattgcaggcgagcgccgccacgcctgactgcctcggcctcccgaggtgccgggattgcagacggagtctcgttcactcagtgctcaatggtgcccaggctggagtgcagtggcgtgatctcggctcactacaacctccacctccca

SEQ ID NO: 82363 - DNA, 1559 bp, Homo sapiens
ataacccctaatcgcgtagagattttttttaaaaaccagcctagcagcaataggtatgtgctgtggatgcttctccatgatgataaaggatgagtttgtgctgggatctccttatgaaaagataactggccaagcccatgaggaacaagaatgttatgctaatcagacccaaggtaaacagcctgcagtgcacctcctgactgattagcactgaacccacttggaatcatcaaccacaggcacgtggtaattggatgttcttctaatacacatagtgagattgtaaaatgaggatgatatatgaggaaagtcagacggagaaactaaagttcagttcttaaatacaagccaagggaacagactaagtgaatggtacagccaggattgaagcctggttttcacaaggtggtatgtcatgataaaacaagccaaagaaaaggttgggtagtgtttggaggctaaaagagaccaaagagtcttagtgaatcaaccttgatgcgattagggtagtactaaccctaatcgcggacgttggacgacaaagatggcggcagggaccagcagttactgggaagatctcaggaaacaggctcgacagctggaaaatgaacttgacctgaaactagtttccttcagcaaactatgtacaagttacagtcatagcagtacccgagatggaagacgcgacaggtatagttctgatacaacaccccttttaaatggatcaagccaagacagaatgtttgagacaatggcgattgagattgaacaacttttggcaaggcttacaggggtaaatgataaaatggcagaatataccaacagtgcaggtgtcccctccttgaatgcagccctgatgcatacattacagcggcatagagacatattgcaggtaatatattgggctcgagatgttttcattatcacaggagtttgggtttttttttttaatccctgcattggatatgtgcacatatatttaaaaggacaaagagaaaaatctgagaaaataaatgccatgctaaagggacttgttttacttttttttggggtcaccattataaaattctgaaaatatctaatagctcttgctatttcttggcgaagttgagtaatattcatcactgggtacatatacttccactatgggagacctagctagctagctgtaacagtgaaatagccaatggtcatgtatagacaataacgtggtgggtaagcgtgtactttcagctagctttgaagataatatggagggggaattatttactatacttagtatattgtttaagaaaacagtaaatgtgtatgcaccaataaaactaaataaacttttaaagatttaaatggaggatatgttaaaaatatggtagtacaaatagaaaggactttctaaataagacttgatactggaaaccataacgaatggctaatttgcttactacacagagatataatagaaataagaaaaagacagtaggaaaatggacaaaggatataaaattgcttacaaaaaaatgaatggccaaaactataaaaacattttcagcagtatttcc

SEQ ID NO: 82364 - DNA, 1269 bp, Homo sapiens
ataacccctaatcgcgtagagattttttttaaaaaccagcctagcagcaataggtatgtgctgtggatgcttctccatgatgataaaggatgagtttgtgctgggatctccttatgaaaagataactggccaagcccatgaggaacaagaatgttatgctaatcagacccaaggtaaacagcctgcagtgcacctcctgactgattagcactgaacccacttggaatcatcaaccacaggcacgtggtaattggatgttcttctaatacacatagtgagattgtaaaatgaggatgatatatgaggaaagtcagacggagaaactaaagttcagttcttaaatacaagccaagggaacagactaagtgaatggtacagccaggattgaagcctggttttcacaaggtggtatgtcatgataaaacaagccaaagaaaaggttgggtagtgtttggaggctaaaagagaccaaagagtcttagtgaatcaaccttgatgcgattagggtagtactaaccctaatcgcggacgttggacgacaaagatggcggcagggaccagcagttactgggaagatctcaggaaacaggctcgacagctggaaaatgaacttgacctgaaactagtttccttcagcaaactatgtacaagttacagtcatagcagtacccgagatggaagacgcgacaggtatagttctgatacaacaccccttttaaatggatcaagccaagacagaatgtttgagacaatggcgattgagattgaacaacttttggcaaggcttacaggggtaaatgataaaatggcagaatataccaacagtgcaggtgtcccctccttgaatgcagccctgatgcatacattacagcggcatagagacatattgcaggattatacacatgaattccataaaaccaaagcaaactttatggcaatacgggaaagggagaatcttatgggatcagtacgaaaagatattgagtcatataaaagtgggtctggagtaaacaacagaagaactgagctatttttgaaagaacatgaccaccttcgaaactcagatcgtctgatagaagagacaataagcattgctatggcaacaaaagaaaatatgacttcacagagaggaatgttgaagtcaattcacagccaccctaggaagggggggactccccatctagggggggtatttgggaccgggccctcccgctggtggtggatgggtcaatggtgggaaatttagggactttgcaagcacagtttata

SEQ ID NO: 82365 - DNA, 503 bp, Homo sapiens
agtcaaaacagattttctcttgtctcacgtccttccttttttaagctaaccgttcccattttctttcatcagctctatagtgagaggagacaccgtgctagcagccctcactcgctctggccgcgcttgaggagccctttaacccaccgctgcagtgtggaagcccctctctggactgccggagaccgtagccggctccctctgcttgcgggaaagtgtggagggagagacacgggtgggaaccggggctgtgcagggcactcatgggccagcgtgagttctgggtgagcacggactcggcaggccctgcactccgaacggccggcgccactggccccaggcagtgaaaagcttaacacccaggccagcagctgcggaggatgtgccgggtcccccagcactgcctgccggccggcccgcccgccccgcacttgaattctggccggacctcaagccgcctccctgcggggcaggggctggggacctgcagcccaccatgctcg

SEQ ID NO: 82366 - DNA, 265 bp, Homo sapiens
ttgtccgcgctttttcccctctgcacaaatagtagcacttctgtacctttcttatttttctttttaccaggtggtcttggtaaaggctgtacataagtgtttccttgatcttgctcttttttaaacaactgcacggtattcaactgtgtattatgttctataatttgttaataagtaccccattggtggtcatgaggttgtttccaattcttctttttcaaacattgctgcaataacttactgtgaactcacatcatttttcatg

SEQ ID NO: 82367 - DNA, 455 bp, Homo sapiens
tgaaactccatctttactaaaaatacaaaaattagccaggcatggtggtgtgcacctgtagtcccacctccccactagctgggactacgggttggcttggcttccatggctgtgggggcttctggttcatgccctttcctcctttctctcttgttcagtgttttcctccatagaatggctaaggccgtgccagccacctgaaaggagctgagttctagcctctactgattttgcgtgtgagctccttgccactccaaaatttttcttagccagagggccttgctgtcacttcttttgacttgctcatccatgctccctcagaaggtcctggggctcttcctttgatagccccttggcaagactgcaagctctgagctcctctcagctgcacccaaggtcttaattatcagaaagtttactcttcctgacaagggcttccatcttgccaaatattc

SEQ ID NO: 82368 - DNA, 395 bp, Homo sapiens
tgaaccctggtatccatttgaacaggtggctgaataagacagcttcagaaggggcagcagctgctgggagtggatggtgtcccagcacaatctggggttgtggtcatgaaaaacaaaataggaaatgatgtatacagtgaccttgaaagagttcatttttactaaattagtcccaaaaggaaaagggagaaatatttcagggcaccgtcaagcagccctgggtttagcaaggtgagcatgttttctgtaatgtggacactcaactggaatgtggcatgctaattttagaagggcaccagcctgttgaccgactttccattataatttacatgccgcctgcataactaccaggttatcaattgtgtattttgactcacatatttctttagattcaa

SEQ ID NO: 82369 - DNA, 592 bp, Homo sapiens
aacaagtgttcagaggtgccatgcagtaatgaaaccagtccaggagccaggctgtaagtgctgtaattcaagtaagcttttggttaatttaaagggatggtagttacaccagctcctaacccatcgccatcttctgtttcatgtttttgattactgagaagtgacactcaaatgtttattttttcttaaaactactgagtacattttgtaacagctccagtttctactgagagctcatttatgccatatttcctttgctcacataactctaagagtacttctgttttttactgaaagcttgtatttctgtctctgctaagttataaacttactgatgacaaaaaaaaaaacaaaaaaaaaaaaagaaaaaataaaaaaaacaagaaaaaacacaacaaaaaaaaaaacacgaaacaaagaaggaagaagacgagacgagaagagaggagaagacgagcagagagaacgagactagctctatggccgaccaacctcgtggcgttctccgctcggcgcgcgcgggtcgtgcgccgctccggcggttgggctcctgtccgatcgttcgatcgggtattctcggcgggctgtggcg

SEQ ID NO: 82370 - DNA, 712 bp, Homo sapiens
ctacatacccacatacacggacatagatttttttttcctttctattcatgcctggtcttgttcattccctagagtcttagccaagaatgtttgaaaggactagagggtgtcaaagcttagccatttattttgactgttcttgaatgagatacattatacactaataagtgagaatcaattaagcagaaattcggtctgcttaattggtacctcctagatttggctcctaggattagctgtagttttggagggtgaaatcaccaatcctctatgccagtgtccagttctcacaccatgtataaatactggtgtggtctagataagcaaagggtttgaaaactggtaaaccattcattgtacctaaatcagttttttggctaccatactacttggcatctgtaatctcaaagcatagtatcccctgtgctcaaactgaagaggaaattaagaaagtattgcgctgttcattggagccacttaaagtaattggcttagcttatctggtttgacttttccataaagatgaaattcatgtaatttgttaaatccttactacattatacgttgatgataatgtcttttccttgaatatgcttccattcttaattcatgatgatatttttgactttgtaatgattgatgtcctttcctcaccaccattcaccaagtggggcaaataaaaaggaaatctgcaaattttccgaagaaaggc

SEQ ID NO: 82371 - DNA, 660 bp, Homo sapiens
cagacacgggaagagagataaagctcagggatgtcttggcttcagaacaagccccactcatgggaacaaatccattcccatgggaactcaccctgtatcacaagaggagaatcactcccagcaccacggactccccagggagtcactcccacgacccacacgtctccctcccctcaggccccacctccctacgctgccacactgggggtcccgtttcaacaagagttttgctgggaacagatgcactgactacatccaggtcgtggtaagggctgtgcaagtatttgagtccctgctttgatttcttttggggatagacctaggaatggaatggcggcttcgcagggtaattttgtgtttacctgtttctggaaggagcacactgagctggccagagcaggcttgtgttttcctctgtgctccttcctgcttcccaggatgcagatgagatggcaggtgccccagcagccctcgccaaccataaggcatggattcctcaccttcggctcggggagcacagagactgagggccgtggactcggggtgagatggtggcacctccatcacagacccacagactctgtgtccagcccttccggaaaggtgacagaaatgaaaagtctgccttatggaagacaaggttattcagaattttcggtt

SEQ ID NO: 82372 - DNA, 1633 bp, Homo sapiens
tctaactttcagcaaatgtcaccctcattaaactccatctaattgtgcccagttccccaccctcctacaggggacaagaagtgtcccaacgcaaatagtgtatctggcagcctcataggactcaactggagtccggctccagccagtaaagggtcaactcagctctgaatgttgggagtttcacactgttaaggagaacgctgaggaggagatagcaaagaagaagttaggaaatgttggtgtctttttgcatttttccaaatgaaccttgtcactaaaatctctgcatacctttcatttaatctctattgcctattccacttttaacctgttcctctaagcataccactttagcctggattatgattcttttctttcttcacttctttgccttaaaattgttttttttaaaaaatcctgctactcatgttaccttgcatggttcagtttctcccttctaatactgccaacttccttaacccagacctcttatcgcaaagacaggagaatgtttttctatattgaagccaatagaaaactactaaaaggctacatgcaattagtaaatttttaaatgtacattttttaaatgagtgtaggaaacataaaactttagtaggtgcatgcttactgggaaagcacgcatgcatgctaaaatgtcattgtacagtacatattgtttaccacttgttttttagtttaatattacattatggatatcttttcaagttacatataatacctatatgtagctgacatacatttcactgcaagggtattgaattattttgtaactggccttagagggtttttacattgctgcttttttctttttttaaatactaccaactaaaagccataaactcttttctttttctttttttcttcactctgtactatgaaaaaagtttaagcatatataaaagtacaattgtactacttctaataaatccccacaaacctgtcacccagcttcaacattatcagattatggccaaacttgtttcacttacaactctactcatatcccatgcttttatatatatataattttaaagcatatctgagctagcatagtctttcaaatgtaaatatttcaatatttgctgtaaaagatatgaattttaaaaatgtaaacataatactattttcatacctaaacaattaacagtaattccttaatatcaattttccagttttctcaaagatgtcataaacttttttttgttcattttgttttttaacttatttgaatcaagatccaaggaagaaaacacattgtgatgggttgatatgtctcctaagtttcttttaatatatgggtaccctctcctgttttctcttccaactcacttgttaaagaaaatgaagttgtttgtcctgtagagttgcacacagcatgggttttgctgtctgcatcatgtgctatagtctaagatgttctgttgtcctctgtattttctgtaaattgtagtaatgtacaggcttgatcaaaatcaagttttaagtttttttgaccagataaatttaatgattttggcaagatggtgtgttctatttgaagcctattattttctgtttgtctctttttctgtggtgttagcagctattgatcctcaatacctatagccag

SEQ ID NO: 82373 - DNA, 1542 bp, Homo sapiens
tctaactttcagcaaatgtcaccctcattaaactccatctaattgtgcccagttccccaccctcctacaggggacaagaagtgtcccaacgcaaatagtgtatctggcagcctcataggactcaactggagtccggctccagccagtaaagggtcaactcagctctgaatgttgggagtttcacactgttaaggagaacgctgaggaggagatagcaaagaagaagttaggaaatgttggtgtctttttgcatttttccaaatgaaccttgtcactaaaatctctgcatacctttcatttaatctctattgcctattccacttttaacctgttcctctaagcataccactttagcctggattatgattcttttctttcttcacttctttgccttaaaattgttttttttaaaaaatcctgctactcatgttaccttgcatggttcagtttctcccttctaatactgccaacttccttaacccagacctcttatcgcaaagacaggagaatgtttttctatattgaagccaatagaaaactactaaaaggctacatgcaattagtaaatttttaaatgtacattttttaaatgagtgtaggaaacataaaactttagtaggtgcatgcttactgggaaagcacgcatgcatgctaaaatgtcattgtacagtacatattgtttaccacttgttttttagtttaatattacattatggatatcttttcaagttacatataatacctatatgtagctgacatacatttcactgcaagggtattgaattattttgtaactggccttagagggtttttacattgctgcttttttctttttttaaatactaccaactaaaagccataaactcttttctttttctttttttcttcactctgtactatgaaaaaagtttaagcatatataaaagtacaattgtactacttctaataaatccccacaaacctgtcacccagcttcaacattatcagattatggccaaacttgtttcacttacaactctactcatatcccatgcttttatatatatataattttaaagcatatctgagctagcatagtctttcaaatgtaaatatttcaatatttgctgtaaaagatatgaattttaaaaatgtaaacataatactattttcatacctaaacaattaacagtaattccttaatatcaattttccagttttctcaaagatgtcataaacttttttttgttcattttgttttttaacttatttgaatcaagatccaaggaagaaaacacattgtgatgggttgatatgtctcctaagtttcttttaatatatgggtaccctctcctgttttctcttccaactcacttgttaaagaaaatgaagttgtttgtcctgtagagttgcacacagcatgggttttgctgtctgcatcatgtgctatagtctaagatgttctgttgtcctctgtattttctgtaaattgtagtaatgtacaggcttgatcaaaatcaagttttaagtttttttgaccagataaatttaatgattttggca

SEQ ID NO: 82374 - DNA, 371 bp, Homo sapiens
ctaaacagatttaactccctcccagcaatccagattaatttaatatgctttcttaacggcattccgcatttctcattaaagcaaatgaacgtccatccctctctgataaattagggcaaaaaaattcatatgtttagggcatagggaaggaggagttgttggctgttaaaaaaaagaacaaaaaaaagtaccgcaaatggcgtttcaaagtctagacatcttcatcatcaacacaaacattcctcttcacaaagggacctcaagtaagcttaggctggagggcccacctgcgtatgcttttcttctcattctttcttaccttccctccagcccacccaacccacattcagtgaccaagtcacgtgggtttt

SEQ ID NO: 82375 - DNA, 415 bp, Homo sapiens
gctttcctctttccggggtctccagctttcagacagtagaatcatgagacttctcagcctccttaaccatgtgagccaatgccttataacaaatatcctacaaacatatatatataaatgtatacatacaaatataataatatcatacaaatatatatatttatatgtatacatgtaattacatttaagaacatttaaggctatttacatgtaaagaaaggaaaaataatgtaaatatttgttttcacctgaaataaatgtcagacactgtctttgtttaaagaaatagtcctcttaaactttgggcaatgctgccaattacattaacttacaatgttatttcaattgcatcaccagagtaaaatcttagagtattatttttatctaataaattaataacatccacatggcttta

SEQ ID NO: 82376 - DNA, 368 bp, Homo sapiens
cctgcttaacaatctttagaactattagaagcaatacctctgtttacatgtacctgtttccccaccaaagacataaaacgaggaaaataaaagcaaaaagcaaataaatatgtgaagtacacatacattcacactcaaccttggatttaatcaatcctgaatcattttgttaaatttatctaaatatatatacacatatatccacacacaggcacgtatagacatagactatgcattataatatattttaatttggaaacaacatttagacatttggctcaaagttacggaatattactatatctgacacgtttctgtttcaagaaatgtttacctaacatttttgagagttaaaaaaaatagttgtc

SEQ ID NO: 82377 - DNA, 389 bp, Homo sapiens
acccaaggctttactctcttggccagcatctgagctccccactctagtgtggtgggttgatgtgtgttttacctctgaggggctcactacagccctctctccttgaagatggagtgagctggtgggctatggaggagtgcttgtagaaaggaaactaaagctttctggacaaacagataaactcctagattcattcatttattcagtaaatatgtatgcatcctgattatatgctgggtactcctctgggtgctcatgaagcatcagtcactcaaacacatgaagcttgttgcttttgtgagcttccattctgcaggggaagatagacattgagcaataagcttaataaatacatcctatggtatgttaggaggtgataagtgctacag

SEQ ID NO: 82378 - DNA, 488 bp, Homo sapiens
gaaatgaagacacatcctgaactggaacaagacttgccaggggtgaactggcaaactttccttgtactaacttcacaatccaaaccacacgatgttatttcttatagtggctgtaaaggaagaagctgcagggcttaaatgtactcttttccagtttctggatttatctgtagtttacttttattttgtcgctttggtcgtgcattgaatgttctcttgactttcaaagatttgaaaatatatttaatatagtaattcagagggggtgaactcttgcatggtttgattaaaattatagccttaaaaagcattgttagttttagggcagatagcctttggattcaagtatatcttgtctttcatgtatcaattcaactgaccatttgaccttaaaagttggtatttttaattccgaattatttgtgtgctaccgtaaatcaggcgtattgcttgtcagttgttttttttctttttccttttcccttttt

SEQ ID NO: 82379 - DNA, 1001 bp, Homo sapiens
tggtacataactttttcttgttagcatttggtaggggtgttttattgaccaaatatgttcccacaacctagttttttgtaactgactaaatatagtagatttttaaattttatcatcaaaatctatagacaatttttgattaaaatagactccacatctatgtcctgcttttcttcttattattaattacattgttgtataaaagaacaagacttcagaatcaagaatatcttgtctcttggcattgaatttatacaaggtgctctttctttaatgctgtctcaaaggacatattttttactcattaaaaaggaagatcagaatctagttgtatgcattgctccaacatattagtaattaaaattaggaggtaaatgtggtcaaagcgatagaaagacttgagatgtcatttatattgattatagcactctacaaacagaaattgttaaataatagtttatataaatattttgtatcatttcaaatatttgagtgcctgaagtttctcctcttgtatagttcagattatcaatttgaagacttactccgttagttaaaatgtttctagtctcgtttattatataaaagcaattttcagttaaatgtgttccgcttacataaaacattacaaattagtgagtatttaattacattttcatgttcctgtaatgtctttagaagattttcatattattacctatcaatatatgtatgctttgtcaaagaaaaatcaaacatatatatcattgagattgaaactttttaaaagtacttaattctattgaaaaaccacatccataggaacaattgcaatataatattgggaacattaaatatatatcctatgtctattttatatataagcatatatgattaaaaatataaagatttttaaacgtagtattataaagtaaaaattagttaacttctgatgattatgttaattaagataaaattattctgattttggtgatttttaaataaaaatattaaattacatg

SEQ ID NO: 82380 - DNA, 384 bp, Homo sapiens
tgcctgcctggtattccattttgtgacttccataatttgagtgcaccttctcttattgatgaacatttacagttttccaaattttacagttattaataatctgtgataatccttacacatatgttttttatgttctcatactgttatttctgaaggacagaattttagaagtgggattgctgggtcattgggtatgtgcatcttaaattctaatagctgctgctaaataggcagaagcaatttgaagtcatgccagtattatgtgagaagaccagtttccatacatttaccaatatgtatttatctgcatttctccacgatcattgtagtaactgtatctttataacctgctggtttgtgtggtggtttaaaatttttcctctt

SEQ ID NO: 82381 - DNA, 102 bp, Homo sapiens
aggaagtggaggagggactgagagtaaggaaaagccccccgcttcccaactgcaggttactgagcctggtgtaggcctgagctggggaaagagagagccttt

SEQ ID NO: 82382 - DNA, 468 bp, Homo sapiens
caaatctattggttaatccatttgaatgccatcaacatgcctaagtattgtgtggtggatgctatgatgtgtcacacagaacttcttttaggatgacaggatggagtctccagctgtgaaagtgttgctgcagacagccctcagcttccagttcttgtaaaaatggcctcagcttcagagagctccattacccaagctcattcatttcctggggtgttctgcatccagtgagtgttctgtggacttgccagaacactcacttttggaacctggccaccatgttggaaggaatcccagagcacatgaggaggccttttgggggtgttccagctgacagccttagctaaggtcttagctaatagtcagcatcaactgctggcaagtgaacaaggcttcagatgattccagccctcagctttccagctgaaaacattgtaaagcaaatacagccatttccactttaaaaaa

SEQ ID NO: 82383 - DNA, 483 bp, Homo sapiens
aataaaaaagccttttagccaacaatatgtaagcagaagaatggagcaggagttagagagaaccctcaagcaataatggaggccactggagaggcaagactgccaaaggctaagttattgacccagtatttttaaaactgcctccgaaaagaagcctgaacgaaagaaaataatttgtgctattagaatgtatttttcctttgtgttcctatctacttccttcacaagctatttttggagcatttggccagagtgatctttctgaaatggaagactcatgtattgttcctgtgagtcagatgggaagctgatggaaagtcttcagcagagaaaaatccaaagtgactgcaatgatttacgtgactctacagatcctggcccctgtggtatcacctcccacctctctactcttcactgctgcactccagccatattggttccctcactttcttcacactcagtaagaatgctctacctcagggc

SEQ ID NO: 82384 - DNA, 389 bp, Homo sapiens
tacaaagaccgttgtaaagattgggaatgaggaaggtgaccttgatcgggtatccacagaccttacaaaatccttgtatgtaattagagttatgttaatggcacatttataagcaaagtaatgtcatggaatggaagacccataagttgacatgagaaacagaaagtgtattaaagttaatctgcattcatgggggcagattgttagccaaatgaataaagaattagattcatcttcatggtatgtagcatgaagaatttaaaatgaatcagaggtttaaattaactgcagaaattatagagtttcagaaaacgaatttctctccaattttgaggaaattactgatgatacacattgtagaagcaacaagaaaaacaaagattgatagt

SEQ ID NO: 82385 - DNA, 245 bp, Homo sapiens
ttcccgagtttttctggctacttaaaggcctttacatcttcaggtaaattttaggtgagtttatgaaatttaacaacaaaaaaattctgcttggattttgacattgaattgaatctatagatcaattttggggtgaattgccgtctttataatattgagtcttccaatcaatgaaaatggaatggccttcatttatttggaacaattatctcaccaatactttgtagttttagttgaatatgtct

SEQ ID NO: 82386 - DNA, 1747 bp, Homo sapiens
  misc_feature (84)..(84): n is a, c, g, or t
gcggcacgaggggggtgtctggctggcgtggctccctgtttggggcctctcccctgaatccttcctggggccatggaggccagncagacaccccggccagaatggagctgactgaattgctcctcgtggtcatgcttctcctaactgcaaggctaacgctgtccagcccggctcctcctgcttgtgacctccgagtcctcagtaaactgcttcgtgactcccatgtccttcacagcagactgagccagtgcccagaggttcaccctttgcctacacctgtcctgctgcctgctgtggactttagcttgggagaatggaaaacccagatggaggagaccaaggcacaggacattctgggagcagtgacccttctgctggagggagtgatggcagcacggggacaactgggacccacttgcctctcatccctcctggggcagctttctggacaggtccgtctcctccttggggccctgcagagcctccttggaacccagcttcctccacagggcaggaccacagctcacaaggatcccaatgccatcttcctgagcttccaacacctgctccgaggaaaggtgcgtttcctgatgcttgtaggagggtccaccctctgcgtcaggcgggccccacccaccacagctgtccccagcagaacctctctagtcctcacactgaacgagctcccaaacaggacttctggattgttggagacaaacttcactgcctcagccagaactactggctctgggcttctgaagtggcagcagggattcagagccaagattcctggtctgctgaaccaaacctccaggtccctggaccaaatccccggatacctgaacaggatacacgaactcttgaatggaactcgtggactctttcctggaccctcacgcaggaccctaggagccccggacatttcctcaggaacatcagacacaggctccctgccacccaacctccagcctggatattctccttccccaacccatcctcctactggacagtatacgctcttccctcttccacccaccttgcccacccctgtggtccagctccaccccctgcttcctgacccttctgctccaacgcccacccctaccagccctcttctaaacacatcctacacccactcccagaatctgtctcaggaagggtaaggttctcagacactgccgacatcagcattgtctcgtgtacagctcccttccctgcagggcgcccctgggagacaactggacaagatttcctactttctcctgaaacccaaagccctggtaaaagggatacacaggactgaaaagggaatcatttttcactgtacattataaaccttcagaagctatttttttaagctatcagcaatactcatcagagcagctagctctttggtctattttctgcagaaatttgcaactcactgattctctacatgctctttttctgtgataactctgcaaaggcctgggctggcctggcagttgaacagagggagagactaaccttgagtcagaaaacagagaaagggtaatttcctttgcttcaaattcaaggccttccaacgcccccatcccctttactatcattctcagtgggactctgatcccatattcttaacagatctttactcttgagaaatgaataagctttctctcagaaatgctgtccctatacactagacaaaactgagcctgtataaggaataaatgggagcgccgaaaagctccctaaaaagcaagggaaa

SEQ ID NO: 82387 - DNA, 1774 bp, Homo sapiens
tcttcctacccatctgctccccagagggctgcctgctgtgcacttgggtcctggagcccttctccacccggatagattcctcacccttggcccgcctttgccccaccctactctgcccagaagtgcaagagcctaagccgcctccatggccccaggaaggattcaggggagaggccccaaacagggagccacgccagccagacaccccggccagaatggagctgactgaattgctcctcgtggtcatgcttctcctaactgcaaggctaacgctgtccagcccggctcctcctgcttgtgacctccgagtcctcagtaaactgcttcgtgactcccatgtccttcacagcagactgagccagtgcccagaggttcaccctttgcctacacctgtcctgctgcctgctgtggactttagcttgggagaatggaaaacccagatggaggagaccaaggcacaggacattctgggagcagtgacccttctgctggagggagtgatggcagcacggggacaactgggacccacttgcctctcatccctcctggggcagctttctggacaggtccgtctcctccttggggccctgcagagcctccttggaacccagcttcctccacagggcaggaccacagctcacaaggatcccaatgccatcttcctgagcttccaacacctgctccgaggaaaggtgcgtttcctgatgcttgtaggagggtccaccctctgcgtcaggcgggccccacccaccacagctgtccccagcagaacctctctagtcctcacactgaacgagctcccaaacaggacttctggattgttggagacaaacttcactgcctcagccagaactactggctctgggcttctgaagtggcagcagggattcagagccaagattcctggtctgctgaaccaaacctccaggtccctggaccaaatccccggatacctgaacaggatacacgaactcttgaatggaactcgtggactctttcctggaccctcacgcaggaccctaggagccccggacatttcctcaggaacatcagacacaggctccctgccacccaacctccagcctggatattctccttccccaacccatcctcctactggacagtatacgctcttccctcttccacccaccttgcccacccctgtggtccagctccaccccctgcttcctgacccttctgctccaacgcccacccctaccagccctcttctaaacacatcctacacccactcccagaatctgtctcaggaagggtaaggttctcagacactgccgacatcagcattgtctcgtgtacagctcccttccctgcagggcgcccctgggagacaactggacaagatttcctactttctcctgaaacccaaagccctggtaaaagggatacacaggactgaaaagggaatcatttttcactgtacattataaaccttcagaagctatttttttaagctatcagcaatactcatcagagcagctagctctttggtctattttctgcagaaatttgcaactcactgattctctacatgctctttttctgtgataactctgcaaaggcctgggctggcctggcagttgaacagagggagagactaaccttgagtcagaaaacagagaaagggtaatttcctttgcttcaaattcaaggccttccaacgcccccatcccctttactatcattctcagtgggactctgatcccatattcttaacagatctttactcttgagaaatgaataagctttctctcag

SEQ ID NO: 82388 - DNA, 1631 bp, Homo sapiens
  misc_feature (84)..(84): n is a, c, g, or t
gcggcacgaggggggtgtctggctggcgtggctccctgtttggggcctctcccctgaatccttcctggggccatggaggccagncagacaccccggccagaatggagctgactgaattgctcctcgtggtcatgcttctcctaactgcaaggctaacgctgtccagcccggctcctcctgcttgtgacctccgagtcctcagtaaactgcttcgtgactcccatgtccttcacagcagactgagccagtgcccagaggttcaccctttgcctacacctgtcctgctgcctgctgtggactttagcttgggagaatggaaaacccagatggaggagaccaaggcacaggacattctgggagcagtgacccttctgctggagggagtgatggcagcacggggacaactgggacccacttgcctctcatccctcctggggcagctttctggacaggtccgtctcctccttggggccctgcagagcctccttggaacccagcttcctccacagggcaggaccacagctcacaaggatcccaatgccatcttcctgagcttccaacacctgctccgaggaaaggacttctggattgttggagacaaacttcactgcctcagccagaactactggctctgggcttctgaagtggcagcagggattcagagccaagattcctggtctgctgaaccaaacctccaggtccctggaccaaatccccggatacctgaacaggatacacgaactcttgaatggaactcgtggactctttcctggaccctcacgcaggaccctaggagccccggacatttcctcaggaacatcagacacaggctccctgccacccaacctccagcctggatattctccttccccaacccatcctcctactggacagtatacgctcttccctcttccacccaccttgcccacccctgtggtccagctccaccccctgcttcctgacccttctgctccaacgcccacccctaccagccctcttctaaacacatcctacacccactcccagaatctgtctcaggaagggtaaggttctcagacactgccgacatcagcattgtctcgtgtacagctcccttccctgcagggcgcccctgggagacaactggacaagatttcctactttctcctgaaacccaaagccctggtaaaagggatacacaggactgaaaagggaatcatttttcactgtacattataaaccttcagaagctatttttttaagctatcagcaatactcatcagagcagctagctctttggtctattttctgcagaaatttgcaactcactgattctctacatgctctttttctgtgataactctgcaaaggcctgggctggcctggcagttgaacagagggagagactaaccttgagtcagaaaacagagaaagggtaatttcctttgcttcaaattcaaggccttccaacgcccccatcccctttactatcattctcagtgggactctgatcccatattcttaacagatctttactcttgagaaatgaataagctttctctcagaaatgctgtccctatacactagacaaaactgagcctgtataaggaataaatgggagcgccgaaaagctccctaaaaagcaagggaaa

SEQ ID NO: 82389 - DNA, 1694 bp, Homo sapiens
  misc_feature (84)..(84): n is a, c, g, or t
gcggcacgaggggggtgtctggctggcgtggctccctgtttggggcctctcccctgaatccttcctggggccatggaggccagncagacaccccggccagaatggagctgactgaattgctcctcgtggtcatgcttctcctaactgcaaggctaacgctgtccagcccggctcctcctgcttgtgacctccgagtcctcagtaaactgcttcgtgactcccatgtccttcacagcagactgagccagtgcccagaggttcaccctttgcctacacctgtcctgctgcctgctgtggactttagcttgggagaatggaaaacccagatggaggagaccaaggcacaggacattctgggagcagtgacccttctgctggagggagtgatggcagcacggggacaactgggacccacttgcctctcatccctcctggggcagctttctggacaggtccgtctcctccttggggccctgcagagcctccttggaacccagacaagggaggcctgagatctggccctggtgtttggcctcaggaccatcctctgccctcagcttcttcctccacagggcaggaccacagctcacaaggatcccaatgccatcttcctgagcttccaacacctgctccgaggaaaggacttctggattgttggagacaaacttcactgcctcagccagaactactggctctgggcttctgaagtggcagcagggattcagagccaagattcctggtctgctgaaccaaacctccaggtccctggaccaaatccccggatacctgaacaggatacacgaactcttgaatggaactcgtggactctttcctggaccctcacgcaggaccctaggagccccggacatttcctcaggaacatcagacacaggctccctgccacccaacctccagcctggatattctccttccccaacccatcctcctactggacagtatacgctcttccctcttccacccaccttgcccacccctgtggtccagctccaccccctgcttcctgacccttctgctccaacgcccacccctaccagccctcttctaaacacatcctacacccactcccagaatctgtctcaggaagggtaaggttctcagacactgccgacatcagcattgtctcgtgtacagctcccttccctgcagggcgcccctgggagacaactggacaagatttcctactttctcctgaaacccaaagccctggtaaaagggatacacaggactgaaaagggaatcatttttcactgtacattataaaccttcagaagctatttttttaagctatcagcaatactcatcagagcagctagctctttggtctattttctgcagaaatttgcaactcactgattctctacatgctctttttctgtgataactctgcaaaggcctgggctggcctggcagttgaacagagggagagactaaccttgagtcagaaaacagagaaagggtaatttcctttgcttcaaattcaaggccttccaacgcccccatcccctttactatcattctcagtgggactctgatcccatattcttaacagatctttactcttgagaaatgaataagctttctctcagaaatgctgtccctatacactagacaaaactgagcctgtataaggaataaatgggagcgccgaaaagctccctaaaaagcaagggaaa

SEQ ID NO: 82390 - DNA, 1055 bp, Homo sapiens
tagtttctccagacaggaagaaagcctctcacacttaaacatgcaatgacgtgacacacttggagacatgagtgcagagccactcagccgctcctgggcctctgcagcagatgccagtggactggccttgcagggtgacgaccactaagaggaagacccccaactccatctgagcaggagaaggagctttgaagtaacccgagagctctccaggccccacccagacctttacccgctccccttcttcaagaagatctcctcctctctggtccaggagccctaacccactgcctctgcctgtccccaagggcccgcctccgtgtctccacagcacaactcgggcccaggcctgacaccactggagagaccccaggcccacttctagccaggcctgtgccttcctagtcactctaactcccagagagaataagaatgcatgtaatagctataccaaccgcgcatccggctttcacatgcactgtctcccctccctccacaccccacttcttcacttcaattggcagcgccacatccaggcgtcagcccccattcactccaggaacactttcttatccccacccctttgctcctcttctgcaaagccaatgcaggtggcaggaaggtgaggggtagtggaccaatggcaaccctctgtgggaacaaggggccgaggccacgctgcctgcatctcgtgctggggacctgcatgcgccagcaccagggcttggactggatcttactcagtccatggtgcccagcctctgccccaacatgccctctgcatgtgaccgtcatgccctggatggagccactcctggctcaccccacctgcactgcactgtccccagagagccacccctccacccactcagagacagctgtggagagggccaggagaatgggattaccctatgaccaaggagacatgggaagaagccctccttccttccacgatcgaggttccgccatcaactcggttctcggatatgcaagtacctcactttgttaacttattaacttattggtttcattaaagttttcaagaggaggtgatt

SEQ ID NO: 82391 - DNA, 841 bp, Homo sapiens
acctcggcctcccaaactgctgggattataggcgtgagccatcgcaccccggcctcctatgagcatttcttaatagtgactctcctgatctatccattagggccaatgacccagactacctcacagggttgttgtgaggttcaaatgagataaggatgtgagtgtataataggtgctgtagtttagtttggtattttaatttcagtttacctaaaagcttctgagcttcttggaatttccgataaaaagtttagggaaactgacaatcatttcaaatccaacttattcctttctaacctccccttcttcttcccaacatatatccctgtctagaaagtccctataagttccctcttataatacaaacgtccctggggaaaagacaagagctgacttatctccagataacaccttaatggttcatatatgcttcagttaagagctggaatggcataggagttgggcccttgagagggaagggaggaccccctggaggcttaaactctgtaaagagatacagaaagctgatggcagactaagcagaaggcaaacttggtcgacttcccaatttttctgagggaaaaacctaacagaacagggccatatttcaacaattttgttgtatgtgccaattcctatctaaagggttagaattgtttattttcctctcttgtaagatacacataatttatacatgtaaatgtataaattatttttaggctggacatggtggctcacccctgtaatcccggcactctgggagactgagacagaaggatcccttgagcccaggagtttgagaccagcctgggcaatgtagggagaccccgtttctataaaa

SEQ ID NO: 82392 - DNA, 422 bp, Homo sapiens
ttcgccttcttctccaacattccctctcatcctgctccctctcatcctgctccagctaccactcaccactaatgactttcacatctcctctccagtcctaactgtgctccagaaccctacaagggggctttctggtgtcctcaacaatgccaccaggatctgtgtcattgcttctcatgtgctgtccagtgccattcactatgttagaccacagggacccaaagaaggataagacccattctaatggtcaatgctattagtaaattagcaaatgctgccacaggaaaatacagggctcaggaaacacaaagaaggagtgtctagcccagtctgggtagaagggaatggaggtgtcagaaaagttctccacgagaccctgtctctgagttgacccttccctcaccactggaactatctgtcaa

SEQ ID NO: 82393 - DNA, 371 bp, Homo sapiens
aagtcaccagcacgttaaaaagatcattcaccatgatcagtgggattcatcctagggatgcaaggatggctccacatatgcaaatcaataatccagatacatcacattaacataatgaagaacaaccatacgatcatttcaataggtgctaaaaaaaaaacctgataaaattcaatatcccttcatgataaaaattctcaacaaaatgagtatttaaggaacatacctcaaaataatagaaatagagattttaattttttatgtcataatgaaacatcttgtgcactttccatagagacactgtaggaaagatccattcttatttagacatttttatgtttaaatatttataaagttacaagatataaaaa

SEQ ID NO: 82394 - DNA, 370 bp, Homo sapiens
gaaaaggggaaaaatcacaatatgtgttctagacaatattggtttagattttttaaagatctaaaattcaattatggaaagccagcagcctgatccagttactgtgactaaagcaattgtcagaccatctctagtcaaccccttatgggttttgcaatgtgtctaccccaattttggatcaggaggggtcaaacagaaatacagcaatgtgattaaactgctcctttgcaaacaatatgaaaaggtttgttcttccaaagtagattctaacaaatcgtctgctcactgtggggtagcaaagagagaaaagcaaatctttctattagtctcaagcaagtcttcagatttacacacaatctaatgaagcatc

SEQ ID NO: 82395 - DNA, 453 bp, Homo sapiens
catcagactaatcccagaatatagcttctaatcagatatgcctttgacagtatgcaagactggtaggatagatacagcactaattagttttgttaatgtgatgaatttgcttacctaaataattaattttccatggcttaggaaagtgcatacaagataaaacaggtaaataaggtaaacaaagaaagtgaaaatagaaatgataacatgaatgtaagagaagttattttcaggtcatttgctagagatagaccttttgtttaggcctagctctccagcatatattaaaaggagataagggccgggtgtggcagtgcacccttacagtcctagctactgagaaggctgagttgagagaatcactgaagcctgggagtttgaggctgcagtgagctatgagcatgccactgaactccagcctgggcaacagaacaagaccctggctcttaaaaa

SEQ ID NO: 82396 - DNA, 316 bp, Homo sapiens
aaacacagcattcttatattctgaaagatgggagaggaggcaaagggcaaaacctgatatttcttaggtgtcaacaactacagtttcctatgtttctccatccctatcaggaaaaactgccaggctgaattctcacaaaaattgcctacaatgtcactactgttctccactctttccaagaaccgcggtgaggactggtcacgcagcgtgaggggggcaggtgcagaagagcaagtgtagaagccatctcttcgccggataacgaggcaggaccccagcatctcgtgggacctcctcccttcgggaaattgcgagc

SEQ ID NO: 82397 - DNA, 834 bp, Homo sapiens
gatgactttacatgattgcaggggaaatacaatgcataatgtctagtatgcttattattatttttattatttgagactgggtctcgctctgttactcaggctggagtgcagtggcacaatctcggctcactgccacctcctcctcccgggttcaagcgattctcctccctcagcttcctgagtagctgggattacaggcgcgtatcaccacgcctggctaatttctgtatttttggtagagacggtgtttcactatgttggccaggctggtctcgaactcctgacctcaggtgatccacccgcctcggcctcccaaagtgctcggattacaggtgtgagcccccgcgcccagcccttgttattatttttgacaacactctgcgacttcgttgtccctggcctggcaacccattcaggatatgcccatctctgctggtgaacatgaactctcactgcatggaaactggactgagtccccgctgtcctgagcactttgcaccacagtgcgagtcagcgatcacactctgttcctgacagttgtgtctccgtcgtcaccgtcgtcacaggcgtccgggcccttacaacgagtccagcggtttcttcctgctgcctcagctgatctcccccactggccacattccatctgggcatggtgacagcatgtcccctggggccaatgcgaccacagcctcatgagctgccctcagcgctcctgggggttcctgctgcggcattcttctgtcaccattatccgcatcatttccagtagaggatttccagtgttttccttgctctttccacaatatctcactcaacactgctggccattggagg

SEQ ID NO: 82398 - DNA, 488 bp, Homo sapiens
tcatgttcatttcttcttgccgctgttacaaactaccctacattgagttgcttaatacaccacaaatctactaactaagaggtctgggggggcagatgtcaaataggtctattaaggctaaagtcaagggtgcagcaggactgcatcccttctggaggttctggagagaatatgtcccttgcctttcccagttgctaaagccactcttattctttggctcatggcccctaactgcatcttcaaagccagaagcaaagcatattcgaatctccctctgtgacctgtgcttccatcatcaaatctccttcaattcggactctcttacctccctctttcacttataaagacctcttgtgattgctggacacagaggccgtggctcacagccataatcccaacaatttaggagttcaaagcaggagaaacgcttgaggccaaaacttcaggaccagcctgggaaacacagcgagaccccctcaattaaacaa

SEQ ID NO: 82399 - DNA, 383 bp, Homo sapiens
tagtactgaggctctgatagggagtgtctccttgggtgttgatttcttccctgactgaagtttcccttggaggtctgaatgctttcacagatagttgttttttgagaacccaaggttgtaaacccaaatgcctagagggcgaggccagtaaaatgaatcagtgctttgggccatgtgaaggcctcaggggacctggaggactgtgtcccaccaaaggggctgctgtggtaatgtaggcccagtgtggaccacctgtggagttttcctgaaatctgcattttaactagctggcgtttaatccaaattaaactacggggacactatatgcagctgaacaaaatatttctgtggatcacccaactgcttgtctagaaggactcaga

SEQ ID NO: 82400 - DNA, 417 bp, Homo sapiens
aaattaatcacaaaaatgtaattcatatgctaacttcagcagcacatacactaaaattggaatgatacagagatcagcatggtccttgtgcaaggatggcacacaaatgcatgaagagttccatattttttattcttactaaaatcaattcatttgtaataaagaaattaaaatgcattatttaatttaattcctctatcatatgctttgaagtaatgatcccagaacattcttaagatattttaaaatgtatttttcatataatggtaatttgtttgaaagtataatggagcaagacaagatgatgctcttagtgtgtactaaaagaaaaggtctattataatattgttattaaatcttattttgttattaaatttgttatttgttattaaaatcttattttgtatatattcttat

SEQ ID NO: 82401 - DNA, 348 bp, Homo sapiens
ttagccaggatggtctcgatctcctgacctcatgatccacccgcctcggcctcccaaagtgctgggaattacaggtgtgagccaccgcgcccggccagacctttatggattttagggttgatgaggtggagtcacagcagttttacctggatctaatgagagtggcagaagactccaggtgttagttatttacataattctaacctggtgtttttctccaggcaacctttggaatgagccccaaatgcgtgtaggtagtatatcctatacttactcctgaatttgcttagagcaatattccagaatccttcccaatatagtcaccagatcatggtgctgggttcaggt

SEQ ID NO: 82402 - DNA, 295 bp, Homo sapiens
ccaggctgtgccaaccgtaagaattgccaccgtagtctcaagtgtcatggagaaaaggcttgtaccattaattctgctgttgctaagaaaccttgagcaagaaggacatgctgtctttatttgagcctcagtttctcttgttttacaagtgaggattctaataatctatccaaaaaggtgttctactcttaaattggatttgaaacacacatgatagtaaatatgtttgtattcttaacagtctggttacaaggacagcgatgagaaaacaaataccctgtttaattatttaggt

SEQ ID NO: 82403 - DNA, 334 bp, Homo sapiens
tttattttgtaataccaaataggatttaagaaaattaacgtatttctttactatggaaaaccacattgtcatttgtgacatcatctatattaaatatggttttcacattagttatttgtcacttacttggaaaatgatgctgttaggtcctggtattaaaaatctagaaaagacttgttggtttatgtgctgaaatgtctttatttataattaattttaactactatttacttcatttcggatcctgtttaacaaagatacttgagacatccatttgttttaatgaaatctgtatggatatggaaatgcttgccctaataaaagcctacatata

SEQ ID NO: 82404 - DNA, 242 bp, Homo sapiens
ccctccacaccagccgggtttcatcctccagtgagcgccggcgcggtccttcccgggagacttcttccacctggcgtgttgtgctctgctcacgggaaggaggctggaggtccgctctgtgccaagggctctggggccctgggccagcgtgtctgtctgattttagaactgtaggtcagtggtgagtagtaggagcccaggctttgggcatcaaggcagttgtgtgtgccgggttacagcct

SEQ ID NO: 82405 - DNA, 813 bp, Homo sapiens
ttccagagtcagcggcgcgcgggcaggctgccacgaccctaacccgcccggcggacggggcccagcagggaaagccaatgaatatcccctacccctccacaggctgcccgtagggtttctctgtaaagcgcgacgacgcgttctcaaaagcgccattaatgcgactcgatgcaaagcgtcaaaatgcggtgcgatacacgtatacgtgggaaaccggttcagcattaaagttcaagtggagcggagggggctgcatatttttatttctatttatttgttgagacggaatctcattctgtcgcccaggctggagtgcagtggcgcgatctcgactcgctgcttccctccgcttcccgggttcagacgattcttgtgcctcagcctcccgagtagctgggattacaggcatgcaccactactcctggctaatttttgtatttttagtagtcggtcaggctgctctcgaactcctgacctcaagtgatccgcccgcctcggcctcccaaggtgttgggattacaggcgtgagccaccggcgcccggtggccgggagctgcatttttatgtgtgggcgggagtcttgtttccgcaagaatcgagggaaacggcagtgcaggccagggggggtctgactcccacctctgtccccgattggggtctccaagcgtggttagcggagggagccccggctgcgggtatgacggtggttgtggcagcaagaaggcgagtgtcaccaagggcgtcctgggccccaattcagtggcgcagggtctgcaggactcgaggtgaaatttgagccaagggccccggggc

SEQ ID NO: 82406 - DNA, 418 bp, Homo sapiens
aattttcttattttaagaatttgggaaattgttagccagtatttcttcaagtacattttcagctcttccctctttcttctctctttctgaaactctgatgacacgaatgttagatcttttattatagttccacatgtccctgaggctctattcatgtttttcagtctattttctccgtgttcagatggataatatctattgatttatcctccaattcaatgatttgttcctgtgtctcttccattctgatatttagcccattcactgagcattttatttcagttctatttttcagctctgaagtgcccatttggttcttgttaatatcttctatttctttgctgaagctttctgctttttcatttgttataagcatatgtgtaatttactcatagaataaatgtttgtaccacgcttg

SEQ ID NO: 82407 - DNA, 523 bp, Homo sapiens
tgttattttatatcaggggttggcaaaccacggcctatgggccagatatggtcctcagcctgtgtttataaggttcttgagctaggactagtttttagatttttgaagtgttgttaaaaaatatccacacaaaataatgtgtgacagaaacatacagtatgtgacccacaaaatctaaaatatttactctctggccctttatagaaaaagttttgccagcccttattgtaccctacacttagcttagtacctatggatcacagctgttttatagctcttttgccagtctatagatgtaattttcaacagcttagctaaaggattcacgcttctgctaccttctaatgctagctttaatatatattggctattatgattatcttaagtacaataaatcaaaagctaagaccaaaataagagctgtgcatatatttaaagccctgattatgttcagcattattgctttgagttttgttattcagtaactattaaatataaagctatatatattaacagtaaaaga

SEQ ID NO: 82408 - DNA, 669 bp, Homo sapiens
tcctgaagtacggggccttcgtccctcctgagctcttcggctccgagttcttcatgggacggctgatgaggaggatcccggagccccggatctgctttctggaagccatctggagcaacattttctccctgaacctgctggatgcctggtatgacctcaccagttctggggagtcctggaaacagcacatcaaggacaagaccaggagcttagagaaggagcccctgaccacctcggggacctcctcgcggctggaggcctcgtggctgcagccaggcacggcgctggcccaggcatttaaaggcttcctgacaggcaggcccctccaccagcgcagccccaacttcctccagggcctccagctgcaccaggactactgtagccacaaagacttctccacctgggcagactaccagcttgactccatgcccagccagctgacccccaaggagccccggctctgcctggtggacgccgcctacttcatcaacaccagctctccctccatgttccggccaggccgcaggctggacctcatcctctccttcgactactccctatctgcgcccttcgaggtaccctggtcaccccaggggaacccctctgcccagccaggccaagctccagaggcgagcagcagggccactgagcccctgccccacaccgccg

SEQ ID NO: 82409 - DNA, 315 bp, Homo sapiens
agagaaacaaagtgcatttgtgaaatcaaatccattctgaacacccacaattaatgtgcacttcagcacaaccctcctgagaatgggtactaaaatgacttgaaccaagtcacttctttattctttaaagtgtcctcaaaggttttcaacacctccctacaccaccactccacaaaatacaaaccaaaatcaaagagacttgagccccttttattcatagagggagttatttcccccagccctcatctatagtttttcagttcagcttattagatgctgtttctcatctgtactctgccttctctctgattgaaa

SEQ ID NO: 82410 - DNA, 658 bp, Homo sapiens
acagtatagcaagacagtctgcactggcaaacccaggcctttccatctgtagcccacatagcaaactttgggcagaggcttccctagcaagtttgttcctttcctattcatttctggccctacgaccatcagctcaattgaaactagtccaacagaatcagaggcatttgtaaaaggttttcagaggaaaatctactgtaaactgtgtaatcctgaattagtccatgtttgattctacatgtcttaaataaggcttcagcttatgacatgtctacaaggtgaacaggagcattcgagactgtaagcccggctggatttcagtctgtcacatactgttatttgtaaaggaataaatgttctaaactcagtaagtaaactttagtggtgatacaactaaatcataaaggcatgaccatttcttctgtgaagttatgttcccttttctgtatgaaaatggataaaatcaaaacttagtctagcatattttttcctttgtataaaatgtgaagaatgtgaatccacacaagggaaagcaggactgtattaaaaataacatgtgattacactaaatacatattagtttggaaaagaaaaggaatacatcatgttattaaaatgtcctggtgtgtttctaagtaacagaatctctgtggtcaaa

SEQ ID NO: 82411 - DNA, 417 bp, Homo sapiens
ggaggtaaggtgacattcatccatgttgttgcatatagctttagattattcttattgctgtgtagtatgaatgcatattatgtaaatatatcacagtgtctttccatatgtatagttgtaggtcattcccactgctgtatgctattcctagtgtgaatataacacatgtatttatgtttccttctgttgctgtgcattggatagttcccaggttgtgacaatatggatagtgccactatggacattcaggtatatgtcttttcatgaacatatggacacatttgtgttgctaccaaagaatgaaattgttagatcaaaggacacctatgatcacctcaagtagataatgcagttttccaaaggagttgtacccactgacacagtcaccagcagggtacaagtcccatttgttctgca

SEQ ID NO: 82412 - DNA, 321 bp, Homo sapiens
gtcagagaccaagtggaaaggagtgtactcaatgaactcacttggatgccatagaaacactgagagaaaaggcacctaaaccagcctgggctgtcaggggaggctttctggaagaggtgacacctgatatgagtcccaatggatgataggaatcaatcaggcaaagatggggttggaggaacgcaaagctgcagacggagcagcctattgaaaggctgagtttggagagcatggagcatgtttggttcagtccagctgagcagggaaacgtaatacaaaaacctcaactatgaatcacagggagagagaagcggtagaagg

SEQ ID NO: 82413 - DNA, 937 bp, Homo sapiens
gtctcaaaaaaaaaaaattaaattaaaaaaataaaaaaaatattgaaagagtgattagtaatgaagatggcccccaaaaaagagcagtacccagaggggagagagaattctgaattgagaggactgtttctagagtaccacagccagcagggcacaggccactgaagtgtcttgtatgtctgaccctgtgcagtccctccaagtcctgattctcttgtgatgtattgtgaaggtgctgtgagtgacttggttcaggtgcgaatctgttaggttgttgagcagacagctcttcagcatcccccgtattacctctctgtgctgggcaacaaatcactacaggcctggtggcttcgaacagcagccatttatttcctagcttctgtggggcaggagtccaggcacagcgaactcaacctagggtctcataaaggctgcattcagggtgttggctagggctgggttctcatcaggagacttgactcagaggatccacatccaggctcttctagactggggacagaattccttttcttagggctgaagcattcttggcagctttacttcttcagagccagcagtagagacagagactcttataagataggtgctaaactcttctgtgatacagcccatcatcaccttttgtgaattccgctacttagaagcaagtcagagatctcacctgtgctcaaggtgggaggggattacaggagctgggggcctggggccactgtgaagtctgtctgtcacacttaccaagtgtggccaggagagatgcagaggacaccgtccatgcccttagagatgctgtctgtgggaggactctgcagatgagttggtccagtagaggcatgaagtaagtggggctgtcttttaccacagagcacatggtcatgaggcagagctggaggtgaatttgaatgttgttgtattcaga

SEQ ID NO: 82414 - DNA, 1890 bp, Homo sapiens
  misc_feature (146)..(146): n is a, c, g, or t
  misc_feature (149)..(149): n is a, c, g, or t
  misc_feature (162)..(162): n is a, c, g, or t
  misc_feature (168)..(168): n is a, c, g, or t
  misc_feature (174)..(174): n is a, c, g, or t
  misc_feature (176)..(176): n is a, c, g, or t
  misc_feature (189)..(189): n is a, c, g, or t
  misc_feature (191)..(191): n is a, c, g, or t
  misc_feature (226)..(226): n is a, c, g, or t
  misc_feature (255)..(255): n is a, c, g, or t
  misc_feature (414)..(414): n is a, c, g, or t
  misc_feature (550)..(550): n is a, c, g, or t
  misc_feature (560)..(560): n is a, c, g, or t
  misc_feature (832)..(832): n is a, c, g, or t
  misc_feature (842)..(842): n is a, c, g, or t
  misc_feature (866)..(866): n is a, c, g, or t
  misc_feature (882)..(884): n is a, c, g, or t
  misc_feature (887)..(887): n is a, c, g, or t
  misc_feature (897)..(897): n is a, c, g, or t
  misc_feature (910)..(910): n is a, c, g, or t
  misc_feature (925)..(925): n is a, c, g, or t
  misc_feature (940)..(940): n is a, c, g, or t
  misc_feature (961)..(961): n is a, c, g, or t
  misc_feature (986)..(986): n is a, c, g, or t
  misc_feature (999)..(999): n is a, c, g, or t
  misc_feature (1049)..(1049): n is a, c, g, or t
  misc_feature (1058)..(1061): n is a, c, g, or t
  misc_feature (1068)..(1068): n is a, c, g, or t
  misc_feature (1081)..(1081): n is a, c, g, or t
  misc_feature (1351)..(1351): n is a, c, g, or t
  misc_feature (1754)..(1754): n is a, c, g, or t
  misc_feature (1887)..(1887): n is a, c, g, or t
  misc_feature (1890)..(1890): n is a, c, g, or t
tgttgttgttgttttaggatatgaatttccaggtcctcaacttccacacatacttgttcctaaaattgatttgctttccttaagacttgcctcaatcccctctggcaccgtccactttgtaatgcctatgcctcctcagtccttanatntaggaaggaagtntaaggnacctangnaaagtaaagcccntncgaagattaatcaagatagcataaacctgtgggtntttaaaaacgccctagcgtatacgtattntcatttgttgaagctatcttagaagtttgtatatttactcctcttggtatgctctgaattcatatatgtatggtagagtgaggtggcaagagtaatacattttcattcaaataatttggtgcttccttacccacttttgtcagagtgcttgaatttganggagagttccacgacacaataaagagaacgtctgtatgtgttttgaatatttaaatccccttttccatgaatttaaaataaacactcttttcagctgttgtcagctcattattaatcgcggaaagagaagtacctnaatagtgaancaatatatagattagaggcactgattttaaaaaatgtaattgaaatattttaagatacattggataaaattttgggataaaacttacatgatttctttagtaggagaatattaataagatagttgagacgtttataaatcctgttaaaggaaacccatgccttattaatgtttcttatattcttttaacaaaatataaaatgtcagctgctagacctaattgttttgatagtatacttttatctaattaagtgcatgatttatctctgtagnagatgcattnccaatagatttttactttcttctnttaagaattgtttatnnnaantgtattattntcttttttttacnaattgtatacgaatnaaaattataactctntaaaggacttttttctttgtntctcactttggtcacaggaaatganacaatctaaactncgttacatgtttttgtttgtacatgttgtattatacaagcttcagtgttntcaataatnnnnaaacatnttaagcacagaanacttaaacagattagattttcacacaagaaatagcatacaaaatcaattcaaagatgaagaatctgccttaggaataacttttaatctgttttcccttcccaatttgcagcattagctttccccagtcccataatttgagaacctggtggtagattaatgatggttaccaattctttaccactccccttatcgaaaggcacagactatttctccactttcttcaatctggattgggcctgtttcaccttcatctggtagaatacagtagnaaagacaccatggcagttccagactcaatattttaagaggactggcagcttctctttctctctcttagaagctgactgccaagctatgaaaaagtggaagagccatgtgaaagggcccatgtggaggagaactgggcccctggccaacaaggttcatccctaaacacggtttacataaatttatatttcaagttgtcctcttgacagtttcaaatgagtcaaaattgatcattattattattactacataatgtgggtaaggaaaggcttagacaatattttcatgtccaagcctttcatgttgctttgcatgtttttgaatctttactattgccattttgttatggctttagttaaaactagatcacataatctgtaacatcagagaatcccacatatatanactgtaataagtcacaataggctgaaaagaaacaagtgggaggccagcatacagaactctatgtcatccctcaggatactaccagaaccacagcagtttctttaaacattttgcttcccgccccttaaaaganttn

SEQ ID NO: 82415 - DNA, 560 bp, Homo sapiens
tgcagtgagccaagatcgcaccactgcactccagcctgggcaacagagtgagactgtgtctcaaaaaaaaaaaaaaagattttagtgagaacacaaaccgccagagtcaattatgaaccgtctttcccattagacagaccatcaggccagctctgaatgtcctgtatccagcccaagcctagcatggaggaaaaacgtaggaaatagttgttaatgatgatccaatgcctgctggctagaagacacagtaatgatactgcttgctgtgaccagagtctgaaaagcgattttcaaaccttgcctcaaaggctgcattaaagtgagaaacttatccatgctggctcttaccaacctactgcttcccacagtagcctgggtatgaaatggccttggaccattctgaacagtaaattattattctttgcattttaataactttagggaaatataacattttgacacagttaatgctcactctattgttccctgccccactaagtatgtgactcaggaaggcaagtaccagaagtcccaggtaggaactcgtccataaaaaaaaa

SEQ ID NO: 82416 - DNA, 308 bp, Homo sapiens
aaaaagaaaagaaaaagaaagccaggcttcatggaaagatcgtatgtgtgacccaaatatgagttcttcagctcagccatggtaatcccttctctctccactcccgggagtgagagagacggtagatttggaatcatgcattttagcaagtggacttgttgaaacaggaagcaagggccttcagtgtagcccattcttgatccagagctgttgcctgtgacacgcggtttctctggatgtcacaggcagctgcctggtgcccagcttgcttctcgactggtggcccctatgggtggttgtgcgatgga

SEQ ID NO: 82417 - DNA, 644 bp, Homo sapiens
tcaagagcttgccggtgagcctggacggaggcataggtgcagctaattaggataagacaggggccgcgctgtggtcagccgtgggaagccggcgaggggactggagttggggctacacttgcctccctcctatgctgcttcctgagccacgaagtggtcattgccagcatcccaggcaacaaacagcaagactcagacatctccaaggaaaccctttgagtggatctgtaccgttgttctcgtcttgctctcttgctgccctgccaccttcacagctgctttctgtttcctggttccaggaagacagcggggcacagggtccctgctttgtgaggagcagctggcttctccctttgcccccaggttttgccctcccacatgtctcccttctggtgacccggaccccagacaaactatgcctgcctccctgaagccaggcatcctgaggaacttgatagacaaacaatgacagtgttttccagaactgtgggtacgtgtctaatctcagatggtactatgaattcctggagatcaaagtttggatctaattcaacccctgatcctcgaaacggctttcttgcaaagtgtatatattggtttctttgctgaatgaatgaataaaacatggaaaatgtggtaattca

SEQ ID NO: 82418 - DNA, 583 bp, Homo sapiens
tcgtctggtctggtggaactaagggagaggtagaaaaccagctggaacctgtttaacaggggacagcatccagatgcccacagaaaagctattttcttcaggaggaccgtctttccacttccagcttcaccctccacacacatgacagagttcaagttgccaaagacctcaggcagcaccagaggttcttgcacaggtttgctgatgtgttttgaagcaatagacagatcacagcccagcaagtggtccgtggccagatcggaagagatatcaagcaaagacatgtggcggaaactggcgctggtataagctgctctcagctgctcattcagattctttgcctcttgaaaccactgggcttcaccctgtgccatttctgtggagagaaagaaaggggggcacaacagggattcatagtcacatctccctcagtctgaacgccatgccttttcattccatgattctgcctgtctactatgaatgtgttaggattttccacagccatccatgattcccacattgcgatcatctcataggttttggcacaaaatcggaatgtgggaagcatgtgtccaaagtgcca

SEQ ID NO: 82419 - DNA, 340 bp, Homo sapiens
aattaatcaatcagccattttggtggccgaaatttataaggcaagtaatacttttagtttctttgatagacaccatgatcagaaacatagtctctttcttaaagggaaaataggaagtcttctgagtcataacagatgcatacataaatttctctgagtcttcataagaaacacaagcaagatttcacagaggcagtggaatttgaactgagtcttgagaaataagcaatatctgaacatgtagaatgcaaaataaaggataagcaagtgctaatgcccagagggtaatacatattaaataaccaataaccaattgctacttgtgtttcttacactagaa

SEQ ID NO: 82420 - DNA, 502 bp, Homo sapiens
attgaatgagttcgaaaaatgcttctagttttcacagctttttggaggtgggtattgcaatgaggaagttgaacctggaccacctgcccactgcctatgggcaaacggaggctaggagagttcaagtgactcgccccagtcctgcagcttatagatggcggagttggcattatggccagggtctgctttacccccaagtcttgtcccagctctgccactcagccacattgaccctggaagtctcccgtaaatagtagcatcttgcacagtgacctggcatgacactgaagccataatgggcaagtcactgccttctctgctttcctgaaaaaggtgggccatatcacatttcctgaatcctaagacgtgtgtttctgaagtcagatgtctcagaatgcatgtgtccatttaccaagagagacttgtatttctatgccctacttccccacccccaggaagctcttattaaaatgctggcatcttatttcatggcacagtagag

SEQ ID NO: 82421 - DNA, 623 bp, Homo sapiens
atgcaggcagggaaccagcctcggcgatggaaatcaatgaataagacttaaccttcctggtggcaaatactccaacagggacatcacagaccttccacaactctgaggaagatgaaagtctcccgtgcacccagctctggctgaggacggaatgacctggggagaacttgggcacttcaggttttgtgcccagactcctcctgttgtccctgcccacctctcctaccccttcctcctctggaagcagtctttctcttgctcaaaaaagccccaatcctatctctgattctagctgcccacaaagccccagggagaaaaccttcccaaaaaggcagtggataaatcagaatgcagtgaggagcggatcctttccaggaccaagacagatgctgaagaagacagcagggaccggagcccagcaaactggatgagagcagcaaggccttcatgcatcttcaggctccatcagcagagggagagaatgcattagacgggagtttcctgactcctattttctaatgtggcagtcctaatgagaagagggtttgaagcgctaagatgtgctgacagtcctaatggtttgttatgagtttccttagaaaaattaaacactgaaaaacaaa

SEQ ID NO: 82422 - DNA, 207 bp, Homo sapiens
cctcctgggctcaagtgatcctcctgtctcagtcacttgagtagctgggactacaggcgtgtgccaccatgtccagctaattttttttcttttctcaacttttagttaaaaaacaaacaaataagactgtgtgtctatagaattgtctactttttatttggataacttaaaaaatttttttttgaatagtttttttttttcttggcc

SEQ ID NO: 82423 - DNA, 350 bp, Homo sapiens
actcgggaggccgaggtaggagaatctcttgaacctgggaggcagagtttgcagtgagccaggattgcaccactacataaaaataagtaaatgtacaaagtcaagctgtggtgagtgctgttaggaaataaagtaagaagataggagtgctcatgtttggaggtcacgacaggcctccctgaagaggtggcacttcaggagagactgggacagtcaggaggtgagtggggcatcatctgggggcctcaggataggagtgaatttgagatggggcttgaggatgtagacagagacagacgagagagagaaacagtgagatagaaggagacaccgagagacagagatagagg

SEQ ID NO: 82424 - DNA, 472 bp, Homo sapiens
actctttaacttaatatacctgcatgatgaatgtatttcagaaatttgaatgaaaagtagtattcttcccatatattaaagttagttcacttaaaacctatataaacattttaggttaaaactttaatgttaatcatttgaaataataatatacttgttttaagtctatctcttagatattgtagttattttaaacttgatcactttctgctaatgcatactgttagtttagtcccatcacatggttaactgactatgtagacttcttaatttaaaaagaaatggcaaaacagacaaaatgctgctaaagaaatttgcaaaggtctcagacaggggaagaatagaaaagaaaaagaatagcagtattcattctctaccttactactcccccccaccttccattttcaaattccaagtatttagttgaatacttgctgaacttttttcagtatttttattggacttgttaaaa

SEQ ID NO: 82425 - DNA, 280 bp, Homo sapiens
tcccccattggctctgttcttcctgccagtgctcttccccctgctcactgggttccagctgtgcgggcctccctgctgttcaatggaatgagacccatgcccctcctggttatcccactcagagtgcccttcaacagctacagggctggcccatcctttctctgttaccttcggaggaagccttctctagataccatctttaaaacagcaatcttccttctccatccccagcagcacctctgacccccttcacctgctttatttttctccatattatcat

SEQ ID NO: 82426 - DNA, 128 bp, Homo sapiens
atgctgaagaacctattttcttcttcccagttttatcttggtcctatccttggtccaaacttctctttccttgaacacaaaaggaagacgcagatggaagccctctgctccctggatcctcaattgac

SEQ ID NO: 82427 - DNA, 650 bp, Homo sapiens
tggcgggtgcttgtagtcccagctactcgggaggctgaggcaggagaatggcgtgaacccgggaggcggagcttgcagtgagccgagaccgcaccactgcactccagcctgggtgacagagcgagactctgtctcagaataaataaataaataaataaataaacgaaataatgaatttatatggcactaggcctcaactaggatttattttaatagatttagttacccagttcattctttttctacccattaagaaaacatatattgacagcatttagtatgcataaaatattcctgtcctaaagaactacttaaaaatcctaaagaactacttacaaatttcccttctaggtagtttcctttgcacaactaatatgcataatagcaccattgaaatactgtgcttttattttctcaatgtccatgatttttggatgacgtaattaagtgaattaaacatattttgtacttcttagtttctttctataagaaaataaaatggctgggagcagtggctcatgactgtaatcccaacactttgggaggctgagatgggaggattgcttaaggccaggagttcaagaccagcctggttaacatagcgagaccccatctctattaaaaaataataagtaaaagaaaaaatgtat

SEQ ID NO: 82428 - DNA, 414 bp, Homo sapiens
ctactgttttgtgactgactggccaatcaccaggcatggatctccctcgtcattttaggacggagtcactttctttgtgccatcctgtacagatggacatttcagttgaaaacccatactgggaggaacaggctgacattggtagcgttgccagtgtgccaagtactatagttcttggggagaaaggaagcggaatcgctggcccaggagttttgcacacacgtgtttcaggcttttggaccatgactccaggctggcccacagaaggccctcgtcagaagagcagtcacaggccggatgcggtggctcacacctagaatcccagccactttgggaggccaaggcaggaagatcacttgagctcaggagtttgaaaccagcctgggcaatatagtgagccctcacctctacaaa

SEQ ID NO: 82429 - DNA, 587 bp, Homo sapiens
tattgtattcattctcatgtgggctgaataaatctgttcacagcaggtgcctctatctgaccttaccctggtccccacaggcttcttccagaagagcacaaagggttgggtggcataagagctcatagaatattcatccagatgccttcaagggaaataggaaaatatacagtgaataatactgatgttatttatgtgcttcaagatcagtccccctcgacaggcattagtattctagttccttcagccccaggcatttcttggtaagaaatattcagtgatccctaagaacacgtgaggtcctccccacagctttatggagatacagtcaaggcacggtagaaggcagctgcaaagctcatggtgccagagaaatgggagaggccttcccacaacctcaggctctgagaagagcaggcagctaggacagggcaggcagacctggaaacaccaaaggaagaggcagccatggtgtagatccacctgagggccgttcctgagagcggacagcccggccccgccccaggagtgtcccgttgtatttgtacgcacagggacgaaaccattttaggatttgtctcaaggct

SEQ ID NO: 82430 - DNA, 738 bp, Homo sapiens
agcggcggggattacgggcatgagccactgtgcgcaatctgattttagatttcaaacagtataggataaaattgagagaaccatttggcaataaaaaatattaaaactgagtttgcagagaagggcatgatctatatatctactattaaaaaccattcaactgaatatatttccatggccatcacaccattattaaaacctctgaaaagactaacatgtaccagagtaaagatccacataagacatgtgtattagggttctccacagagacagaaacaataggatatatgtatatataaaccagagtttattaagaattggctcacacaattagaaggtgaagtcccatgatgactgtctgcaagctggaggagagaagccagttgtgtgtctcagtccaagtccaaaaccattaaaaccagggaagctgacaacgcagccctgagtctgaggccaaaggcttaagacccactgagtggccaccagtgcaagtcccagagtccaaaggctgaagagcctggagtctgatgtccaagggcagcaggaaaggaagcgagcatctggcatgggaagaagaaagattcagaagactaagcaagcaaacgaatcccaccttcctttgcctactttgttctagtcatgctggcagtcaaactggatggtaccactcacactgagggtgggtctatttctcccagtctactgactcaaatgtcaatctcctctggcaacaccctc

SEQ ID NO: 82431 - DNA, 549 bp, Homo sapiens
gggttacccaatccagtggtgttggaacaactagctggttagcatctcacttggtgaacactgactgctctgtccaggctgcaggcaagtgtgtgtgggcagcatgaggctttacaaagtgtgaatgagttgcaaatgatttcaaattaggagattcacataacaagctgtggaaggaaacaggcagaaggatatacaagaggtcatccccaatagcagtgtgaatccacagccaccagacatcccgatgggcgctgagtctcacaaatgatcagatccatgcccattccacatgggacaccacttccccctctcagcagaaacgggaaagactgggcaggtgtggagaagcagcctggagatgcctgtatgggcagaaatgatctaggttttgcatgctctctggcccagcgagcctcttcccgtacatctcacagaaacactaggatacgtgaaaataagcaagctggaaaacaacctgtaaagcggactctgtttttgtttttaaaatatttgtgtagagattgaaaaacacctggggagacatgt

SEQ ID NO: 82432 - DNA, 815 bp, Homo sapiens
gacaaagtcatgccagtccttccatactggcagttttaatttttacgaaaccacattcttcacgatgcctgatgctgtgcagaagagcgtagtctagaagaaagaacacggattttggagacaggcattcctctcaaccccaaacctgccatctcctagccatgtaactttggacaaggggcaatagaaagacaactaaagaaggatccaacgatttgaaattccagaacttcagtctgccaaaaaacaggtcatggcctcgcatcaatagtgccacaggccagtaccagaggatgaacaagcctcttctagactgggaaagaaactttgctgcagtcctggatggagcaaaaggccacagtgatgatgactatgatgaccctgagcttcggatggaagagacatggcagtcgattaaaattttaccagcccggcctataaaggaatctgaatatgcagatacacactatttcaaggttgcaatggacactccccttccgttagacaccaggacctctatctccattggacagccgacctggaacacacagacgaggttggaaagagtggacaaacccatttccaaggacgtcagaagccaaaacattaacaggagatgcatccgtaagaaagaacaagattcctttaccacctcctcggcctctcataacacttccgaagaagtaccaacccttgccccctgagccggagagcagcaggccacctttatctcagagacacacctttccagaagtccagagaatgcccagtcagataagcttaagggacttaagtgagccataaaatagggatgg

SEQ ID NO: 82433 - DNA, 692 bp, Homo sapiens
ctggcacccactcttgttgcttgctgaagattagtgacagacaggatgtcgcagacacatctatactgattagaatgaccctcctctctttttgctttctgtcttacggagcgaaaacatctttaaaaactacagctgaaatgacactgtgctacaccggtgaggggtttcttttctgtagtcaagtctaaaatattacctaatctgaactctccaaaaataactcacaacctaaaatttttcactccataatcctttcttttttatgttattatttttaatgtatcaatgatactgcatcagaacaggtggcttttggccaaaagtaaaaacattttgttctgaccaatgtgtgttttactcatatccaaacacaaccagtaatatgaactctgccccatgatgcaggagaaataaatattaagaatgtcactattctggaaaattattttgcctgagcatttaaaattttttatgtagtttttagcttccataaggaatggtttatgagtatgctatgctatccagataaggggaaaagctacttggtgggggcaggtgggtgtgagtgagagtgaagtatataatcaagtggtaagtattagaaatacctagtcagtgcttttttttaggggaggatgagaatatatatattaaggctctcaaagaagtaatacatttacttcagcaaa

SEQ ID NO: 82434 - DNA, 833 bp, Homo sapiens
gggcctagagagcgggcgtccagcagctcttggcaggacgcagcgatgtcagccatctgcagcaatgaggcggcgctgagcacctcgtggacgttggccgcgttgaccagcagcttggacgtatagatgaagttgaggatctgctgcaggccaccaggtgccagtgcctccagggacagctccacacgctgcagctgcttgttctgggtgaagagtgagtggaagaactggctgtaggcggctagcacacccttgtgtgccggaaagacgctgcgctggggcaccagcaccaagtccacgtcgcagaggtcaggctggaagaggcgctgctcgttcaggcggcccatcaagcaggcaaagtgcagcgccacgtcctccaccagcgagaactcagccgccggggagtcagttgtcttctcaaccagcaactgcggggacagagggcacaggagtgggtcaaggccagtgggcccctgcccgcccttcccccagcaccactcccagcattgccagccatccaggaggcagcccatcactcgtggctccactttacagcaacagagccgaaactagcaaggaagggattcaagcctgagtgagctgcctcagagctcaggctccactcgtgaccctctgaggctgaagatcaggtcctgtcactttctgggcctctgggtcatctcctgggaaatgggaaaagtcatcccaggaagggaaagggaaggaaaggggatgaaagagagaccacagtgaccaaccatccaggtttgccagggacctgggcattttctggggtgcagggctttcagtgctagaaccaggaccatcgcagg

SEQ ID NO: 82435 - DNA, 695 bp, Homo sapiens
gagccaaacaggatggttttatacgtgtgtgtttggcattaactttatttcctattcacgtaccagatattactgcccgctcttatgaaatagtttattccaccataaatgtatgttttaatgatcaccacatttttttggaatacattaatctgtctaaaaataggtgattaaatcatctgtcattctgctgtgaagctctttaatgttttctttgggaaataaattagaatgccatattggtttccaagcagacataagctggcgatgacttttttgtacaaaagttactgatgaaaagctcatagaggcatttggatttcttcagggttgtaaatccaggtatgttactactttatctactggaaattggggtaatgcaggagatgggaaagcatgatgttaaatcaactggtgaccccaaataattttccatggtgttcatcagccatgcacacactgtattactgtcatcattcctagcttttccactatgctgtctcaagtttgcacaaattgtaagtgattttaaatcattaactgatgtgacataatcaaattacttagggttttatttactgtgctccgagtaattcagttatgacttggcaaggtatttaacagacaatagtgaagttactacaaattcaactttgcattggacaactccatttgaggataccaccaccttcaaa

SEQ ID NO: 82436 - DNA, 459 bp, Homo sapiens
gttcatctagcagggaccccaaggagcccagccacacagagggagcaccagcagcttataggacctggcacttttccctctggtgttggccaggcttggttagtcatggctaattaggcctccaaaccatggccaaaatcactccctgaagtattgtcttttagaaagcatcctcattcattccttcgtttgacagatatttattaagtgtctacctgtgtgccatccactgttctaggtactggggccttgtcagtgaagaacagcaaaagatccccacttacttagaggcaataactaatagataactaagatgttagaaagtgtgataaaggctgggcatggtagctcacacctgtgatcccaagcactttgggaggctgaggcgggtggatcacttgaggtcaggagttcgaggccagcttggccaacatggtgaaaccctgtctctactaaaaa

SEQ ID NO: 82437 - DNA, 775 bp, Homo sapiens
aggattactattaatggagaaagcccaaaacatcggtcatggcatactttaacacctatagctgatgataaacttttcctatgtggtggactaagtgcagataatatcccattaagtgatggttggattcataatgtcacaacaaattgttggaaacaacttacacatttacctaaaacaagacctaggttatggcacacagcctgtttgggaaaagaaaatgaaataatggtatttggtgggagcaaagatgacttacttgccttggatacaggtcactgtaatgatttattgatctttcaaacacagccttattcactactcaggtcatgccttgactgcattggtaaaaattctatcatgttagaaagtcagatatctttattacctcctaaacttctgcaacaagtactcaaaaaaataacattttgggctgcagctaatcaccgagaagaacaaagagtccaaaaagaagaaacagaaaataaatatcagtggatcagtagcaattaaattgttatatactttacatatttagtatgttttaactttttaatcagactatacatttacactcccaaattgcaggctttatttaaaggataaaatttaaaggataaaaaaacagtcactctgttaagtgactatatgccatgggatatatggaaaaaagatattaatgcagattaatttatatttgtaaacaaatttccttacaaactgcagaacaaatattctttctgaaagtaagtacagttataacagattttaaatc

SEQ ID NO: 82438 - DNA, 407 bp, Homo sapiens
  misc_feature (401)..(406): n is a, c, g, or t
gtaattctcctgttaactagcaagtcaaggaatccgtaagcccatcttacatgtctttgggtggtgaggaaaatctcgatgatgtccatcaccgacagagtaagagactaatactgttaattgaattcccctaaagagaacaaaactataccatcgtgtggggggaagggtagaagaagcaaatccatacaagtctccaatatgtttgaattggttgcattgattttcctcagctaatggcctaggatagatgctgaattgtcctcagaaaatataaagttgattagagcagcttatttccacttaagactttttaaattgcagctacaaatatttcaaaggtatatgtgtatatttagatatatatttttttaataaaacattttatttttctattaaannnnnna

SEQ ID NO: 82439 - DNA, 599 bp, Homo sapiens
gggacagagccaatgtctttttcaactttatccccagtgtgcccctgggcttggtacacaacaggcaaccagaggcatttgttgagatgaattggaagagagtgtgacgcaaatccaacggaatgacctttgcttgtggctgggtttggggcgtgtgtatttttttaaggcaggatgccggctatagaacattttgtgagacatcctgagccctgacagcaccagtgaaattctgacgtagttagtcctgggtgataaaccggtgtttcatttcctgctttggaattctttccagtcacaagaccctcggtgtctccaggcccatggccaaagtttggagaattacactcatactcgcccacgtggacagcgacattcatttgccaaatggaaggtatttaggtttggagtgttttcttcttccttctccctcttcttaagctttcaccagggaggtctttggagggtgccattctgtagtgacaagcatcagtcataggttgaccctgaacctcagcatcagcatctgcaccaataatctggagatcaaactaggctgaaggccaaggagttaggaggcacacaggctcccaaaatgt

SEQ ID NO: 82440 - DNA, 719 bp, Homo sapiens
ggggaggtgagtgtggtagggaggttctcagattgaggacatgacaggagattcgagggctaaatacatttctggattttatctctgtggaaatatgtttatatataggagatcacattataagcatgatccctttttaaaatatgttgagtggtgtcattcctaaatccacctgaggatgcttattattaaaagcccaggcccccttgttgctctcagcttggtgcttctggcagccagctaggtgctagtctgttttgttcttctccaggacagccactaccttctctatccccaagggtactattctgctcttaaattgctgttcccaaatacaaacctgcaaatctattccatgtacgggttttactgttttattaccgtggaggaatgggataacaaaaagctgttaagatgttggacttcacctttaatgctcattggcattatccggggagcttgaaaaatactgatgccaggtgccactctagacaaatcaagtcacaaactcagtgaatggggctaaaaccctttactatttctgacaatagttcctcccttaattaggatactcctgctttcaagcgttgtagcctaaaactgcaatcaaggcccaaacacaaaaacgtactgagtttgtcctctgtgcctggcactaggaagagcaatagtggaaccccctaagtggttggtttgcatttttttacgttcctagacta

SEQ ID NO: 82441 - DNA, 494 bp, Homo sapiens
tgagacagggtcttgctctgtcacccaggctggagtgcagtggtgccatctaggctcactgcagcctctgcctcctggctgaagtgatcctcccacctcagcctccctagtagctgagactacaggtgtggactacaatgcctggccaattttttgtattttttttaatagagaccaggttttgccatgttgcccaggctggtctcaaactccttagctcaagcgaatccactcacctcagcctcccaaagtgttaggattatagccatgagccactgtgcctggcctaccttcactttttccaagttgtctcttctgctgctatacctgtggaacacacagacccttcattggggagggtaattatttttagttgcagaggaagccagaaacctttgatggctcaaagaagtgtctcatcatcataacacatagtaagcctcagtaaatacttgatgaatacttgagcaacctggcttcatttttaaattatt

SEQ ID NO: 82442 - DNA, 521 bp, Homo sapiens
actaaaggaatttgggtgtcttaaaagtttattctaatgagactgtgacctgtatgccttaatgtatttattgcccaacccaaaacaacaacataaaaaggtgctataatgtaaaaaagttagcattttctatttacagacaattttcaaagtaggaatctaggtcagtttcaccttttctctatactgtattcctgcctccaatgaccaaacctgaaaaaatatgtttcttctaagaaaaaaattctcataactcctttttagtttttataactgcagtattttcttcatctataaaattttactgagtgtgtgcttcttacctttacattaccaaattcttgtttattcttcttccacattggtatcccacttacttcttctttcaaagcctcatttctctgtgttccttagcatttatataaccaaatttcagtctgattatcaggaacaaaccattcaaggattcctagaactcaatactgctaacacttttttttttcaatgacatgcattgcttg

SEQ ID NO: 82443 - DNA, 114 bp, Homo sapiens
tggggtaatttgttacatggcaatagaaaattcgtgtctttacctctgccactactactgcatatatatatttatgtatgtatatgtatgtgtgtgtatgtttatatatatata

SEQ ID NO: 82444 - DNA, 738 bp, Homo sapiens
atattcaaatactcccagccgagaagctgccatcgatcctcccatggacccctgatcctggtttggaggaacttttcacagctctctctccctccctcaaaccctgtgcaatgagtttgcagaagagagtcttcccgagaaggcagaacgggactcatgaagtggcagctaagccctgtccagtggccacccgtcagccaagggccagagaccaggaaaggaagaaaggcagcttcacttcctctttgaggatggagtcgcacagccgcgctggaaagagcagaaaatctgcaaaatttcggtccatctccaggtccctgatgctctgtaatgctaagaccagtgatgatggctctagccctgatgagaaatatcctgatccctttgagatttccttggcccagggcaaggagggaattttccactcatctgtgcagctggcagacacatcggaggctgggcccagcagtgttcctgatctagcactggcctcggaggctgctcaactccaagcagctgggaatgatcgaggcaagacctgtaggaggatattcttcatgaaggaatcttccacagcttcctctcgagaaaagcctggaaaatctagaagcacaaagtagtaacttcctgtttcctaaagcctgccaccaaagggcacgcagcaactcaaccagtgttaatccctattgcacaatgagacaattgattttccaatgacccaagaaatctgcagcgccc

SEQ ID NO: 82445 - DNA, 564 bp, Homo sapiens
ttagcgtaagcaataatcaacccctttagtgagactgtaagctccatgagggcaaggcctttgttcatttctatgtctctggtgcctagaagaatgcctacccatagtaggtgctctgtgaacatttattgaaaaaaaaagtgaatggactgagtgtctgctatgtttgggcctgtgggaggtgctttctataaaagtctttctaatcctcgcagcaatccaccgtgcaccataagggtgtctgtcgtccattctagggctccatctggtgtgtgtttaccattatcataagcattattgtgagtgcttccagagcagataatccttattatgactgaataatgtagctacattatccccattttacaaatgaggaaatgaggcacagagaggtgaagtaactcacccaaggtcacacagaccctcaagcttcaagctactccttcaccttcatatcagcactgtcttacagaaccttctgcaggatggaactgctctccatctgcaccatccgatgttgtcaccgctagacatgggtagttactgagtacttgaaaggtagct

SEQ ID NO: 82446 - DNA, 241 bp, Homo sapiens
gcaaaatgaattgtcacatttataaatatacaaagtccaagaggataaaaacaatgatctacgggctgtagaacaatacacacgcggtggcagagtgtgagcaacacactgacctgtcaggtaatacaatctaaatccaccaactctgtaggtgcttacaattttaaatacacatatttgacagggacagacagacacacacagacacaatgtaaacatttgggtatggcaggagattgca

SEQ ID NO: 82447 - DNA, 439 bp, Homo sapiens
taatggttttttcacacaatccccgacacacacttgcactttttttccgcttcaaaatgacagtggatgtttgcaaaagcccctggagtctagaaggacatcaatcactttcacagctggagtcgtaacactttccttagaggaaattttatgcagcaagcagaataagcttcatcctcagcaggacaagacaaaaggtaggtaaaaggaaaggctggcagccaccaccaggcttttgtgccactaactgggggtggggtggggtacatcaattggaacttattcttcaccccaaggcttgcctgtttgccttccatttcccttctgaatttgaggaggagtaagtacagcaccatgaaaccagctcataacaaaacaagcacttacctccattgctactcaaaacaaggacaccacaggagagttctccagggatctt

SEQ ID NO: 82448 - DNA, 384 bp, Homo sapiens
taagagggacctttgtaaagcatgggtctctgtgtcccgattccatcatgggacaactaatcctaaatgataaatgtattactcaggcagcccctgatatcagagggaagttgcagaaatgggccctggcgtcggggagtactttaggagacctcctgaaagaggccaccttggtcttttacagtacagatagggagacacaagaaagaggcagaagctttaagggtcaccatgcaaacccacaaaccccagaattcctaaggtgcatctgttaactcctacagatgtggcaagaacagttatctctcttctaaaatttaaccacacccatgcaagtcttaatttctttcactaaggtgaaacagctcagggtacaatgttgtt

SEQ ID NO: 82449 - DNA, 396 bp, Homo sapiens
tcccagacaaccaggagactcatgacccttcagggatcacagtcttgggctaccatttgttgattgtcagaaaacagttggcgcaaatattttcttcagttttgtggttgtttaaagtggaaatagcagtactagttattttcttgtacagaagcaggatatgtgaggattactgtttaatagccgttaggcatacaggttctttgcaggtgcttggaggaatgtaaggattaatacagtcagtttcctattgagcatggctggggtgggattgtgtagtggaatgtatggatttagaatggttcagtataagcaagtatccagcgtcatgattccagaatacagttttgctcttacggcatgtacattctcagaaagtacagaatctaaggatga

SEQ ID NO: 82450 - DNA, 425 bp, Homo sapiens
tacaggtgttagccacagcacctgtcctgatccatcttgttattctttaacacagtaccctattcattttgttgcactgaggacaatttgaaattatgtgtgtcatacttgtttatttaccatctaccccactagaatataaattaaatgagggcagagtcatatctactttgttcactgtttacctagcttgggatctagcatctagcaggtgctcaacaaatatttgatgaattaatgaaaaaagggaaatgtcttcagagtccatttagactttctccggcttcccatctcagtggctactcattgagtgggtcctgccttcaattaacttccttcttctcttcctttctacactaacctcactgaggggaggagcctcagggaagttacaagggtaagtttctaatgtcaaatgcaggaga

SEQ ID NO: 82451 - DNA, 895 bp, Homo sapiens
acaagcattaggggaggaagaaagccgaatgatcctggagcatgtccttggcgcaggcactgctggacaaagcagtccatctcggtgggctggcactgcggagccagcgtggacattccaccgagcacgaggcgaaaggggcagcccagaggcctgccactgaaaccgccttctgcaggcaccgtctgccagtgctcagcgctgttagcagggctcctcctctgctgggatgaggggttgggatgacaggggttcacagtgtcctgcctgccccttcagcagcataacctttgtctttctggactcctggctggagctggtgatactgtgaacatgctgcctctctggaagctgctccatgtctccctatatccccagagcatggcagctgtgatcagaattccacagggtggggctgatgaggatccatgcacatccgtccctgtacccctcattagggacttgggttggggggtgcctatctgcacgtgttctttttcctctcacgcactttgtcggtctctgtgcagggtttctattatactaataaggagcactggggacgctggcgacagtgtgataatcgtccccttggagggccagaggcagtcggtgtgcgctgacctcatcctgggggagtgctgatgaaactctggcttggccttactgcctgagcactgcgcctgatgtggagggttagggggcagggttgccgggctgtttcttctacggcttcattgttaccagccatgcttgtctttggggcatttcatcaaaacttctttagttttgcttaagaactttaaagagctgatgagcctaatggaaacttttcagtaataactcagtacaggaacacacttcacaaataccagctaattaatcctcagagcac

SEQ ID NO: 82452 - DNA, 332 bp, Homo sapiens
cctcattttttctcttctctgttcccttttacaatgaattccttaaaaagaaaacatgtctatattccctatttccctgttttctcttttctcttgaaatccctccagttagagtttgccttccctccccaactccacttcaccaaaacttgctctgatcgactcccctgttgctaaatcgaatggtcagttctcatctaacttgatccatcagcagcatttgacagagttgatcatgctctccccaggaaattttacttggttttgagagctccaccctcagtctttctactgcctcattggatgctctttgctgttctcctttcctggtt

SEQ ID NO: 82453 - DNA, 620 bp, Homo sapiens
cttcccagtcctctcagagtatgtctgtgactgaatgagtcagcggtggaatccttggggaggatgtttcaaatccaaaatttgggtcttttgggaaagcctcagttggttctgagccagtggctctctgtttctggcccctggcatggacgtgatgaaggaatgctaggtgggaacagagtggagagggttttaatcagcctgggcagtggtgtgggctctgggtggtggacattcttgtgttctggcccaggctgtggaagctccaggccagcttgtgggggtccccaggtttccagagttgactcagagaaggagggctggtcggcagctcagaggctcttctgcagaaggtaaatctttccatctcatatttgccttgccgctgctctgttccccactggcgggcactgccttccctgcacagggatacacatatccaaggaggagaagacagaagccaggggtcctgatgattggggcaggtgatggggtgggcgagagagagcctgtgtgtttagtacccctcccatccagaaaaataaaaacatgcatttatgttaaaaatgacttttgcttaaaaagtagcatgttcattgtagaaatctggaaagggaaat

SEQ ID NO: 82454 - DNA, 644 bp, Homo sapiens
tctctcactggtgcccactctcccctgaatcacactgcacagggtctctcctgtctgaagagaagaaaacaccctgaaaattaagaagataaaagtgatggcggtgctgttcaaaaggagagaatgtggaacccttgggctttgttcctaatgctcggggacgatgagattgagagaactcatggagtcaacaggtgtcacagatgtcccaggaaaataccaaaaataaaacaaaaacacctctcgccttgccaaacgagaaagcaacatcactcaactgcagggcattttggcaactaagagtgtttacccccagagaaacagctgcccttgccccagcgggcaaaacaggcctcccttctacccctccccgactcccttctccctctggaggtttcttttcggcatccagccagacagaaagaaggcaggtgacagagcaggggcttaacaggtcccacgcaaggctcagctggggaaggccactccaaatcactttggcaaacttgaactgaaccgcaggccaccgcagccgggaaaacaaacaagagcctgtcggccaggtcctgctagctgtgcccaagctgcagctcccctctccctggcttggagtggagcaataaaaggggtttgtgaatgcatgt

SEQ ID NO: 82455 - DNA, 707 bp, Homo sapiens
atagaatttggctttgagggttcctgatggctttttagtctttaactgtgtgtgtaccagtctcacatttggcccaaacctcaggattctccctctgcctgtcttacttcatggtactagaagaccttcctcgccactctctccacatgagagagtcagctgccctttctcctgtgcctctgcaggaagaactctcttgcatggcacatctcagctcctcattgagggatagttttctttgataagaaacctggagtccatttactctgacctctctttaaatctatatccagagccactagcccaggaaaaacttgggtgacccgtaatttctcttctcctgctgtccttttgctcttacgccccaccccaactccccttaaattttacaggcttatgacagtttgtatgtgctcagccaatgagcagaaaacctggaaagaatttctggactttagcccaccagtttgtctggttgactaacctgctgagagctaaaattggcacccattgccccgtgccttcaggcagtctcctggggcagagtatgccaccatccgaatatcaggcactgagtgggatgtgggtgatgctcacatgactggctagagctttgggggtggggtgggggttaactactatttttttggccatgatctctttccccttccttttttttttaattaaataaatggatcaaattaaat

SEQ ID NO: 82456 - DNA, 450 bp, Homo sapiens
caaatctggaaagacagtctcccgtgtccccaccttactaatcccgcacacttaccctgactttactcctggggctgtgggagacaggggtggaatgggcccctgacacgcaggcagcccctcctatccctgcatgaatcctggcatgaccccggacacccaagaaagtgcacctttgacaatggtgcaccaggtcatggtggcacctctccccttggtggtggcatctggggcccttgcacacaggggacaaggaacctgaagtgaaggggagttgacctattgaggccacactgaggacagtccctctcactttgggagaggagatggcactcctggtctgatgttccagaattcctctccatggaaggagaggagaacaccataacatattagagcagagaggggatccgcggcaaaggcaaggcttctgttacaaagatggggaaa

SEQ ID NO: 82457 - DNA, 441 bp, Homo sapiens
gataaaactataaaatatacttgaaaaatcacaaagttttaaacacttttataagtgtactttttgctttattgaatgcctggagcagtttcagaaacttacatagtttgggagttctcaaagaaacagccatcaatgacgaatatagccttttgatgttccagagtaccgcactctgacagttgtctttcttacactgtcttcttccaccactatggtgtccctataattatgcttcaaatgtgctgtcatttttgaatgctacattttcacacatgagtggatagacatgaacagtgttttggttctttcctttgtttcccctattgaactactttttttagtaagtccatgttaattaaaattctaatgttctcatcaaaattgcatttttggaataaatttgtatcaggatcaaatgacattaaatcattcaaaatc

SEQ ID NO: 82458 - DNA, 287 bp, Homo sapiens
aacagatggatttcctgaaatcaccactgtctccatggaaacagctcagctggctctatcagttgctataaagtgttctctccttggtgtggatggaatcttcgtgttagtggaggaagaggacccaggacagaacatattggactaagcttagaagggagaagacaagatttgggttagctattagaggcttagaaagattctcccaagtgttgaggagatgtcagacgttgcctgctctaatgatttgtatgagaatagtggcagcagttcctgaagttggaagg

SEQ ID NO: 82459 - DNA, 406 bp, Homo sapiens
aaccaggaatggtgactcatcccagagaatggtaacagcaggaagctgctggctggaggcagtgttactgaaacccaggagctgaggtcatgtggcaaaagctggaaccacagagaggactgtctagataagctttagtcacaaatgagatggagctgctgctggagacactatgggaaacaaagagaagagagaagaaagaatgtgacttctcccttgctcctaccttccatccttttactaatagccttcattggtcaaaactactggaagcccagagaccaggggaaacagaaaaatgtagttccccgctatatagaatagaaccagggagaggcagggattggatctaagaccaactaatctaagcaaatgattggcatagatacttagagtcatctggttt

SEQ ID NO: 82460 - DNA, 513 bp, Homo sapiens
acctataataagaaatagattgaattagtaattgaaaacctgtccacaaagaaaagtacaggcaaaaatgacttcactggtgaattttaccaaacgtttaaaagtgaattaatgccaatccccaacaaactctccaagaaacagaagatgttttccaattttgtctatgaggccaatattaccctaatacaaaacctgaaaaggcatcatgagaaaagaaagtgaaagtgacaaatcaatatctcctaaaatataggtgcaaaatcattaacaaaacactatcaaaatgaatgtagcaacacatacacaaaaggattacacatcaagaccaagtgagatttattcaggagtccatggttcgtttaacaccccaaaataaatcaatgtaatagaatatattacaaaaatcacatgtcaattgatcaataagaagcatttgacaaacaaaatatcctttcatgtacaagtgtgcaacaaactaagagaaaggacctttcttaatcataaaatcta

SEQ ID NO: 82461 - DNA, 419 bp, Homo sapiens
ggctcattcaggtcaggcttctgaaccggcctcgtgcactaggccgcccggtgactacagtgctgggattacaggcaagagccactgcacccagcttctctgtacttttaaaactctacagatgattcccagattgggagccagtgctcttgcagaggttcccatgatgtggaccaggggacttctgatgcagcaggagcacagtttggctccagcattgtgccatctaggtacaccagcaagagctcccctccatgcttggcaaatacgggcatgtgagctgcccatctcatcacccttgcccttgatgtgacacagctcatgtcagaagcttgatttaacaatatagttgtaagctaacaaaaaaggaaacaaaagtatgatctttcctccaaagttgccttttcctgtcatacttg

SEQ ID NO: 82462 - DNA, 268 bp, Homo sapiens
agaataaggcagggattgagatttattttttacaaatagctaaccaatattccccaaaacatttattacttttcccttttgtcataaaatgctatctttatcatacatatttggtttgtcttctgaactctctactcttttacatctgtttgcctagcttgaccacagtatgagagtcttttttttttgagatggagtctccctctgtcacccaggctggagcgcagtggtatgatctcagctcactgcaacctctgcctcccgggtt

SEQ ID NO: 82463 - DNA, 216 bp, Homo sapiens
cattcactaaatatgtgcaaaggaagtttcaattctgagctgacttccaacatttttttcagggaaaatattatctctattgttttatgtctatgacaaacagcctttactgtagctcttccttttaatttctctttctcttgttccttctcttcttctgccagcttcttctcttctttcaccttctatgcctcattttccttatcttcttccttt

SEQ ID NO: 82464 - DNA, 293 bp, Homo sapiens
tgaaatcatcaagtcttctgtgcaaaaagaacatataacttacaaaggcaaacttacaaaaagcatcacatgttgaaaaactgacatacaaagcaaggcaacatagagcagtgtttttttttaaagctcaatgaaggtgtgaattgaaggattttatatctaactgaatgttctcaaatgtcaaggttatagaaaaagagttttcgacataacgaaaacctgggtaatttctgtacctgctggccatttctgaggaatatacaagagaatgagctttatccaaccaattgatg

SEQ ID NO: 82465 - DNA, 1544 bp, Homo sapiens
tcagtacaaatacaactgtcattcattgtcctaagtacgtgtacatgtcagcaacaatgtcaggatctgtggagtttgcgagtataagatctttaagtgttgaaggtttcatctccataattgcagctgctttagctacaaatattataggaagctgttccttctttttctttacatcaccaaaccttccagtggttataggcattttgttatccttcaagtgacctggagcctttgttgcatgacaggattgtacctgaagatcacattctttaacaattggacctactgaatctgtaaaactactagaagaaaacatattgaaaatacttcaggacattggtttaggcaaagattttatggctaatacctcaaagcacagacaacaaagataaaaatagacaaatgagactatcttacactaaaaagtagctgtgcaaagtaaagggaacaacaagagtgcagagaaaacctgttgaatatgagagaatatttgcaaactatgcgacaagggactaatatccaaatatacaaggaactcaaacatctcaacagcaaaaaatataaataatcccattaaagtgggaaaaggatgtgaacagacagttctcaaaagaagacatgcaaatggccaaaaagtatatggaaatatgttcaacatcactaatgattaggaaaatgcaaattgaaaccacaatgagatactctacttagaattgttcttactaaaaaagataaaaaacaacaaatgctgatgaggatgtggagaaaagaaaactttcactgttggtgaaagtataaattagaacaactactgtggaaaacagtatgtagatttctcaaaaacctaaaaatagaaccaccacatgatccagcaaaccaagtataaccacaggaaaagaaatcagtatatcaaagagatacttgcacttgcatatttatcacagcactattcatgataacaaagatatggaattaacctaagcatccatcagtggacacagggataaagaaaatgtttatgtacacagtggaatactatttggccataaaaaagagtaaaatgttattgctaacaacatggatggaacttgaggtcattatggtaagtgaaataagccaggcacagaaagacaaataccacatgttctcacttatatgtgggaggtgaaaaacttcacctcatggagatagggaatagaataagttatccggggctgagaaggggaaatgaagagaaattggtgaatatgtacaaatttccatttagatcaaaggaataagttctgatgttagaaagcatactagagtgaactatagttagcaaaaatatattgcatatttcaaagtagttggaagagaggacttgaaatgttaccaacacatagaagtggtaaatactcaagatcatggataccccaaatacgctgacttgaccattacacattctatgcatgcaagaaatgctcatgtgtaccttatatatatgtaaaatatgtatcaataaaagaaaatatataagatagttttaaaataaaaaattg

SEQ ID NO: 82466 - DNA, 1488 bp, Homo sapiens
tcagtacaaatacaactgtcattcattgtcctaagtacgtgtacatgtcagcaacaatgtcaggatctgtggagtttgcgagtataagatctttaagtgttgaaggtttcatctccataattgcagctgctttagctacaaatattataggaagctgttccttctttttctttacatcaccaaaccttccagtggttataggcattttgttatccttcaagtgacctggagcctttgttgcatgacaggattgtacctgaagatcacattctttaacaattggacctactgaatctgtaaaactactagaagaaaacatattgaaaatacttcaggacattggtttaggcaaagattttatggctaatacctcaaagcacagacaacaaagataaaaatagacaaatgagactatcttacactaaaaagtagctgtgcaaagtaaagggaacaacaagagtgcagagaaaacctgttgaatatgagagaatatttgcaaactatgcgacaagggactaatatccaaatatacaaggaactcaaacatctcaacagcaaaaaatataaataatcccattaaagtgggaaaaggatgtgaacagacagttctcaaaagaagacatgcaaatggccaaaaagtatatggaaatatgttcaacatcactaatgattaggaaaatgcaaattgaaaccacaatgagatactctacttagaattgttcttactaaaaaagataaaaaacaacaaatgctgatgaggatgtggagaaaagaaaactttcactgttggtgaaagtataaattagaacaactactgtggaaaacagtatgtagatttctcaaaaacctaaaaatagaaccaccacatgatccagcaaaccaagtataaccacaggaaaagaaatcagtatatcaaagagatacttgcacttgcatatttatcacagcactattcatgataacaaagatatggaattaacctaagcatccatcagtggacacagggataaagaaaatgtttatgtacacagtggaatactatttggccataaaaaagaataagccaggcacagaaagacaaataccacatgttctcacttatatgtgggaggtgaaaaacttcacctcatggagatagggaatagaataagttatccggggctgagaaggggaaatgaagagaaattggtgaatatgtacaaatttccatttagatcaaaggaataagttctgatgttagaaagcatactagagtgaactatagttagcaaaaatatattgcatatttcaaagtagttggaagagaggacttgaaatgttaccaacacatagaagtggtaaatactcaagatcatggataccccaaatacgctgacttgaccattacacattctatgcatgcaagaaatgctcatgtgtaccttatatatatgtaaaatatgtatcaataaaagaaaatatataagatagttttaaaataaaaaattg

SEQ ID NO: 82467 - DNA, 301 bp, Homo sapiens
cgtcagctgtcaggcacccacaatctgggtcagataaaaatcccttaccctggtacagagcccggcccactgttttggagtagcattcaacactcattcatgcaacatgtgtttttgcacatttgctattttctggcactgctttaactgctgtgaatacagtagtggctaaaaataaaagtccctgccctcttggagcttatattctagtaagagagacagacaataagcaagataaataaataaaatatagtgtgttagaaagtgatacatactaaggagaatggtaaagcagggagtg

SEQ ID NO: 82468 - DNA, 3483 bp, Homo sapiens
  misc_feature (2000)..(2001): n is a, c, g, or t
  misc_feature (2091)..(2091): n is a, c, g, or t
caggactgcctgagacaagccacaagctgaacagagaaagtggattgaacaaggacgcatttccccagtacatccacaacatgctgtccacatctcgttctcggtttatcagaaataccaacgagagcggtgaagaagtcaccaccttttttgattatgattacggtgctccctgtcataaatttgacgtgaagcaaattggggcccaactcctgcctccgctctactcgctggtgttcatctttggttttgtgggcaacatgctggtcgtcctcatcttaataaactgcaaaaagctgaagtgcttgactgacatttacctgctcaacctggccatctctgatctgctttttcttattactctcccattgtgggctcactctgctgcaaatgagtgggtctttgggaatgcaatgtgcaaattattcacagggctgtatcacatcggttattttggcggaatcttcttcatcatcctcctgacaatcgatagatacctggctattgtccatgctgtgtttgctttaaaagccaggacggtcacctttggggtggtgacaagtgtgatcacctggttggtggctgtgtttgcttctgtcccaggaatcatctttactaaatgccagaaagaagattctgtttatgtctgtggcccttattttccacgaggatggaataatttccacacaataatgaggaacattttggggctggtcctgccgctgctcatcatggtcatctgctactcgggaatcctgaaaaccctgcttcggtgtcgaaacgagaagaagaggcatagggcagtgagagtcatcttcaccatcatgattgtttactttctcttctggactccctataacattgtcattctcctgaacaccttccaggaattcttcggcctgagtaactgtgaaagcaccagtcaactggaccaagccacgcaggtgacagagactcttgggatgactcactgctgcatcaatcccatcatctatgccttcgttggggagaagttcagaaggtatctctcggtgttcttccgaaagcacatcaccaagcgcttctgcaaacaatgtccagttttctacagggagacagtggatggagtgacttcaacaaacacgccttccactggggagcaggaagtctcggctggtttataaaacgaggagcagtttgattgttgtttataaagggagataacaatctgtatataacaacaaacttcaagggtttgttgaacaatagaaacctgtaaagcaggtgcccaggaacctcagggctgtgtgtactaatacagactatgtcacccaatgcatatccaacatgtgctcagggaataatccagaaaaactgtgggtagagactttgactctccagaaagctcatctcagctcctgaaaaatgcctcattaccttgtgctaatcctctttttctagtcttcataatttcttcactcaatctctgattctgtcaatgtcttgaaatcaagggccagctggaggtgaagaagagaatgtgacaggcacagatgaatgggagtgagggatagtggggtcagggctgagaggagaaggagggagacatgagcatggctgagcctggacaaagacaaaggtgagcaaagggctcacgcattcagccaggagatgatactggtccttagccccatctgccacgtgtatttaaccttgaagggttcaccaggtcagggagagtttgggaactgcaataacctgggagttttggtggagtccgatgattctcttttgcataagtgcatgacatatttttgctttattacagtttatctatggcacccatgcaccttacatttgaaatctatgaaatatcatgctccattgttcagatgcttcttaggccacatccccctgtctaaaaattcagaaaatttttgtttataaaagatgcattatctatgatatgctaatatatgtatatgcaatatatataggctcttgctgatctctccagaggnngtgattatgagaagggggtgagaatgatgagttccttcaccaggagcaaaggacggggatcgtgtggaaccactgcagaactatttccgnaatcaactaagtggagagagccaggaaggctgcatcagaacccagtaaagcttcttgtctggatctgagctggtttgttttgtgcttgcttttccctgccttgccactcccctcactcttctcttttccccacagcctttttcacatagctcttggctgtaggattgccccactccaaaaaccagtgtgtggaggtccaggagtgagaccaggaaagaatgtgaaagtgactacacaaggactcctcgatggtcgtggaaaaggaaagtcaattggcagagcccctgaagccagtcttcaggacaaagaaggagcctagagacagaaatgacagatctctgctttggaaatcacacgtctggcttcacagatgtgtgattcacagtgtgaatcttggtgtctacgttaccaggcaggaaggctgagaggagagagactccagctgggttggaaaacagtattttccaaactaccttccagttcctcatttttgaatacaggcatagagttcagactttttttaaatagtaaaaataaaattaaagctgaaaactgcaacttgtaaatgtggtaaagagttagtttgagttactatcatgtcaaacgtgaaaatgctgtattagtcacagagataattctagctttgagcttaagaattttgagcaggtggtatgtttgggagactgctgagtcaacccaatagttgttgattggcaggagttggaagtgtgtgatctgtgggcacattagcctatgtgcatgcagcatctaagtaatgatgtcgtttgaatcacagtatacgctccatcgctgtcatctcagctggatctccattctctcaggcttgctgccaaaagccttttgtgttttgttttgtatcattatgaagtcatgcgtttaatcacattcgagtgtttcagtgcttcgcagatgtccttgatgctcatattgttccctattttgccagtgggaactcctaaatcaagttggcttctaatcaaagcttttaaaccctattggtaaagaatggaaggtggagaagctccctgaagtaagcaaagactttcctcttagtcgagccaagttaagaatgttcttatgttgcccagtgtgtttctgatctgatgcaagcaagaaacactgggcttctagaaccaggcaacttgggaactagactcccaagctggactatggctctactttcaggccacatggctaaagaaggtttcagaaagaagtggggacagagcagaactttcaccttcatatatttgtatgatcctaatgaatgcataaaatgttaagttgatggtgatgaaatgtaaatactgtttttaacaactatgatttggaaaataaatcaatgctataactatgttgataaaagattta

SEQ ID NO: 82469 - DNA, 2278 bp, Homo sapiens
caggactgcctgagacaagccacaagctgaacagagaaagtggattgaacaaggacgcatttccccagtacatccacaacatgctgtccacatctcgttctcggtttatcagaaataccaacgagagcggtgaagaagtcaccaccttttttgattatgattacggtgctccctgtcataaatttgacgtgaagcaaattggggcccaactcctgcctccgctctactcgctggtgttcatctttggttttgtgggcaacatgctggtcgtcctcatcttaataaactgcaaaaagctgaagtgcttgactgacatttacctgctcaacctggccatctctgatctgctttttcttattactctcccattgtgggctcactctgctgcaaatgagtgggtctttgggaatgcaatgtgcaaattattcacagggctgtatcacatcggttattttggcggaatcttcttcatcatcctcctgacaatcgatagatacctggctattgtccatgctgtgtttgctttaaaagccaggacggtcacctttggggtggtgacaagtgtgatcacctggttggtggctgtgtttgcttctgtcccaggaatcatctttactaaatgccagaaagaagattctgtttatgtctgtggcccttattttccacgaggatggaataatttccacacaataatgaggaacattttggggctggtcctgccgctgctcatcatggtcatctgctactcgggaatcctgaaaaccctgcttcggtgtcgaaacgagaagaagaggcatagggcagtgagagtcatcttcaccatcatgattgtttactttctcttctggactccctataacattgtcattctcctgaacaccttccaggaattcttcggcctgagtaactgtgaaagcaccagtcaactggaccaagccacgcaggtgacagagactcttgggatgactcactgctgcatcaatcccatcatctatgccttcgttggggagaagttcagaagcctttttcacatagctcttggctgtaggattgccccactccaaaaaccagtgtgtggaggtccaggagtgagaccaggaaagaatgtgaaagtgactacacaaggactcctcgatggtcgtggaaaaggaaagtcaattggcagagcccctgaagccagtcttcaggacaaagaaggagcctagagacagaaatgacagatctctgctttggaaatcacacgtctggcttcacagatgtgtgattcacagtgtgaatcttggtgtctacgttaccaggcaggaaggctgagaggagagagactccagctgggttggaaaacagtattttccaaactaccttccagttcctcatttttgaatacaggcatagagttcagactttttttaaatagtaaaaataaaattaaagctgaaaactgcaacttgtaaatgtggtaaagagttagtttgagttactatcatgtcaaacgtgaaaatgctgtattagtcacagagataattctagctttgagcttaagaattttgagcaggtggtatgtttgggagactgctgagtcaacccaatagttgttgattggcaggagttggaagtgtgtgatctgtgggcacattagcctatgtgcatgcagcatctaagtaatgatgtcgtttgaatcacagtatacgctccatcgctgtcatctcagctggatctccattctctcaggcttgctgccaaaagccttttgtgttttgttttgtatcattatgaagtcatgcgtttaatcacattcgagtgtttcagtgcttcgcagatgtccttgatgctcatattgttccctattttgccagtgggaactcctaaatcaagttggcttctaatcaaagcttttaaaccctattggtaaagaatggaaggtggagaagctccctgaagtaagcaaagactttcctcttagtcgagccaagttaagaatgttcttatgttgcccagtgtgtttctgatctgatgcaagcaagaaacactgggcttctagaaccaggcaacttgggaactagactcccaagctggactatggctctactttcaggccacatggctaaagaaggtttcagaaagaagtggggacagagcagaactttcaccttcatatatttgtatgatcctaatgaatgcataaaatgttaagttgatggtgatgaaatgtaaatactgtttttaacaactatgatttggaaaataaatcaatgctataactatgttgataaaagattta

SEQ ID NO: 82470 - DNA, 424 bp, Homo sapiens
aggtaaacagcatccttccacagcagcagttctcaagtgggatcttggaccagcaaggtgggtgtcacttgggaatttgttagaaacgcacattcatgggccccacccagcccgcctggatcagatgctctggaggttgaggccctgcagctgcacttgaagaagacttctgtgggattctgaggcacggaagccatcaagtgtccctgctctgtgtgcggcacaacagagaaagccacagacttgaggtcagcagaagcaaactcaaagcctacatgtgtatgctcacaggccatgtggacccggataaatcactgcacttttctgagcctagccccagcccctgtcaaatgaggagaagccggggtacaagagctaaatcttgacacatgtgaagaacagcagagcaaacttcagctctctt

SEQ ID NO: 82471 - DNA, 798 bp, Homo sapiens
tcagtctgtatcctctagatcatggacagcctattgatccttctaactctgcagcaaagcctccaagttaaaaaggaaaataagtctctcaacaccattatttattcagctgcacacagtcttgaactgctgaaatataaaaatgaaaccaaagcagtttccatctaatcacttttttaaaaaatgccatgcagaatatgtttatcacaatcaccatcatcatcatcatcaccactgctgttgccactgcatcaccatccaacatgaacaccaccaacttaatcatgtccctgattcaacagttttcaacttgtttatacataaaataatgacagagtgtgattgtttgccaaaaaaagtttttctatgagcatcttaataaccaagttataataacccagttatttccatcaacaaaaaaaatctgaatagcatttggtttgtctgtgtatcagcagaaatgcttatgtgaatttagcatttattataactgatgaagtccttttaactggagtgtattgtaataatatgtctgcaaaacataatatgtctgtgaaagataatgaaatattttagcatttgcaataaaaaggtactgaagtctcagttccttttcaactctaacaattatatcaacatctatgtcttactctttttaaaaagtgtgatgtgtgacttgatagaatacatgttaggaagtacagggctaattaacttggttgaggtggttacagaaggcttccataaggaattatattgtgattgagataggaaggaagagtagaaaatgcttaggtc

SEQ ID NO: 82472 - DNA, 293 bp, Homo sapiens
tcttattcaacacaaacaggataaataaaaagaaaaccacacttagatatatcatggtcaaactcatgaaagagggaatcttaaagcagctggtgaaaaatggcacgcagcatacaaatgacaggtgatcagcaacagagaagattgtaaagtgatatatctaaatcaccaacatcagggagtcataacaataaattgtatctgcttaataaaggaacttaaaaatacatgcagcaaaactgggtagaattaatgggacagaatcacaaatccacaattggagagttcaatta

SEQ ID NO: 82473 - DNA, 384 bp, Homo sapiens
cctctctctgtgcagttgaacttgatcagatgagatggcaaaagccagagcagggagcaaggcaaaagagaaaaatatgttcacggtgacttttgaaaacatatggatgaaactcctgaggaggctgaggaactaaaccttttcttttggcagtaggcacagagtgcagattcatctctctgtgaattactctagctcctgctgtgtgagttctattttagcccagtaatgcaaaaagaaagaaaaactaagttctgacaagcacttacatttcttgaatttttgttgaaggtcccagaggtcattgtaagcagcctgaacaggtagttagggctcctggattctagtctcagcttggctactaatttaccgtgtgacgttagg

SEQ ID NO: 82474 - DNA, 495 bp, Homo sapiens
ggaaatttaatctatgcagtgctcaggaaggttagggaaggcctctctgggaaagtgatacttgagaccagaaggatgagtaagaggtagccaagcaagagaggagagaagagcagtccaagcagagggaacagatgtgcacaggccctgtgactggaaggagaaagggatcaggataatctgtgaggactgagagaagactaatgtgctgggctgaagaaaggggggctgggtatagtataaaatgaggtgggagaggtgggctggagccagaccatgttaaagtattattcttgcttctctcattctccacataataggtcctatggattttattttctcaacacagtccatttcaaatcatcctcctctccccatttgtactttcacctttctgattcaagctgccctcatctctttcctggattaacaaaatatccccttaattgacctctttgcttccattcttactctagcccccataacattctccat

SEQ ID NO: 82475 - DNA, 290 bp, Homo sapiens
gttggccaggctggtctcgaactcctgacctcaggtgatccacctgcctgggcctcccaaagtgctgaggttacaggcgtgagccaccacgcccagctagtctcacattattaaaagcaatctgtatgctctcacctcccaaatagatgctttctctcccctgctccctttctatatgttgcccagctttctttctggaatgccagattcacattcctacctattaattcatttggatgtcagtaaatcttagatttaacatgtccaaagtgaactgcggatcgcctgcc

SEQ ID NO: 82476 - DNA, 759 bp, Homo sapiens
gggcccccgaaggatctcggaggcgaagttgctagaagatacgtaagagggccccagtggagatggaacaaccaaaggacggggctgggcctgaagggaacaacctgtccctgccgtcatctgggaccgagccatggccccctgcgcctctcccagcccctccacccttgctcctgaactccacagaccccacccacctggggctcccggagagcgtggcctctgtcaccgtgcccatacgcctggacaccctctcctgcctcctgcacagcgccctgctgggggcctacaccttccaacaggccttgccctcttgcccctgctgctcccaggcaggccactcccagccgggggcagttaggaggcctcccaggggacgcggaggctgggaagtcaggcacaggccaggctggggccgaggcctgcatcgacggggccttgggagagctgagcagccagagaggggccgggcggggggccctggggctggccccaggaccccaccaatgacactgccatcaccaccaacactgcctgcccaggatgggaagaaagaagctcgaggtccagagccacccctggaaacaccactggctgctgaggactgggagacagagtactaggaccttggagggtcaggcacctgagattgcagtcacccaggagggttttcctggggcccagagtgatctcagccctgtcagaagaaccccaagaaacatcttccatcctcccctctccccaaaaccacaatcccag

SEQ ID NO: 82477 - DNA, 420 bp, Homo sapiens
gtgatcttcccaccttggcctcccaaaatgctgggattataggcatgagccactgctcctggcctttttatgcacttaataaggatgagtcatctaacatatttttgactgtttcctttgaaaatttgcatctggattatcatatcctctggaatgtgccctctgttgtatcttggtgtctcaattgaaatttgtggtatttatatacattataaagtaatgctacatagagaaacatgattatttttatgtcagtttctaggaaataattatctacccacatatttaccatttgaaaagctcttcattctttcttaaatatctgaatttccatctgttaccattttccttctgcctgaagaacttccttttgtattttttgcagtgtaggtctgctagcaataaactctcttggtcttc

SEQ ID NO: 82478 - DNA, 472 bp, Homo sapiens
tgaagctggatcagatgcccacacctaggcctctaattgtccagatgatgaaattactatgactgacatagaccaaacatcattctcctcctaggataggtaaacagcctttcctccctgagatcagtgtaattccacctgtaccaaaagaatgtgggactctgttggcagggaaggagacaagtgagaatggttgttggtagattagacaacatgtgtctgctgtgtgtctagctcttctgctctaagtttcttgaagcagcttttttttttctgctttgtttacttcttgtttatctttgtatctttaataactggctttagttcctggccatgatttatactatttgccaaaatgaatgaaataaaatgatgcaacagatatatatggattaattttttcactaaataatatgtcacattaatgagatagaaacataggcaaataatacatttggtaaggcaaaacgac

SEQ ID NO: 82479 - DNA, 1157 bp, Homo sapiens
taagtgaaggaaatgagacccggagaagctggacagcttgcctgcccaaagccatctggttatggctgagcttagcctagaatttaggtcttggcttccagcccagaactttctccactacacagcactgcttgtcagagtacttaatgtctaccttgctttccatttttaaagtttacattttgttgtaagattatctactttccaatttggtcactaactagaagacttacccagtcccaaacaattatcagattatatggaaaattgaagatacttaattttgtctgtcaacatgttccagaagaatattttttggggaaaatggatttacaatcaacaaataaacaaaaatgatggcatgtttccatgttttctttttaattggatccttatcagagtactcccaatcagattcttctccagtttagagttttcccccaagagattcagctcatccaagaaaaaggtgagaaggtcctaggcagtactagagtgaagcctgcctgattctcagctgattggccaaactcagaactctctcggtgttctgggtgcttttgacagacagtgggacgcacctccccaccccagtactgctgacacagtgtcttccctctctctctctggaccttactcccaagaattagtgagaagcccacagatgtgtggagaacactaagcataccctgggcaaacagccattcgcacatcagaaaatattagaaacttattgtgaggaacagagggggaacaaaaaagaaaaaggaaaaaaagcaggtctgtccttgcatatatacaatgtctgtggaagtctcacttttaatgccaactattatgaaactacttctactctgatcaaattatatactaggtgccaaataaatggtgttaaattgaaaacaaaataatgagttgattaaccattattttctttcaagccagaatacaagctacagcattacatttaagcataaatgtgaatttatattttatagttttcaactatctaaatttcctttttaacttaaatactattattgttgttgacagattaggctactattaccatgattttttttaaagtacttccacctaattttaatggaccaattattaagacttatcttccaatctggtaaagagatatgtaacgg

SEQ ID NO: 82480 - DNA, 515 bp, Homo sapiens
gatgttgtgcacacatggaggaggggtggcctaactataactaatacatggagatcatgcttggagtgtggttttttccttggatttagtctgttctcttacttgcctctgattccctggaaatgtgaaaaccaagtagaaaacaatttatgaacatacagaaaaaacgcaggatacagattcgtgattatgtttttttttttttaaggtttcagtgaactgcctaaaaatatatgcaaaattttgtttttctgtacttttcagttcagaagaattagtaaagaatttctaagtaaagccaaatttacttttatgatattatgtatgtggcagaggtgtatggggaggagtggatcacagaactgttggagaggaataaaggagtggtagtagtaacgatctacaagtcttttattgactgaaatagtatgctatgaaaataaagtcacaggttaagataggtgagagtacattttctcagagcatgttggatttttctaattgtatagtgaaag

SEQ ID NO: 82481 - DNA, 575 bp, Homo sapiens
ctaagaagtttagactcttatgccagtgtttcccagagtgtttttgcaggaataatgggtatgcagaattaataggtgttacatgtaaagggcttttgttgccagattagcttgggaaatgcagagttaatgcttacattccaatatgaaacagagagacttttagagactgtaatttttagatagctgtattatagtgagtcctctgggactgtttggttcttttggtatgatggtatttttgttatgtcaaatactgtctgaaaaaattataagaaaatatgtgttctttttggccgggtgcggtggcttaccgctgtaatctcagcactttggaaggccgaggcaggtgagtcacctgaggtcagaagttcaagccaacctggccaacatggtgaaaccccatctctagtaaaaataaaaaaaattagtctggcatggtagtgcgtgcctgtagtcccagctactttggaggctgaggcaggagaattgcttgaacctgggaggcggagggtgcaatgaattgagattgcgccactgcactccagcctaggcgacagagcaagactccatct

SEQ ID NO: 82482 - DNA, 765 bp, Homo sapiens
caggaggacaccttggggcaaggttggcatgtctgctcctgcctgaacccacacagttcctggagtgcagcaggtgctcctcagctgtttgctgcacgcatggacgtaagagtgacagaagcatgtccttcgacatgacgtttttgtacctgaacattgtctagaggctttccagactgtaagctctgtgggattaggagcctgcctgcctcgcactccctggcatccttagtgctttgggcctcacaggccagcggagccctcgtgcgggttccaggcctgctttggtgggagtgctcagtacttttagccacacagagccgtggcctgcaaggctttcggagtacatctctagcacatctgagaatccggaagcaactcagagtttctggaatggatttcacaaagtctgtgaataagaaggccccacaggccctactcaacagcttttttttttttttttttttttaaatacagaagatgctagtcttcaaagaacctctttactcttttactctttttctttttttttcgagacagagtctcattctatcgcccaggctggagtgcagtggcatgatcttggctcactgcaaccttcacctcctaggtgcaagtgattctcctgcctcagcagcctccagagtagctggaattacaggggtgcgccaccatacttggctaatttttgtatttttagtagagactgggtttcccaatgttggccaggctggtctcgagctcctgacctcaagtgatccaccc

SEQ ID NO: 82483 - DNA, 632 bp, Homo sapiens
ctctggtctcctgactctggcagggggaacatttgcactgttcttgttccttaccccaggagctggcctattgcacaacctcaggaaacagcccctatgcaatcctggcccacagagcggacatgttctggtttttattcagcagcttttttatgaagtgtgttttcctttcccatcatgtcatctggaagcaattcctcccaacagctggatttgctttcacaattggtaaacaccgcgaatggaaggccggggacgatgcggagctccccggaggagccttgtccccacccgcttggctcgcgttctgaagcttatcgcgggtgcctgcacaagcctcatcaaaatcgagggcgtcctccagcaggcgacccacattgcattccccgcttaagagggtcaacgtgttcttcgggggagaaattttctgaatgctttgcagataaaattgatcagatgcaggccagattgccagctgccggggccgcgtgcgcctgtggaggccccaccagcgcggggcaccagcgcctcggggtccgggggaggcctctctctgcaccgccgccaccaaagccagtaagagagggcaaaaccccaaagagcactgactgggccgtcaaggaagatgaatg

SEQ ID NO: 82484 - DNA, 408 bp, Homo sapiens
tctctgcctccagggttcaagccattcttccgcctcagcctcccaagtagctgggaatacagttgcgcaccaccatgcctggccactttttgtatttttagtggagatggggttttatgttggccaggctggtctcgaactccagacctcaggcaatccgcctgccttggcctcccaaagtgctgggattacaggtgtgagccaccgcacccagctggcctcctgttttcttgataagaggtgaggtactttgctcatgaatttgagtagaggatgtaaagtttaaagtaaatgatgaaaatgtggactaagccattgagagggatagggaataagctgacaacatttctaaaaatattgttggtagcattgagagtgctcagttgacatcattagttcatagcagtg

SEQ ID NO: 82485 - DNA, 1318 bp, Homo sapiens
acttccgctgtcccgcgaagggcggggggagcgaactgttgtggtgcggagcgttcggcgggcggcggccgggcggcccaggggctgccgcgggactcggggcgcagccgagtggctgcaggggtggagtgggccggacgagccgcggggcccgggtgccgcgggttcgaggccgggccccgcgcgaggaggccgcgccaccccgggggagctgcccggcagcgagtttgccccgctgccgaaagaaggcgggagccggcaggggccttcgaaaccccctggcaacccaggcccggagtccttggggagcggctgtttcctgggacgccctcccggacacccccgctgcagggttacggttctgggcccccggcagaaggctcctccgggtgacccccggcggggccctgcgagccgcgggagccgaccccggggcctcgagccgggaggaagggggcttccggaggcggagggccgggggccgagggagccgggcctctcggacgcggggcagggcagcgcccgggctggagacggactctgggaccctcggctgcgggggtctcagcgacctgccccgcggcaagcgcggccgcggagtggcctaccggggaccctcccccagagggaccggcccggggcggggagatgaacggcttcagcacggaggaggacagccgcgaagggccccccgccgccccagctgccgccgccccgggctacggccagagctgctgcctcatcgaggacggcgagcgctgcgtccggcccgcgggcaacgcctccttcagcaagagggtccagaagagcatctcgcagaagaaactcaagctggacatcgacaagagcgtaaggcacctatatatctgtgattttcacaaaaatttcatccagagtgtccgaaataaaaggaagaggaagacaagtgacgatggcggagattctcccgagcacgacactgacattcctgaggttgatctgttccagctgcaggtgaacaccctacgacgttataaacgacactacaagttgcagaccagaccaggcttcaataaggcccagttagcagaaactgtgagtcgacacttcaggaacatacctgtgaatgaaaaagagacccttgcctacttcatctacatggtgaagagtaacaagagtagactggaccagaaatcggagggtggcaagcagcttgagtgaggatgaagcacatcttaaaggaatgaagtgtaatgcttgatgcacaggtgatatctactacatttaagcccataaagactgttaaatattattgtaaataaaaaagtttgaatgatga

SEQ ID NO: 82486 - DNA, 2366 bp, Homo sapiens
  misc_feature (1320)..(1320): n is a, c, g, or t
gcggatttcctgccagcttacttttatctttaaggatttaaggaataaactcaaattcagaagtctctgcagaacatttgtgcaacagctgtttcagtatcaacaaccccaagtcatttgctgggcattcagtttctgtaaagtttttcagtggttcctccagccagccttggaggattcttcatgtcttagctgttgctgccaccttcacttaccagtgtgcctccagcctgtattagaaaatctgtagtatccaccttcttgtatgtggttctaccttgtaagaacttccacatctttttccacttttctttgtggatcagatgtgagataatgcaagaattataaattgacacatagaaacaaagtttttcaaagagttattatcctacaatagtagctattgtaattgtaaaaatagagtgtcccaaataccgttgcaacagtcccttgtgtcctgctttcctcctccccaggacagtacattccagtcgactataagtttatgactcctacaggtcttctaaaaatgtcacatcacttcctgcttccttgagggactctgtcttgtcggaaggaaagtctaagctgttctcatgcccacccccctgatgcctcactttttcattatgctcctacatgggcagccatcatcacccaactgacactgtaccctgggcctcctcactctttctgtcatcctccattggaaactctaaagtcttggcactcctacccatctggaatgcttcctgtctgcctaaagtcctcccttttagtcagggcccttcaccctgagcatctctgttgcagggatctcttcctttgctgaatctgtaccatttactgtcttcaccattcactggaagtttggtgtatgatacgctgccaagtgtgatgttagcattctctttgtgttctgcaactcagtagtgagcttctgggaatgatggcctacatcttgtcttccatctatctctccaatgccctgcaatggaaggaagccccgcaattcgacagatacctattgctgtctccaaggaattggccaactctgactttgatttttgtctccatcaggtaaggcacctatatatctgtgattttcacaaaaatttcatccagagtgtccgaaataaaaggaagaggaagacaagtgacgatggcggagattctcccgagcacgacactgacattcctgaggtaaaggtcaaagaaaccagttgcggaagctggaagaatggattctaatctgattctcacctctggcctggtctgctttttgtgttaagaagtaattttagtccttttgttttgctntggattatttgaaaagtgaattatagtaatatggaatctgagagctaaaagcttggacacccactggtcagactgccccatcattttacagacaggcacagagagccgaggtcatgtatatagtttggaggctctagtctagggccctttccagtagaccacactgcttttctgcaagacgcccctgacgaatgcgtaaatacaaccacagtgtcacttttttttaaaccttgtttatgcctttagagagtgtataatggtttgggagaagtcttttccccaaaaaatgaaggtgtaagtcatcagttcataccagctctgattttctctcactgatttcttgacatctagtccaggctgttcccaaggatccatttcaaagttgactaaactggacccggttttctcaactctagcactgttgacatttggggtcagctaatttttgttgtggggactgtcctctgcattgtaggatatttaacagcatgcctcagcagcatcccctcgtgagattctacccatcaccaccctgagtcatgacaatcaaaacgtgtctccagacattgccacacctcctttacaagacaaaatcgtcctgtgttgagaaccactgcgctagaccatgagacctaggcttctcaaactggaaggctgccttcccttcaggtgcccgtgtctattaagtgaggcttcaggaaggaatattggattttctttctactaaattgttttcactcaagactcagcaagagaagaaccgtttatagtgtacattgaatatttgacacatgaatatttcataaggcaaccgcctgttagcactcagagtgaaaatgactgtgtaggaatagaaagagtaggcgggcctttgtctgcagatgtggaggaaaccgttgaaaatctggccctttccctctgcccctccctgtgtccccttttccaatgttggtttacagaatcttgcttttgcctttaacgttattgttattttacaaagaaatggacgtattcgatttctaagtggttttcaccaaaaaaaaaaa

SEQ ID NO: 82487 - DNA, 1034 bp, Homo sapiens
cctagcaaagagctatttgaggataacagccctcctttgtgctcctctatccggtcgctgcctcgttctggcctatcatcctccaggatgtctctggtttttgcctttgctctccatctttggtgtcccttctagcatcactgcccctccaaagctcagcctcttcatctcattctgattgttgctatagcatctccctccgtatccccccatcagtcttcccaacaaccaccaccagacccatcctgcgccatcgccctccaccctctgtgatagctccttctgtttttctggatgtgctaccatccattctcaccttttaaattcatcacagttgcctgtgacccccttgcccatctgtgcctctcccagctctctgtgctgtgatcttttcccctattccctaccgtttctcagtgctttatcagaccctgctcctccttagcttaagctttaccttttccaccagttttgtgagatcagcccaccccagccagaactgtttttctactgttatttttgccctcctagccagttactagtcctcaatagaccatttctaagacctcttttgaagccctccccatcctcacccctaccttagtgtagtgctaggcacatagtgggctcttggtgagtcctgggtggtcaggtgatggataacatttttctcctcttctccctaggtgttgatctgttccagctgcaggtgaacaccctacgacgttataaacgacactacaagttgcagaccagaccaggcttcaataaggcccagttagcagaaactgtgagtcgacacttcaggaacatacctgtgaatgaaaaagagacccttgcctacttcatctacatggtgaagagtaacaagagtagactggaccagaaatcggagggtggcaagcagcttgagtgaggatgaagcacatcttaaaggaatgaagtgtaatgcttgatgcacaggtgatatctactacatttaagcccataaagactgttaaatattattgtaaataaaaaagtttgaatgatga

SEQ ID NO: 82488 - DNA, 2135 bp, Homo sapiens
  misc_feature (1089)..(1089): n is a, c, g, or t
acttccgctgtcccgcgaagggcggggggagcgaactgttgtggtgcggagcgttcggcgggcggcggccgggcggcccaggggctgccgcgggactcggggcgcagccgagtggctgcaggggtggagtgggccggacgagccgcggggcccgggtgccgcgggttcgaggccgggccccgcgcgaggaggccgcgccaccccgggggagctgcccggcagcgagtttgccccgctgccgaaagaaggcgggagccggcaggggccttcgaaaccccctggcaacccaggcccggagtccttggggagcggctgtttcctgggacgccctcccggacacccccgctgcagggttacggttctgggcccccggcagaaggctcctccgggtgacccccggcggggccctgcgagccgcgggagccgaccccggggcctcgagccgggaggaagggggcttccggaggcggagggccgggggccgagggagccgggcctctcggacgcggggcagggcagcgcccgggctggagacggactctgggaccctcggctgcgggggtctcagcgacctgccccgcggcaagcgcggccgcggagtggcctaccggggaccctcccccagagggaccggcccggggcggggagatgaacggcttcagcacggaggaggacagccgcgaagggccccccgccgccccagctgccgccgccccgggctacggccagagctgctgcctcatcgaggacggcgagcgctgcgtccggcccgcgggcaacgcctccttcagcaagagggtccagaagagcatctcgcagaagaaactcaagctggacatcgacaagagcgtaaggcacctatatatctgtgattttcacaaaaatttcatccagagtgtccgaaataaaaggaagaggaagacaagtgacgatggcggagattctcccgagcacgacactgacattcctgaggtaaaggtcaaagaaaccagttgcggaagctggaagaatggattctaatctgattctcacctctggcctggtctgctttttgtgttaagaagtaattttagtccttttgttttgctntggattatttgaaaagtgaattatagtaatatggaatctgagagctaaaagcttggacacccactggtcagactgccccatcattttacagacaggcacagagagccgaggtcatgtatatagtttggaggctctagtctagggccctttccagtagaccacactgcttttctgcaagacgcccctgacgaatgcgtaaatacaaccacagtgtcacttttttttaaaccttgtttatgcctttagagagtgtataatggtttgggagaagtcttttccccaaaaaatgaaggtgtaagtcatcagttcataccagctctgattttctctcactgatttcttgacatctagtccaggctgttcccaaggatccatttcaaagttgactaaactggacccggttttctcaactctagcactgttgacatttggggtcagctaatttttgttgtggggactgtcctctgcattgtaggatatttaacagcatgcctcagcagcatcccctcgtgagattctacccatcaccaccctgagtcatgacaatcaaaacgtgtctccagacattgccacacctcctttacaagacaaaatcgtcctgtgttgagaaccactgcgctagaccatgagacctaggcttctcaaactggaaggctgccttcccttcaggtgcccgtgtctattaagtgaggcttcaggaaggaatattggattttctttctactaaattgttttcactcaagactcagcaagagaagaaccgtttatagtgtacattgaatatttgacacatgaatatttcataaggcaaccgcctgttagcactcagagtgaaaatgactgtgtaggaatagaaagagtaggcgggcctttgtctgcagatgtggaggaaaccgttgaaaatctggccctttccctctgcccctccctgtgtccccttttccaatgttggtttacagaatcttgcttttgcctttaacgttattgttattttacaaagaaatggacgtattcgatttctaagtggttttcaccaaaaaaaaaaa

SEQ ID NO: 82489 - DNA, 1081 bp, Homo sapiens
  misc_feature (1038)..(1040): n is a, c, g, or t
cctagcaaagagctatttgaggataacagccctcctttgtgctcctctatccggtcgctgcctcgttctggcctatcatcctccaggatgtctctggtttttgcctttgctctccatctttggtgtcccttctagcatcactgcccctccaaagctcagcctcttcatctcattctgattgttgctatagcatctccctccgtatccccccatcagtcttcccaacaaccaccaccagacccatcctgcgccatcgccctccaccctctgtgatagctccttctgtttttctggatgtgctaccatccattctcaccttttaaattcatcacagttgcctgtgacccccttgcccatctgtgcctctcccagctctctgtgctgtgatcttttcccctattccctaccgtttctcagtgctttatcagaccctgctcctccttagcttaagctttaccttttccaccagttttgtgagatcagcccaccccagccagaactgtttttctactgttatttttgccctcctagccagttactagtcctcaatagaccatttctaagacctcttttgaagccctccccatcctcacccctaccttagtgtagtgctaggcacatagtgggctcttggtgagtcctgggtggtcaggtgatggataacatttttctcctcttctccctaggtgttgatctgttccagctgcaggtgaacaccctacgacgttataaacgacactacaagttgcagaccagaccaggcttcaataaggcccagttagcagaaactgtgagtcgacacttcaggaacatacctgtgaatgaaaaagagacccttgcctacttcatctacatggtgaagagtaacaagagtagactggaccagaaatcggagggtggcaagcagcttgagtgaggatgaagcacatcttaaaggaatgaagtgtaatgcttgatgcacaggtgatatctactacatttaagcccataaagactgttaaatattattgtaaataaaaaagtttgaatgatgaaaannntaaatctttttggtcaggaggattatattctcatgattcag

SEQ ID NO: 82490 - DNA, 448 bp, Homo sapiens
tttgaaaaagaatgaaggactttggcccctcatattgatcattcattttgtttttaagtgctctccacctgcctgaagcaagaacagctcttttagaggcaggttgatctgttccagctgcaggtgaacaccctacgacgttataaacgacactacaagttgcagaccagaccaggcttcaataaggcccagttagcagaaactgtgagtcgacacttcaggaacatacctgtgaatgaaaaagagacccttgcctacttcatctacatggtgaagagtaacaagagtagactggaccagaaatcggagggtggcaagcagcttgagtgaggatgaagcacatcttaaaggaatgaagtgtaatgcttgatgcacaggtgatatctactacatttaagcccataaagactgttaaatattattgtaaataaaaaagtttgaatgatga

SEQ ID NO: 82491 - DNA, 495 bp, Homo sapiens
  misc_feature (452)..(454): n is a, c, g, or t
tttgaaaaagaatgaaggactttggcccctcatattgatcattcattttgtttttaagtgctctccacctgcctgaagcaagaacagctcttttagaggcaggttgatctgttccagctgcaggtgaacaccctacgacgttataaacgacactacaagttgcagaccagaccaggcttcaataaggcccagttagcagaaactgtgagtcgacacttcaggaacatacctgtgaatgaaaaagagacccttgcctacttcatctacatggtgaagagtaacaagagtagactggaccagaaatcggagggtggcaagcagcttgagtgaggatgaagcacatcttaaaggaatgaagtgtaatgcttgatgcacaggtgatatctactacatttaagcccataaagactgttaaatattattgtaaataaaaaagtttgaatgatgaaaannntaaatctttttggtcaggaggattatattctcatgattcag

SEQ ID NO: 82492 - DNA, 376 bp, Homo sapiens
gaagttcttcagcatttgtcattcccgccacagcatgcaaacaactccattcgcttctttgtacaatgtagaatttgcggtgtgatttgtgcatggtttaaggaactttggtattttccccccacatagactgtgagtcgacacttcaggaacatacctgtgaatgaaaaagagacccttgcctacttcatctacatggtgaagagtaacaagagtagactggaccagaaatcggagggtggcaagcagcttgagtgaggatgaagcacatcttaaaggaatgaagtgtaatgcttgatgcacaggtgatatctactacatttaagcccataaagactgttaaatattattgtaaataaaaaagtttgaatgatga

SEQ ID NO: 82493 - DNA, 423 bp, Homo sapiens
  misc_feature (380)..(382): n is a, c, g, or t
gaagttcttcagcatttgtcattcccgccacagcatgcaaacaactccattcgcttctttgtacaatgtagaatttgcggtgtgatttgtgcatggtttaaggaactttggtattttccccccacatagactgtgagtcgacacttcaggaacatacctgtgaatgaaaaagagacccttgcctacttcatctacatggtgaagagtaacaagagtagactggaccagaaatcggagggtggcaagcagcttgagtgaggatgaagcacatcttaaaggaatgaagtgtaatgcttgatgcacaggtgatatctactacatttaagcccataaagactgttaaatattattgtaaataaaaaagtttgaatgatgaaaannntaaatctttttggtcaggaggattatattctcatgattcag

SEQ ID NO: 82494 - DNA, 1362 bp, Homo sapiens
acttccgctgtcccgcgaagggcggggggagcgaactgttgtggtgcggagcgttcggcgggcggcggccgggcggcccaggggctgccgcgggactcggggcgcagccgagtggctgcaggggtggagtgggccggacgagccgcggggcccgggtgccgcgggttcgaggccgggccccgcgcgaggaggccgcgccaccccgggggagctgcccggcagcgagtttgccccgctgccgaaagaaggcgggagccggcaggggccttcgaaaccccctggcaacccaggcccggagtccttggggagcggctgtttcctgggacgccctcccggacacccccgctgcagggttacggttctgggcccccggcagaaggctcctccgggtgacccccggcggggccctgcgagccgcgggagccgaccccggggcctcgagccgggaggaagggggcttccggaggcggagggccgggggccgagggagccgggcctctcggacgcggggcagggcagcgcccgggctggagacggactctgggaccctcggctgcgggggtctcagcgacctgccccgcggcaagcgcggccgcggagtggcctaccggggaccctcccccagagggaccggcccggggcggggagatgaacggcttcagcacggaggaggacagccgcgaagggccccccgccgccccagctgccgccgccccgggctacggccagagctgctgcctcatcgaggacggcgagcgctgcgtccggcccgcgggcaacgcctccttcagcaagagggtccagaagagcatctcgcagaagaaactcaagctggacatcgacaagagcgtaaggcacctatatatctgtgattttcacaaaaatttcatccagagtgtccgaaataaaaggaagaggaagacaagtgacgatggcggagattctcccgagcacgacactgacattcctgagtgctctccacctgcctgaagcaagaacagctcttttagaggcaggttgatctgttccagctgcaggtgaacaccctacgacgttataaacgacactacaagttgcagaccagaccaggcttcaataaggcccagttagcagaaactgtgagtcgacacttcaggaacatacctgtgaatgaaaaagagacccttgcctacttcatctacatggtgaagagtaacaagagtagactggaccagaaatcggagggtggcaagcagcttgagtgaggatgaagcacatcttaaaggaatgaagtgtaatgcttgatgcacaggtgatatctactacatttaagcccataaagactgttaaatattattgtaaataaaaaagtttgaatgatga

SEQ ID NO: 82495 - DNA, 1365 bp, Homo sapiens
  misc_feature (1322)..(1324): n is a, c, g, or t
acttccgctgtcccgcgaagggcggggggagcgaactgttgtggtgcggagcgttcggcgggcggcggccgggcggcccaggggctgccgcgggactcggggcgcagccgagtggctgcaggggtggagtgggccggacgagccgcggggcccgggtgccgcgggttcgaggccgggccccgcgcgaggaggccgcgccaccccgggggagctgcccggcagcgagtttgccccgctgccgaaagaaggcgggagccggcaggggccttcgaaaccccctggcaacccaggcccggagtccttggggagcggctgtttcctgggacgccctcccggacacccccgctgcagggttacggttctgggcccccggcagaaggctcctccgggtgacccccggcggggccctgcgagccgcgggagccgaccccggggcctcgagccgggaggaagggggcttccggaggcggagggccgggggccgagggagccgggcctctcggacgcggggcagggcagcgcccgggctggagacggactctgggaccctcggctgcgggggtctcagcgacctgccccgcggcaagcgcggccgcggagtggcctaccggggaccctcccccagagggaccggcccggggcggggagatgaacggcttcagcacggaggaggacagccgcgaagggccccccgccgccccagctgccgccgccccgggctacggccagagctgctgcctcatcgaggacggcgagcgctgcgtccggcccgcgggcaacgcctccttcagcaagagggtccagaagagcatctcgcagaagaaactcaagctggacatcgacaagagcgtaaggcacctatatatctgtgattttcacaaaaatttcatccagagtgtccgaaataaaaggaagaggaagacaagtgacgatggcggagattctcccgagcacgacactgacattcctgaggttgatctgttccagctgcaggtgaacaccctacgacgttataaacgacactacaagttgcagaccagaccaggcttcaataaggcccagttagcagaaactgtgagtcgacacttcaggaacatacctgtgaatgaaaaagagacccttgcctacttcatctacatggtgaagagtaacaagagtagactggaccagaaatcggagggtggcaagcagcttgagtgaggatgaagcacatcttaaaggaatgaagtgtaatgcttgatgcacaggtgatatctactacatttaagcccataaagactgttaaatattattgtaaataaaaaagtttgaatgatgaaaannntaaatctttttggtcaggaggattatattctcatgattcag

SEQ ID NO: 82496 - DNA, 1195 bp, Homo sapiens
acttccgctgtcccgcgaagggcggggggagcgaactgttgtggtgcggagcgttcggcgggcggcggccgggcggcccaggggctgccgcgggactcggggcgcagccgagtggctgcaggggtggagtgggccggacgagccgcggggcccgggtgccgcgggttcgaggccgggccccgcgcgaggaggccgcgccaccccgggggagctgcccggcagcgagtttgccccgctgccgaaagaaggcgggagccggcaggggccttcgaaaccccctggcaacccaggcccggagtccttggggagcggctgtttcctgggacgccctcccggacacccccgctgcagggttacggttctgggcccccggcagaaggctcctccgggtgacccccggcggggccctgcgagccgcgggagccgaccccggggcctcgagccgggaggaagggggcttccggaggcggagggccgggggccgagggagccgggcctctcggacgcggggcagggcagcgcccgggctggagacggactctgggaccctcggctgcgggggtctcagcgacctgccccgcggcaagcgcggccgcggagtggcctaccggggaccctcccccagagggaccggcccggggcggggagatgaacggcttcagcacggaggaggacagccgcgaagggccccccgccgccccagctgccgccgccccgggctacggccagagctgctgcctcatcgaggacggcgagcgctgcgtccggcccgcgggcaacgcctccttcagcaagagggtccagaagagcatctcgcagaagaaactcaagctggacatcgacaagagcgttgatctgttccagctgcaggtgaacaccctacgacgttataaacgacactacaagttgcagaccagaccaggcttcaataaggcccagttagcagaaactgtgagtcgacacttcaggaacatacctgtgaatgaaaaagagacccttgcctacttcatctacatggtgaagagtaacaagagtagactggaccagaaatcggagggtggcaagcagcttgagtgaggatgaagcacatcttaaaggaatgaagtgtaatgcttgatgcacaggtgatatctactacatttaagcccataaagactgttaaatattattgtaaataaaaaagtttgaatgatga

SEQ ID NO: 82497 - DNA, 1182 bp, Homo sapiens
gagtgcagcaacccaagggtgtcttaatctgaaataccaccaggaatgtctggacacagtagacaaagttttttcaactggacgccttaggatacatgcttccaaaaacaaagtagccaaaaagaaaccagagtcacagaatatcagagccaaaggaacatttggaggtaattcagtacctcctccttttcaacctacaggggagatagtggaagagaagcagggatgggtctgccttctgtgcccacaattcattggagattgttgtggtgaagaatttcttttatgatgaaggagaaataaactcccatcagctttaattcaggcaggtttattgaaaaggtgaagaagcatcttgcagaagcaaagcatggctgaggcttgtgggctctgtctggacaaatgagcagccgacagtggctgatgctgcccctgactctggggccgtgcggtctgtggttctctgtgagcatctcttctattctcttgcaccttccctcagcctggcagtctctgtgtactcttcaacccataattgagcgaggctgtaccagccccaatgccatgtagcactttatgtcaaattagaaaggcatgaaataaactagccctttataatacaactgttggaacaacagttgaaaataacaatatcttgactcctggttgagtgctttacgctgagctttcttttccgaatatgagcacagacttggggatattagtgtcacctagcgttattagctagtattctccttttgtttccccataacatcccctcctccttcccacagatccactctccactcatttccatcctgtcttatgccacttggggcttgtcccttctagaatgcatccctggctcccctgtgtgcacacttgcagttaggtttagcagtgggggcacctgatggagcctggaagtgagaggaaggtgaggtccgtatttcttccctctccctccctgctctggcactgagtatctggcaatagctgcatctgtctattacttcagtggccactcttccacagacgcaattctcagtgggtcccatagcattatttacctttgttcctttagctcccatcaaggaagacccagaggcattctcctcaccaaggcattaagaaatgcatgggtgaggggaacagcggcgtgcgtgtaaaggtcctgtggca

SEQ ID NO: 82498 - DNA, 598 bp, Homo sapiens
gagtgcagcaacccaagggtgtcttaatctgaaataccaccaggaatgtctggacacagtagacaaagttttttcaactggacgccttaggatacatgcttccaaaaacaaagtagccaaaaagaaaccagagtcacagaatatcagagccaaaggaacatttggaggtaattcagtacctcctccttttcaacctacaggggagatagtggaagagaagcagggatgggtctgccttctgtgcccacaattcattggagattgttgtggtgaagaatttcttttatgatgaaggagaaataaactcccatcagctttaattcaggcaggtttattgaaaaggtgaagaagcatcttgcagaagcaaagcatggctgaggcttgtgggctctgtctggacaaatgagcagccgacagtggctgatgctgcccctgactctggggccgtgcggtctgtggttctctgtgagcatctcttctattctcttgcaccttccctcagcctggcagtctctgtgtactcttcaacccataattgagcgaggctgtaccagcaaagcaccagcacaagaaaacacagttaccagacaagaccaca

SEQ ID NO: 82499 - DNA, 378 bp, Homo sapiens
atttcataatactattttgtgtagaaaccattactgtttgttttgtatttgtgtaggtaaaaagtattatgaaattatgtaattacagtattcactctgccaaaaaaaacaaaaataattataactcgggtatctaatgattgaacatttagtaattcttccctgacaaaaagagaaaaatattataactcaggtatctaatgattgaacatttagtaattcttccctgattataaaagtagcacatttatactttggaaaataaaacagcatgtatgggaaaaagtaataaacatagagaaattccatcacctcccttcccctctcctccaagaagcttgagcccaggagtttgggacttgcctgggcaatatagcg

SEQ ID NO: 82500 - DNA, 155 bp, Homo sapiens
tagctcaggccccaccatgtctcaccttgacatctgcagccatctcctcattggtcttcctgcctccagtctttcccccgtgattcattttctgcactggggatgatctttctaatttccaaacctgatcaaaaccctttcgtgactctgcatta

SEQ ID NO: 82501 - DNA, 867 bp, Homo sapiens
gtgccactgaagatcctggtgtcgccatgggccgcgccccgcccgttgttaccggtattgtaagaacaagccgtacccaaagtctcgcttctgccgaggtgtccctgatgccaagattcgcatttttgacctggggcggaaaaaggcaaaagtggatgagtttccgctttgtggccacatggtgtcagatgaatatgagcagctgtcctctgaagccctggaggctgcccgaatttgtgccaataagtacatggtaaaaagttgtggcaaagatggcttccatatccgggtgcggctccaccccttccacgtcatccgcatcaacaagatgttgtcctgtgctggggctgacaggtgagcttggtctgggccttttaaggcagttggagtctctacattattaggcttgcattattttatcagagcatagaggtggccccagtgactcagccactatggctactagaaaagccaaggctggcaagtgactttcagtggtcactcaggaccccttcctgcagatacaaacaaagcatgagtaagtcttagcaagctcttccccacaggttaggggaaacactggtgatgggagtagctcttcttgcttttagctgaatgacaaccatcttgccagcaggtagctgaagctggcagaggagcccagtggcgccttttcagtggttcttgggatgctccgcagccaattaagccgactgagttcctttcctcatggggacccgtgtgcaatggctgcacacagcagcttccttggtagtgtacgcagcctgttggttgtatgggttgctctaagggaccttggagacaggcctttccgatggatgttcatgtttctaaccttgcactacc

SEQ ID NO: 82502 - DNA, 4972 bp, Homo sapiens
  misc_feature (4867)..(4867): n is a, c, g, or t
ccaacattatttttgtgcagatttcaattcatgctgcactcatcctgggggcaaaagttaaaggttttctaaaaagctacttagtgaatgtcttagttaatggaaaagaaaataagtcaatccttttttttctaaccttgaagttgcaaagattgacaatgaactctgtaatggtgcattctcctcttgtgtggtttttgaaagctgagttatccttcctgtaatgattctgcacctgcaaactatacgtggcttcctccaggcagtaaatctacagcccaggctccctgcatcttatggctccaatcactttggatctcatcgtcgcctgcacattgccatacacagggaaggagaagagatggagaaggcaaagactttctgaaagccgtggctaaaagctggcatgtgtcacatcagctcacattccattgtagagacggggtttcaccgtgttagccaggatggtcttgatatcctgacctcgtgatccgcccgccttggcttcccaaagtgctgggattacaggcgtgagccaccgctcccggcctggcaggcattcttgaggcaaacgggaaatgggtgaacgggaggaacattggcagcacttgtggtctgcaccaagaactgaatcgaatttccatgtgttattgaatgttcacaaagaccttgtacagcgagtgttactacctctggtcaatgattcaactcaaggctcagaaaagtcaagtgtcttgtccagggacacttagtcagaagtgaatccaaggtttaagctcaagtctgcctaactctgaatttcacagccttttgctacatatggcgaataatatatccctgagcactaaaggcagactccaaggatcttgtctctgcaatcatcattctggccataatttatgaaaagcaacccaaagtatgtgatgtaataaaaagtactatctatgagtttacccttccaaaaattgaactgaattctgagctctaaatttggaatcaaaagaacttttctctgcactaatcatttggaacatcacttaaagaaaacaacgaaaaactggtgtcccctgagagaaagcaatacaaaacattatgcataaagaaatccttccaaaaaataaaccaaatccagtcaaatctctagttttgactcctagcttaccggaaatacgtgatgggaaaaaaatgaaatgacaccactatgattcaatcagccaaatccagcatatgcaaatttctaccagataaatggtttagtttcttccccaaacaaatggcacaaggaaacggaggtaagaatgggatgctgttatagattttaaaagatttaagaaagtataaactaaatacactatgtgcatcctctctgaacgtgcttcaaacatatcaaggggtcaatgagcagttttgaaacaataagggaatttgaacactgaatggttgtcagaagatagtaagagatcattattaattttactagacataatgatgttctgattttgttttttttttaaaaaaaaaacagtgttatttcctttatagatacatcatatagtattaactaatgaaatgctttgatatctggaacgtttaaaaaatattcccgatggagtaagtgcaaagaaacaggtaagcaaaatgctgataattgctgaaacacaggatgtgtacctggggcttcatttactatctcttcattttctattttgatatttgttggacattctcataaaaaggaaagttatgttttattttctcataagctagtaatgaaatagccctacgtaactgatattgtagagacaagaataggtgtaatagagcttaaggttttcatttaaaaaactatctgtagacttcaatggatcttaggtggcatccatgcaataacactcgtggaacatgcaggacaggtgtggagctccatcttcacacagtgacattttttatgcttctgttttccctaagagtggagtgagaggatgattattttatatcatggacttcttccctgctatactttttttaattattttactttcacttctgggatacatgtgctgagcatgcaggcttgtttacataggtatacatctgccatggtggtttgctgcacctatcaacccatcatacaggttttaagccctgcatgcattaggtattcgccctaatgctctccctcgcctttccccccaccccctgatagcccccagtgagtcatattcccctccctgtgtccatgtgttctcattgttcaactcccatttatgagtgagaatatgtggtgtttagttttctgttcctgtgttagtttgctgagaatgatgttttccagcttcatccatgtccctgaaaaggacatgagctcattcttttttatggctgcatagtattccacggtgttatatgtgccacattttcttaatccagtctgtcattgatggacatttgggttgtttccaagtctttgctattgtaaatagtgctgcaataaacatatgtgtgcatgtgtctttgtagtagaatgatttataatcctttgggtatatgcccagtaatgggactgatgggtcaaatggtatttctggttctagatccttgaggaattgccacactgtcttccacaatggttgaactaatttatactcccaccaacagggtaaaagcattcctatttctccacatcctctccagcatctgttgtttccaaatgttttaatgattgccattccacctggcgtgagatggtatctcattgtggttttgattttcatttctctaatgaccagtgatgataagctttttttcatatgtttgttggccacataaatgtcttcttttgacttttatgtggaaacaaatttaactgcacagagaggtgaaaattaattaataacttttaaagtaattccctaagtttctaaggatctatatgtttccatctgactttattttatttaagctcttgattgatgctgcatttggagcaggttcatgaacatgaatagagttaatctgggacagatttccctcatttgattttttcactgtttccatcacagaacttatttcatgctcaccatgtttgcaggcattgagcttggtactggagccacagagctggatcagacagacttgtgcaaatatttcaggttttttttgtgggggggtcatatttatagataaataacagtaaagagtgacgggttcttatgaaaatgcatacacagtgaagtagagggtgaaaaggagggatgtgttctatgaggaggaagagtgataagaaagtgtaaggggatgtgtctgtgtctagacatatgtgtgttcacgtgtgtgcgtgcttgtgtgtactgcatgtgtatatgtgtggccatgcacctgtgtgcatgttcatgtgtgtgtgtgtatgtgtctgtgttgaggactaaattaattgggcttatggaagcagggagccactgataggtttaattagagactgacatgatatgatagtttaggtggatttctctgggggctgtgttgagggacagtggggaggagagctagaaggaagaaaaggacacatgcataacagaagcaatatctgtctatgggatggtggaaagaatcagaaaagacttaataaaacatgtgacactttaactgaatcttgaaatagacaagtgttggaggagggagttggaccagatacttcatgcaaagggaagaaaagtgcacaaacaaaatatgagaaacaaggcagacaggcatttttttaaaattttcgcacccactgatagaccagtgatgcattcacatcgtctgcattcatgatcaacaaaagtgctttcctagaacatgaacctcaacccaagtgtcgcctcaagtagtgtatgcatgaactcaagcattaaattagaattgattttttaaaaaactcacacaaacagatgtattatttaaaaatctttaaagcaggtttaaacagttttcaggattaaaagcagccactattagaaagaacaaaaatacatttgacataaatataaggagcctcaatagaacctcctgtacccagtcattgtcaatgccacatccattcattcaccagcccttatatcaatgcttgctgggctcacttaccacgatcagcacgtgcatgtccttatctgaaagcttgccactcaaatgtgctcagtcttacctgtgtggctgggagtgttggggatttaatgtcaagggaaagaatcttccatcaatgaatgatgaaagttagttttcacaacttccggtccccttggccctcatcaaagggctccaggtgaggtttgggctccttgctatcctccgagtttccacggtagttttaagcaccattgcccgtggtaatggctgacattgatactgcactttttttttatttaagatggagttcccctctgccacccagactggagtacagtggcgcgatcctggccatcgcaacctccgcctcccagatccctcctacaacacatgagaattgtgggtgctacaattcaagatgagatttgagtggggacaaagtcaaaccatatcattagataggacactggagaaaggcaagaaagaaaagacatctgaagaatgaagggagccaaagaaatgccaacattttgctttttgaagaaaagctaaattaaagtcaaaatggatttatcaatttccttgggttcgtgaatgtacagaactttattaagactgtcatgctgtcatcatggctggatctgatacggccaccgtggaccttgaggtgacctcgggaatggagacagtgcatgggagagaatcacattggaaggggcctgggtttctgaagaccctgtaagacagatctccttgcagncctgactgcccacattagggcttttatgttagggtgaagttaccttgcattgtcatataagcaattgctatttgtggtgtcttgcaaataaacctattctgatct

SEQ ID NO: 82503 - DNA, 4887 bp, Homo sapiens
  misc_feature (4782)..(4782): n is a, c, g, or t
tggcgactgctttgggaagtcctgctggcaggcactctgcccctgggggtgtgcaaagagttgtccagttaccttgatcttctcacagcctcctccccagggcaccaggagagaccaggattggaggacggtaaagaacacacttcccagaggattcttggaggtggcttcctccaggcagtaaatctacagcccaggctccctgcatcttatggctccaatcactttggatctcatcgtcgcctgcacattgccatacacagggaaggagaagagatggagaaggcaaagactttctgaaagccgtggctaaaagctggcatgtgtcacatcagctcacattccattgtagagacggggtttcaccgtgttagccaggatggtcttgatatcctgacctcgtgatccgcccgccttggcttcccaaagtgctgggattacaggcgtgagccaccgctcccggcctggcaggcattcttgaggcaaacgggaaatgggtgaacgggaggaacattggcagcacttgtggtctgcaccaagaactgaatcgaatttccatgtgttattgaatgttcacaaagaccttgtacagcgagtgttactacctctggtcaatgattcaactcaaggctcagaaaagtcaagtgtcttgtccagggacacttagtcagaagtgaatccaaggtttaagctcaagtctgcctaactctgaatttcacagccttttgctacatatggcgaataatatatccctgagcactaaaggcagactccaaggatcttgtctctgcaatcatcattctggccataatttatgaaaagcaacccaaagtatgtgatgtaataaaaagtactatctatgagtttacccttccaaaaattgaactgaattctgagctctaaatttggaatcaaaagaacttttctctgcactaatcatttggaacatcacttaaagaaaacaacgaaaaactggtgtcccctgagagaaagcaatacaaaacattatgcataaagaaatccttccaaaaaataaaccaaatccagtcaaatctctagttttgactcctagcttaccggaaatacgtgatgggaaaaaaatgaaatgacaccactatgattcaatcagccaaatccagcatatgcaaatttctaccagataaatggtttagtttcttccccaaacaaatggcacaaggaaacggaggtaagaatgggatgctgttatagattttaaaagatttaagaaagtataaactaaatacactatgtgcatcctctctgaacgtgcttcaaacatatcaaggggtcaatgagcagttttgaaacaataagggaatttgaacactgaatggttgtcagaagatagtaagagatcattattaattttactagacataatgatgttctgattttgttttttttttaaaaaaaaaacagtgttatttcctttatagatacatcatatagtattaactaatgaaatgctttgatatctggaacgtttaaaaaatattcccgatggagtaagtgcaaagaaacaggtaagcaaaatgctgataattgctgaaacacaggatgtgtacctggggcttcatttactatctcttcattttctattttgatatttgttggacattctcataaaaaggaaagttatgttttattttctcataagctagtaatgaaatagccctacgtaactgatattgtagagacaagaataggtgtaatagagcttaaggttttcatttaaaaaactatctgtagacttcaatggatcttaggtggcatccatgcaataacactcgtggaacatgcaggacaggtgtggagctccatcttcacacagtgacattttttatgcttctgttttccctaagagtggagtgagaggatgattattttatatcatggacttcttccctgctatactttttttaattattttactttcacttctgggatacatgtgctgagcatgcaggcttgtttacataggtatacatctgccatggtggtttgctgcacctatcaacccatcatacaggttttaagccctgcatgcattaggtattcgccctaatgctctccctcgcctttccccccaccccctgatagcccccagtgagtcatattcccctccctgtgtccatgtgttctcattgttcaactcccatttatgagtgagaatatgtggtgtttagttttctgttcctgtgttagtttgctgagaatgatgttttccagcttcatccatgtccctgaaaaggacatgagctcattcttttttatggctgcatagtattccacggtgttatatgtgccacattttcttaatccagtctgtcattgatggacatttgggttgtttccaagtctttgctattgtaaatagtgctgcaataaacatatgtgtgcatgtgtctttgtagtagaatgatttataatcctttgggtatatgcccagtaatgggactgatgggtcaaatggtatttctggttctagatccttgaggaattgccacactgtcttccacaatggttgaactaatttatactcccaccaacagggtaaaagcattcctatttctccacatcctctccagcatctgttgtttccaaatgttttaatgattgccattccacctggcgtgagatggtatctcattgtggttttgattttcatttctctaatgaccagtgatgataagctttttttcatatgtttgttggccacataaatgtcttcttttgacttttatgtggaaacaaatttaactgcacagagaggtgaaaattaattaataacttttaaagtaattccctaagtttctaaggatctatatgtttccatctgactttattttatttaagctcttgattgatgctgcatttggagcaggttcatgaacatgaatagagttaatctgggacagatttccctcatttgattttttcactgtttccatcacagaacttatttcatgctcaccatgtttgcaggcattgagcttggtactggagccacagagctggatcagacagacttgtgcaaatatttcaggttttttttgtgggggggtcatatttatagataaataacagtaaagagtgacgggttcttatgaaaatgcatacacagtgaagtagagggtgaaaaggagggatgtgttctatgaggaggaagagtgataagaaagtgtaaggggatgtgtctgtgtctagacatatgtgtgttcacgtgtgtgcgtgcttgtgtgtactgcatgtgtatatgtgtggccatgcacctgtgtgcatgttcatgtgtgtgtgtgtatgtgtctgtgttgaggactaaattaattgggcttatggaagcagggagccactgataggtttaattagagactgacatgatatgatagtttaggtggatttctctgggggctgtgttgagggacagtggggaggagagctagaaggaagaaaaggacacatgcataacagaagcaatatctgtctatgggatggtggaaagaatcagaaaagacttaataaaacatgtgacactttaactgaatcttgaaatagacaagtgttggaggagggagttggaccagatacttcatgcaaagggaagaaaagtgcacaaacaaaatatgagaaacaaggcagacaggcatttttttaaaattttcgcacccactgatagaccagtgatgcattcacatcgtctgcattcatgatcaacaaaagtgctttcctagaacatgaacctcaacccaagtgtcgcctcaagtagtgtatgcatgaactcaagcattaaattagaattgattttttaaaaaactcacacaaacagatgtattatttaaaaatctttaaagcaggtttaaacagttttcaggattaaaagcagccactattagaaagaacaaaaatacatttgacataaatataaggagcctcaatagaacctcctgtacccagtcattgtcaatgccacatccattcattcaccagcccttatatcaatgcttgctgggctcacttaccacgatcagcacgtgcatgtccttatctgaaagcttgccactcaaatgtgctcagtcttacctgtgtggctgggagtgttggggatttaatgtcaagggaaagaatcttccatcaatgaatgatgaaagttagttttcacaacttccggtccccttggccctcatcaaagggctccaggtgaggtttgggctccttgctatcctccgagtttccacggtagttttaagcaccattgcccgtggtaatggctgacattgatactgcactttttttttatttaagatggagttcccctctgccacccagactggagtacagtggcgcgatcctggccatcgcaacctccgcctcccagatccctcctacaacacatgagaattgtgggtgctacaattcaagatgagatttgagtggggacaaagtcaaaccatatcattagataggacactggagaaaggcaagaaagaaaagacatctgaagaatgaagggagccaaagaaatgccaacattttgctttttgaagaaaagctaaattaaagtcaaaatggatttatcaatttccttgggttcgtgaatgtacagaactttattaagactgtcatgctgtcatcatggctggatctgatacggccaccgtggaccttgaggtgacctcgggaatggagacagtgcatgggagagaatcacattggaaggggcctgggtttctgaagaccctgtaagacagatctccttgcagncctgactgcccacattagggcttttatgttagggtgaagttaccttgcattgtcatataagcaattgctatttgtggtgtcttgcaaataaacctattctgatct

SEQ ID NO: 82504 - DNA, 373 bp, Homo sapiens
gttgtctaggaaatctttctatatacaagggcaagattttgaaatgggcaaaagagattgctggatatcatttcagtgaaatgctgaaacctccaaggattgtctgatcctgtagaggtgtctgccttcattttattctgtttttaactaggctgtttcacaatgctgacaagaagttaacctgtagaaatccaatagcaatgcaaatgattcctgtccatagaaatccaaattatgtctggtggaatgcaattgattatcaatctgtggatattaaatatgaatcagttttattagtttttgcatccattgtaaatgtttcagcatttctaataagactgagtgtgtgatactttgagtgctttttgaaata

SEQ ID NO: 82505 - DNA, 444 bp, Homo sapiens
gagagatactgtcaaaattaactgttgacagcagtaggaaatgaaagagggaggacacagaaaaatatacatgaaacctcaaacccaggtattctgggaccatctaacttagagcaaacagccctacccctcaaggatattgttgtacaatgaagtgtttaaagatgataattactattatcataatcattagaatatgacggccaggcatggtggctcatgtctataatcctagcacctggggaggccgaagcaggaggatcacttgagcttaagagttcaagaccagcctgggcaacatagtgaggacttatctctacaaaaaataacaaaaatcagccaggcatggtggtgtgtgcccatagtcctagctacttgggaggctgaagtaagccaaagttgcacaactgcactccagcctgggcaacagagtgagaccctgct

SEQ ID NO: 82506 - DNA, 801 bp, Homo sapiens
gagggagagcactttggaaaagttgccatagttttgataagctgaatgagggaaagcaaaatgctccaacggaagagaaggtaagtctgtttagctttgtggagtggtgggctttgagtagtgggctttgagtagacagtgtggctattttttatggagtttggaggtggaaatgattctcaaaactgtttcgtttttgggtgccatgctccaagtcccacccaattatttgagcagatgagttgcaaaagggcaagcagagcagcaagtgtttattccaattaagggagaaagctaaaaagcaagaattaattaagcaatcatgtcaaacaatttaaaatggaggtttttaaccagaagtcaatgtaaataccttaagcagtctgtggactttttattaataatattataagtagaattgtatgtttgtacaaaatttccagttttctagtggaagggtcacaaagttctcatgaatcaagactttaagaatgactgctgaaggaggtaggtttgatatattttggtaaggcaggaggcagcagtgtagggtgagggtggatgtgagatgttagaaaaaagtctgcacaggccagattatccagagtgaccctgagtaggaggtacccagaatcacgggattctggcatgcaaagccaagcaaaagcagtggattgccagggataactggtaaaggctctgaagaggcagcagattctgggtttggtatctgacagagatagcttgacttgtgtctgagttttaaaaaactttgaaaggtgtactgaaaggaagaagaga

SEQ ID NO: 82507 - DNA, 290 bp, Homo sapiens
aattatttcataataatgtaataaacattcatgaacataccctatcaagcaagagctagaaccttggcaatcatttccttgactcctccagtttgtggctatcatgatattcagccccaagttcatcatttctgttttttcttcgatacaggtttcttatatgtatttctaaaaatctttggttatttcatctttgtaaaaagtcattgttctatttttcccactagttctacattgcattcatattgttgtgggttgtggtaattcatttattttgactgctgtataat

SEQ ID NO: 82508 - DNA, 441 bp, Homo sapiens
cccaggaggatagccttcacgaagaacctcaccatgctggtaccttgatcttggatttccagcctccagactgtgcatcatgcacgatagaactgctgtaccccaaagcaagccataaaatctaggaagactatctgaccctctcttctcctccctgaagacccttacatgacaagtgtcatgccctatgcccagaggaagaaatgctacacagagaggccaagaaaaatctgaacacacaggacttgttggaattcccctcaagttattatcattacatcatgccttttttgtccagtcatatttctacacagctgtccattcttcatcgaacctaagcttaagaatatgcacttctccctgggtctctgggtcttcatttctgagcgctcccatgtgatgtaaaattttgattaaataaattttttcttgataaaatgt

SEQ ID NO: 82509 - DNA, 330 bp, Homo sapiens
tgtctacctccctgccattctctcaccctcatcccacagcagggtctcaggagtcccactctccctctcctctcattccagtgtcccacaactgcccagttaacccccagatgcaagccagattccatctgccccaggccccaagcttttgctttggcatcacgcgaggccaggctgctttgcaggcaccaaaattcaccctctcctactcctggaaaagcccagccccaggcctcacagagccaggggaggggatctcatcacatcacagttagaaatcatacaggcctaaagtcccagctacccaggagccaaggcaggaggatccct

SEQ ID NO: 82510 - DNA, 684 bp, Homo sapiens
agcagcggtaatctgctgtggtctttttccacggtttggaagctttatttttttgctctttgcaataaatattgttgctgctaattctttgagtccacactgcttttgtgagttgtagcactcacccgaaggtttgcagcttcactcctgaagccagtgagaccacgaacccaacgagaggaacgaagaattccagacgcgctgcattaagagctgtaacactcactgcgaaggtctgcagcttcacttttgaagccagcaagaccacgaacccatcagaaggaagaaactccaaacacatccgagcagcagaaggaacaaactccggacacgctgcctttaagaactgtgacactcagagcgagggtctgcggcatcacatttgaagtcagtgagaccaagaacccaccgattccggacgcgagcaggttgcttcagggtatagacatttggcacagtactgcagcataaacccatcaaggtaagccctgacatgttacacgaaagacaccctcacctttggaattataaagaggggacaggctcggcatggtggctcacgtctataatcccatcacgttgggaggccaaggtgggtggattatatgaagtcaggagtttgagaccagccgggccaacatataatgaaaccctgtctctacttaaaaaaaaaaaatacaaaaa

SEQ ID NO: 82511 - DNA, 373 bp, Homo sapiens
caaccattcctccctacctctaccactaccatctagtccaagccaccagtatctctcatctggattaccacaatatcctcccaaccagtctcattgttcccagctatgtctcccaccctcaccacctaatatgttctgagcacagcaattagattaattaatccagctccgttttatatcagatgacataaatctctgctctacaccctccgctggctacccatgttagagtaaaagctgaaatcctaaaaatagcccacaaggggccattatgtataaggatacagtatggtgctgtgttcccattactctctgacttcatctcctactttgttcccctttactcactgcactgacttccttgttcaatggc

SEQ ID NO: 82512 - DNA, 251 bp, Homo sapiens
tgaggttttttaaaaaacattttttaaaattattgtttttgcagaggataattttgaatttttaaaaattctaaacatgatttctgggattttgtttctttcttattttgttatttttttttattttaaatgaaattagactttttaaatagttgatggtaaacctcaaactttgaatgaatttttgtgatgttcaagagtagggtacctgcctttggtcggttcattaaagctctttattctgtttttat

SEQ ID NO: 82513 - DNA, 308 bp, Homo sapiens
catatatacataaaaatacaaacataagtgaagatttcatagctttgatataaaaattctagccatgagacaagtaaaactcgctattttaaaaggacattggattcaaagttcataaatagaacaagttcaagtttattgtatatgcctgaagcccttaccaagttttaaataacaagtagcaaatttatatttcaagcacagagaatttaagctttccaaaaggccaattcaattttacgttatctttggcaaaaatcatgttaacagaatccaaaagagtaaaacataaaggcctttcttctaca

SEQ ID NO: 82514 - DNA, 881 bp, Homo sapiens
tttttctgaaattttgctttttactatggaactatttttcaaatacagtgaaaacttgagagtctggtagtgactccatataactcatcacccagttatataacagcttttaactttttgccataatcgtttcattgtcttctctctttatgttttttcatcatcctctcaactatcctatgatttcaccctaataccaaacgctttacctactcccaggactgatatttcagcaagctggaaagaaaggaaagtacaacagggctctgggggccctggtcccaagctggagtgaagaaatgtgccctctcaaaagtatagcccctctaaaaccaaagccccaggcaagccagagataaagccttcctccaaaacagtattatggggcgttttcagaggctggcaggttagaaaacagccgctgcttgctcactacaagctgtgcttctccctactgcccagtctaagaagcagagtcctggtgttacaatgggttgcccaaagtgactgcagggtaagcttcaggatgattgttgagcaaggtgagctttctcctgtgagcaaggaattagccacagactgaacactgtgggggacctgtctttctggctcactcctcacccctcctcttttacagttgagagaaccaaggaatgcgttgggcagtattccttcttatactcatgatagccatttgacgttccaggtttatgtgtgtgtgtgggtgggtgctttcccttggactccccatctcgagtggtccttgggctttgtctcttgccccagaactcctaggctgtggcaacaatcaaagcctgagctcacttgatctagcagatgtccttttggcaaatcccagcttcggaagcctgctttaacca

SEQ ID NO: 82515 - DNA, 210 bp, Homo sapiens
cacagaattctgagtaaagttgccttttcagtcacatctgttaatgttgacaagacataatctaaaaatcaagaggatgagaatagaaggaccacttcccttctagtgacctcctggaccacaccaagcaccaacatcatgaggatccaaggaatctctggaaagttctatctccagaagataccctgagaacacttaggccctcccaga

SEQ ID NO: 82516 - DNA, 159 bp, Homo sapiens
tcttttaagaaatgtaacatgcctccaatctccatttgagaaaataatcactctaaattgaacaataaaatgctgaaagaaaattatgtaaagacagcttcatggaaaagatattaaatggttaagacaatattttctcaagatcagatcaatggataa

SEQ ID NO: 82517 - DNA, 714 bp, Homo sapiens
gcaaaccctgcctcaccacttacggtcacaagcacccacatacattgggagaataatttcagccactcatcatttgcagcatcactcttgccacaggcttctttatgtggagttcttcccttgccttcacctcacattactctctcactgtagggatcttagccctgctactgtgctgccattgccttctgatgggctgctccctggctgtattgccgtgacccagcaaattctcactcctaggcagaactcacaggagatgcctacagaggatgctgatgtaatttggtttactgatggcccctaattaaatggcaattctggaaaacactgcaaggtgatgcagctgtctctgtgactgaagtcctaaaagacaaccctctcccagaggcaaagttggcccacccagcaaaactgattgccttagccagagcctgtcgatgcgcagaaagcaaggttgctgaagtttacacagagagcagaggcgcatttacaacagcacgtgatttggggatgctccggaaataacgtagattcctgacttcttccagacaatcccttaaaaatggccaacaggcctttgatctcttggaggtcattcagaaactgaaatcactggcccttatcaaaattcctagacatcggaagccagacacttttgatggtaagagcaactgtttcacagaggctgtgaccaaaactgttgctgaagtg

SEQ ID NO: 82518 - DNA, 1250 bp, Homo sapiens
taaatatatttttaatgaaaagggacttaaaaagtaaacatgattatctaaattacttaaaattttttaatcttagtaaaaattttaggaaagttatctagtttaaatttcaaatgttttaaaatttgtaggcatttaataaattatctttttttggaggggtggatgctgcatttcattggaaatgtcatttttccaaagtttctagctatatactctctttccttcaaataacataagtctgaaagcaatgaaaacgtcaaaggaaaatgtttatatacatccacatgtttatttaatatgtttctcttaacacctgaaacttgttttaaaacaaaaagcagtattcacttcaaatcataaacttagaattctgtatctcatgtcagaaatatgtttatggccttgcttttaagtggtgctgtttcccatagggcattagttctcagattttggaatgtgaaataatcacctaggaagttggtttaaaatgcacactagtgagcccaccttagacttcttttggggccttcgacctcactttgagaaataccttcttcaggttattctttatgtttgtcctgtggttaaatattagagtattcatgataaaacattttgagaaggggtaagcagtgagttattacccacaatttaaagcaaattttgaatgaatctttaagttaggtatctaccttcccaccagccccccaaaaaacctctcagtagtttctttcagtgtacaaaatgatgagcatttttctatgatgaggttttaaccattattcagggtggtcttttgtttttaaatctttttttaactaataagatttacggtgtgtattttatacagaaatgcattataaatgtttttaattgtgttctgttttttgcagtctttaagtgccatgccaattgttcttatattctatagaagttcgctcaaaatactcaacaggggaataggcagcggacagtcagaatggttggaattttggctttctaagaaaaactttattttgcataagcatgtggtcagatcattttgtgcatatgcagcctggattggatgttaagtaaatgcttgttcagtgccggtacatttacttaaatctgtttttatttttgtcatgtagaatactactgtggtcatcataatgtaatctatttctgtacctttttttttttttttactttgaagtctttaaataaaatgtataatacccattgagagtggatcatttttcata

SEQ ID NO: 82519 - DNA, 1245 bp, Homo sapiens
taaatatatttttaatgaaaagggacttaaaaagtaaacatgattatctaaattacttaaaattttttaatcttagtaaaaattttaggaaagttatctagtttaaatttcaaatgttttaaaatttgtaggcatttaataaattatctttttttggaggggtggatgctgcatttcattggaaatgtcatttttccaaagtttctagctatatactctctttccttcaaataacataagtctgaaagcaatgaaaacgtcaaaggaaaatgtttatatacatccacatgtttatttaatatgtttctcttaacacctgaaacttgttttaaaacaaaaagcagtattcacttcaaatcataaacttagaattctgtatctcatgtcagaaatatgtttatggccttgcttttaagtggtgctgtttcccatagggcattagttctcagattttggaatgtgaaataatcacctaggaagttggtttaaaatgcacactagtgagcccaccttagacttcttttggggccttcgacctcactttgagaaataccttcttcaggttattctttatgtttgtcctgtggttaaatattagagtattcatgataaaacattttgagaaggggtaagcagtgagttattacccacaatttaaagcaaattttgaatgaatctttaagttaggtatctaccttcccaccagccccccaaaaaacctctcagtagtttctttcagtgtacaaaatgatgagcatttttctatgatgaggttttaaccattattcagggtggtcttttgtttttaaatctttttttaactaataagatttacggtgtgtattttatacagaaatgcattataaatgtttttaattgtgttctgttttttgcagtctttaagtgccatgccaattgttcttatattctatagaagttcgctcaaaatactcaacaggggaataggcagcggacagtcagaatggttggaattttggctttctaagaaaaactttattttgcataagcatgtggtcagatcattttgtgcatatgcagcctggattggatgttaagtaaatgcttgttcagtgccggtacatttactacgacggatcaatgtgccaggagacagcacgggtccacaaggaccaatgagcaaagaatgactacagagggcagataggttatccagaagaacacaaacgcgggggccacggcaggtaaacgcgctggggagaactg

SEQ ID NO: 82520 - DNA, 635 bp, Homo sapiens
gccagttaagaactcacaggtacttttccagccacccagataggagagatcattaaaacagtgcattctgtgctacctgacacctattggctttggtctgctctaaacttatccatctctgtccattactggaacaactccgcaaagtccttattccctaaaacatcactgataccattaaagccactaacagagactgaactcagaataaaggaaatcatagagaaactagatcagcagatcccacccagacctttcacccatgtgaacaccaccaccagtgccacacacagcacagccaccatcctcaaccctcgagatacatactgcaggggagaccagctggacatcctactggaggtgagggaccacttgggacagaggaagcaatatggtggggatttcctgagggccaggatgtcctccccagcactgacggcaggtgcttcaggaaaggtgatggacttcaacaatggcacctacctggtcagcttcactctgttctgggagggccaggtctccctgtctctgctgctcatccaccccagtgaaggggcgtcggctctctggagggcaaggaaccaaggctatgataaaattattttcaaaggcaaatttgttaatggcacctctca

SEQ ID NO: 82521 - DNA, 699 bp, Homo sapiens
  misc_feature (607)..(607): n is a, c, g, or t
tggggtgaacaacggaaatatttctaacttttgtatgaggacaattttgacaatttcattgcaagaaaaaaatatatatatagactaatttctctcattcagtagtcataaaaatacattaaaaattcagcaaattaaatccagtaatatataaaaaggataatgcataacaaccaagtctgatttacgtaaggaatccaaaataggtttaaattgggaaatcaattaatgtagttcactatattcacagaataagggggaaaactgtatcattaccaaaaaaaaaaaaaaaaaaaaaataatagcttgatccctctaaaagaaagcaagaagggaaaaaaaaaaaaaggttgtgccggtagaaaaccaattggcagatggtaaacataaacccaaatatatctgtaattacattaagtgcaagtgaaccaaaacagttcagataaaagacagtacctatttcatagcattatgactatcatgaggtaatatatgtagagattagagtacacatgtcatattaggaggtgtgcaataaatgatactttattctgaagattaacataattcatacttaaaaggatcaagaactagaatattaaaaaantagaatgtgaatgtttctgcaagttttgataagaacaagcccataaattaatctctaatttgctacatttagggaatatgggtaatgactac

SEQ ID NO: 82522 - DNA, 394 bp, Homo sapiens
ttgatatttgtgtctaattccagctactttgaaagctaaggcaaggggattactgtattaataaattctcatgctgttaataaagacataaccaagactggataattcataatgaaaaaggttaatggcctcacagtttcacatggctggggaggtctcacaattattggagcaaacaagagactttgttcaggggaatctccacttataaaaccatcagatcacgtgagacttttttgctatcatgagaacagcatgggaaaatcccacccccatgattcaattacctcccacagagtacctcccaggacatgtggagattattacaattcaagatgagatttggttggggacagagagccaaaccatatcaattacttaaggctaggagttt

SEQ ID NO: 82523 - DNA, 828 bp, Homo sapiens
atcaaatttctgatgggaatggtgaactaacatttctaaaaggtcttttgggtgaactgagtactgcaaggtttccataaccatgcttctttctagtctttttattccaatagagtacgcaaatctggacagctccttggagtttcaaggttcaaggatgaaaaatctagtttatgtgttgtatacagctaatgtcaagcctactacttcacataccatgtaacaaaaactgagctataaacaaggaaatcatacaagcaaaactacatatcagaacctaccacaatagctaaaaatcacaatgccctcaagaaagctacattaatgttggtttactaatagaacagcaaactagatagctactggagtaataatctctgaagggcaatattaccaatgccactatcacaaactataaataatcaattactagtgaatttccattatcattgcttagtgcaacaggaagtcacaaaatttagaggtgcatgataaacagaatgggaaggcactacaggtatcagtaaatagccctcctaatacctcaaacagtggaaatacactattggccctcaaaatcctaccagagtattcttttaatttaaatatatgaataaaggacacttaacaattatacaatacactagtgattatgagaggaagtgttggatagtaatactagaaaaaaattagggaaccatttcaggtacgtgcagttctgccaagggcacaaccatgtggacaaaattcatactacacatctatcgtatcaagttacttcacaagacagcaccaaatctaataattcatatggaaaatagagttgac

SEQ ID NO: 82524 - DNA, 274 bp, Homo sapiens
ggtattaattcttctttaaatgttaggttgactcaccagttaatgcagctatttggtcataaatgtttctttgttaatcactttcggttatctagctttatgtatctaggaaagggagaaagagaagctcaataaaaatgttttgtagctcttacttccccttagaacctctgagaaggaaggtggttgctgtattagtcctgcaatattgttgtattggcaggattttattttattgtggtacaatatgtaacattaaatttaccatcttaac

SEQ ID NO: 82525 - DNA, 262 bp, Homo sapiens
acaaaatacttaccattgtgttacagctgcctaaagtgttcaattcagtaacatgctgtacaggtttgtagcctaggaccaataggctgtaccataaagcctaggtaatgtgatctaggtttgtttaagtacactttgtgatgtttgcacaatgacaatatcacctaatgccacatttcttagaatatatccctgccattaagtgacatcagactatatatgctatttatacaagtcacactttaggtataaaaactgagaa

SEQ ID NO: 82526 - DNA, 283 bp, Homo sapiens
attaatatatattattatgactccttaatattatttttctaatctatattcattaggaagttaacaaatccttaatgtcttaaaaaatagtcaaatgtaaactagcaaattcaaattatctaaaattttcaacatcataacttctgaaaaatagccaacccttattgagcgcttactatgtgccaagcattggtctaagtacattgcacagactgactttttaaatcctcacagctctattgggaggtactatcattattcccattttacaaatgaagaaact

SEQ ID NO: 82527 - DNA, 490 bp, Homo sapiens
acacatagtcttgctctgtcacccaggctggagtacagtggagtgatcttggctcgctgcaacccccacctcctgggttcaagcaattctcctgccttagcctccagggtagctgggactacaggcacccaccaccacacccagctaattttctttgtattttttagtagagacagagtttcaccatgttgcccaggctggtcttgaactcctgacctcaagtgatctgcccacctctgcctcccaaagtgctaggattacaggcatgagccaccatccccgacttacatagatatgcttccttttacactgtattattttttggaacttctgtcttttgatcagttttattaaaaggtgtctattttgatagctgtgttaaaagagctgactcttggcttattgatttttttttccatctcattaatttcctctttaatttctgcagagaataacctgtctctgagggaggaaggacatagattatttc

SEQ ID NO: 82528 - DNA, 1846 bp, Homo sapiens
  misc_feature (1226)..(1226): n is a, c, g, or t
  misc_feature (1430)..(1430): n is a, c, g, or t
cacgtgctcacagagtaggctgcggcaccacgtgcagccgctctcgtgcaggcgtttgcagtgtgcagctgagttcggcagctcacacagcacccctttcaagttgttttgcagtgggtgcctcttgtgagacactgtttctgagagcagcttttgtggcatcttacagggcagatttctggtcccacccacctctgcctccgccatggctgcaagaaccgttatcattgaccacgggtctggctttttgaaggctggcacggccggctggaatgagcctcagatggtcttcccgaacatcgtgaactacctaccgtgcaaggagaaccctggccccagctatgcccgtaggcgtgtgagcctgggcatcgacatttgccatcctgacacctttagctaccccatcgagcggggccgcatcctcaactgggagggtgtgcagtacctctggtcatttgtgttggagaaccacagacgggagcaagaggtcccccctgtgatcatcacggagacacccttgagggagcctgcggaccgaaagaagatgctggagatcctgtttgagttgctgcatgtcccatcggtcctcctggccgaccagctgcagatgtccctgtatgcctctggcctcctgaccggagtggtggttgattctggctatggcctgacccgcgtgcagcctttccaccagggccgccccttgcccgccagcggcaagacgctggagttcgccggccaggatctctccgcctatctcctcaagagtctctttaaggaagattgcgatagacgctgcctgtttcagctggagacagtcgccgtgactcagatgaacaagtgctacgtgccgcagaatctgggggaggccctggactttcgtgagaggcagcagagtgccttggatgagagcaacacctatcagctcccagacggctcccgcgtggagctgacccccatgcagcgggtggctcctgagatgttctttagcccgcaggtgttcgagcagccggggcccagcatcccacgggccattgtggaatccgtggagtcctgcgagatctccctgcgccccctgctggtctcccacgtgatggcctgcgggggcaacaccctctatcccgggttcacaaagcgcctgttcagggagctgatgggggatcacgtctcctccaccaaggccacagtctgggagggttccaatagaaactttagtgtctggctaggancgtccgtgtgctcaccttctacctaccagtctgagtgatgtcccgagaggagtatggtgagcatatgaggatgtgaccctactggctcactcctgagaatgggctcctgttagatgggcacgggcggattaattttagcaaaatgttctgggtgggggtagaatgaggtggggtggggtgagctggctttggaattctaggggnatgagggtattttttaggttctaaggttttatcttgttgcaagagtgggacctacccaagggggaagacaagatgtcatccttggaaaccctgcaggggacagtttttccagggtggcctatcattggggtatgagtggctgactgccatctccatgcctgagagccactgatttttcattggcatttcccctggtttgtctcattcttcttggttgagtaggttttaactggggtagcactcctgctaggagtcccaattatttttgactaggggatgggggacagttgacatttctggtcctacaggccctttctggccagggaggcattgctgcaggtgagcctgggatgcccttgccacccgtggttggatcttgttttatatctgcaaataaatagcttgtttggaagcaa

SEQ ID NO: 82529 - DNA, 294 bp, Homo sapiens
cttagggaaggagattccacaatttatttgatgacctgtttcagtttttagcaactaggaaattcccccttcttctaacctcgattcaccgtgccacagatttggtttggacgcagacggttctgtttataggcctgccactcggctttgtctgctctcaggaatgacctccaccaggccagatcggaggtggaagccaggactcggtagctccgggaggcatgtgtcccctttctgctgggaattttctctttcttgggtaccctgtcactgagttattgtccctcccatctt

SEQ ID NO: 82530 - DNA, 436 bp, Homo sapiens
tccttactggattgagccttggttacttgccacccagaggggtgattgagttgcagtattctgttgcacctttgatgtcaacttatttttggcttaaattttttaaataacataaggttaaagaaaggatcacatctctatcttttcctcattgacctccctagttctagacaaattctatacttttttcctttctttttctctgtggtcgattatgtcattattccctccccctcaaaacctaccttctcccttggtctccgggaatactgcactctagtgattttcctcctactacggaaatgatttcattacctctctggctggtatttctttgtctttaggtcctttatgaaaacacaacctgttgccctattttctctccacttgcccttttaagatgtcctgtactcttttataattattctggtgcgtc

SEQ ID NO: 82531 - DNA, 489 bp, Homo sapiens
actgaaaaaataaattccaagaggcttagttaggtatggcagggcaaagatattttataaatattttggcaagtagagacaagagaaaatgatgcgtgaggtattttcaatagaagccaattgagcttcctcatttgcatgaagcatctgagctgttttcctaagttccagttcctcctcctcaggtgggcagccttacagcctctgcatttgactctgtcaagatgagactgtagtaaagtgagctctttgtatcattgatgaaagaaagaaaggatttaaattaaccattgggactgagttaaaataaaataaagctataaaaagatcatggctgcttgaccatgagaaaaacctagaaaatagtcatttgcatgagtcatttgttccccgagaacagcattctgttgaatggtgtccatgaggaaaatgctcaaatagataccattggttttttaaaaaattatttcatcagtaacaatgcaattt

SEQ ID NO: 82532 - DNA, 394 bp, Homo sapiens
gcaacattacctgtgacctgactcttgaaacatagctgctattaaagtacaagtgagtcatgcatagcagcttctccttgcccagttaatttctctgtaaaatctttactctcttttattcatgtatatatatgtatgtgtgtgtgtgtaaatatatacatatatatgtttgtatttccctttaaggatttcaaacacaaagaccctagtcatttgattgtctctgtactgtcgaattttgcctacaaccctgactgtagagacacattgttacctgttttccatattctgtctagtaaatgcttggttgtcaggacaacggcatagaaggtggaagctcattgataaccacgtgaattctttaaacaaatatgatcagagcaaattccagggt

SEQ ID NO: 82533 - DNA, 274 bp, Homo sapiens
cacaagaaaattacaaagtaataaagtaggctagggaagtatacataaccttaataattttactgtgggactatattaagggagtatacttaacctcataattttactaagaggatcataatctaaaccacatgtatttgatgaaagacctgacctctttgttgttcagagttggtagcatttgcatttggcctcatagatggatgagaccttgataagtaaagatgaaggaaaattattatagatgtttagcaaaacacacatgaaggtatag

SEQ ID NO: 82534 - DNA, 550 bp, Homo sapiens
tttttttgagacagcgtctcactctctcacccagaatggaatgcagtggcactatcttggctcaaaacaacctcttccacctgggttcaagcgattatcctgtctcagcctcccgagtagctgggataacaggcatgcctggctaatttttgtatcgttagtataaatgacgtttcgctatattggtctggttggtctcgaacaactgacctcaagtgatccacccatctcagcctcccaaagtaatgggattacaggcatgagctaccacacccggccttcgtttttcttttgacacagggttttgctctgtcacccaggctggagtgcagtggtgcagtcatagctcactgcagcctcaaagtcctgagttcaagcagtcctcttgcctcagcctcccaacgtgctaggatctcaggcgtgagccactgcacctagcccgaaaccaagctttctcatcccaagcgccaacctttatcaagtctagcctagtcctctattgtctcctaagtgtccctcatgagtgatcacttctgagtcctcctgcgtg

SEQ ID NO: 82535 - DNA, 373 bp, Homo sapiens
caggaaatggcaagaactcagaagtcctggtaagatgtgtgcatcaggggttggagataagccctacaaagactcagaggcctgccacatcagaaaagtttttaaaggtccagtggtatggggcatactgtggtatttcttccaagataaagaagaaatcgttaaaccttgaacatcccatctttaaggtagtggcttcatatttggtaccttaagacctggcagattccaggatgctagcaatatctgagatagatgacaatgttttgaggagtcttggtgagattaagcaggggagttacagaacaaaaccctaggattttagagcaagactgaactatttacagaaaaaaaaaaaaaaaaaaaaaaaaaa

SEQ ID NO: 82536 - DNA, 2690 bp, Homo sapiens
aaatggacaaggcatgtaaagtcactttcttttatttttatcttttttttccccccgttagaacctctggcagggactgactagcccatgaaacttatttcttcttcccgggcacacagctaaactaaatttcacagctttccttgtagttggttatagtcatgtgatgaacttctttttttgagacagagtttagctcttgttgctcaggctggaatgcaatggcacaatctcagctcaccgcaacctccgcctcccgtgttcaagcgattctcctgcctcagcctcccaagtagctgggattacaggcatgtgccatcacacccggctaattttgtatttttagtagagacacggtttctccatgttggtcaggctggtctcgaactcccgacctcaggtgattcccccacctcggctttcaaagtgctgggattacgggcgtgagccaccgagcctggccgtgattaacttctagccaattaaatatgaatggaaatgatgtgctcatttttagggttaatgaagtcctcctattctcccttactctttcttcgtcaacttgatgcctttgagcatggtgaccttcaaaactatgtattggagatgccaaagccagaaaagagaagaatgagtggctgaaacagtacttggaagacagccaccccaattagaaacacccctttttgcacttactgtaagagaaaaaattgagatttgagaatttatatgtataggagctagaatgaccatagctagtccagaaattggtacaagaagtggagtactgctaaaacaataacctaaaatatgttacatcagcttatttatgatgcagcaggtggtagagaatgtgatttggaggctagaaaaaggaggcccatgtttgcagtggcaaagtaattagtaaaactgtcacctgaaataattcaaaatcagatcacctatctgtttagattagctccagaggaaatgattgaaaagagcaaaagtaatactgtgttgaattttacattttacttttagtaaggttttactaaagagagaaactcaggaaatacttcacagaagtgagagtgtacaggaatatttctcaggaagggttggaaaagttgacttttataagacttctaataaaaaaaaaaaaaaaactagaagaggtcttgagtatagttacccttgagattaagtcctgcaacaaagatcaggaaaagggtttggtctttccattcaaagtcattattttagatggcttcaagatagctacgataaaggtctaaaggaactggcataggagcaaggcagcaaagcagtaaattaggcttgataattatgtaagaaagaactttgggtgtagttaccagaagcaaatcaatcagaagactacatttttagaggaattttattaatcatactaaatctggctcaaatatcattgttcgggtgttaaaacagagggtaactgtccaaccccaagcttgcataagtagaaaaatagagcataaaaccttaacagctccccagtacccacacaggatgtggccatggagaatgatggacaaaaaaagaacatttcagaagctcgtataaggagctgtactaaagactggacagggagtttctcctgaagactagaattggagtttcatcagaactttcttcagtttcaaggagatgggccgcaaaatgtttatgcagtatttcatcattattatacatgaatagtattgctcagtatcacattttttttctgaatgagagaatgtattatagttatctgtccctgagttaccactatatattgggtttgcagggatgggggtgacaataaagataatttgtctttttagttcttaggtcacatctgtacctaatgaagagaactgcacattttctgaaaatcctagactttgagcctgttccagtaactggttaaaactttagattgtctcctttgggacagggtatgttctgtgtgtggaaagacaggtaaaatacatgtttagtgatcagaatagtagattcttgcaaatgctaaattcttctggccacacagctatatttccatgcctctcttgcaattaggtatatgggttaggtgtgctgattaggttctaaccagtggaatgtgagaagtgatgcactcctattccagctctggcctatggaaacatcacatgagcaatccaatatatcccactccccatcaacttgaggcagatgagcaaatttgcactggaaactatgtgttaaagatggcaaagccgcaagataggactcctggtttcctgaatcttcacttggaggatacttgcttcccaattagagacacttgtgctagagtttcctgactcttcactgggaggatacttgcttgccaattagggacacttgtgctacagctcatacgcattcttttgtgttaggccactgagatttcagagcgtgccctaataaagacctgtccctctttctccagatgcaatcgttcattacctaattctaatttttataccacaggagtaggcccacaaatcaggctagccaaagtatcctatcattcagccatagtgattagttcaggaatgggcagattaacaaaactgaagttaatcagagatagtcttatcatttgggctagcactatcaagaaaaagacacctgcttctggaataagcaaaaaaaaaaaa

SEQ ID NO: 82537 - DNA, 3307 bp, Homo sapiens
ctttggaagtcctatgagggaccatttacggtttcctcagtaatttccaccaggatgaatttccttctcatcactctgcctcaggtagtgctctgaaggtcgtcctttctgaacaaacgcagcaaagcaagccacaccatgggtgagatcaaccaagttgccgtggagaaatacctggaggagaaccctcagtttgccaaggagtactttgacaggaagttgcgggtggaggtgctgggagaaatcttcaagaacagccaggtgccagtccagtccagcatgtccttctctgagctgacccaggtggaggagtcagccctgtgcttggagctgctgtggaccgtgcaggaggaggggggcaccccagagcagggggttcacagggccctgcagaggctggcccacctgctccaggctgaccgctgcagcatgttcctgtgccggtcccggaacggcatacctgaggtggcctctaggttgctggatgtcacccccacctccaagtttgaggacaacctggtgggccctgacaaagaagttgtgtttccattggacattgggatagtgggttgggctgctcacacgaagaaaactcataatgtcccagatgtgaaaaagaacagccatttttctgacttcatggacaagcaaactgggtatgtcactaagaacctgctggcaaccccgatcgtggtgggcaaggaggttcttgctgtgatcatggcagttaacaaagtaaatgcatctgaattttccaaacaggatgaagaggtcttttccaaatacctcaactttgtgtctatcatcctaaggcttcatcacaccagctacatgtacaatattgaatcccgaagaagccagatccttatgtggtcagccaataaagtatttgaagaactcacagatgttgagcgacagtttcacaaagcgctctacacggttagatcatatctgaactgtgaacgatactccattggactgctggacatgaccaaggagaaggaattctacgatgaatggccaatcaagcttggagaagtagagccttataaaggtccaaagacacctgatggcagggaagtcaacttttataaaatcattgattacattttacatggaaaagaagagatcaaagtgattccgacgcctcctgcagaccactggacactcattagtgggttgccaacatatgttgctgaaaatggatttatctgtaacatgatgaatgcccctgcggatgaatacttcacatttcagaaaggacctgtagacgaaactggttgggtcattaagaatgttttgtccctgcctattgtcaacaagaaagaagatattgtgggagtggctacattttacaacaggaaggatggaaaacctttcgatgagcatgatgaatacattaccgagactctcacacaatttcttggatggtctcttttaaatactgacacctacgataagatgaataagctagaaaacagaaaggacattgctcaggaaatgctcatgaaccaaaccaaagccactcctgaagaaattaagtccattttgaaatttcaagagaagttaaatgttgatgtaattgacgactgtgaagaaaaacaacttgttgcaattttgaaagaggacttgccagacccacgctcagcagaactgtacgaattccgcttcagtgacttcccccttacagagcacggattgattaaatgtggaatacgactgttttttgaaataaatgtggtggagaaattcaaagtacctgtagaggttcttaccagatggatgtacactgtgaggaaagggtaccgagctgtcacttaccacaattggcggcatgggttcaacgtggggcagaccatgtttactttgctgatgacaggaagattaaagaagtactacacagatctcgaagcctttgccatgcttgctgctgctttctgccatgatattgaccacagaggcaccaataatttgtaccagatgaaatccacgtctccattagcaagacttcatggttcttctattttggagaggcaccacctggagtacagtaagactctgttgcaggatgagagtttaaacatcttccagaacctaaataagcggcagtttgaaacagttattcatttgttcgaggtcgcaataatagcaactgacctggctttatatttcaagaagaggaccatgtttcaaaaaattgttgatgcctgtgaacaaatgcaaacggaagaagaagccatcaaatatgtaactgttgatccaaccaagaaagagattatcatggcaatgatgatgacggcatgtgacttgtctgctattaccaagccctgggaggtgcaaagtcaggtagcacttatggttgcaaatgaattttgggaacaaggagatctggagagaacagtgttgcagcaacaacccattcctatgatggacagaaacaaaagagatgaattacctaaacttcaagttggatttattgattttgtttgtacttttgtatataaggagttctcacggtttcacaaagaaatcacacctatgctgagtggtcttcagaataacagagtagaatggaaatcactagctgatgagtatgatgcaaagatgaaggtcattgaagaggaggcaaaaaagcaagaaggaggagccgaaaaagctgctgaagattcaggaggtggtgatgacaaaaagtccaaaacatgtttaatgttgtaatattatctaactggtctaaacttcaaatatcattttacctttgaagaaaaccagaaaacattcaaaagaacttcaacaaatcatcacgtaacaggatcttcagaaaaactaccctgtgactatgaagaaaatatatattgctagcccaaaaatcccaggggcaaaataaagttcaacaaaagtgcaaaatatgacaaaaataggtacatttttggtgccaatttattttaaattaaaaaatatgcaatcctgaaactagtcacaaattcttttttaaaacattaattgtatttatttgctaaggctgctataacaaagtaccacagactgggtgcttaaccaatagaaatgtattttctcaaagtcctgggggctggaagttcaagatcaaggagttggcagggttggtttcttgggaggcctctcaacttggtttgcagatggccatcttctccctgtgtcttcacatggtcttccctctgtgtgtctgtgtcctaatctccttttcttataaggactccagtaggactggattagggcctacccatgtgacctcattttagtcttaattacctcgttaatggccttatct

SEQ ID NO: 82538 - DNA, 1318 bp, Homo sapiens
ttaccatgttacacatattacacggtgacatgggcgcgtcgcggcccgctctgaaatttcaagagaagttaaatgttgatgtaattgacgactgtgaagaaaaacaacttgttgcaattttgaaagaggacttgccagacccacgctcagcagaactgtacgaattccgcttcagtgacttcccccttacagagcacggattgattaaatgtggaatacgactgttttttgaaataaatgtggtggagaaattcaaagtacctgtagaggttcttaccagatggatgtacactgtgaggaaagggtaccgagctgtcacttaccacaattggcggcatgggttcaacgtggggcagaccatgtttactttgctgatgacaggaagattaaagaagtactacacagatctcgaagcctttgccatgcttgctgctgctttctgccatgatattgaccacagaggcaccaataatttgtaccagatgaaatccacgtctccattagcaagacttcatggttcttctattttggagaggcaccacctggagtacagtaagactctgttgcaggatgagagtttaaacatcttccagaacctaaataagcggcagtttgaaacagttattcatttgttcgaggtcgcaataatagcaactgacctggctttatatttcaagaagaggaccatgtttcaaaaaattgttgatgcctgtgaacaaatgcaaacggaagaagaagccatcaaatatgtaactgttgatccaaccaagaaagagattatcatggcaatgatgatgacggcatgtgacttgtctgctattaccaagccctgggaggtgcaaagtcaggtagcacttatggttgcaaatgaattttgggaacaaggagatctggagagaacagtgttgcagcaacaacccattcctatgatggacagaaacaaaagagatgaattacctaaacttcaagttggatttattgattttgtttgtacttttgtatataagctgctgaagattcaggaggtggtgatgacaaaaagtccaaaacatgtttaatgttgtaatattatctaactggtctaaacttcaaatatcattttacctttgaagaaaaccagaaaacattcaaaagaacttcaacaaatcatcacgtaacaggatcttcagaaaaactaccctgtgactatgaagaaaatatatattgctagcccaaaaatcccaggggcaaaataaagttcaacaaaagtgcaaaatatgacaaaaataggtacatttttggtgccaatttattttaaattaaaaaatatgcaatcctg

SEQ ID NO: 82539 - DNA, 2816 bp, Homo sapiens
ctttggaagtcctatgagggaccatttacggtttcctcagtaatttccaccaggatgaatttccttctcatcactctgcctcaggtagtgctctgaaggtcgtcctttctgaacaaacgcagcaaagcaagccacaccatgggtgagatcaaccaagttgccgtggagaaatacctggaggagaaccctcagtttgccaaggagtactttgacaggaagttgcgggtggaggtgctgggagaaatcttcaagaacagccaggtgccagtccagtccagcatgtccttctctgagctgacccaggtggaggagtcagccctgtgcttggagctgctgtggaccgtgcaggaggaggggggcaccccagagcagggggttcacagggccctgcagaggctggcccacctgctccaggctgaccgctgcagcatgttcctgtgccggtcccggaacggcatacctgaggtggcctctaggttgctggatgtcacccccacctccaagtttgaggacaacctggtgggccctgacaaagaagttgtgtttccattggacattgggatagtgggttgggctgctcacacgaagaaaactcataatgtcccagatgtgaaaaagaacagccatttttctgacttcatggacaagcaaactgggtatgtcactaagaacctgctggcaaccccgatcgtggtgggcaaggaggttcttgctgtgatcatggcagttaacaaagtaaatgcatctgaattttccaaacaggatgaagaggtcttttccaaatacctcaactttgtgtctatcatcctaaggcttcatcacaccagctacatgtacaatattgaatcccgaagaagccagatccttatgtggtcagccaataaagtatttgaagaactcacagatgttgagcgacagtttcacaaagcgctctacacggttagatcatatctgaactgtgaacgatactccattggactgctggacatgaccaaggagaaggaattctacgatgaatggccaatcaagcttggagaagtagagccttataaaggtccaaagacacctgatggcagggaagtcaacttttataaaatcattgattacattttacatggaaaagaagagatcaaagtgattccgacgcctcctgcagaccactggacactcattagtgggttgccaacatatgttgctgaaaatggatttatctgtaacatgatgaatgcccctgcggatgaatacttcacatttcagaaaggacctgtagacgaaactggttgggtcattaagaatgttttgtccctgcctattgtcaacaagaaagaagatattgtgggagtggctacattttacaacaggaaggatggaaaacctttcgatgagcatgatgaatacattaccgagactctcacacaatttcttggatggtctcttttaaatactgacacctacgataagatgaataagctagaaaacagaaaggacattgctcaggaaatgctcatgaaccaaaccaaagccactcctgaagaaattaagtccattttgaaatttcaagagaagttaaatgttgatgtaattgacgactgtgaagaaaaacaacttgttgcaattttgaaagaggacttgccagacccacgctcagcagaactgtacgaattccgcttcagtgacttcccccttacagagcacggattgattaaatgtggaatacgactgttttttgaaataaatgtggtggagaaattcaaagtacctgtagaggttcttaccagatggatgtacactgtgaggaaagggtaccgagctgtcacttaccacaattggcggcatgggttcaacgtggggcagaccatgtttactttgctgatgacaggaagattaaagaagtactacacagatctcgaagcctttgccatgcttgctgctgctttctgccatgatattgaccacagaggcaccaataatttgtaccagatgaaatccacgtctccattagcaagacttcatggttcttctattttggagaggcaccacctggagtacagtaagactctgttgcaggatgagagtttaaacatcttccagaacctaaataagcggcagtttgaaacagttattcatttgttcgaggtcgcaataatagcaactgacctggctttatatttcaagaagaggaccatgtttcaaaaaattgttgatgcctgtgaacaaatgcaaacggaagaagaagccatcaaatatgtaactgttgatccaaccaagaaagagattatcatggcaatgatgatgacggcatgtgacttgtctgctattaccaagccctgggaggtgcaaagtcaggtagcacttatggttgcaaatgaattttgggaacaaggagatctggagagaacagtgttgcagcaacaacccattcctatgatggacagaaacaaaagagatgaattacctaaacttcaagttggatttattgattttgtttgtacttttgtatataagctgctgaagattcaggaggtggtgatgacaaaaagtccaaaacatgtttaatgttgtaatattatctaactggtctaaacttcaaatatcattttacctttgaagaaaaccagaaaacattcaaaagaacttcaacaaatcatcacgtaacaggatcttcagaaaaactaccctgtgactatgaagaaaatatatattgctagcccaaaaatcccaggggcaaaataaagttcaacaaaagtgcaaaatatgacaaaaataggtacatttttggtgccaatttattttaaattaaaaaatatgcaatcctg

SEQ ID NO: 82540 - DNA, 966 bp, Homo sapiens
cacagagcaacaagggaaagagtagtagaactgcagctttaggctgttctccaggactggtgggcaactgtggcaaggtcagcttcccccaatatttttctactttggataggaggactacctctcagcatttcctgtaatggcattgcacacctgtatacccagtctttggcaatacacattacagatactggccaaaaaagaattagaaaatcagtgtcaaagttggattgtggtccctgaagacttagattaatggaattctgctggaaacataaaggttgtttccctgctgttcacatctgttgcatcctgggaaaaaaacaaaaaggaagatgttatgtgaagagctgatgtttgcatcgccgactctccctgatttgtgctgatgatagctgaagctgcagtcttggcatcttctactgcacattgtcatcagcaaggtaagaagtgccttttgcctcctgccatgattctgaggcctccctccccagccatgtggaaccgctggagtgcagtggaagatctcagctcactgcaaactcctcctctcaggttcaagcaaattcttgtgcctcagccaccctaaaatagctgaaattacagctttggtatcagaatgatgctggcctcataaaatgagttagggaggattccctcttttgctattgattggaatggactcagctctgcaccaagcggacctaattagacatctacagaattctccaccccaaatcagcagaatatacatttttttcaggaacataacaacaacgctaattgccaaaaattggaccaacattactcgggacagggtaaaggatctccgtcaggaaatggttacaaggaagcagagatgttaaccaaagcgactcccagaacagcaggggccatacagaccgagaactcaggacaaagcacagccaactcaaaggcgcaccacacacactgggcacgcgcaat

SEQ ID NO: 82541 - DNA, 451 bp, Homo sapiens
caatatttaattttaatttttcccttataaattcacttcctatgctttatctcttttatgtttgtatgtccattcttctcttgttgactttataaaagctcttaatatgtaaaagttattgatgctttacgacctatgttctaaatatttcgctagttttatcatttattatgcagctttgtttatgcaaacatttttagcattttaatttgattattattatagagacaattctgtttattttcccttttcttggaaggaaatgcttacactttatgagtctttaaaatattactttaagtttatgatagattaaatatttgacagaaacaggccaggcacggttgcccacacctgtagtcccagcactttgagaggctgaggcaggaggatcccttgaggccacaagttcaagatcagtctggataacatgatgaaacactgtctctac

SEQ ID NO: 82542 - DNA, 225 bp, Homo sapiens
caagagattatgattttcccaaaatcagatgaaatttgtgttctttacctgctcttggatgctttacatgacacaaagttatgaaattataagtgttactatccagtcttctcattattattatctgagaatagatagtttcctttgcagaactaggtagctctcaagagaggcccagtcagcatattaaacagctggctccctgtagcagagaagctacccatg

SEQ ID NO: 82543 - DNA, 511 bp, Homo sapiens
ctagggcagggagtgggttaccttccaccgtggattaactcagttcaactgataactactcctccaggcccccagcctgggacagccctggggacacagtcacccagtagcagcactgtgcccagcacaggtaagcactcaataatgacgacggttactaagtactccacccccaccaaacagtaggcagagactgtctctcctgttggccatcataaccccagtactcagtaggcgctgaatgtttggtgaatgagtaagtgaagggaaagctgaggcaccaaccctcagggagccctcagtctggtggatgtaaccaacaaccacagaactacagaactgtatactttagatacatgaattgtgtggtatgtgaattatatctcaaagccatttgaaaaaataccaaatgtgccattaagatttggatgggaagttatgggtaatgagaatataatgacatcttgcaacattatattgagaaaaatacaaattgaaatgttttatctta

SEQ ID NO: 82544 - DNA, 453 bp, Homo sapiens
aaaccacaaacacgctctcacccacgttttacgactttataactcaccaaataaacctgattcctataaccataaaacaaagccgaaatgagttggacatgtaccagcgaggagaagcaggaggcgggtggagattgccagagggggctctcagctgtggagtcgcggctctccgtgtggatttcggcatctcagtcttgcagaaacttaatattccaatcagcacccaagcaaggcgttggaagccaaggagtgcatgagtgccccatagctgggggaatattactcaccaggtcatggtcggctgcgtaaaatacaaccctcatatatcattataactgccagccaacgacagttataattgagacggcaataactaggagagagttctttaatttaacatccaattattacaagttatcacttcttaataaatgtaatataacagacaat

SEQ ID NO: 82545 - DNA, 249 bp, Homo sapiens
ccgtataccccataaatacatatacctactatgtgcccacaaaaattaaaatcaaaaattaaaaaaaaaaacatgaaagagatcattgtggtgatgcatcagttctatatcttgcttgtaatgatggttacacaaatctacacatgacaaaatttcatagacctacatgcatacatacatacatacacacacacacgatcgtatgtaaaattggtaaaatctgagtaaggtctatggattgcaccaatg

SEQ ID NO: 82546 - DNA, 664 bp, Homo sapiens
tggtaaaaataacaatgagagcaaaggccaaaatgtatggagtatttattatgtgtcagacatttttcactaagcattctagtacaatatttcttcagatctatgaagatcttaatcttaagtagtaaatggttttattataaccactatacaaaatagaaacactaacataaaaaggttaaataatctgtttaaattatcttggattatcaacccaatcagctgtgtcctcagaacagaagctggtagcactacactgaactataccacacttgcaagccttcagaggaaaattccctaagagaaaatggtatctatgactcaatatttcttcccataccctcagtgacttacggtatttatttactaaatgccaaagcagatagtccaataggaaatacgtagctaaatggcctgcgaagagaagggaatgtcaaataacaggcaaaatagaatctgacaccctaggtctcagcaagtgttttgaatggacaataaagaaagtgactagaatgtaacctctgaaaaaatgttgtgaagcaccaatggccttgaaaaaatctagggagctgatgtaaaggacatccacttcataatgacaattattgaacaaattacttgttggagatggagttgcagacaaaacaaatatttaccactgctt

SEQ ID NO: 82547 - DNA, 553 bp, Homo sapiens
gcatcagcctcctgagtggctgggattacagcaatgcatgagagctcctgtcgctccacatcctcagcagcacgtggtgttcggtgttctggattttagacattctaatagtcagctcatgaggcacccactcatggagctttttcatccttccaatttgcttcaaatgccaaacgactgtagaatggttgacgctgagttcttcagcaacttctcatgtagctttaaaaggatcagcttcgatgactgctctcaattggttgttatcaacttctgaaggccggccactaagctcctcatcctcaaggttctcatctcctttgcaaaacttcttgaaccatcactgcacggccaatatggtgagataatggctcatggcagacaacaaacatctatgcctcgactaactgttcccgaaactactgtccattaattaatcctaaagccaaaagagggtaataatcagaaaagtattttatacctaagagctcaaaagatcagctagatgggaagaatcactgaagcactaaacagtatcatacagatttgaaag

SEQ ID NO: 82548 - DNA, 452 bp, Homo sapiens
taaggcacagaagacctttaatgacaacaattttatcatgggtgtttaaaatatactgagcagttactacatatcaggcgcctgctgaagtgatgtccttttgcagatgagaaaactgaccatcagagtggtcaaggaagtagcccaaagccacccaactagtcagcagagaccagaattccatggccagaggtctggctcctaagatcccgctctcgccccgctctatcctgttcctgctgcccctggtccctccctctattccccatcaccctatcaccttgacgacattctgggtcaggagcccaggcccccacttaagcagcggggccaggcaggtccctgtgaaggggtcagggccagagcaggtgagaagggctcctcctgtgtccaccctctcttctttttaggactctgtgcatgctgttctcttcactccctgtgcacctgac

SEQ ID NO: 82549 - DNA, 259 bp, Homo sapiens
cacaaacatacatcagcatacattcatactgtttaaaaagagaagagttttacatagaaaaggaatggaaagacagtcaacagcaatagtcaagatatctagaaataattttagaggaaaaaagtatctactactgtctttaaatacattaaaatagaacaattttacgtatttacttttctcttttaaaaaattactttaaaaatctttttagaaattaaatcactaaaaataaatttttaaagaactttaagattat

SEQ ID NO: 82550 - DNA, 316 bp, Homo sapiens
ttgcagaactaaaactgggacctaaatagcattgtttccaggagaagaaaactggttggcaatttgtcaaaatagtagaagcgaggtctcagccccgttttttttttttatggccttatgaattttaagtaacctcaggaaggcattggaagttttccttgagatagaaatctctccctctgtccttttcaaagcctccatggacaaaatactatcaaaatgatcgttattctgccagtcatgttaacaaggaagtgtgcattttaataatttttcattccttttccccagagagatagacacagggaatgccagc

SEQ ID NO: 82551 - DNA, 280 bp, Homo sapiens
gataaatgtcctcaattcccagaggacattgaggcccaaggtgatctagttggtactggcacacaggaagcccctctccacctttttggactctttgtctggtgctctcttactagttcctgccctagtccaatagcacatcctcctctgtgcttgtgcggcattcacagaggagcagatacagttgcccctggcccagggcatagagcccagggtgggaagaagcccctcgcagggacacgaggacaggtgcaaaggctgttggaggaacagtgaagag

SEQ ID NO: 82552 - DNA, 5064 bp, Homo sapiens
gctgcagtagaagctgtaaatgtcttccatcatcttttttatgagggtcaagtggatatctacaacatcaatgacccactaaaggagacagccacaattgggttcattaataacttcggtcagatccctaaacagttatttaaaaaacctcatccaccaaagcgagtgagaagtcgactcaatggagacaatgcaggaatctctgtcctaccaggatctacaagtgacaagatcttttttcatcatctagacaacttgaggccttctctaacacctgtaaaagaactcaaagaacctgtaggacaaatcgtatgtacagataaaggtattcttgcggtggaacagaataaggccatgactgtttatgaatgcttgtctgagtggggccagattctctgtgcaatctgccccaaccccaagctggtcatcacgggtggaacaagcacggttgtgtgtgtgtgggagatgggcacctccaaagaaaaggccaagaccgtcaccctcaaacaggccttactgggccacactgataccgtcacctgcgccacagcatcattagcctatcacataattgtcagtgggtcccgtgatcgaacctgtatcatttgggatttgaacaaactgtcatttctaacccagcttcgagggcatcgagctccagtttctgctctttgtatcaatgaattaacaggggacattgtgtcctgcgctggcacatatatccatgtgtggagcatcaatgggaaccctatcgtgagtgtcaacacgttcacaggtaggagccagcagatcatctgctgctgcatgtcggagatgaacgaatgggacacgcagaacgtcatagtgacaggacactcagatggagtggttcggttttggagaatggaatttttgcaagttcctgaaacaccagctcctgagcctgctgaagtcctagaaatgcaggaagactgtccagaagcacaaatagggcaggaagcccaagacgaggacagcagtgattcagaagcagatgagcagagcatcagccaggaccctaaggacactccaagccaacccagcagcaccagccacaggccccgggcagcctcctgccgcgcaacagccgcctggtgtactgacagtggctctgacgactccagacgctggtccgaccagctcagtctagatgagaaagacggcttcatatttgtgaactattcagagggccagaccagagcccatctgcagggcccccttagccacccccaccccaatcccattgaggtgcggaattacagcagattgaaacctgggtaccgatgggaacggcagctggtgttcaggagtaagctgactatgcacacagcctttgatcgaaaggacaatgcacacccagctgaggtcactgccttgggcatctccaaggatcacagtaggatcctcgttggtgacagtcgaggccgagttttcagctggtctgtgagtgaccagccaggccgttctgctgctgatcactgggtgaaggatgaaggtggtgacagctgctcaggctgctcggtgaggttttcactcacagaaagacgacaccattgcaggaactgtggtcagctcttctgccagaagtgcagtcgctttcaatctgaaatcaaacgcttgaaaatctcatccccggtgcgtgtttgtcagaactgttattataacttacagcatgagagaggttcagaagatgggcctcgaaattgttgaagattcaacaagctgagtggagaccatggtctgtagaccccttcccgattctcctgtcccagcttggaaggcattgaaaacagtctccgtttacacatctcttcataccacgtgtttgaagtgttaaaattcaaagggatcattgaataaaacgggtgtagagtacaggaatggggcagacgcgattcaggtgaacagcacaagaagaatatgaggtggttcctaggagcaacactttcgacctccagttctccctgatgacagtagctgtctccaagagaaaaatcctcacttattaactctcttttcttgcatctcatttttatagagctactcatccttatttggaaaaaccaacaacaaaaaaggcttttagaaaatggttgtaaatctgacttctttgcaagtaactatgtatattgtaaatagatataaaaggccttttttctaaataaggacttaactgcctgtaacatgaaacttcaaactaaaccactaactcaatgaactacttatggtttgtctgacatccctcacttaccaattaattataaatatgtttttttaaatccccaaagacattatctgtggtctttttttcctttcaagctcagcctgtgtgcctgatgtcatttctttcaagttgcccacagtatctccacttaaactaggctagtaaccaaaataatgtggaccttctttaggaaacagtgtgggagaataggagtccagccgtaagataaactggaaatatttgggcgtcttgtacctggctacgcaccacctcagtgttgttcctacataaacagggccccttttaaacttgtatgtggactgctgtttggtcaaagaataccttcttagcattgcagaaaggtggtcagatgaccagtgtagtgcaggaaacagccctgtctcaactaatggaaatatatttgcatgtaacccaaaattagcttatcttgcatagaacataataagtatgtgtctttggtgacactaatgttctactatagcttattttcaaacaaggggtaaaaaaaggaaagaaagaagtgtacagaattaacatataaactttgttgtaaaactgaatcatgtcagaactgcttaaaattaacctttaccatttaatgtcatctacctgaaaacagtgagatttatactgtatcaatgtctatttttttgtttttgctatgaatataattacagtattttaatatttagttatttaatttgttctactagttggatacagaacacacaaatccagggggattaaagctggaaggggctaagagattagtttacagagaaaaggcttggtggtgggatttttttaaatgtgtgttatgtacatatatatatatatataatatatattaaaaatgaaacaattaatctagattttaacattttcagaaacttagtgataacattatgaacaattctaaaagccctgtgatttgaaaaatatagaatcattaatggcccaagataggccttcacaccttcacaggtgcgaaaggaaaggccttcacaccctcacagaggcatcatgcaaaggacagcggctttggcttttccaattttccatctttaggccctggtgagaggcacacttatgcactaaaatgcacatatatgcacatgcattcaaaaataggcatttggtacaatggtgatcttgtacctgatgggctgaaaccagcttaagaacaaatttgttcttcctgatatgataactaggtctccaagagaaaatagaaaggctgctttagtgccttacgcttactaaatttaaatctttatttacctgggtttgagcctacagtctatttatgattacatatcaaaattgattaaaacacttccatttctaaaagttcaaatatacttgttaataaaaggattatcggcattaatactttaatttaaagaaaagttgtgttctgttttcctttctgtgtcttactccccccacactctccctcccccatcaccatcttcaattctaataaataatgctgatgttcaacagttgcagaaattgtgctattatgtaactgtgggccttgcccctgtctggccctctagatgatttgtagcagtgttattctacactttttaaaagaagcgtcctccttttgtccatgaatcatgtttaccccatacccagtggcagaggtgttctttaaagacttgaatatatgaatgtgtgtgtgtagttacttaaaggttattcctctttgtaataggaaactatatgggatgaacacttttaaactttccgacacaacttccattactaactttctaacagaacttccataactagaaggtggaaaccaaaaccctcatggtagtatttcctctggcagctggtgctgtgggcaactgttttgttcaatcgggtttcttttctttttgcctctaatgcagaaatcaacagaatcactcacacatacaagtacactcacatacataaactaattatttctctggatatctttctgtgttccatgtaaatttatttaccaacatctattgtcaacatgtacatctaccttagtatggtctgcattctttttctgagagtacctcatagggctcctgcctgatctttgtagtttgttcattcatccatccacctgttcatttgttcatccatgtattctaacatttctatgtagtgtgcaactctaatgtcatgcttttgaagaagagaatagctgcccatagcagccatccgtctggataatagcaaaacactctagataagttattttgcactttcttatgtataaagttggtagaaacttatttttgctttgtatcatttaaatacattttgttttggtaaatgaactgtgtataaaatatttatgccgttaaaactgtttttagaaagtatttttaatttcagcaagtttggttacttgttgcatgactcttaacacagctgactttttgtgtcagtgcaatgtatattttttgtcctgttattaacttgtaagccctagtaatggccaattatttgtacagcaacagaagtaaattgaagatactggctaagactggattgattgtggacttttatactatattgcagaaaccaatatctgtttcttggtggttatgtaaaagacctgaagaattactatctagtgtgcagtctgtgatatctgaatgttcattgtatatttgtctctgatgcaaaaaggtagagtaacacaattacaatacatgattaaatgcaatagtccaggtacttaagtaatttttttttcatttcaaataaatacctatttaccaccaaaagaaagaaaaagaaaa

SEQ ID NO: 82553 - DNA, 4773 bp, Homo sapiens
acttttgcttggggctatgcagacctcagttgcagactgggaacctatgagtcagacaaggccatgactgtttatgaatgcttgtctgagtggggccagattctctgtgcaatctgccccaaccccaagctggtcatcacgggtggaacaagcacggttgtgtgtgtgtgggagatgggcacctccaaagaaaaggccaagaccgtcaccctcaaacaggccttactgggccacactgataccgtcacctgcgccacagcatcattagcctatcacataattgtcagtgggtcccgtgatcgaacctgtatcatttgggatttgaacaaactgtcatttctaacccagcttcgagggcatcgagctccagtttctgctctttgtatcaatgaattaacaggggacattgtgtcctgcgctggcacatatatccatgtgtggagcatcaatgggaaccctatcgtgagtgtcaacacgttcacaggtaggagccagcagatcatctgctgctgcatgtcggagatgaacgaatgggacacgcagaacgtcatagtgacaggacactcagatggagtggttcggttttggagaatggaatttttgcaagttcctgaaacaccagctcctgagcctgctgaagtcctagaaatgcaggaagactgtccagaagcacaaatagggcaggaagcccaagacgaggacagcagtgattcagaagcagatgagcagagcatcagccaggaccctaaggacactccaagccaacccagcagcaccagccacaggccccgggcagcctcctgccgcgcaacagccgcctggtgtactgacagtggctctgacgactccagacgctggtccgaccagctcagtctagatgagaaagacggcttcatatttgtgaactattcagagggccagaccagagcccatctgcagggcccccttagccacccccaccccaatcccattgaggtgcggaattacagcagattgaaacctgggtaccgatgggaacggcagctggtgttcaggagtaagctgactatgcacacagcctttgatcgaaaggacaatgcacacccagctgaggtcactgccttgggcatctccaaggatcacagtaggatcctcgttggtgacagtcgaggccgagttttcagctggtctgtgagtgaccagccaggccgttctgctgctgatcactgggtgaaggatgaaggtggtgacagctgctcaggctgctcggtgaggttttcactcacagaaagacgacaccattgcaggaactgtggtcagctcttctgccagaagtgcagtcgctttcaatctgaaatcaaacgcttgaaaatctcatccccggtgcgtgtttgtcagaactgttattataacttacagcatgagagaggttcagaagatgggcctcgaaattgttgaagattcaacaagctgagtggagaccatggtctgtagaccccttcccgattctcctgtcccagcttggaaggcattgaaaacagtctccgtttacacatctcttcataccacgtgtttgaagtgttaaaattcaaagggatcattgaataaaacgggtgtagagtacaggaatggggcagacgcgattcaggtgaacagcacaagaagaatatgaggtggttcctaggagcaacactttcgacctccagttctccctgatgacagtagctgtctccaagagaaaaatcctcacttattaactctcttttcttgcatctcatttttatagagctactcatccttatttggaaaaaccaacaacaaaaaaggcttttagaaaatggttgtaaatctgacttctttgcaagtaactatgtatattgtaaatagatataaaaggccttttttctaaataaggacttaactgcctgtaacatgaaacttcaaactaaaccactaactcaatgaactacttatggtttgtctgacatccctcacttaccaattaattataaatatgtttttttaaatccccaaagacattatctgtggtctttttttcctttcaagctcagcctgtgtgcctgatgtcatttctttcaagttgcccacagtatctccacttaaactaggctagtaaccaaaataatgtggaccttctttaggaaacagtgtgggagaataggagtccagccgtaagataaactggaaatatttgggcgtcttgtacctggctacgcaccacctcagtgttgttcctacataaacagggccccttttaaacttgtatgtggactgctgtttggtcaaagaataccttcttagcattgcagaaaggtggtcagatgaccagtgtagtgcaggaaacagccctgtctcaactaatggaaatatatttgcatgtaacccaaaattagcttatcttgcatagaacataataagtatgtgtctttggtgacactaatgttctactatagcttattttcaaacaaggggtaaaaaaaggaaagaaagaagtgtacagaattaacatataaactttgttgtaaaactgaatcatgtcagaactgcttaaaattaacctttaccatttaatgtcatctacctgaaaacagtgagatttatactgtatcaatgtctatttttttgtttttgctatgaatataattacagtattttaatatttagttatttaatttgttctactagttggatacagaacacacaaatccagggggattaaagctggaaggggctaagagattagtttacagagaaaaggcttggtggtgggatttttttaaatgtgtgttatgtacatatatatatatatataatatatattaaaaatgaaacaattaatctagattttaacattttcagaaacttagtgataacattatgaacaattctaaaagccctgtgatttgaaaaatatagaatcattaatggcccaagataggccttcacaccttcacaggtgcgaaaggaaaggccttcacaccctcacagaggcatcatgcaaaggacagcggctttggcttttccaattttccatctttaggccctggtgagaggcacacttatgcactaaaatgcacatatatgcacatgcattcaaaaataggcatttggtacaatggtgatcttgtacctgatgggctgaaaccagcttaagaacaaatttgttcttcctgatatgataactaggtctccaagagaaaatagaaaggctgctttagtgccttacgcttactaaatttaaatctttatttacctgggtttgagcctacagtctatttatgattacatatcaaaattgattaaaacacttccatttctaaaagttcaaatatacttgttaataaaaggattatcggcattaatactttaatttaaagaaaagttgtgttctgttttcctttctgtgtcttactccccccacactctccctcccccatcaccatcttcaattctaataaataatgctgatgttcaacagttgcagaaattgtgctattatgtaactgtgggccttgcccctgtctggccctctagatgatttgtagcagtgttattctacactttttaaaagaagcgtcctccttttgtccatgaatcatgtttaccccatacccagtggcagaggtgttctttaaagacttgaatatatgaatgtgtgtgtgtagttacttaaaggttattcctctttgtaataggaaactatatgggatgaacacttttaaactttccgacacaacttccattactaactttctaacagaacttccataactagaaggtggaaaccaaaaccctcatggtagtatttcctctggcagctggtgctgtgggcaactgttttgttcaatcgggtttcttttctttttgcctctaatgcagaaatcaacagaatcactcacacatacaagtacactcacatacataaactaattatttctctggatatctttctgtgttccatgtaaatttatttaccaacatctattgtcaacatgtacatctaccttagtatggtctgcattctttttctgagagtacctcatagggctcctgcctgatctttgtagtttgttcattcatccatccacctgttcatttgttcatccatgtattctaacatttctatgtagtgtgcaactctaatgtcatgcttttgaagaagagaatagctgcccatagcagccatccgtctggataatagcaaaacactctagataagttattttgcactttcttatgtataaagttggtagaaacttatttttgctttgtatcatttaaatacattttgttttggtaaatgaactgtgtataaaatatttatgccgttaaaactgtttttagaaagtatttttaatttcagcaagtttggttacttgttgcatgactcttaacacagctgactttttgtgtcagtgcaatgtatattttttgtcctgttattaacttgtaagccctagtaatggccaattatttgtacagcaacagaagtaaattgaagatactggctaagactggattgattgtggacttttatactatattgcagaaaccaatatctgtttcttggtggttatgtaaaagacctgaagaattactatctagtgtgcagtctgtgatatctgaatgttcattgtatatttgtctctgatgcaaaaaggtagagtaacacaattacaatacatgattaaatgcaatagtccaggtacttaagtaatttttttttcatttcaaataaatacctatttaccaccaaaagaaagaaaaagaaaa

SEQ ID NO: 82554 - DNA, 5166 bp, Homo sapiens
gctgcagtagaagctgtaaatgtcttccatcatcttttttatgagggtcaagtggatatctacaacatcaatgacccactaaaggagacagccacaattgggttcattaataacttcggtcagatccctaaacagttatttaaaaaacctcatccaccaaagcgagtgagaagtcgactcaatggagacaatgcaggaatctctgtcctaccaggatctacaagtgacaagatcttttttcatcatctagacaacttgaggccttctctaacacctgtaaaagaactcaaagaacctgtaggacaaatcgtatgtacagataaaggtattcttgcggtggaacagaataaggccatgactgtttatgaatgcttgtctgagtggggccagattctctgtgcaatctgccccaaccccaagctggtcatcacgggtggaacaagcacggttgtgtgtgtgtgggagatgggcacctccaaagaaaaggccaagaccgtcaccctcaaacaggccttactgggccacactgataccgtcacctgcgccacagcatcattagcctatcacataattgtcagtgggtcccgtgatcgaacctgtatcatttgggatttgaacaaactgtcatttctaacccagcttcgagggcatcgagctccagtttctgctctttgtatcaatgaattaacaggggacattgtgtcctgcgctggcacatatatccatgtgtggagcatcaatgggaaccctatcgtgagtgtcaacacgttcacaggtaggagccagcagatcatctgctgctgcatgtcggagatgaacgaatgggacacgcagaacgtcatagtgacaggacactcagatggagtggttcggttttggagaatggaatttttgcaagttcctgaaacaccagctcctgagcctgctgaagtcctagaaatgcaggaagactgtccagaagcacaaatagggcaggaagcccaagacgaggacagcagtgattcagaagcagatgagcagagcatcagccaggaccctaaggacactccaagccaacccagcagcaccagccacaggccccgggcagcctcctgccgcgcaacagccgcctggtgtactgacagtggctctgacgactccagacgctggtccgaccagctcagtctagatgagaaagacggcttcatatttgtgaactattcagagggccagaccagagcccatctgcagggcccccttagccacccccaccccaatcccattgaggtgcggaattacagcagattgaaacctgggtaccgatgggaacggcagctggtgttcaggagtaagctgactatgcacacagcctttgatcgaaaggacaatgcacacccagctgaggtcactgccttgggcatctccaaggatcacagtaggatcctcgttggtgacagtcgaggccgagttttcagctggtctgtgagtgaccagccaggccgttctgctgctgatcactgggtgaaggatgaaggtggtgacagctgctcaggctgctcggtgaggttttcactcacagaaagacgacaccattgcaggaactgtggtcagctcttctgccagaagtgcagtcgctttcaatctgaaatcaaacgcttgaaaatctcatccccggtgcgtgtttgtcagaactgttattataacttacagcatgagagaggttcagaagatgggcctcgaaattgttgaagattcaacaagctgagtggagaccatggtctgtagaccccttcccgattctcctgtcccagcttggaaggcattgaaaacagtctccgtttacacatctcttcataccacgtgtttgaagtgttaaaattcaaagggatcattgaataaaacgggtgtagagtacaggaatggggcagacgcgattcaggtgaacagcacaagaagaatatgaggtggttcctaggagcaacactttcgacctccagttctccctgatgacagtagctgtctccaagagaaaaatcctcacttattaactctcttttcttgcatctcatttttatagagctactcatccttatttggaaaaaccaacaacaaaaaaggcttttagaaaatggttgtaaatctgacttctttgcaagtaactatgtatattgtaaatagatataaaaggccttttttctaaataaggacttaactgcctgtaacatgaaacttcaaactaaaccactaactcaatgaactacttatggtttgtctgacatccctcacttaccaattaattataaatatgtttttttaaatccccaaagacattatctgtggtctttttttcctttcaagctcagcctgtgtgcctgatgtcatttctttcaagttgcccacagtatctccacttaaactaggctagtaaccaaaataatgtggaccttctttaggaaacagtgtgggagaataggagtccagccgtaagataaactggaaatatttgggcgtcttgtacctggctacgcaccacctcagtgttgttcctacataaacagggccccttttaaacttgtatgtggactgctgtttggtcaaagaataccttcttagcattgcagaaaggtggtcagatgaccagtgtagtgcaggaaacagccctgtctcaactaatggaaatatatttgcatgtaacccaaaattagcttatcttgcatagaacataataagtatgtgtctttggtgacactaatgttctactatagcttattttcaaacaaggggtaaaaaaaggaaagaaagaagtgtacagaattaacatataaactttgttgtaaaactgaatcatgtcagaactgcttaaaattaacctttaccatttaatgtcatctacctgaaaacagtgagatttatactgtatcaatgtctatttttttgtttttgctatgaatataattacagtattttaatatttagttatttaatttgttctactagttggatacagaacacacaaatccagggggattaaagctggaaggggctaagagattagtttacagagaaaaggcttggtggtgggatttttttaaatgtgtgttatgtacatatatatatatatataatatatattaaaaatgaaacaattaatctagattttaacattttcagaaacttagtgataacattatgaacaattctaaaagccctgtgatttgaaaaatatagaatcattaatggcccaagataggccttcacaccttcacaggtgcgaaaggaaaggccttcacaccctcacagaggcatcatgcaaaggacagcggctttggcttttccaattttccatctttaggccctggtgagaggcacacttatgcactaaaatgcacatatatgcacatgcattcaaaaataggcatttggtacaatggtgatcttgtacctgatgggctgaaaccagcttaagaacaaatttgttcttcctgatatgataactaggtctccaagagaaaatagaaaggctgctttagtgccttacgcttactaaatttaaatctttatttacctgggtttgagcctacagtctatttatgattacatatcaaaattgattaaaacacttccatttctaaaagttcaaatatacttgttaataaaaggattatcggcattaatactttaatttaaagaaaagttgtgttctgttttcctttctgtgtcttactccccccacactctccctcccccatcaccatcttcaattctaataaataatgctgatgttcaacagttgcagaaattgtgctattatgtaactgtgggccttgcccctgtctggccctctagatgatttgtagcagtgttattctacactttttaaaagaagcgtcctccttttgtccatgaatcatgtttaccccatacccagtggcagaggtgttctttaaagacttgaatatatgaatgtgtgtgtgtagttacttaaaggttattcctctttgtaataggaaactatatgggatgaacacttttaaactttccgacacaacttccattactaactttctaacagaacttccataactagaaggtggaaaccaaaaccctcatggtagtatttcctctggcagctggtgctgtgggcaactgttttgttcaatcgggtttcttttctttttgcctctaatgcagaaatcaacagaatcactcacacatacaagtacactcacatacataaactaattatttctctggatatctttctgtgttccatgtaaatttatttaccaacatctattgtcaacatgtacatctaccttagtatggtctgcattctttttctgagagtacctcatagggctcctgcctgatctttgtagtttgttcattcatccatccacctgttcatttgttcatccatgtattctaacatttctatgtagtgtgcaactctaatgtcatgcttttgaagaagagaatagctgcccatagcagccatccgtctggataatagcaaaacactctagataagttattttgcactttcttatgtataaagttggtagaaacttatttttgctttgtatcatttaaatacattttgttttggtaaatgaactgtgtataaaatatttatgccgttaaaactgtttttagaaagtatttttaatttcagcaagtttggttacttgttgcatgactcttaacacagctgactttttgtgtcagtgcaatgtatattttttgtcctgttattaacttgtaagccctagtaatggccaattatttgtacagcaacagaagtaaattgaagatactggcttaaaaaaaaaaaaaaaaaaaaaaaaaaaaagtgtgtgtggggggcccggggccctgtggaaagagtttttggagaacacattgggtggggggggggggccccagagggttagggtgcacaggtggcacacaagggtggttccctagaggaagaaccggggggcacaggagcaaactgagacgggatggcgaattactacacgccataatgaaaaaaaaccgcacgggggggaaaacacggagagggcttgtggaaacaagactcccgaaagaggaagctccaggagggcacaagaaagggggaaccacaaacacacgggggtccacacgacgaaaccgaataatacaatataccccgcgcgacgg

SEQ ID NO: 82555 - DNA, 2302 bp, Homo sapiens
gctgcagtagaagctgtaaatgtcttccatcatcttttttatgagggtcaagtggatatctacaacatcaatgacccactaaaggagacagccacaattgggttcattaataacttcggtcagatccctaaacagttatttaaaaaacctcatccaccaaagcgagtgagaagtcgactcaatggagacaatgcaggaatctctgtcctaccaggatctacaagtgacaagatcttttttcatcatctagacaacttgaggccttctctaacacctgtaaaagaactcaaagaacctgtaggacaaatcgtatgtacagataaaggtattcttgcggtggaacagaataaggccatgactgtttatgaatgcttgtctgagtggggccagattctctgtgcaatctgccccaaccccaagctggtcatcacgggtggaacaagcacggttgtgtgtgtgtgggagatgggcacctccaaagaaaaggccaagaccgtcaccctcaaacaggccttactgggccacactgataccgtcacctgcgccacagcatcattagcctatcacataattgtcagtgggtcccgtgatcgaacctgtatcatttgggatttgaacaaactgtcatttctaacccagcttcgagggcatcgagctccagtttctgctctttgtatcaatgaattaacaggggacattgtgtcctgcgctggcacatatatccatgtgtggagcatcaatgggaaccctatcgtgagtgtcaacacgttcacaggtaggagccagcagatcatctgctgctgcatgtcggagatgaacgaatgggacacgcagaacgtcatagtgacaggacactcagatggagtggttcggttttggagaatggaatttttgcaagttcctgaaacaccagctcctgagcctgctgaagtcctagaaatgcaggaagactgtccagaagcacaaatagggcaggaagcccaagacgaggacagcagtgattcagaagcagatgagcagagcatcagccaggaccctaaggacactccaagccaacccagcagcaccagccacaggccccgggcagcctcctgccgcgcaacagccgcctggtgtactgacagtggctctgacgactccagacgctggtccgaccagctcagtctagatgagaaagacggcttcatatttgtgaactattcagagggccagaccagagcccatctgcagggcccccttagccacccccaccccaatcccattgaggtgcggaattacagcagattgaaacctgggtaccgatgggaacggcagctggtgttcaggagtaagctgactatgcacacagcctttgatcgaaaggacaatgcacacccagctgaggtcactgccttgggcatctccaaggatcacagtaggatcctcgttggtgacagtcgaggccgagttttcagctggtctgtgagtgaccagccaggccgttctgctgctgatcactgggtgaaggatgaaggtggtgacagctgctcaggctgctcggtgaggttttcactcacagaaagacgacaccattgcaggaactgtggtcagctcttctgccagaagtgcagtcgctttcaatctgaaatcaaacgcttgaaaatctcatccccggtgcgtgtttgtcagaactgttattataacttacagcatgagagaggttcagaagatgggcctcgaaattgttgaagattcaacaagctgagtggagaccatggtctgtagaccccttcccgattctcctgtcccagcttggaaggcattgaaaacagtctccgtttacacatctcttcataccacgtgtttgaagtgttaaaattcaaagggatcattgaataaaacgggtgtagagtacaggaatggggcagacgcgattcaggtgaacagcacaagaagaatatgaggtggttcctaggagcaacactttcgacctccagttctccctgatgacagtagctgtctccaagagaaaaatcctcacttattaactctcttttcttgcatctcatttttatagagctactcatccttatttggaaaaaccaacaacaaaaaaggcttttagaaaatggttgtaaatctgacttctttgcaagtaactatgtatattgtaaatagatataaaaggccttttttctaaataaggacttaactgcctgtaacatgaaacttcaaactaaaccactaactcaatgaactacttatggtttgtctgacatccctcacttaccaattaattataaatatgtttttttaaatcccc

SEQ ID NO: 82556 - DNA, 850 bp, Homo sapiens
gctgcagtagaagctgtaaatgtcttccatcatcttttttatgagggtcaagtggatatctacaacatcaatgacccactaaaggagacagccacaattgggttcattaataacttcggtcagatccctaaacagttatttaaaaaacctcatccaccaaagcgagtgagaagtcgactcaatggagacaatgcaggaatctctgtcctaccaggatctacaagtgacaagatcttttttcatcatctagacaacttgaggccttctctaacacctgtaaaagaactcaaagaacctgtaggacaaatcgtatgtacagataaaggtattcttgcggtggaacagaataaggccatgactgtttatgaatgcttgtctgagtggggccagattctctgtgcaatctgccccaaccccaagctggtcatcacgggtggaacaagcacggttgtgtgtgtgtgggagatgggcacctccaaagaaaaggccaagaccgtcaccctcaaacaggccttactgggccacactgataccgtcacctgcgccacagcatcattagcctatcacataattgtcagtgggtcccgtgatcgaacctgtatcatttgggatttgaacaaactgtcatttctaacccagcttcgagggcatcgagctccagtttctgctctttgtatcaatgaattaacaggggggaattctgagttgatgagtataaaaaggcctctgcaggtagcccaagagacgataactaaagtccagaggtataaacagaaagaggaacagacactgtagatttttcttaactccatgacttcttcttgcagaaattctgcattaggcactgttt

SEQ ID NO: 82557 - DNA, 208 bp, Homo sapiens
aatagcttccctggtttaatactgcttttcttcatagactgaaacaaataatacagctttccttttagtccttgttcagccacacaacacaaaccagtatggcctttggcattttactgcaagctttccattcgattattaatgtttccggtgcccatgatcaagcatggagaagacctataattaattgacttttcctttcctttag

SEQ ID NO: 82558 - DNA, 352 bp, Homo sapiens
agaaataggaaagctggaggaaagtcctgcagaggccctgttaggttgaacattccacccagcaggtcttgtaggagattcaaaagcccagctctatttcagagatcattttttctcaacgtaggtatcaggatgcttgatttatatgaatatttgaaattatcatgctctatgagataatgacattagtttttcctgttcctgtcctaataccatgatttcttttttctagaactcaaagaacctgtaggacaaatcgtatgtacagataaaggtattcttgcggtggaacagaataaggttcttatcccaccaacctggaataaaacttttgcttggggctatgcagacc

SEQ ID NO: 82559 - DNA, 1914 bp, Homo sapiens
  misc_feature (4)..(4): n is a, c, g, or t
  misc_feature (7)..(7): n is a, c, g, or t
ggcnggngtgtagtggtgcaatctcggcttactgaaacctctgcctcccaggttcaagcaattctcctgcctcagcctcccaagtagctggaattacaagcatgcactgctatgcccggctaatttttgtacttctagtagagacagggtttcaccatgttgacctggctggtctcaaactcctgacctcaaatgatccgcccatcttggcttcccaaagtgctgggattataggcagcactacacctggcctgaaccatgtttttaaactaatatgactataatctttttccctgtactttgaaacagccattgtgtgcaggcagcccgctgccacatcttccaagatacgggaaatctaactgtataacatgatggaaattaagttatctgttaaccctgacagtctctcttcattgagtaatgtaaattggttccttaatctgtttcttaactttttaatttttgtacttatttaaatttagttttggagaatggaatttttgcaagttcctgaaacaccagctcctgagcctgctgaagtcctagaaatgcaggaagactgtccagaagcacaaatagggcaggaagcccaagacgaggacagcagtgattcagaagcagatgagcagagcatcagccaggaccctaaggacactccaagccaacccagcagcaccagccacaggccccgggcagcctcctgccgcgcaacagccgcctggtgtactgacagtggctctgacgactccagacgctggtccgaccagctcagtctagatgagaaagacggcttcatatttgtgaactattcagagggccagaccagagcccatctgcagggcccccttagccacccccaccccaatcccattgaggtgcggaattacagcagattgaaacctgggtaccgatgggaacggcagctggtgttcaggagtaagctgactatgcacacagcctttgatcgaaaggacaatgcacacccagctgaggtcactgccttgggcatctccaaggatcacagtaggatcctcgttggtgacagtcgaggccgagttttcagctggtctgtgagtgaccagccaggccgttctgctgctgatcactgggtgaaggatgaaggtggtgacagctgctcaggctgctcggtgaggttttcactcacagaaagacgacaccattgcaggaactgtggtcagctcttctgccagaagtgcagtcgctttcaatctgaaatcaaacgcttgaaaatctcatccccggtgcgtgtttgtcagaactgttattataacttacagcatgagagaggttcagaagatgggcctcgaaattgttgaagattcaacaagctgagtggagaccatggtctgtagaccccttcccgattctcctgtcccagcttggaaggcattgaaaacagtctccgtttacacatctcttcataccacgtgtttgaagtgttaaaattcaaagggatcattgaataaaacgggtgtagagtacaggaatggggcagacgcgattcaggtgaacagcacaagaagaatatgaggtggttcctaggagcaacactttcgacctccagttctccctgatgacagtagctgtctccaagagaaaaatcctcacttattaactctcttttcttgcatctcatttttatagagctactcatccttatttggaaaaaccaacaacaaaaaaggcttttagaaaatggttgtaaatctgacttctttgcaagtaactatgtatattgtaaatagatataaaaggccttttttctaaataaggacttaactgcctgtaacatgaaacttcaaactaaaccactaactcaatgaactacttatggtttgtctgacatccctcacttaccaattaattataaatatgtttttttaaatcccc

SEQ ID NO: 82560 - DNA, 4676 bp, Homo sapiens
  misc_feature (4)..(4): n is a, c, g, or t
  misc_feature (7)..(7): n is a, c, g, or t
ggcnggngtgtagtggtgcaatctcggcttactgaaacctctgcctcccaggttcaagcaattctcctgcctcagcctcccaagtagctggaattacaagcatgcactgctatgcccggctaatttttgtacttctagtagagacagggtttcaccatgttgacctggctggtctcaaactcctgacctcaaatgatccgcccatcttggcttcccaaagtgctgggattataggcagcactacacctggcctgaaccatgtttttaaactaatatgactataatctttttccctgtactttgaaacagccattgtgtgcaggcagcccgctgccacatcttccaagatacgggaaatctaactgtataacatgatggaaattaagttatctgttaaccctgacagtctctcttcattgagtaatgtaaattggttccttaatctgtttcttaactttttaatttttgtacttatttaaatttagttttggagaatggaatttttgcaagttcctgaaacaccagctcctgagcctgctgaagtcctagaaatgcaggaagactgtccagaagcacaaatagggcaggaagcccaagacgaggacagcagtgattcagaagcagatgagcagagcatcagccaggaccctaaggacactccaagccaacccagcagcaccagccacaggccccgggcagcctcctgccgcgcaacagccgcctggtgtactgacagtggctctgacgactccagacgctggtccgaccagctcagtctagatgagaaagacggcttcatatttgtgaactattcagagggccagaccagagcccatctgcagggcccccttagccacccccaccccaatcccattgaggtgcggaattacagcagattgaaacctgggtaccgatgggaacggcagctggtgttcaggagtaagctgactatgcacacagcctttgatcgaaaggacaatgcacacccagctgaggtcactgccttgggcatctccaaggatcacagtaggatcctcgttggtgacagtcgaggccgagttttcagctggtctgtgagtgaccagccaggccgttctgctgctgatcactgggtgaaggatgaaggtggtgacagctgctcaggctgctcggtgaggttttcactcacagaaagacgacaccattgcaggaactgtggtcagctcttctgccagaagtgcagtcgctttcaatctgaaatcaaacgcttgaaaatctcatccccggtgcgtgtttgtcagaactgttattataacttacagcatgagagaggttcagaagatgggcctcgaaattgttgaagattcaacaagctgagtggagaccatggtctgtagaccccttcccgattctcctgtcccagcttggaaggcattgaaaacagtctccgtttacacatctcttcataccacgtgtttgaagtgttaaaattcaaagggatcattgaataaaacgggtgtagagtacaggaatggggcagacgcgattcaggtgaacagcacaagaagaatatgaggtggttcctaggagcaacactttcgacctccagttctccctgatgacagtagctgtctccaagagaaaaatcctcacttattaactctcttttcttgcatctcatttttatagagctactcatccttatttggaaaaaccaacaacaaaaaaggcttttagaaaatggttgtaaatctgacttctttgcaagtaactatgtatattgtaaatagatataaaaggccttttttctaaataaggacttaactgcctgtaacatgaaacttcaaactaaaccactaactcaatgaactacttatggtttgtctgacatccctcacttaccaattaattataaatatgtttttttaaatccccaaagacattatctgtggtctttttttcctttcaagctcagcctgtgtgcctgatgtcatttctttcaagttgcccacagtatctccacttaaactaggctagtaaccaaaataatgtggaccttctttaggaaacagtgtgggagaataggagtccagccgtaagataaactggaaatatttgggcgtcttgtacctggctacgcaccacctcagtgttgttcctacataaacagggccccttttaaacttgtatgtggactgctgtttggtcaaagaataccttcttagcattgcagaaaggtggtcagatgaccagtgtagtgcaggaaacagccctgtctcaactaatggaaatatatttgcatgtaacccaaaattagcttatcttgcatagaacataataagtatgtgtctttggtgacactaatgttctactatagcttattttcaaacaaggggtaaaaaaaggaaagaaagaagtgtacagaattaacatataaactttgttgtaaaactgaatcatgtcagaactgcttaaaattaacctttaccatttaatgtcatctacctgaaaacagtgagatttatactgtatcaatgtctatttttttgtttttgctatgaatataattacagtattttaatatttagttatttaatttgttctactagttggatacagaacacacaaatccagggggattaaagctggaaggggctaagagattagtttacagagaaaaggcttggtggtgggatttttttaaatgtgtgttatgtacatatatatatatatataatatatattaaaaatgaaacaattaatctagattttaacattttcagaaacttagtgataacattatgaacaattctaaaagccctgtgatttgaaaaatatagaatcattaatggcccaagataggccttcacaccttcacaggtgcgaaaggaaaggccttcacaccctcacagaggcatcatgcaaaggacagcggctttggcttttccaattttccatctttaggccctggtgagaggcacacttatgcactaaaatgcacatatatgcacatgcattcaaaaataggcatttggtacaatggtgatcttgtacctgatgggctgaaaccagcttaagaacaaatttgttcttcctgatatgataactaggtctccaagagaaaatagaaaggctgctttagtgccttacgcttactaaatttaaatctttatttacctgggtttgagcctacagtctatttatgattacatatcaaaattgattaaaacacttccatttctaaaagttcaaatatacttgttaataaaaggattatcggcattaatactttaatttaaagaaaagttgtgttctgttttcctttctgtgtcttactccccccacactctccctcccccatcaccatcttcaattctaataaataatgctgatgttcaacagttgcagaaattgtgctattatgtaactgtgggccttgcccctgtctggccctctagatgatttgtagcagtgttattctacactttttaaaagaagcgtcctccttttgtccatgaatcatgtttaccccatacccagtggcagaggtgttctttaaagacttgaatatatgaatgtgtgtgtgtagttacttaaaggttattcctctttgtaataggaaactatatgggatgaacacttttaaactttccgacacaacttccattactaactttctaacagaacttccataactagaaggtggaaaccaaaaccctcatggtagtatttcctctggcagctggtgctgtgggcaactgttttgttcaatcgggtttcttttctttttgcctctaatgcagaaatcaacagaatcactcacacatacaagtacactcacatacataaactaattatttctctggatatctttctgtgttccatgtaaatttatttaccaacatctattgtcaacatgtacatctaccttagtatggtctgcattctttttctgagagtacctcatagggctcctgcctgatctttgtagtttgttcattcatccatccacctgttcatttgttcatccatgtattctaacatttctatgtagtgtgcaactctaatgtcatgcttttgaagaagagaatagctgcccatagcagccatccgtctggataatagcaaaacactctagataagttattttgcactttcttatgtataaagttggtagaaacttatttttgctttgtatcatttaaatacattttgttttggtaaatgaactgtgtataaaatatttatgccgttaaaactgtttttagaaagtatttttaatttcagcaagtttggttacttgttgcatgactcttaacacagctgactttttgtgtcagtgcaatgtatattttttgtcctgttattaacttgtaagccctagtaatggccaattatttgtacagcaacagaagtaaattgaagatactggctaagactggattgattgtggacttttatactatattgcagaaaccaatatctgtttcttggtggttatgtaaaagacctgaagaattactatctagtgtgcagtctgtgatatctgaatgttcattgtatatttgtctctgatgcaaaaaggtagagtaacacaattacaatacatgattaaatgcaatagtccaggtacttaagtaatttttttttcatttcaaataaatacctatttaccaccaaaagaaagaaaaagaaaa

SEQ ID NO: 82561 - DNA, 3665 bp, Homo sapiens
gctgcagtagaagctgtaaatgtcttccatcatcttttttatgagggtcaagtggatatctacaacatcaatgacccactaaaggagacagccacaattgggttcattaataacttcggtcagatccctaaacagttatttaaaaaacctcatccaccaaagcgagtgagaagtcgactcaatggagacaatgcaggaatctctgtcctaccaggatctacaagtgacaagatcttttttcatcatctagacaacttgaggccttctctaacacctgtaaaagaactcaaagaacctgtaggacaaatcgtatgtacagataaaggtattcttgcggtggaacagaataaggccatgactgtttatgaatgcttgtctgagtggggccagattctctgtgcaatctgccccaaccccaagctggtcatcacgggtggaacaagcacggttgtgtgtgtgtgggagatgggcacctccaaagaaaaggccaagaccgtcaccctcaaacaggccttactgggccacactgataccgtcacctgcgccacagcatcattagcctatcacataattgtcagtgggtcccgtgatcgaacctgtatcatttgggatttgaacaaactgtcatttctaacccagcttcgagggcatcgagctccagtttctgctctttgtatcaatgaattaacaggggacattgtgtcctgcgctggcacatatatccatgtgtggagcatcaatgggaaccctatcgtgagtgtcaacacgttcacaggtaggagccagcagatcatctgctgctgcatgtcggagatgaacgaatgggacacgcagaacgtcatagtgacaggacactcagatggagtggttcggttttggagaatggaatttttgcaagttcctgaaacaccagctcctgagcctgctgaagtcctagaaatgcaggaagactgtccagaagcacaaatagggcaggaagcccaagacgaggacagcagtgattcagaagcagatgagcagagcatcagccaggaccctaaggacactccaagccaacccagcagcaccagccacaggccccgggcagcctcctgccgcgcaacagccgcctggtgtactgacagtggctctgacgactccagacgctggtccgaccagctcagtctagatgagaaagacggcttcatatttgtgaactattcagagggccagaccagagcccatctgcagggcccccttagccacccccaccccaatcccattgaggtgcggaattacagcagattgaaacctgggtaccgatgggaacggcagctggtgttcaggagtaagctgactatgcacacagcctttgatcgaaaggacaatgcacacccagctgaggtcactgccttgggcatctccaaggatcacagtaggatcctcgttggtgacagtcgaggccgagttttcagctggtctgtgagtgaccagccaggccgttctgctgctgatcactgggtgaaggatgaaggtggtgacagctgctcaggctgctcggtgaggttttcactcacagaaagacgacaccattgcaggaactgtggtcagctcttctgccagaagtgcagtcgctttcaatctgaaatcaaacgcttgaaaatctcatccccggtgcgtgtttgtcagaactgttattataacttacagcatgagagaggttcagaagatgggcctcgaaattgttgaagattcaacaagctgagtggagaccatggtctgtagaccccttcccgattctcctgtcccagcttggaaggcattgaaaacagtctccgtttacacatctcttcataccacgtgtttgaagtgttaaaattcaaagggatcattgaataaaacgggtgtagagtacaggaatggggcagacgcgattcaggtgaacagcacaagaagaatatgaggtggttcctaggagcaacactttcgacctccagttctccctgatgacagtagctgtctccaagagaaaaatcctcacttattaactctcttttcttgcatctcatttttatagagctactcatccttatttggaaaaaccaacaacaaaaaaggcttttagaaaatggttgtaaatctgacttctttgcaagtaactatgtatattgtaaatagatataaaaggccttttttctaaataaggacttaactgcctgtaacatgaaacttcaaactaaaccactaactcaatgaactacttatggtttgtctgacatccctcacttaccaattaattataaatatgtttttttaaatccccaaagacattatctgtggtctttttttcctttcaagctcagcctgtgtgcctgatgtcatttctttcaagttgcccacagtatctccacttaaactaggctagtaaccaaaataatgtggaccttctttaggaaacagtgtgggagaataggagtccagccgtaagataaactggaaatatttgggcgtcttgtacctggctacgcaccacctcagtgttgttcctacataaacagggccccttttaaacttgtatgtggactgctgtttggtcaaagaataccttcttagcattgcagaaaggtggtcagatgaccagtgtagtgcaggaaacagccctgtctcaactaatggaaatatatttgcatgtaacccaaaattagcttatcttgcatagaacataataagtatgtgtctttggtgacactaatgttctactatagcttattttcaaacaaggggtaaaaaaaggaaagaaagaagtgtacagaattaacatataaactttgttgtaaaactgaatcatgtcagaactgcttaaaattaacctttaccatttaatgtcatctacctgaaaacagtgagatttatactgtatcaatgtctatttttttgtttttgctatgaatataattacagtattttaatatttagttatttaatttgttctactagttggatacagaacacacaaatccagggggattaaagctggaaggggctaagagattagtttacagagaaaaggcttggtggtgggatttttttaaatgtgtgttatgtacatatatatatatatataatatatattaaaaatgaaacaattaatctagattttaacattttcagaaacttagtgataacattatgaacaattctaaaagccctgtgatttgaaaaatatagaatcattaatggcccaagataggccttcacaccttcacaggtgcgaaaggaaaggccttcacaccctcacagaggcatcatgcaaaggacagcggctttggcttttccaattttccatctttaggccctggtgagaggcacacttatgcactaaaatgcacatatatgcacatgcattcaaaaataggcatttggtacaatggtgatcttgtacctgatgggctgaaaccagcttaagaacaaatttgttcttcctgatatgataactaggtctccaagagaaaatagaaaggctgctttagtgccttacgcttactaaatttaaatctttatttacctgggtttgagcctacagtctatttatgattacatatcaaaattgattaaaacacttccatttctaaaagttcaaatatacttgttaataaaaggattatcggcattaatactttaattta

SEQ ID NO: 82562 - DNA, 870 bp, Homo sapiens
gctgcagtagaagctgtaaatgtcttccatcatcttttttatgagggtcaagtggatatctacaacatcaatgacccactaaaggagacagccacaattgggttcattaataacttcggtcagatccctaaacagttatttaaaaaacctcatccaccaaagcgagtgagaagtcgactcaatggagacaatgcaggaatctctgtcctaccaggatctacaagtgacaagatcttttttcatcatctagacaacttgaggccttctctaacacctgtaaaagaactcaaagaacctgtaggacaaatcgtatgtacagataaaggtattcttgcggtggaacagaataaggccatgactgtttatgaatgcttgtctgagtggggccagattctctgtgcaatctgccccaaccccaagctggtcatcacgggtggaacaagcacggttgtgtgtgtgtgggagatgggcacctccaaagaaaaggccaagaccgtcaccctcaaacaggccttactgggccacactgataccgtcacctgcgccacagcatcattagcctatcacataattgtcagtgggtcccgtgatcgaacctgtatcatttgggatttgaacaaactgtcatttctaacccagcttcgagggcatcgagctccagtttctgctctttgtatcaatgaattaacaggggacattgtgtcctgcgctggcacatatatccatgtgtggagcatcaatgggaaccctatcgtgagtgtcaacacgttcacaggtaggagccagcagatcatctgctgctgcatgtcggagatgaacgaatgggacacgcagaacgtcatagctgtttcctggggatcctctgaacgc

SEQ ID NO: 82563 - DNA, 841 bp, Homo sapiens
cccagcacttggctccggtggtgacagccggatgctcctgttgccttgcgtcatcagcaggtaatctggggaggttcactggtaccttgtgaatattctgtttcctgtcagcctttcacctaatggtcttagcatccctaaatcattatttcatcagggatgtcaaagatgatttccatattctgtgattcttttcacatgtattagcgggcattctgtaaagaaacttcttatcatcaataagagaacatcatagattcttctaaaaaagcagggtcaatgtttcattctgtcctttatccatttgaaaggaagatagtcacctatagttgtggaaatcagtgttttcctttcactcctctgcttctttccctccatccttcctttgtgaatcactgtgtgccaactgactattcattgtgttgtagtcacagtcatggggttttctgctgctcacttgatttcagatatggccagtggaaactcctgctggctggttcctgtgtccttttcatatgtgtgtattaatgtttaagagccaaaatccaggctgggtgcagtggctcacatctgtaatcccagcacttcgggaggctgaagtgggtgaatctcttgagcctaggagttcaagaccaatttggcaactgtggtgaaaccccatctctacaagaaataccaaaaaataaaaaagagaaattagccaggtggggtggcacacacttgtggtcctactcaggaggctgaggtgggaggattgcttgagcctgggaggcagaggttgtagtgagcagagatcataccattgctttcaagcttgagtaacagagcaagacttttgctt

SEQ ID NO: 82564 - DNA, 718 bp, Homo sapiens
cccagcacttggctccggtggtgacagccggatgctcctgttgccttgcgtcatcagcaggtaatctggggaggttcactggtaccttgtgaatattctgtttcctgtcagcctttcacctaatggtcttagcatccctaaatcattatttcatcagggatgtcaaagatgatttccatattctgtgattcttttcacatgtattagcgggcattctgtaaagaaacttcttatcatcaataagagaacatcatagattcttctaaaaaagcagggtcaatgtttcattctgtcctttatccatttgaaaggaagatagtcacctatagttgtggaaatcagtgttttcctttcactcctctgcttctttccctccatccttcctttgtgaatcactgtgtgccaactgactattcattgtgttgtagtcacagtcatggggttttctgctgctcacttgatttcagatatggccagtggaaactcctgctggctggttcctgtgtccttttcatatgtgtgtattaatgtttaagagccaaaatccactgcaccctgccgagactcatttcttaccaggctttgaaccatgttataggccagcagttgtacagagtcaccaatattctgaacctgcgtatttttttacggtgttatttctgtatatttcctataaactggaagttaggtgtaagaccttctttagatcaggtggtgt

SEQ ID NO: 82565 - DNA, 1261 bp, Homo sapiens
ctaggacatgctagatattcaaagcttgttgaataaatgactgaaaggatgcagaattttcaaaattccctcttcaagtacttcttctacaggaatgggtagagtgggaagtgaggagacagggtgggtatgtgggtgggaatagggcaagtgacttaagctggtgtgggtgggctccagtatccacttctacttcaatcagagcaactcaacaatgctacatatataagcccactatgaaaattggatattgaatcagctgggaaaatgaattccttactgagcatttcaacttaaacttgggttccaagtggattaaacagatgatgttgtaacactgttatcagcctgacaggaaatgcatagagacaccagtcctcgtttcttaaagtggaggagcctcagctagcaaattgccacttattagcttgtctcacctataaaagagccatggaagagaagtgcaagagaactgaagtgatttcctgatgacagcagggggtgctctcactagactgaaggacagatacattctcagagcagtaggaaaggaataacacattgccttactacgactctatatgagactttagaagtgcctaatacctgcctggagcaaaagaattaatatgctctattccacggctctgccgtcttcaactttgataaatacttaaaaatgtatttttgaaaagtcattaacttctggaatataggattcagccaccacacttagaatgtgtgaaactgtggtgcaatttgtaacaggatgtacaccacatttttaatcagggaattgtgttttttaaagctaagagacctgtagtgaattaaggcatttggctcagccaaacattccaatcacgaaacgatcgaagaggaaatctatagaatcttattataaacttacaaaaaggataactgtgggtctcggccataaactgaagtaatacagatgaactggacacatatgttgcacaataggtgattcagagcaatatagcctatgctgttttatgatatggaaagcaatcaaatcttatttgcaaaaaattcagatcaattgaattttaatgagaagcaggtgctggagtgtagcatccacaaagaattctgggaatgtttaaaattagtcccatatttgccaggagacagttgggtacataaacttttttatttcttgattcatgggtctattcggactgtagattgctctgccattctgagttcagcaatttgaataaattatgctgaaaatcac

SEQ ID NO: 82566 - DNA, 727 bp, Homo sapiens
ctaggacatgctagatattcaaagcttgttgaataaatgactgaaaggatgcagaattttcaaaattccctcttcaagtacttcttctacaggaatgggtagagtgggaagtgaggagacagggtgggtatgtgggtgggaatagggcaagtgacttaagctggtgtgggtgggctccagtatccacttctacttcaatcagagcaactcaacaatgctacatatataaggtatgtattggggtgttagtatacattttcatattaaaaacaatgagttttaaaactgatggatcacttattttaataaagaaaaatgggtagggcttggaaaaaagaaagaccacttagtttaaactctatgaaactcagtttccttttttatatcatagagttattatgaggatgaaatgaaataatgtatggaaagtgcctggctcatggtatgaaacttcaccttccttgtaccaacccactgcttttgccagcagagccaggactaaggtgaggcaagtgagtgctaggggcacaaagtttaaggggataatcattttcaaggtcatgcacttgacctacaagtcatgacacactggccaaactagacttcaaacctttttcaaacacattgcttattcttttcaccaagactatcctccctgccaattaaacctaaggaaagcctacctagaatacaaccctttcttaataaaagcttctgcagtcatcca

SEQ ID NO: 82567 - DNA, 587 bp, Homo sapiens
ctagttataaaagtataggttaatttaagaaaagctgagggttttaaaagaatatttagttttatgcatagaaaaaaggtataaaagtaaaaacctgctgctcatttgggtattaaaggtataagtgttaagtataaatgttatattttctaattggctagtaatttatgtacttttatttacatctttttgtgtattaatttttcccaaaacatactgaaagtttttgttttaatacttttctattgatcttcacaattttcaacttcttcaatccaaatttatcgattagtaatgatgttgcttttttctttttaaagtttttacctattatgttttctgccatattaatcagtattttaaaaaattactaatggctgtaataggagacacacacaatttgttaatgagaatgcatcaagtttctcaccattaagcataatgtttatctgtcttcatacagccatatatgttttatatatgtgtgcacgtgttcccttgtgtacgtgggttgcatatgtgtgtgtagttattatgttaagacataccatatcctttattaaactcattgaaattaagaaatgtta

SEQ ID NO: 82568 - DNA, 496 bp, Homo sapiens
catctgatttgtgtgggcaatcttatataattatacatgtcagcctcactaaagtaattcaggacacatttttcaagtgtcatttatgcacatggggctgtgattctgttctaggaaggccctgcttaacctggctgttgcccttctctccaatctcattttaacctctctgcctggctacatatggccctcctttctggttcttgaacaccccaggattgtccatgctcagagcctttgaatttggtgttcactgtgcctggaaagtgcttcgtttggctttttgcatttatccaaaaggcttcagtttaaatgtcatctcttctttaaccatagaatacacatcatttactccctctcacattatcctcttatcttgtgtcacctactacaatctgtaactatcttaatagggactaggtctgcctttttcatgcctaaactcccagcacctagaacagaatctgacatgcaatgggctttcaataaatatttg

SEQ ID NO: 82569 - DNA, 692 bp, Homo sapiens
aggtgagcttgtcagcgggcacacgtatcctatgatctgaacccttaaattaatgaacagatgggtgtagacagcggtttgcagcccctgttgatgttgggttggtttataatcaccatatggaacagaatcggagcctcgcgtccacttcgatgctagaattctgttcgagtgctgatgaccaggggcggctaaacaccatgccctgccatctctgggtcttagagtcaccctaacatctgatctagattaattatcatcatgtgcgaggttttggcatgaagcacgccaggctcaccgtttcatgatcttagactatttacagcaaactcaaacagctcacttgctttttacaccctgcaaaagaccaagggagagcctggaggggttgttttttttttctgttttattctatcaaagcagcaaatactgcaatttccacagtaaatggtcacagtggggaccaatatcctgccctccagacccgctgcttcagccaatacagcaagggaagacgcagctctgttttctagaaggatcccaccgaggcataaaaacggcgcagcccagcctggcgccgcgccgggtcccggagccccgggcgcgaacatggggaatgcgcactccaaaagcggggacaggcacagcgcgctccccggccgccccgagctgtctttttacggctctttccc

SEQ ID NO: 82570 - DNA, 450 bp, Homo sapiens
accattgccagggccctggtcagaaccactatcatctcccacctggaggttgccacagcatggcctccctgcttctacccaaatcttcccacaatctttctcaactcagctgccatgggatgcttttaaatcagtagacagttcgtgtcacctctctgctcagaacccttccgcatctcccatctcagacagaataaaaaccaaagccccagcaatagcctcccagggcttacacaatctgtactgatctgagtccaacaactccctggcctccttccctacttctctccctctctctactccacagacctctttcctgagcttcagacacaccacggagttccctcttagcatctttattctgttgtttctgcctacaatgctcttccctcagtactttggccagctccttcccctccttcaagtctttgctcaattttcacttaggag

SEQ ID NO: 82571 - DNA, 1007 bp, Homo sapiens
tcacgccaatttagggtctccggtatctcccgctgagctgctctgttcccggcttagaggaccaggagaagggggagctggaggctggagcctgtaacaccgtggctcgtctcactctggatggtggtggcaacagagatggcagcgcagctggagtgttaggagggcggcctgagcggtaggagtggggctggagcagtaagatggcggccagagcggtttttctggcattgtctgcccagctgctccaagccaggctgatgaaggaggagtcccctgtggtgagctggaggttggagcctgaagacggcacagctctgtgcttcatcttctgaggttgtggcagccacggtgatggagacggcagctcaacaggagcaataggaggagatggagtttcactgtgtcagccaggatggtctcgatctcctgacctcgtgatccgcccgccttggccttccaaagtgccgagattacagcgatgtgcattttgtaagcactttggagccactatcaaatgctgtgaagagaaatgtacccagatgtatcattatccttgtgctgcaggagccggctcctttcaggatttcagtcacatcttcctgctttgtccagaacacattgaccaagctcctgaaagatgtaagtttactacgcatagacttttaaacttcaaccaatgtatttactgaaaataacaaatgttgtaaattccctgagtgttattctacttgtattaaaaggtaataatacataatcattaaaatctgagggatcattgccagagattgttggggagggaaatgttatcaacggtttcattgaaattaaatccaaaaagttatttcctcagaaaaatcaaataaagtttgcatgttttttattcttaaaacattttaaaaaccactgtagaatgatgtaaatagggactgtgcagtatttctgacatatactataaaattattaaaaagtcaatcagtattcaacatcttttacactaaaaagcc

SEQ ID NO: 82572 - DNA, 1027 bp, Homo sapiens
tcacgccaatttagggtctccggtatctcccgctgagctgctctgttcccggcttagaggaccaggagaagggggagctggaggctggagcctgtaacaccgtggctcgtctcactctggatggtggtggcaacagagatggcagcgcagctggagtgttaggagggcggcctgagcggtaggagtggggctggagcagtaagatggcggccagagcggtttttctggcattgtctgcccagctgctccaagccaggctgatgaaggaggagtcccctgtggtgagctggaggttggagcctgaagacggcacagctctgtgcttcatcttctgaggttgtggcagccacggtgatggagacggcagctcaacaggagcaataggagggtaaccgtggaggccacgtgagatggagtttcactgtgtcagccaggatggtctcgatctcctgacctcgtgatccgcccgccttggccttccaaagtgccgagattacagcgatgtgcattttgtaagcactttggagccactatcaaatgctgtgaagagaaatgtacccagatgtatcattatccttgtgctgcaggagccggctcctttcaggatttcagtcacatcttcctgctttgtccagaacacattgaccaagctcctgaaagatgtaagtttactacgcatagacttttaaacttcaaccaatgtatttactgaaaataacaaatgttgtaaattccctgagtgttattctacttgtattaaaaggtaataatacataatcattaaaatctgagggatcattgccagagattgttggggagggaaatgttatcaacggtttcattgaaattaaatccaaaaagttatttcctcagaaaaatcaaataaagtttgcatgttttttattcttaaaacattttaaaaaccactgtagaatgatgtaaatagggactgtgcagtatttctgacatatactataaaattattaaaaagtcaatcagtattcaacatcttttacactaaaaagcc

SEQ ID NO: 82573 - DNA, 423 bp, Homo sapiens
tcatcttgcatttgtggagactggattttacaccttgttaaagtgggtccttttagtttttccttttgttgtttgctgatttgttttaaatcacaatttattgatttcttacaatcaaatactgccaactagcattacttccactcatgcatcattaaaagcaaaggatatttcctccttggtatttttaaatggtacattatacaataaacaaagttagaacttaaaatgcacccttattaattatgtaaactggtaatttgtttaaaaaagcataactaataatttggttcctttcttcataaaatggaaatttaaatatttctcctgatagtcttgaggtgatcattagtagtgcaaagtgtggcacacacgtatagtttcatctagaaaggtgtgtctcttacacaacttatttaaaca

SEQ ID NO: 82574 - DNA, 686 bp, Homo sapiens
caacacggggcctcccctggtggaatctccacccactatgcatgtccctccttgctccccagtgggagggcaccctgggagcacagcagaacctgggggaggggagggggagccctgagaaggctggcttagccgtcttgggagtgactgtacagctgtgtgcaggtgtgtgcggaacacaggtccagcgatccgggagaaggagctgaaggcagagtggtcctggaggatgcgggtgaggtgagcaaatgggcctccccccacagacttggggccccaccctgcagccaccctagccctggaagcccctcaggttgctcgtttctgccatcaagcctggctcctcctggagcctcacgcacagagtctgatctgcactgggagctcagaaggcaggcatgaggagcctgctcccatctgcgggggtggagaccccggaatcgacacccaaaggctgctgggagcacatgagggggtgggagaggaaggcaggaagaggagccctgagggcggctctgaggctggggtgggtaccctctgccacctccacctccaccaggccaccgtgctgcctgaagctggccccggaaaggtgcttgtgcatgggcacagaggtgtgcacacacacacggggctgcaggggcaggaggaggaaggagccccagcccagactcagcccagccctg

SEQ ID NO: 82575 - DNA, 709 bp, Homo sapiens
gcgtcttctgcccggccccttcgcccacgtgaagaacgccagggagctgtgaggcagtgctgtgtggttcctgccgtccggactctttttcctctactgagattcatctgtgtgaaatatgagttggcgaggaagatcgacctattattggcctagaccaaggcgctatgtacagcctcctgaaatgattgggcctatgcggcccgagcagttcagtgatgaagtggaaccagcaacacctgaagaaggggaaccagcaactcaacgtcaggatcctgcagctgctcaggagggagaggatgagggagcatctgcaggtcaagggccgaagcctgaagctgatagccaggaacagggtcacccacagactgggtgtgagtgtgaagatggtcctgatgggcaggagatggacccgccaaatccagaggaggtgaaaacgcctgaagaagagatgaggtctcactatgttgcccagactgggattctctggcttttaatgaacaattgcttcttaaatctttccccacggaaaccttgagtgactgaaatatcaaatggcgagagaccgtttagttcctatcatctgtggcatgtgaaaagcaatcacagtgttaaaagaaggcacgttgaaatgatgcaggctgctcctatgttggaaatttgttcattaaaattctcccaataaagctttacagccttctgcaaagaa

SEQ ID NO: 82576 - DNA, 812 bp, Homo sapiens
gcgtcttctgcccggccccttcgcccacgtgaagaacgccagggagctgtgaggcagtgctgtgtggttcctgccgtccggactctttttcctctactgagattcatctgtgtgaaatatgagttggcgaggaagatcgacctattattggcctagaccaaggcgctatgtacagcctcctgaaatgattgggcctatgcggcccgagcagttcagtgatgaagtggaaccagcaacacctgaagaaggggaaccagcaactcaacgtcaggatcctgcagctgctcaggagggagaggatgagggagcatctgcaggtcaagggccgaagcctgaagctgatagccaggaacagggtcacccacagactgggtgtgagtgtgaagatggtcctgatgggcaggagatggacccgccaaatccagaggaggtgaaaacgcctgaagaaggtgaaaagcaatcacagtgttaaaagaaggcacgttgaaatgatgcaggctgctcctatgttggaaatttgttcattaaaattctcccaataaagctttacagccttctgcaaagaagtcttgtgaatcttttgtcaattttatttctagctatttgatgctgtgaaatgtttcattctttgcaattttgtattctatctccttgagctgtgtgtagaggcataattctcatgtattgattttctatccagcaaccttgttaaatatgcttatgaattttaaaagtttacttctaggttttttcagttttcaacctacagaatcatatcatttttgaataagaacaattttgtttctgccttt

SEQ ID NO: 82577 - DNA, 955 bp, Homo sapiens
gcgtcttctgcccggccccttcgcccacgtgaagaacgccagggagctgtgaggcagtgctgtgtggttcctgccgtccggactctttttcctctactgagattcatctgtgtgaaatatgagttggcgaggaagatcgacctattattggcctagaccaaggcgctatgtacagcctcctgaaatgattgggcctatgcggcccgagcagttcagtgatgaagtggaaccagcaacacctgaagaaggggaaccagcaactcaacgtcaggatcctgcagctgctcaggagggagaggatgagggagcatctgcaggtcaagggccgaagcctgaagctgatagccaggaacagggtcacccacagactgggtgtgagtgtgaagatggtcctgatgggcaggagatggacccgccaaatccagaggaggtgaaaacgcctgaagaagagatgaggtctcactatgttgcccagactgggattctctggcttttaatgaacaattgcttcttaaatctttccccacggaaaccttgagtgactgaaatatcaaatggcgagagaccgtttagttcctatcatctgtggcatgtgaaaagcaatcacagtgttaaaagaaggcacgttgaaatgatgcaggctgctcctatgttggaaatttgttcattaaaattctcccaataaagctttacagccttctgcaaagaagtcttgtgaatcttttgtcaattttatttctagctatttgatgctgtgaaatgtttcattctttgcaattttgtattctatctccttgagctgtgtgtagaggcataattctcatgtattgattttctatccagcaaccttgttaaatatgcttatgaattttaaaagtttacttctaggttttttcagttttcaacctacagaatcatatcatttttgaataagaacaattttgtttctgccttt

SEQ ID NO: 82578 - DNA, 566 bp, Homo sapiens
gcgtcttctgcccggccccttcgcccacgtgaagaacgccagggagctgtgaggcagtgctgtgtggttcctgccgtccggactctttttcctctactgagattcatctgtgtgaaatatgagttggcgaggaagatcgacctattattggcctagaccaaggcgctatgtacagcctcctgaaatgattgggcctatgcggcccgagcagttcagtgatgaagtggaaccagcaacacctgaagaaggggaaccagcaactcaacgtcaggatcctgcagctgctcaggagggagaggatgagggagcatctgcaggtcaagggccgaagcctgaagctgatagccaggaacagggtcacccacagactgggtgtgagtgtgaagatggtcctgatgggcaggagatggacccgccaaatccagaggaggtgaaaacgcctgaagaaggtgaaaagcaatcacagtgttaaaagaaggcacgttgaaatgatgcaggctgctcctatgttggaaatttgttcattaaaattctcccaataaagctttacagccttctgcaaagaa

SEQ ID NO: 82579 - DNA, 1029 bp, Homo sapiens
  misc_feature (734)..(734): n is a, c, g, or t
  misc_feature (1029)..(1029): n is a, c, g, or t
ctcatatttcacacagatgagttggcgaggaagatcgacctattattggtctaggccaataataggtcgatcttcctcgccaactcatatttcacacagatgaatctcagtagaggaagatcgacctattattggcctagaccaaggcgctatgtacagcctcctgaaatgattgggcctatgcggcccgagcagttcagtgatgaagtggaaccagcaacacctgaagaaggggaaccagcaactcaacgtcaggatcctgcagctgctcaggagggagaggatgagggagcatctgcaggtcaagggccgaagcctgaagctgatagccaggaacagggtcacccacagactgggtgtgagtgtgaagatggtcctgatgggcaggagatggacccgccaaatccagaggaggtgaaaacgcctgaagaaggtgaaaagcaatcacagtgttaaaagaaggcacgttgaaatgatgcaggctgctcctatgttggaaatttgttcattaaaattctcccaataaagctttacagccttctgcaaagaaaaaaaacaaaagaaacaaaaaaaaaaacagtctttgttgcggcgcggcgctgggcccttgagaaaagtcgtttctctagaacccagtcccgtgtttggcgcggcggcgggcgccgcatgatggtgtactctgcagaccaccttgcgggctcaaacggcgtgtgttcctcagagggagaaacccnccgtgggtccatacgagacaaaaactcgcgttgtgggtgttctctcccccccagcatatatgaaaaaaaaacgcgccgcgtcggggtgagaaacccccgagaggggtggtttttgagagcaccaaatcttccccataaaagtgggagcactcctccaggaaggggggaccatacactggcggcgctcgtccatcctccaccagcagcggaggtggtcccccaaagagcagagagctcttgccgagattttccaaaatatatgcacgccccggtgctctcggctcgtggtggggtn

SEQ ID NO: 82580 - DNA, 680 bp, Homo sapiens
gcatagtggaaacagtacaggttctctaaaaagtgaaagaccctggtttaaatccagcggcgccatttggaattggtgttacccagggttttcttttactatttctacaccttagtttttaatgttctacgggggaaaccattcacttacatttacacaacgttattgagtatttaccatatggcaggcactgagatgagattctaggaactaaggtgtgaataaaacagatgaaaattaaaaaaaaaaaaaaaaaaaaaaaaaaaaaaaaaaaaaaaaaaaaaaaaaaaaaaaaaaaaaaaaaaaaaaaaaaaaaaaaaaaaaaaaagaagaggggggggcgcggcgctagccagaaagactatcctcgcacaggagggagcgagcgcaacagaaaccgacgcgcgcgcagcagctaattatctagagaaaaaaggggcgcgactactaaagagaggagggcgtatatttataaatacgaggagcggcgcggcagccggcggccgtatctaaaaaaagagctggagtgagagaagaacaacacgagaccatgcgggagggacaaccacttataggagaaacgaccccctcatcactggcggggggggagcgacaaaaagtgggggcgaagaaaacccaccagaaaagaaaataaaaacaccccgagggagaaagaaaac

SEQ ID NO: 82581 - DNA, 745 bp, Homo sapiens
gcgatcgaggaggaggctgtgtgtgtgttgctatggaaatacatgaccacgcaaaaggaagtccattctgataattctgatacctgagatgtaactggactgaagagtagaaacaggaaaaattttagtgccaactttaattacaatggccactgattcaggggatccagccagcacagaagattctgagaaacctgatggaatttcatttgaaaacagagttccccaggtcgctgcaactttgacagtagaagctagactaaaggagaaaaacagtaccttctctgcttctggggaaactgtagaaaggaagagatttttccgaaagagtgttgaaatgacggaagatgacaaagttgccgaatcatcccccaaagatgagagaattaaggctgcaatgaatattccaagagtagataagcttccttcaaatgtgttgagaggtggacaagaagttaaatatgaacagtgttcaaagtcaacctcagaaatctcaaaagattgtttcaaggagaaaaatgaaaaggaaatggaagaagaagcagaaatgaaggctgtagctacttctcctagtggcagattcctgaaatttgacatagaactaggaagaggagcatttaaaacagtatataaaggactggacactgaaacatgggttgaggttgcttggtgtgagctgcaggtaggtatataatcttcttggttataataaattcaagttttagctggcctggccttctgtgtg

SEQ ID NO: 82582 - DNA, 7235 bp, Homo sapiens
gcgatcgaggaggaggctgtgtgtgtgttgctatggaaatacatgaccacgcaaaaggaagtccattctgataattctgatacctgagatgtaactggactgaagagtagaaacaggaaaaattttagtgccaactttaattacaatggccactgattcaggggatccagccagcacagaagattctgagaaacctgatggaatttcatttgaaaacagagttccccaggtcgctgcaactttgacagtagaagctagactaaaggagaaaaacagtaccttctctgcttctggggaaactgtagaaaggaagagatttttccgaaagagtgttgaaatgacggaagatgacaaagttgccgaatcatcccccaaagatgagagaattaaggctgcaatgaatattccaagagtagataagcttccttcaaatgtgttgagaggtggacaagaagttaaatatgaacagtgttcaaagtcaacctcagaaatctcaaaagattgtttcaaggagaaaaatgaaaaggaaatggaagaagaagcagaaatgaaggctgtagctacttctcctagtggcagattcctgaaatttgacatagaactaggaagaggagcatttaaaacagtatataaaggactggacactgaaacatgggttgaggttgcttggtgtgagctgcaggaccgaaagttaaccaaagctgagcagcaaagattcaaggaagaagcagagatgttgaagggtctccagcaccccaatatagttcgattttatgattcctgggaatctatattaaaaggaaagaaatgtattgtattagtgactgaactaatgacatctgggaccttaaagacgtacttaaaacgatttaaagtcatgaaaccaaaggtcttaaggagctggtgcaggcaaattttaaaggggttgcagttcttgcacactaggactcctcctattattcaccgggatctgaagtgtgacaatattttcatcacgggacccactggatctgtgaagattggtgatctaggattagccaccttaatgcgtacctcatttgctaagagtgtcattggaactcctgagtttatggctccagagatgtatgaagaacactatgatgaatccgtagatgtttatgcttttggaatgtgtatgctggaaatggccacatcggagtatccttattctgagtgtcagaatgcagctcaaatataccggaaagtaactagtggcataaaaccagccagcttcaataaagtcactgatcctgaagtcaaagaaatcattgaaggatgtattcgtcaaaacaaatctgaaaggttgtctatcagggacctattaaaccatgcattttttgctgaggatacaggactgagggtggagttagcagaagaagatgattgctcaaattcatcccttgctttaagactctgggttgaagaccctaaaaaattgaaaggcaaacacaaagacaatgaagctattgaatttagtttcaacttagaaacagatacacctgaggaagtagcatatgaaatggtcaagtctgggttcttccatgaaagtgattccaaagctgttgctaaatccattagagaccgggtgacgccaataaagaagacaagagagaagaagcctgctggctgtttggaagaacgcagggattctcagtgcaagtctatggggaatgtattccctcagccccagaatacaactttaccccttgctcccgctcagcaaactggggctgaatgtgaagaaactgaagttgatcaacatgttagacaacagcttctacaaagaaaaccacagcagcactgctcctctgttacaggtgacaatttgtctgaggcaggagctgcatcagttatacattcagatacttcaagtcagcccagtgtagcctattcctcaaatcaaacgatgggctctcaaatggtttctaatatcccgcaggctgaagtaaatgttccagggcaaatttattcatctcagcaactagtaggacattaccagcaagtttcagggttacagaagcattcaaagctgactcagccgcagattttgcctttggttcaaggtcagtccactgttttacctgtacatgtccttggaccgacagttgtttcacaaccccaggtttccccattaactgttcagaaggtcccacagataaagcctgtatcccaaccagttggagctgaacaacaagcagctcttctaaaaccagatttagttcgaagcttgaatcaagatgtggcaactacgaaggaaaacgtcagtagccctgataacccaagtggaaatggcaaacaggatcggatcaaacagagaagagcttcctgtccccgaccagagaaggggactaaatttcagcttaccgtccttcaggtatcaacctctggagataacatggtagagtgtcagctggagacacacaacaacaagatggtcaccttcaagtttgatgttgatggtgatgcgccagaggatattgcagactatatggttgaagataactttgtgctggaaagtgagaaagaaaaatttgtagaagaattgagagctattgtaggtcaagcccaggagatccttcatgtccactttgccacagaaagagccactggagttgattctattactgtggactccaacagtagccagacagggtcatctgaacaagtacagataaattctacatctactcaaaccagcaatgaatctgctcctcagtcatccccagttggtcggtggcgattctgtatcaatcagacgataagaaaccgtgagactcagtctcctccttctcttcagcattccatgtctgcggttcctggccgacatccacttcctagtccaaaaaacacaagtaataaggaaatatcacgggacacattgctcactatagaaaataatccatgccaccgtgcacttttcacctccaaatcagaacacaaggatgtggttgatggtaagatttctgaatgtgctagtgtagaaaccaagcagccagctatactttatcaagtggaagataacaggcagataatggcaccagttactaatagttccagttactctactacttcagttcgtgcagttccagctgaatgtgagggactcaccaaacaagcaagcatattcatacctgtgtatccatgtcaccaaactgccagtcaggctgatgcacttatgtcccatcctggcgaatcaactcagacttctggtaactctcttacaactctggcatttgatcaaaagcctcaaaccttatcagtacagcagccagctatggatgcagagtttatttctcaagaaggagaaactacagtgaacactgaagcaagttctcctaagacagtcattcccactcagacccctggccttgaaccaactacccttcaacccactactgtcctggaatcagatggagaaagacctccaaaactggagtttgcagacaaccgaattaaaactctggatgaaaaattaagaaacttgctctatcaggagcacagcatctctagcatctatcccgagagtcagaaggatacccaaagcatagactctccattttcttcctctgctgaagataccctctcctgtccagtgacagaagtcatagccatcagtcactgtggaattaaagatagccctgtacaatcccctaatttccaacagacaggctctaagcttctgtccaatgtggctgcaagtcagcctgctaatatatcagtgttcaaaagggacctgaatgtgataacttctgtacccagcgaattgtgtttacatgagatgtcctcagatgcttcacttccaggggatccagaggcctatcctgctgctgtgtcaagcggtggagccattcatctgcagacaggagtggaaacagaagagatgagatcagcaattgctcctgatcccattcctctgacacgggagtccacagctgatactagggctttgaatagatgtaaagcgatgagtggatcatttcagcggggtcggttccaggtgattacaattcctcagcagcagtcagcaaaaatgacatcttttggaatagaacacatatcagtgttcagtgagacaaaccattctagtgaagaagcctttattaaaacagcaaagtctcagttggtagaaatagaacctgccacacaaaatccaaaaacttcgttttcttatgagaagttacaagctcttcaggaaacctgtaaagaaaataaaggagttcccaaacaaggtgacaacttcttatctttcagcgcagcttgtgagactgatgtatcttcagtgaccccagaaaaggaatttgaagaaacttcagccacaggaagtagcatgcagtctggatctgaactgttgcttaaagagagagagatattgactgctgggaaacagcctagctctgatagtgaattttcagccagtcttgctggcagtggaaagtcagtggcaaagactggtccagagagtaatcagtgcttaccacaccacgaagaacaagcttatgctcaaacacagagttcactcttctattcgccatcttccccaatgagcagtgatgatgaatcagaaatagaggatgaggacttgaaggtggagcttcaaagattacgagaaaaacacattcaggaggtggtaaatcttcaaacccagcagaataaggagctgcaggagctctatgaacgccttcggtcaattaaagatagcaaaacccaatctactgagattcctttgccacctgcatcaccacgtcgaccaagatctttcaaaagcaaacttcgaagccgcccccagtccttgacacatgtggacaatggcatagttgctacagatccactgtgtgtggagagtaatgcagcatcatgccaacagtctccagccagtaaaaaagggatgttcacagatgacttacacaagctggtggatgactggacaaaggaagcagtaggaaattctcttattaagccaagtttaaaccaacttaaacaaagtcaacacaaactagagacagaaaactggaataaagtatctgaaaatactccgtctactatgggctacacatcaacatggatttcttctctgtcccaaatccgtggagctgtcccaacttccttgccacaaggactctcactcccttcatttcctgggccattatcatcatatggaatgcctcacgtttgtcagtataatgctgtggcgggggcggggtatccagtacagtgggtaggaatttcaggaacaacacaacaatctgtagtaattcccgcccaatctgggggaccattccagccagggatgaatatgcaggcatttccaacttcatcagtgcagaatcctgccacaatccctcctggtcctaaatgaatcagagtagatggtgataaaaagggaggttttttcagaattattttcaggacacccaagatattaaagtttcttcctcttgggttctgtcatattttccctcatttgagtttactttagactatatattttttgttccagtgtggtatttgatacagctcatcattctgtagaaatgtgcagtttgcagatagaacactgcacacagaaatgttttttcacttcaaattctatcctctttgatacttgattttttaaaaatactgttcagaatgctttaataagctcagcttgagcattaccatttccaggacactttccatgaattgttgagaagctccccatcccccgccttttttttttttttttttaactgctgctatctgcagctggatactcttctttaaaaatgtttaaaaattatttagattgattctccccaaatgtggatgaactgagaccctccatcagccagagtcttatgggatcttcacttcacatgtttgtcttaggtttacctttcacagaaggcagggtaacttgctgcaggaaacgttttggtgtataaaattagaatcacttttttttttttttttgagatggagtctctctctgtcacccaggttggagtgcagtggtgtgatcttggctcactgctgcaacctccccctcctgggttcaagcgattctcctgcctcagcctcctgagtagctgggactacaggcgccagccaccatgcctggctaatttttgtatttttagtagaggatggggtttcactatgttggccagactggtctcaaactcctaaccttgtgatccgccctccttagcccccccaaaaaattacaataattttgtcaaccaatacagaacatgagccctttttaaatgtgatttcccgtcatcacagcagtaggatgaagccttgttttgggtgagacagagggaaagggagatttcagtaataattcaaagcagctgtctccttgtttctcacatgcatactacattggttttgagcatctgagaggcattggtttgtcttgcattcttttgcaaggcatatattgcagctgatatgaatctcgtttggggggaatccttgtattcctaacaagggggattaaagctacacctcaatccattcttctgaagtgaaatttacttgacacagtaggtttcgagacttacatatgaaacactggctttacagggttctcagagatgtggggtatacactgtcctgcagtgagatagtagaccctagaaggatactatttaagttgtccttagctctttttaattacaatttttagttgttagaatttctttttagtatctatagtatcttagatgattttagatcttaaatgagtttggcagcctctttagaatctgagagagatcactgtcaagttgcactttactgggttttatccagttttaggaggaggggaggcaatgtcaaaatgtacacctttggtttttaagaaggttaactataataatgttaaaggctagtcacagggttacctaatgctcagtctgtgaaacctaaatagaattcttaaaatgttatttaccaactaagtattcatgttcaaattacttaccttccactctgaagactttaaggtcatttctaatacacatttacctaattaggagttctgtctactagtaaacattccaaattgctacccaacattactgttaacagattttcctccgtattcttctaaaaattataccccatgggcttgccaggtaatgacgaaaacttaatgggtgtacttttttttttttttgcacagtctactttgtgacattaagtacctcttttccaaaaaaaaa

SEQ ID NO: 82583 - DNA, 370 bp, Homo sapiens
aaattttatttatctttggtaataatgttaataataggattgatacagacattcaataacatagatattctaccaggtttgcaaggtaaccaaaactatcgtgttttctgaatagtaacaaattgtatatttagcttgaattttactgttatcatagcaagttttatgtctgtactgtttacagcctgtatcccaaccagttggagctgaacaacaagcagctcttctaaaaccagatttagttcgaaggtaagtatcttcaaattaataccatgagaacaatgaggatatgctgaagtttgtttactcattaggtgcttagtgcatcctgactagagaagcttctgtattcttgtacttgtgtggatgt

SEQ ID NO: 82584 - DNA, 7288 bp, Homo sapiens
gcgatcgaggaggaggctgtgtgtgtgttgctatggaaatacatgaccacgcaaaaggaagtccattctgataattctgatacctgagatgtaactggactgaagagtagaaacaggaaaaattttagtgccaactttaattacaatggccactgattcaggggatccagccagcacagaagattctgagaaacctgatggaatttcatttgaaaacagagttccccaggtcgctgcaactttgacagtagaagctagactaaaggagaaaaacagtaccttctctgcttctggggaaactgtagaaaggaagagatttttccgaaagagtgttgaaatgacggaagatgacaaagttgccgaatcatcccccaaagatgagagaattaaggctgcaatgaatattccaagagtagataagcttccttcaaatgtgttgagaggtggacaagaagttaaatatgaacagtgttcaaagtcaacctcagaaatctcaaaagattgtttcaaggagaaaaatgaaaaggaaatggaagaagaagcagaaatgaaggctgtagctacttctcctagtggcagattcctgaaatttgacatagaactaggaagaggagcatttaaaacagtatataaaggactggacactgaaacatgggttgaggttgcttggtgtgagctgcaggaccgaaagttaaccaaagctgagcagcaaagattcaaggaagaagcagagatgttgaagggtctccagcaccccaatatagttcgattttatgattcctgggaatctatattaaaaggaaagaaatgtattgtattagtgactgaactaatgacatctgggaccttaaagacgtacttaaaacgatttaaagtcatgaaaccaaaggtcttaaggagctggtgcaggcaaattttaaaggggttgcagttcttgcacactaggactcctcctattattcaccgggatctgaagtgtgacaatattttcatcacgggacccactggatctgtgaagattggtgatctaggattagccaccttaatgcgtacctcatttgctaagagtgtcattggaactcctgagtttatggctccagagatgtatgaagaacactatgatgaatccgtagatgtttatgcttttggaatgtgtatgctggaaatggccacatcggagtatccttattctgagtgtcagaatgcagctcaaatataccggaaagtaactagtggcataaaaccagccagcttcaataaagtcactgatcctgaagtcaaagaaatcattgaaggatgtattcgtcaaaacaaatctgaaaggttgtctatcagggacctattaaaccatgcattttttgctgaggatacaggactgagggtggagttagcagaagaagatgattgctcaaattcatcccttgctttaagactctgggttgaagaccctaaaaaattgaaaggcaaacacaaagacaatgaagctattgaatttagtttcaacttagaaacagatacacctgaggaagtagcatatgaaatggtcaagtctgggttcttccatgaaagtgattccaaagctgttgctaaatccattagagaccgggtgacgccaataaagaagacaagagagaagaagcctgctggctgtttggaagaacgcagggattctcagtgcaagtctatggggaatgtattccctcagccccagaatacaactttaccccttgctcccgctcagcaaactggggctgaatgtgaagaaactgaagttgatcaacatgttagacaacagcttctacaaagaaaaccacagcagcactgctcctctgttacaggtgacaatttgtctgaggcaggagctgcatcagttatacattcagatacttcaagtcagcccagtgtagcctattcctcaaatcaaacgatgggctctcaaatggtttctaatatcccgcaggctgaagtaaatgttccagggcaaatttattcatctcagcaactagtaggacattaccagcaagtttcagggttacagaagcattcaaagctgactcagccgcagattttgcctttggttcaaggtcagtccactgttttacctgtacatgtccttggaccgacagttgtttcacaaccccaggtttccccattaactgttcagaaggtcccacagataaagcctgtatcccaaccagttggagctgaacaacaagcagctcttctaaaaccagatttagttcgaagcttgaatcaagatgtggcaactacgaaggaaaacgtcagtagccctgataacccaagtggaaatggcaaacaggatcggatcaaacagagaagagcttcctgtccccgaccagagaaggggactaaatttcagcttaccgtccttcaggtatcaacctctggagataacatggtagagtgtcagctggagacacacaacaacaagatggtcaccttcaagtttgatgttgatggtgatgcgccagaggatattgcagactatatggttgaagataactttgtgctggaaagtgagaaagaaaaatttgtagaagaattgagagctattgtaggtcaagcccaggagatccttcatgtccactttgccacagaaagagccactggagttgattctattactgtggactccaacagtagccagacagggtcatctgaacaagtacagataaattctacatctactcaaaccagcaatgaatctgctcctcagtcatccccagttggtcggtggcgattctgtatcaatcagacgataagaaaccgtgagactcagtctcctccttctcttcagcattccatgtctgcggttcctggccgacatccacttcctagtccaaaaaacacaagtaataaggaaatatcacgggacacattgctcactatagaaaataatccatgccaccgtgcacttttcacctccaaatcagaacacaaggatgtggttgatggtaagatttctgaatgtgctagtgtagaaaccaagcagccagctatactttatcaagtggaagataacaggcagataatggcaccagttactaatagttccagttactctactacttcagttcgtgcagttccagctgaatgtgagggactcaccaaacaagcaagcatattcatacctgtgtatccatgtcaccaaactgccagtcaggctgatgcacttatgtcccatcctggcgaatcaactcagacttctggtaactctcttacaactctggcatttgatcaaaagcctcaaaccttatcagtacagcagccagctatggatgcagagtttatttctcaagaaggagaaactacagtgaacactgaagcaagttctcctaagacagtcattcccactcagacccctggccttgaaccaactacccttcaacccactactgtcctggaatcagatggagaaagacctccaaaactggagtttgcagacaaccgaattaaaactctggatgaaaaattaagaaacttgctctatcaggagcacagcatctctagcatctatcccgagagtcagaaggatacccaaagcatagactctccattttcttcctctgctgaagataccctctcctgtccagtgacagaagtcatagccatcagtcactgtggaattaaagatagccctgtacaatcccctaatttccaacagacaggctctaagcttctgtccaatgtggctgcaagtcagcctgctaatatatcagtgttcaaaagggacctgaatgtgataacttctgtacccagcgaattgtgtttacatgagatgtcctcagatgcttcacttccaggggatccagaggcctatcctgctgctgtgtcaagcggtggagccattcatctgcagacaggagtggaaacagaagagatgagatcagcaattgctcctgatcccattcctctgacacgggagtccacagctgatactagggctttgaatagatgtaaagcgatgagtggatcatttcagcggggtcggttccaggtgattacaattcctcagcagcagtcagcaaaaatgacatcttttggaatagaacacatatcagtgttcagtgagacaaaccattctagtgaagaagcctttattaaaacagcaaagtctcagttggtagaaatagaacctgccacacaaaatccaaaaacttcgttttcttatgagaagttacaagctcttcaggaaacctgtaaagaaaataaaggagttcccaaacaaggtgacaacttcttatctttcagcgcagcttgtgagactgatgtatcttcagtgaccccagaaaaggaatttgaagaaacttcagccacaggaagtagcatgcagtctggatctgaactgttgcttaaagagagagagatattgactgctgggaaacagcctagctctgatagtgaattttcagccagtcttgctggcagtggaaagtcagtggcaaagactggtccagagagtaatcagtgcttaccacaccacgaagaacaagcttatgctcaaacacagagttcactcttctattcgccatcttccccaatgagcagtgatgatgaatcagaaatagaggatgaggacttgaaggtggagcttcaaagattacgagaaaaacacattcaggaggtggtaaatcttcaaacccagcagaataaggagctgcaggagctctatgaacgccttcggtcaattaaagatagcaaaacccaatctactgagattcctttgccacctgcatcaccacgtcgaccaagatctttcaaaagcaaacttcgaagccgcccccagtccttgacacatgtggacaatggcatagttgctacagatccactgtgtgtggagagtaatgcagcatcatgccaacagtctccagccagtaaaaaagggatgttcacagatgacttacacaagctggtggatgactggacaaaggaagcagtaggaaattctcttattaagccaagtttaaaccaacttaaacaaagtcaacacaaactagagacagaaaactggaataaagtatctgaaaatactccgtctactatgggctacacatcaacatggatttcttctctgtcccaaatccgtggagctgtcccaacttccttgccacaaggactctcactcccttcatttcctgggccattatcatcatatggaatgcctcacgtttgtcagtataatgctgtggcgggggcggggtatccagtacagtgggtaggaatttcaggaacaacacaacaatctgtagtaattcccgcccaatctgggggaccattccagccagggatgaatatgcaggcatttccaacttcatcagtgcagaatcctgccacaatccctcctggtcctaaatgaatcagagtagatggtgataaaaagggaggttttttcagaattattttcaggacacccaagatattaaagtttcttcctcttgggttctgtcatattttccctcatttgagtttactttagactatatattttttgttccagtgtggtatttgatacagctcatcattctgtagaaatgtgcagtttgcagatagaacactgcacacagaaatgttttttcacttcaaattctatcctctttgatacttgattttttaaaaatactgttcagaatgctttaataagctcagcttgagcattaccatttccaggacactttccatgaattgttgagaagctccccatcccccgccttttttttttttttttttaactgctgctatctgcagctggatactcttctttaaaaatgtttaaaaattatttagattgattctccccaaatgtggatgaactgagaccctccatcagccagagtcttatgggatcttcacttcacatgtttgtcttaggtttacctttcacagaaggcagggtaacttgctgcaggaaacgttttggtgtataaaattagaatcacttttttttttttttttgagatggagtctctctctgtcacccaggttggagtgcagtggtgtgatcttggctcactgctgcaacctccccctcctgggttcaagcgattctcctgcctcagcctcctgagtagctgggactacaggcgccagccaccatgcctggctaatttttgtatttttagtagaggatggggtttcactatgttggccagactggtctcaaactcctaaccttgtgatccgccctccttagcccccccaaaaaattacaataattttgtcaaccaatacagaacatgagccctttttaaatgtgatttcccgtcatcacagcagtaggatgaagccttgttttgggtgagacagagggaaagggaaaaaacagaattgtaacagttccttgattctgcagatactgctgctgttttacgatttcagtaataattcaaagcagctgtctccttgtttctcacatgcatactacattggttttgagcatctgagaggcattggtttgtcttgcattcttttgcaaggcatatattgcagctgatatgaatctcgtttggggggaatccttgtattcctaacaagggggattaaagctacacctcaatccattcttctgaagtgaaatttacttgacacagtaggtttcgagacttacatatgaaacactggctttacagggttctcagagatgtggggtatacactgtcctgcagtgagatagtagaccctagaaggatactatttaagttgtccttagctctttttaattacaatttttagttgttagaatttctttttagtatctatagtatcttagatgattttagatcttaaatgagtttggcagcctctttagaatctgagagagatcactgtcaagttgcactttactgggttttatccagttttaggaggaggggaggcaatgtcaaaatgtacacctttggtttttaagaaggttaactataataatgttaaaggctagtcacagggttacctaatgctcagtctgtgaaacctaaatagaattcttaaaatgttatttaccaactaagtattcatgttcaaattacttaccttccactctgaagactttaaggtcatttctaatacacatttacctaattaggagttctgtctactagtaaacattccaaattgctacccaacattactgttaacagattttcctccgtattcttctaaaaattataccccatgggcttgccaggtaatgacgaaaacttaatgggtgtacttttttttttttttgcacagtctactttgtgacattaagtacctcttttccaaaaaaaaa

SEQ ID NO: 82585 - DNA, 462 bp, Homo sapiens
ctcccaccaggccccacctccagtattgtggatctcaacatgagatttcagtggggaaacatccaaactatatcatctgggtaactttctaataaactatgtatgtgatgtcaaatgtaattaccatatgtaattttaaattttaaaagccttttacttaacttttatgcactggaattgtgttttaaacctaacaggaagccgttatcattagaatgatcaaaacctgataatagtaaacaaaagagaaagttaatttatgggaataatcattcgggcaatagaataaccagcatatattgctgtcttaaaggggagtagctgtcaacatgtgttactaatagttaaaggtttccagaaaattttcagtatctccctgccaatcaataaagatagcatcacactcatcaccatagctttagttgtcagaaatggtgtatttattgactaaatgcagcactt

SEQ ID NO: 82586 - DNA, 326 bp, Homo sapiens
  misc_feature (121)..(121): n is a, c, g, or t
  misc_feature (168)..(168): n is a, c, g, or t
  misc_feature (225)..(225): n is a, c, g, or t
ctcccaccaggccccacctccagtattgtggatctcaacatgagatttcagtggggaaacatccaaactatatcatctgggtaactttctaataaactatgtatgtgatgtcaaatgtaangaatgatagataatagtgaacatgaaggaaaatgatagatgcatcgncctgtgatattccttaaattgtgtgagcttgtagatttcagagtaatagacatattnaatacaagttataaggactaatcacttcataatgccagtttataaggaaaaatgtttatgtgatgaatttataccactgagcttaaacataatatcttaac

SEQ ID NO: 82587 - DNA, 458 bp, Homo sapiens
aaacactcctggcacataaaattacgtaacagtttaccatcatcagtaagccctgcaattgagataccaatatgtttgtcaatatggagaatttttttctgatgagctgcaagctccgatggtgcccttttcaatgcaaccaatactgcatgggtttttgatttcagaccaactgtggctgaaccttgtttaacagcttccattgcatattcagtttgatgaatcctgctccagacaatgatatcattgtcatactggtttctaaatgtggttccagcacaggtctggttgcagcctctggcaaaactgaggatcaagaagttgctgcctaaactattactctgcgttgtacagagaagtctgtgggactttgcaacccagacttttcagcactgtctttaatttgatcacaaggtttacaaaataggagagtgatcaatattagtggaaagtggatt

SEQ ID NO: 82588 - DNA, 415 bp, Homo sapiens
tcataaaaacatctcatcagttatttaatctcatgtaattaatttttgttctgcttgatcttgataagtagtttcacaaattcatctgtttccttattagagttctgaagaattttcagttagtctgtcgatcttaaagttattagaaacctgtatttaagagtgcttcttagagtcttttccatgaatctgattgcaaatgcttttagagaaaaatcaaaacaataacaatggataaggaaaacagaatagctatggtttaaaatctggtggaagttcattataattagcaattgacaaggaaatctggctatttctgtagcatacaacataataactagagttatggcatattaggtttctgagagttttatacaattttggaacattcctataaaaacacacccataaatgt

SEQ ID NO: 82589 - DNA, 532 bp, Homo sapiens
aggctcgggcaagcacgaacatcatatttcagttcagttggatgtatcaatcattagatctatttctagaacttaaaggtgctccaatccaagagcagcatgtcacctcaaaagcaaagcaccacaaattacagcaatagtaggaaacatatttgaatacactgattaatgtcaatgtgttcactgtagtttttccaatctatacttcactaaatgtgcatatttgaaagccctgagggactatgattaccccaaaaccctggtgttgttaaagtatttgatgtcagaaaaaattaaattcctaggattcctatattcaaattattatgtaactgtttgaaaacattatcttcaataaacttctatatctatgttttcacaatgtttaatattttaaataatgcttataatgttcagctgatcttcaggactcttagataagtaagttactatgtgggtgatgctaactagaggaagtagaatggaagaaatctaggttgtaataaatctttctacttttaattttctctta

SEQ ID NO: 82590 - DNA, 280 bp, Homo sapiens
gtgtggttccagaaccgcaggaccaagtggcggaagaagagcgccctggagccctcgtcctccacgccccgggccccgggcggcgcgggtgcaggcgcaggcggggaccgcgcaccctcggagaacgaggacgacgagtacaacaagccgctggaccccgactcggacgacgagaagatccgcctgctgctgcgcaagcaccgcgccgccttctcggtgctcagcctgggagcgcacagcgtctgacgcccgccgtccaggcccgggatcctggctgcag

SEQ ID NO: 82591 - DNA, 616 bp, Homo sapiens
tgcctttctagtttcagtaatttgttattatgctctgttctttcgttatttaatataatattggacctctttattgactgaaagattttctagctctggtataaattgtattttacaaaaactttataatatgcctattcttttttataatatttgttgtaaagcaactaacataaaaccttaattttcgagtaccttgagaatctgctgttctcaatagagacctttttagcttatttgcttttagctgtgttcgtttcttccagattttactgaatacaccaaatgtgtatgaaatgtcccatgtataaatgagacaaaattgaataagatatagtctcttcctttaaggagtttccatatggtatgattttacctacgctgaatataggtacttattgtaccatattataattcatttttaataaagcataagctttggaattcaagtaaagttgaatttaaatcctggatcattgacttactagatatgggaccttggataaattatacaacctttccccatgtgttcagctctaagggtatttcacctccaggttattatttcaggaattttattatagtcaatctttagtttttttaatagtaacagcca

SEQ ID NO: 82592 - DNA, 318 bp, Homo sapiens
tcagaattactcttttaaagatgtgcctcctatatacaactttaaggtggttttgttttatgatttaatctgattatgctgtcctcaaacaggacatttacatttactgacatgacagctatgttccatatcaattctgtcatactgttttaggttacgcttatacattctaaatgtctttcactgtgtagcctctcttttttttttttttttttttttttttggggagaaaaaaagttccccgtgggcgcgcccgggtgagaggggcgggggtggtaccccggataagggaagcccccgcccggggggaaagaacaa

SEQ ID NO: 82593 - DNA, 96 bp, Homo sapiens
  misc_feature (68)..(68): n is a, c, g, or t
ccaaattgtcttagagataattcccggctcacttagcattaggataatgacggttattctgtcccacngaagagtgttgaactggaacgcttccac

SEQ ID NO: 82594 - DNA, 389 bp, Homo sapiens
gacatatagctgaaccaaaaacaagataaacatctccacaggccagaaatgagacaaaactgaaaagccatgactgtggctgaggatacaggctactgggatttggtctggaagaggccaaagtagctttggctttagctcctgtggataaatagttcttgaagctttggggaaaggacctagaagtgctccagatgggatggggaatggaaatcaggctcattatttaatgccatgggctatagaaggcttcatgcttcagtcaaaaattattgccaacctttccctcatatcatagcttttagcaaagtcacattgttagcttgaagcctgtgttcacactgtttctgatacccacacagaacaggagcacagagataaggatggga

SEQ ID NO: 82595 - DNA, 450 bp, Homo sapiens
ggcctcccaaagtgctgggattacaggcgtgagccactgggcccggtcttgccatattctttaggtgctcagaactcagaccttgactcgttattggttgtgtggtggtggtagtttttttctccttaattatggtttgcaatttaaattttatcctacttatcataagttatgtgcttaaaaagcagatctgcagatctcactgtttcataataatgtgatttaaataggtgcactaacatttttcatccattcactaacacatttaaaaaatattaatagagccacttaacaatgttcaagcatggtgctgagctagagatacaaagctgaacataagaaacacccctgcctttagggggcttacactgcaggaagaaaccgctgtgtgaaacaataggcagcataacttgccaaggttgctgtgatctgagtatgcttgaggaaacc

SEQ ID NO: 82596 - DNA, 300 bp, Homo sapiens
ccaatcaatctgactgatgttcttatagaaagggaaaatatggacacagagagagacaccagagtgtcgtgcacataaagactttgaggacacttcataatggcgaccatctgcatgccaaggagaaaacagcaagcctgccttcacctcaatcttgaacttccagtctccacaacactaagaaaattaatatctgttgtttgtgctacctagtcaatggcattttgttatggcagcctgagcagattaacacacaaggcaagaatctgccttttctttctttctttctttctttttttt

SEQ ID NO: 82597 - DNA, 319 bp, Homo sapiens
tttttttaagacatatgccatctaagtgactcccttaagccgaaatataactttgtagcctttctaaattgtccatggaggaaacagggactctggagccagatacctatgtgatcttgggcaagttacttgactgttctgtgcctcagttttatcacataaaatgggaataataattgtacctcttctgaagggtttttattaggagttaggtggagggcttatgcctcagaacagaaggttgtgatatttgagtttgcgaagtcatcagctttatcagaaattccaccacagcaaattgttggcctgatgctatagg

SEQ ID NO: 82598 - DNA, 442 bp, Homo sapiens
tggttggattgtgagtgtggcttacagaagcatcagcatcaccttagtgcccccctccctcccctcaccctgtggatcttagtcacatgtaatataaccaagctcctgtttctatgaaagaaaccaacaggcctatctgtacacagcacttcataaatcctttttaaaaaaagcagaggaagataatggaatattttgccacttctaagagtgggtaataaatgtgtttgtaacccccagcccagaattgataggatttaatgagaaagtaccttttgcttgattttgtaaatgtaatctttcaatttatagacaagcaaaaatgtacccaagatgatagatgtcattaatgaaaatgttagtttcctaaccccccatccacctacccccacaaaaaattaagaacacattttagaaatactctattagaagagctcaaaca

SEQ ID NO: 82599 - DNA, 425 bp, Homo sapiens
ggaggtttccggcccggggcccgactgcgggtggcatttctggctaagccgttaggcgcgaattttctgtggccagaaaacacagggcacgttacccggtatcgtggtctacacctcgcccacaaatccatcccaggctgtatcctcatggaagctttttccagatgtgcttgagggttaagatggcaatgtgcaagaagaaaaactgcacattggaaaaccttctcttcggagatatctatatctatatttatatatatttacagatatggagatatatacacacacgtatctgaaaacattctgacgttttaaaaacggagcaccagaggagggggacttcatctgacttgttcagcactgtctcccaggccctggcacagagggagcactcgatacacaccgatgggctgaaggtgtgaatg

SEQ ID NO: 82600 - DNA, 211 bp, Homo sapiens
aacagatgaataaactgaatttgtttatgacacagtacacaggaggcaaagtgtttcacatcatagacttcacttccaactccttggaatgttcatttctttggcttacaggagagactagacaggaaggccaggcaatgatgtgaaacactttgcctcctgtgtactgtgtcataaacagatgaataaactgaatttgtactttagaaac

SEQ ID NO: 82601 - DNA, 334 bp, Homo sapiens
cctgacgttaagcaacttgcaaaaccagaatcagaactcacacctgccaaaacagaaagtctgattcttttcactgtggcaagatatctcaacattcaagattttcaaagaaattttattcatacttttgaatttctattttacttaattattcgtactatgagaatatagagccacatgacttttcttaataataatgggtactaactagttcaactctttacatttcttaattttaaattttgctaggctgggtgcagtggctcacgcctataatcccagcactttgcgggggccgaggcgggtggatcacttgaggtcaggagttggagac

SEQ ID NO: 82602 - DNA, 248 bp, Homo sapiens
cccagcttaggcgatcaggatgccagtattacctttccctgcgggagagtggagcatggtgacttctggctggttgttcccctatcccttccccatcccaggagacagggtccctcatgctgaccctacatccagaaaccagggccactctgtctggtcaatcaacagaaagtgacacatccgtgcggagcttcacactgctactttggggacacttcctggctctcttccagggccaatggcaacat

SEQ ID NO: 82603 - DNA, 362 bp, Homo sapiens
ctcatatacataaaaagtgataagaatccgaaaagacagccaggggaattaaatgccagttggggccaacggggccctgatcacggaagagggcgcccccagctctcaatcttcacacaatccctgcacccagggtcacagagcatgcgcaggtccttcccgcccacttccggggcaactgccaaccaccgcgcaggctgagccccaggcaggaagcagcccacttggtggggttggggtatgagtccttcctcgcgggggctcggtgggtcctgagtattctttggccggatttgctgatccgtctgctccaggtgagctgggaaggccgcaggaaaggcccagaagggcctcgccaggag

SEQ ID NO: 82604 - DNA, 462 bp, Homo sapiens
cccacctaccactcaaacctccagcctcatcttctaccaaatctcccatcaggccagtgctccagcaaaccaccaggcactccctgcacaccccacagatggaggtttctcatctctgcttagaatgccatctcccaccaccatctcttatctctcatcttaggcaacctggtcaactcctatccacatttcaaaaccccaactaaagtgtctttcaggaagccttccctaacttcactagagagcaaaactttcctgccagtctatgctgcttctaggataatttcccatttattccatgaactataaatatttgtttccatatctatactttccccactagactgggaacattttgaggaaaggagttgtgctggagccatcctggaatcccctgcatttagcagagagcctgccttgcagcaagctgtgaacaaatgtttgttgaaagtacagttgaca

SEQ ID NO: 82605 - DNA, 490 bp, Homo sapiens
gaatggactagatctgcagagatcagagtccagatctcatattatttatcccttcctattagatatgtaatagggaatataaattacttgttaatttcacatatctgcttagtgcttgttcgtgtaggaccaaaatcagtcttgatacgttgtcctatcacgaaaatcaaggatagaaacattcagaagtcaagatcagtttgctagagtcacaaacagaaaggaagagaatttaaaaagacagtaaaaggagaggaaacaatttcatgtattcagccagtatatgagggaagctaggtatgtggggaggctatatagaaatatatatagaatatcatgggtagaaaagcatccattttttatatagcttcttgaatgttagagtaatttacataaaagaatagtcagttcactcttcactttaacactggtttctaaacaacaacctgtttatcagtcatgatctgatgaagttttcacaggtttgtag

SEQ ID NO: 82606 - DNA, 703 bp, Homo sapiens
  misc_feature (19)..(19): n is a, c, g, or t
aagcaggcggtaccggccngagtttatggatctgggtgcaagcaggccaagccccactcctcaagatggaggaggagctgctgctcccggtggggactccccagtaggccactgggggaagccccacgacccagacagcaggtggagagcagcagctggccggagatcgacttcagcgagaaactgtgcggagctccagcagctggacttcctggagcagaagagccgctgaaccccgcccctgctgatctcactgcacacagcctagggccccacccgccgaggactccagaaccttctcctaccagctcgcccagagaccaagccaagagagtggtctctgaggagcccgctagaaaggcaaggcgaggcccgcagagaaggatgccaagcctgtagaagcagagacgtcggggatgggggacctgccctgggcgccgccagaggcccaagcgcccagcaccgcaggagctggagacgtcgctgagcaccaggtggcgccggcgcggttcctacagggagcctggaggcaggctgcggggtggctgtgccgggagactggagcggctcctggctccgcgcaggcagggcccccagagacagctcatgcagcagatccgcagccccggggccctcaggcaccgccgcggctgccgccctcgctcagtcccgagcgcgtccaccctggccagccagctgcccc

SEQ ID NO: 82607 - DNA, 400 bp, Homo sapiens
ctgggatgacaggggcgagccaccacacccagccatatatagcttcatatatatgttatacttaatgtataacgtactataaaaacaatttataaaagtttaaaaaacgattaaaaaactataaaaacaatttatttttgcttttcagggtcagtgccagcggttgttcagcctacatttagtaccactattcatctattatattcctgtcagcttgagaggtacagtcagggagtacctcacatcctgcagatattcagcacaaatgtctgagcaatctggctagttttgttctactgctttctcagcaaaccataataggaggtgcagtggtttatctcaacatcttcttgtgatggccacactatatactaaagttgagctcacattatatactaaa

SEQ ID NO: 82608 - DNA, 716 bp, Homo sapiens
agacaggagagggaaagcggggctccctcctccaacggctctcaggcacagccacgcctccagcgctggcgccccgcctcgtctttgagttggcagaggacctggcccgcccccaccccaggcagaggctcagaggcgccccactttcccccttcaaaaggcgggccgggccgcgtgctagggcatccctccctgggaaggtgagtgggatggcgagactgagccagcacatgggaggcttcccagcacgtgggaagatcgggacttccctgctggggtgctccccgcggggctccgcactagtcctgcccgaaggacgcttttcgccacccccggggttgcctttttgttggccgcgagccctttaatgcgcggtagggggcggagccagatcttaaattctggcggttgggggcggagcacggcagcggagggagaccagaattggttagggagctggacccagagaagagcaagctcgggattgggtaataggggggcccgacagtagtgtgtagcgaggattggccctccgggcagggcctcgcggctggaattggcccccgcgggaggaccgcggggaattgatggagttggccgggggaacggagcccgccgaggccgctatggccccggcctcgaagaatgccaaagagggctcaaggagccacggtcgccggcggtggcgaaaagacaaggccaaaggtgagcgcgcg

SEQ ID NO: 82609 - DNA, 355 bp, Homo sapiens
actgcgcccagccagtccacacaactttttaaaaaaatttcctgacagcagtaacttcatggtccatacagcttaagaagtgtttatgctttaacaactttgtagctgtttgaaaaaataatacacaaacattgaaagagagcatgtctttatttcattctaactatacttactaatggaatatgtgcctgttggaattgcacaacttctcaaaatttggtatcagaatggacacctacacactcatttcctgttacgtattggttttcttatggtatttgcttttgtcatagcaactatttaaacccagctttgtgaaaatatgatgttatctatcaaaaggattgtaggggga

SEQ ID NO: 82610 - DNA, 845 bp, Homo sapiens
gtcagggacattgaacaagggacatgggtaccaagctgacctgaggactcagctaactaaagttccacatttcttccctccttcccttgtctacctcttttccgtcaaacgtaagtggtcctctaggggttggctctctcatggtctttctcttctgatctgctctgccccgtcgtgggcatcttggaaccacctcagaagcaaggccacagctgtggactggtcctcgtgagagtctccctggatcctctgtacctgtaataggtacacagttacgttattatccaacctccaatccccaaaaagcctccttaatttgaaagagaaaaggtatatgtgccttgcattttgttatcggtccagattttgcatctggtggtggctggggtgccattgggattttggaatgggagcagtttgattcctccctcggaaggaactcatggctctcacaaaccagtgtctgtggcagtgacaagtcacagaatttgtgtttcaaggcttattccttcttccctttaagactttttcaacttcctgtcacttcgggctgagtctcaatttcagtcatgttttgtggcttcctttgagcacagaaacctctccttttcttccgttactggaactaagatcccagcgtaaactcgtgagagtcatttttccacgtcatcattcgttggagctattaagcccgaacacagaatgacattagtgttatactaatgtaagcagcagccactctggtgatgttgcattgaactcttttgttcttaaaccagattcacggcgggcaggcacagagttagaagagtgggctgcaggaagacacgtgctcagcggtggct

SEQ ID NO: 82611 - DNA, 244 bp, Homo sapiens
ggctacacacagaatggttttattttgtggtgctcagttcaccaatttatcttgcttcctacttggctcaaaccaacacaaagcaaaaccctccacagctggtcacggcctcattctcaaaactgtgagacttcccaacttcactgacagcctgcctttgggtccggagctaggccaccacgtgtgtggcggtgtgcactctccactgggccaccactccaccctccctgaacgccctcacatg

SEQ ID NO: 82612 - DNA, 1520 bp, Homo sapiens
tatcactgtattgagtgtggcaaggctttcagccaaaagtcgcaccttgttagacaccagagaattcatactcattagaaaccctatgaatattgtgaatatggcaaggccatctgaaggaattaacacctcattgcacattacatgatcacttccagagtagaaaactatgaatgtgggatagccttctgaaaaagccacaaatttatgaaacattagagaattcttccaaggtgacaaattatataatgaaaaagctgattaccagaaactttcagcagacatcttattgataatatttaatcagcattctcattgaaatctgaaacaaggtatcttccatcagcataacaacacaacacttgagctcctagccaatgtattaagtaaggaaaacaagtatcaacgaagaactataaaaataacttttatacaagaaataattagaaaatgtgttgatagaaaacctaagaataaacacaacaatgagttaggtctttatcaagttataaaatatgttgaaaggcacaaaagaacacctgaaaaatgatattttgtctgaaaagacttgacattgtaaaaatataatttctctcccaaatcactaagtttaatatacttctgaagtttacatcagttttattttaaggaacttcacaaacttatccaaaaattttatgtggaaaagtaaagaaacacaaatagctgaaacaaacttgacaaagcaagtagagaagacacactctattattagatatatcatgtacttatttaaagctgctgtcatttaaacaatgtattaccaagtgaataaatcaagcagtagtaagatagtgagcattcatacaaaaatccaagaagatacaggaattctgtgtatgacagtgctattgaaatcactggggaatgaatggcttatttaataaatggaaggttcataggagaaaaattttagctttctactttatatcatatacaaaaataaaatccaactaaagaccagaatataaaaagcaaaattttaaaactatgatgaaagtagaatccgttactttagggtaacaagatttctttaaaaaacatgtaaacatggaatagtctgttgaattttggtgtattggcctcacaggcacccacaaatgtacacaaagagatatatatcactgtgttcctgaatcatggtttgtattgcccaaaattggatataacaaatttttatcaattgtggaatagatgaataagtgtgatcatttctgtgataaaatacagaatttagaaacaaaatctacctatagttatatggatagattacaatatataatattgagagaaaaaattaaaatgcacaaaggaacacagtataacatttgtataatttaataagatcttgcaaagaacagtactgtgtattggtcatggatccatatatgacttggttgccttttgggatgtgggaaaggtttggtgggagttgttatatttatctgtaatatttctttaataaaagagtgaaagcaaat

SEQ ID NO: 82613 - DNA, 426 bp, Homo sapiens
ggcagcatttgaagctgaaggcaaggagatggatttctcattgagagcctccaggcagcaacacagtcctggggcacatgcgttccagccggtgagacccctgttggacttctagccgcagaaccgtcaggtccgatactggagtttatagccacttggtttgtgcgaattggctgcggcaaccacaggaacctcacgtggggtctgcacacacagttcacaggaagggaaattaaaatgacctctcatgtacagaggatcctcagtctcataacagggaaacgcaaacttcttggggagagaggcaaaaagcaacacaccctgggccaggcatggtggctcatgtctgtaatcctagcattttgggaggccgaggcaggtggatcacttgaggtcaggagtttgagaccagcctggccagtatag

SEQ ID NO: 82614 - DNA, 348 bp, Homo sapiens
cacttgcctttaggcctgtaggcctttcctgtgtgcctgcatctcagggagggtctctctccatgttgttgcctctatgttagtagtagacaactgttattacttggttcttgctgacctggtgagttggggggcaggggttgtcttgggccagcctcagtttttgtcaggccatgaatccctgggtcttgagggtgggattttttagtgatcctgccctcttccactggtagaaggcctttaatgatctgggcccaggatgatttcctgcccttttatcatgggtggaatttttttttccatttccctcactctagtcacagtgaatctttaactgtgtcctgaggg

SEQ ID NO: 82615 - DNA, 394 bp, Homo sapiens
aaggaaggaagcagcttacctgtggtcaagatgactaaaatcttgtaaattcaattccctggtgtcttgggtaagataaattgtatccacatcctatttgaaatataattcagtcatgtcatcagtccatgcagatgaccaggaaagcaagagagacagtgagaattagacaatgacaatggcaggtttttatgtaatctgagaagtgaagattttaagtgaaaaataaatgaagggaaaaaaagaaaaacaagccagccaaacattagaatattctccagggagtgtgtgtgctcatgcacatgtacacagacattcttacccattgtacttcttccctgtatgaaaatccaagccagtcacaaacacaggcatacatctgagaaaatccacc

SEQ ID NO: 82616 - DNA, 372 bp, Homo sapiens
aaagacacacagagagagagagagtctattgagtgagagtagcgttccaatccatccaacaaccgtatgctcacagagcattcaaggaaaaccactttgacatcctccagggagtatgttttgagtggagatacacaggcctgttatagtctcccagcttcttccctgtccttttcttggaagtcatgaggcacggaaaagaaaggagagggagagggagcttaagatttaccagcgatggtaaaaactccagttgaatcttaagtcattagtagaaattcccttcattttactcatagaaggttacatttttaattcattaaaatgaataaaaatctaatattttatatggaatggtgtaagcctgcctcc

SEQ ID NO: 82617 - DNA, 362 bp, Homo sapiens
ttgaaaaagaggctgggcatggtagctcacacctgtagtcccaacgctttgggaggccgaggcaggaggattgcttgagtccaggagttcaagaccagcctgggcaacacggcaagaccctgtccccccacccccaaaaaaggtaatactaaaagtaaaaaattagctttcaaataaagctagaaaaagcacaacaggataaacccagtgaaagcagaggaaagaaataaaggaagaaaagtaaatgaaagaaaaacaggaaacaaacaagaacagctgtcagcaaagaacaactcgcagcctaattttgaaacatctgtgaataaaaaaagtgccttttcccccatttttaaaaggttgtt

SEQ ID NO: 82618 - DNA, 765 bp, Homo sapiens
gcatggccaagctcaccctcctcactggtctgctccttgtgctgacagctgaaataggctctgcctaccagctgacatgttacttcaccaactgggcccagaaccagccaggcctggggtgcttcaagcctgatgacatcgacccctgcctctgtacccacttgatctacgcctttgctggaatgcagaacaacgagatcaccaccatcgaatgggatgacatgactctctaccaagctttcaatggcctgaaaaacaagtaaatgacggaaaacctgagtttcaaatcttttaacctttaaggacagtttaaacaagatcttccacagcagacttcaggctgaaattccaaacaggccaacaagcaggtaaattcagctttcttattatttcaagtgcaagaatgactctaattttaaggggaatggctggctcacagaagctagctgctaactaaagcccagctcagttgccaagggaagcttataagtccaactactggtggactcagttgagaacaatcttccacttagaagcaatccaaagctggcattgataaagcattcagtctccttggtcaggagattcactcctagggaaataattggaactgtggagacattggggtacagcaaaccaacatggcacatgtatacctatgtaacaaacctgcacattgtgcacatgtaccctggaacttaaagtatatttaaaaaaaaaactgtggagacattgaaacataccaatcatagtcacctactccaa

SEQ ID NO: 82619 - DNA, 402 bp, Homo sapiens
aacctgggatcactgctaatgaggaggttgagaaatcagtcctttcacatattgctgttgactgcataaactgctaaaattcttctggaaagcactgaagcaagaaaccccatctctggagcaagcttaaagaaataagccagaaacacagagtaagacagaaacacacaggtaacgtttaccgagcatctggtaaataccagccactgtgccaagtgtgttgtggtattgcttcatttaatacacacagctctcctctcaggtagataggattctatccccattcatacacaagggaacaaagacagtgattaagaaacttgcgtaaggtttccaggaagtaaaaatatactacatatataaaattgctcactgaagcactacttataatactgaaagcat

SEQ ID NO: 82620 - DNA, 339 bp, Homo sapiens
ctctgagaaacaccgcaatctagcagcagaaataacacaagtactcaaagaaagacttggaatgcagtaagatgagtgccatgtgagtgatagcacgttgtaggaatgaaaaggtgggaaaggagttctcagaactgaatagtgaagtcttcagaggtagtgtttgaattggctcatgaaaactgggtaagattttgatgggtaggttgcgggtagaaacaggcactagtagaagagaataacagatgcaaaagtttgaatcctcagaaaatggtatgttgttattagataagtttggaacagaggaagcagtgagagatgtgttgaagatgggggttg

SEQ ID NO: 82621 - DNA, 421 bp, Homo sapiens
ttactggcatctgtcggttggcttggtgttttaaatcttgagatggaagaggagggaggaattgaaatgtatggattaatctgaacatccaatgaatgtatttggccagtaaggacagttttctcttgattttgggtgcaaattgtttgtttttaggagtatagatttgataggaaataagggcacttcagattcaagcacttctcttctcacacaggagtatgcatgggaagaaaaaagagatttgttagtagctgagggtttgagagagggtagtgggggagggatgaagaagggaaaggttttcaaatgcatgtgacactgagctagaggggtcactgctgcctgcagatgccacaaccccatttgtgcacttgagcatggcctgagggagcattggcctgatgaatgcagagagaca

SEQ ID NO: 82622 - DNA, 820 bp, Homo sapiens
cctggacaagcctcggaggaccaggcagaaccctctggctagcagaaaagctcgcacccccgcacccttgcggcgtctgcttcagaccctccacgcaggcgcccgctggagcgcctgctggggatggcgtaccaccgacccttcaggctttttaaaaacctctccaagagctcggtcatgaaggagatatagacgatggccaggcggagggtctcgatccgggacagccttttctcgtaagcaaacgtgggcaccttcctccgcagctggtcaaaggcctcgttgaggttgaacatccgcttcctttcgcggatgttggcggcctggcgctgggcgtaggtgatcacccttttcctcttggggcggcctaatagggagacacctcttccgcgctcctcttcctcctcctcttctccgtccccctggtccacttcgcactcctcttcttctgggtccccctcttcaaaccgcgccatcctcctgggtcttccctctcggagcgcaagggctgggtcccccaaggagaccccgggtgcgaagtcgcagaggagagggcgtctcggggaggccagggacaggtctgcgacgaagtccagcaccgtagtgtccacgcagctctccggataggccgccatcgcttcggcttggccctgcctctcatcggttttccgcagggaggggcgaggttgctggtggggattcttaacagccttgaatctgatggggcaccatcaccgaaaggccagggaacattaaatatttataaccaagctgataacaggattagtcgcaccgataaggaatgctctgacaacgtccc

SEQ ID NO: 82623 - DNA, 416 bp, Homo sapiens
cagaggatcccctgccggctctctaccttgcaggcttctctacctctttctaccacacaagctccagctaaaggctttcttcccacgaatcaattttttatcttctcccaccccctgccagaatctccgccttatccaaattctgtttctctcttaacatcttctaattcatattacaggtttgttgttgttgttgttttgagacagagtctctctctgtcacccaggctggagcacagtggcacaatcccagctcactgcaacctccacctccggggttcgagtgattttcccacctcagcctcccgagtagctgggattacaggcatgagctaccatgcccagcctgtggttgtctataaacagggttgatcatttacacactaatgcttctagcagcactatgaggtagagag

SEQ ID NO: 82624 - DNA, 3290 bp, Homo sapiens
caaacacaaaaaaccacccaactacaaattaggcatcctcccacttggtcttttttcagattcattttggcttaatggtgccttccccattttaaaagcggtcttttactcatagtgccccagccttttgaaggcacaggaacaggagctgggctaccaccttcaagggctgtcaaagatggtgaggtctgaagccaaaggcaagcacaccaaactccatgggggctgaatgctgtggtctgtagtgtctgtgcttctgcagggttagcctggtcccagaaagagggcatgtgcatgctggagtgaagagctgaatttgatttccaagcccctggctgggggtccagagggagggcaggggccacctcctgccggctccctgctattgttgctcagggccggccgtcttggtggtcaccagttcagtggagcccagctctgtggctggcacagggacactgtggccaggtggggtggttcctgggtcttccccaggaggaggccggcaggagttgcttccggccgtgttggtggtctgaattgagaagccgcgactaagggaagatggagacaatactggagcagcagcggcgctatcatgaggagaaggaacggctcatggacgtcatggctaaagagatgctcaccaagaagtccacgctccgggaccagatcaattctgatcaccgcactcgggccatgcaagataggtatatggaggtcagtgggaacctgagggatttgtatgatgataaggatggattacgaaaggaggagctcaatgccatttcaggacccaatgagtttgctgaattctataatagactcaagcaaataaaggaattccaccggaagcacccaaatgagatctgtgtgccaatgtcagtggaatttgaggaactcctgaaggctcgagagaatccaagtgaagaggcacaaaacttggtggagttcacagatgaagagggatatggtcgttatctcgatctccatgactgttacctcaagtacattaacctgaaggcatctgagaagctggattatatcacatacctgtccatctttgaccaattatttgacattcctaaagaaaggaagaatgcagagtataagagatacctagagatgctgcttgagtaccttcaggattacacagatagagtgaagcctctccaagatcagaatgaactttttgggaagattcaggctgagtttgagaagaaatgggagaatgggacctttcctggatggccgaaagagacaagcagtgccctgacccatgctggagcccatcttgacctctctgcattctcctcctgggaggagttggcttctctgggtttggacagattgaaatctgctctcttagctttaggcttgaaatgtggcgggaccctagaagagcgagcccagagactattcagtaccaaaggaaagtccctggagtcacttgatacctctttgtttgccaaaaatcccaagtcaaagggcaccaagcgagacactgaaaggaacaaagacattgcttttctagaagcccagatctatgaatatgtagagattctcggggaacagcgacatctcactcatgaaaatgtacagcgcaagcaagccaggacaggagaagagcgagaagaagaggaagaagagcagatcagtgagagtgagagtgaagatgaagagaacgagatcatttacaaccccaaaaacctgccacttggctgggatggcaaacctattccctactggctgtataagcttcatggcctaaatatcaactacaactgtgagatttgtggaaactacacctaccgagggcccaaagccttccagcgacactttgctgaatggcgtcatgctcatggcatgaggtgtttgggcatcccaaacactgctcactttgctaatgtgacacagattgaagatgctgtctccttgtgggccaaactgaaattgcagaaggcttcagaacgatggcagcctgacactgaggaagaatatgaagactcaagtgggaatgttgtgaataagaagacatacgaggatctgaaaagacaaggactgctctagtgttgagggatgtagctcagcttttgggctagcccaggcttccctaagatctgctttttctatttctcccaaccaaatcctcttaaagaccctttgctatgtagtctcatggtctagcatgcatcttgtagaaacaaggcatgctggcagattgcagggttgagatgtgttttatctgttttatattttaaaagattctgccagaaaataaaaccagaccttgttctaaagcccagggttatggaccaactcagtgcttcaggtcttaatgcctccatacctcttcctcaccaactttactagtagctgagatttaatgggcacctattatgctacatatcatgttaggtaaatctgacctgacctctttccccaccctcctttgttgctgcttccctgaatgagtattaccccaggatgaggtctgccatcagcttagttagccattgatgcaaatactagggaaagactaggaggatgagccagggttgctactaaggactaagtgtcgcaccaaggtttgccttttgtatttgcataaagaaaggagttggagctgggtgcagtggcttgtgcctgtagtcccagctacttgggaggctgaggcaggagggttgcttgagactagcctaggtaacatagtgagaccctgtctcattaaaaaaaaaaaaaaaaggcatggtggcacgcactgtagtcccagctactcaggagactgaggctagaagatcctttgaacctaggagtttgagaccagcctgggcgatatagtgaggccccatctcaaaaaaaaaaaaaagcgggtgggggggagttgggctgtgttggaatgggcctgcagcccaacaaacaagggaactaggaccgacagtgacttcaccagcttgctaggtcagaatgagagactggtgggtctgtctacctgtttcttctacaagatccctatttgactgtaaaagtagctaatactcacatgttctccaatcccaggtagccatggtagagttgggtagagttgagcagctgccccaggatccaaatgtggtgtctgaaatggaaagaactaaggcaaccaggaaggcactgatctgccttataagcacagtcatctgaaagtcaggcctgctgcaggacaggatcccccagagaccccatttgcctctcaacactcagaccttcaactgttttttaataaatctactttttaaaaaaaaaaaata

SEQ ID NO: 82625 - DNA, 251 bp, Homo sapiens
cgggtagcgttctagaggatcccggccatggtagagttgggtagagttgagcagctgccccaggatccaaatgtggtgtctgaaatggaaagaactaaggcaaccaggaaggcactgatctgccttataagcacagtcatctgaaagtcaggcctgctgcaggacaggatcccccagagaccccatttgcctctcaacactcagaccttcaactgttttttaataaatctactttttaaaaaaaaaaaata

SEQ ID NO: 82626 - DNA, 933 bp, Homo sapiens
cggaactttggtgcagcctgatgcgcaacgtggggactcaggcgcgctgggcggcaggagttgcttccggccgtgttggtggtctgaattgagaagccgcgactaagggaagatggagacaatactggagcagcagcggcgctatcatgaggagaaggaacggctcatggacgtcatggctaaagagatgctcaccaagaagtccacgctccgggaccagatcaattctgatcaccgcactcgggccatgcaagataggtatatggaggtcagtgggaacctgagggatttgtatgatgataaggatggattacgaaaggaggagctcaatgccatttcaggacccaatgagtttgctgaattctataatagactcaagcaaataaaggaattccaccggaagcacccaaatgagatctgtgtgccaatgtcagtggaatttgaggaactcctgaaggctcgagagaatccaagtgaagaggcacaaaacttggtggagttcacagatgaagagggatatggtcgttatctcgatctccatgactgttacctcaagtacattaacctgaaggcatctgagaagctggattatatcacatacctgtccatctcttgaccaattatttgacattcctaaagaaaggaagaatgcagagtataagagatacctagagatgctgcttgaggtaccttcagggattacaccagatagagtgaagcctctccaagatccggaatgaacttttcggggaagcattcagggtgaggttgggaagcaatgggggccaatggggacccctttcctggggttggccgaaagaagaaaagcagaggcctgtaccatgggtggggccattttgactcttggggtctcccccgggagggggtgggcgccccggggtgggcggcagggacacgggcccttgctagggg

SEQ ID NO: 82627 - DNA, 929 bp, Homo sapiens
aggcactactcaggtcgaaactaccgagcaggcagcgtccagggccgcgccaggagttgcttccggccgtgttggtggtctgaattgagaagccgcgactaagggaagatggagacaatactggagcagcagcggcgctatcatgaggagaaggaacggctcatggacgtcatggctaaagagatgctcaccaagaagtccacgctccgggaccagatcaattctgatcaccgcactcgggccatgcaagataggtatatggaggtcagtgggaacctgagggatttgtatgatgataaggatggattacgaaaggaggagctcaatgccatttcaggacccaatgagtttgctgaattctataatagactcaagcaaataaaggaattccaccggaagcacccaaatgagatctgtgtgccaatgtcagtggaatttgaggaactcctgaaggctcgagagaatccaagtgaagaggcacaaaacttggtggagttcacagatgaagagggatatggtcgttatctcgatctccatgactgttacctcaagtacattaacctgaaggcatctgagaagctggattatatcacatacctgtccatctcttgaccaattatttgacattcctaaagaaaggaagaatgcagagtataagagatacctagagatgctgcttgaggtaccttcagggattacaccagatagagtgaagcctctccaagatccggaatgaacttttcggggaagcattcagggtgaggttgggaagcaatgggggccaatggggacccctttcctggggttggccgaaagaagaaaagcagaggcctgtaccatgggtggggccattttgactcttggggtctcccccgggagggggtgggcgccccggggtgggcggcagggacacgggcccttgctagggg

SEQ ID NO: 82628 - DNA, 2819 bp, Homo sapiens
aaaattcacgcttatggtacgagccccgttatcggcaggagttgcttccggccgtgttggtggtctgaattgagaagccgcgactaagggaagatggagacaatactggagcagcagcggcgctatcatgaggagaaggaacggctcatggacgtcatggctaaagagatgctcaccaagaagtccacgctccgggaccagatcaattctgatcaccgcactcgggccatgcaagataggtatatggaggtcagtgggaacctgagggatttgtatgatgataaggatggattacgaaaggaggagctcaatgccatttcaggacccaatgagtttgctgaattctataatagactcaagcaaataaaggaattccaccggaagcacccaaatgagatctgtgtgccaatgtcagtggaatttgaggaactcctgaaggctcgagagaatccaagtgaagaggcacaaaacttggtggagttcacagatgaagagggatatggtcgttatctcgatctccatgactgttacctcaagtacattaacctgaaggcatctgagaagctggattatatcacatacctgtccatctttgaccaattatttgacattcctaaagaaaggaagaatgcagagtataagagatacctagagatgctgcttgagtaccttcaggattacacagatagagtgaagcctctccaagatcagaatgaactttttgggaagattcaggctgagtttgagaagaaatgggagaatgggacctttcctggatggccgaaagagacaagcagtgccctgacccatgctggagcccatcttgacctctctgcattctcctcctgggaggagttggcttctctgggtttggacagattgaaatctgctctcttagctttaggcttgaaatgtggcgggaccctagaagagcgagcccagagactattcagtaccaaaggaaagtccctggagtcacttgatacctctttgtttgccaaaaatcccaagtcaaagggcaccaagcgagacactgaaaggaacaaagacattgcttttctagaagcccagatctatgaatatgtagagattctcggggaacagcgacatctcactcatgaaaatgtacagcgcaagcaagccaggacaggagaagagcgagaagaagaggaagaagagcagatcagtgagagtgagagtgaagatgaagagaacgagatcatttacaaccccaaaaacctgccacttggctgggatggcaaacctattccctactggctgtataagcttcatggcctaaatatcaactacaactgtgagatttgtggaaactacacctaccgagggcccaaagccttccagcgacactttgctgaatggcgtcatgctcatggcatgaggtgtttgggcatcccaaacactgctcactttgctaatgtgacacagattgaagatgctgtctccttgtgggccaaactgaaattgcagaaggcttcagaacgatggcagcctgacactgaggaagaatatgaagactcaagtgggaatgttgtgaataagaagacatacgaggatctgaaaagacaaggactgctctagtgttgagggatgtagctcagcttttgggctagcccaggcttccctaagatctgctttttctatttctcccaaccaaatcctcttaaagaccctttgctatgtagtctcatggtctagcatgcatcttgtagaaacaaggcatgctggcagattgcagggttgagatgtgttttatctgttttatattttaaaagattctgccagaaaataaaaccagaccttgttctaaagcccagggttatggaccaactcagtgcttcaggtcttaatgcctccatacctcttcctcaccaactttactagtagctgagatttaatgggcacctattatgctacatatcatgttaggtaaatctgacctgacctctttccccaccctcctttgttgctgcttccctgaatgagtattaccccaggatgaggtctgccatcagcttagttagccattgatgcaaatactagggaaagactaggaggatgagccagggttgctactaaggactaagtgtcgcaccaaggtttgccttttgtatttgcataaagaaaggagttggagctgggtgcagtggcttgtgcctgtagtcccagctacttgggaggctgaggcaggagggttgcttgagactagcctaggtaacatagtgagaccctgtctcattaaaaaaaaaaaaaaaaggcatggtggcacgcactgtagtcccagctactcaggagactgaggctagaagatcctttgaacctaggagtttgagaccagcctgggcgatatagtgaggccccatctcaaaaaaaaaaaaaagcgggtgggggggagttgggctgtgttggaatgggcctgcagcccaacaaacaagggaactaggaccgacagtgacttcaccagcttgctaggtcagaatgagagactggtgggtctgtctacctgtttcttctacaagatccctatttgactgtaaaagtagctaatactcacatgttctccaatcccaggtagccatggtagagttgggtagagttgagcagctgccccaggatccaaatgtggtgtctgaaatggaaagaactaaggcaaccaggaaggcactgatctgccttataagcacagtcatctgaaagtcaggcctgctgcaggacaggatcccccagagaccccatttgcctctcaacactcagaccttcaactgttttttaataaatctactttttaaaaaaaaaaaata

SEQ ID NO: 82629 - DNA, 2938 bp, Homo sapiens
tttcctatgcccgctgaaggcatctgcgaacctctcggcatcgctccaccacacctcccaccagcaggtggcactgtcgccatctccataacatggactggccttccttgtggtgctcctgttttcttaagtcccggggcacttccggcactcgcggaactttggtgcagcctgatgcgcaacgtggggactcaggcgcgctgggcggcaggagttgcttccggccgtgttggtggtctgaattgagaagccgcgactaagggaagatggagacaatactggagcagcagcggcgctatcatgaggagaaggaacggctcatggacgtcatggctaaagagatgctcaccaagaagtccacgctccgggaccagatcaattctgatcaccgcactcgggccatgcaagataggtatatggaggtcagtgggaacctgagggatttgtatgatgataaggatggattacgaaaggaggagctcaatgccatttcaggacccaatgagtttgctgaattctataatagactcaagcaaataaaggaattccaccggaagcacccaaatgagatctgtgtgccaatgtcagtggaatttgaggaactcctgaaggctcgagagaatccaagtgaagaggcacaaaacttggtggagttcacagatgaagagggatatggtcgttatctcgatctccatgactgttacctcaagtacattaacctgaaggcatctgagaagctggattatatcacatacctgtccatctttgaccaattatttgacattcctaaagaaaggaagaatgcagagtataagagatacctagagatgctgcttgagtaccttcaggattacacagatagagtgaagcctctccaagatcagaatgaactttttgggaagattcaggctgagtttgagaagaaatgggagaatgggacctttcctggatggccgaaagagacaagcagtgccctgacccatgctggagcccatcttgacctctctgcattctcctcctgggaggagttggcttctctgggtttggacagattgaaatctgctctcttagctttaggcttgaaatgtggcgggaccctagaagagcgagcccagagactattcagtaccaaaggaaagtccctggagtcacttgatacctctttgtttgccaaaaatcccaagtcaaagggcaccaagcgagacactgaaaggaacaaagacattgcttttctagaagcccagatctatgaatatgtagagattctcggggaacagcgacatctcactcatgaaaatgtacagcgcaagcaagccaggacaggagaagagcgagaagaagaggaagaagagcagatcagtgagagtgagagtgaagatgaagagaacgagatcatttacaaccccattcatggcctaaatatcaactacaactgtgagatttgtggaaactacacctaccgagggcccaaagccttccagcgacactttgctgaatggcgtcatgctcatggcatgaggtgtttgggcatcccaaacactgctcactttgctaatgtgacacagattgaagatgctgtctccttgtgggccaaactgaaattgcagaaggcttcagaacgatggcagcctgacactgaggaagaatatgaagactcaagtgggaatgttgtgaataagaagacatacgaggatctgaaaagacaaggactgctctagtgttgagggatgtagctcagcttttgggctagcccaggcttccctaagatctgctttttctatttctcccaaccaaatcctcttaaagaccctttgctatgtagtctcatggtctagcatgcatcttgtagaaacaaggcatgctggcagattgcagggttgagatgtgttttatctgttttatattttaaaagattctgccagaaaataaaaccagaccttgttctaaagcccagggttatggaccaactcagtgcttcaggtcttaatgcctccatacctcttcctcaccaactttactagtagctgagatttaatgggcacctattatgctacatatcatgttaggtaaatctgacctgacctctttccccaccctcctttgttgctgcttccctgaatgagtattaccccaggatgaggtctgccatcagcttagttagccattgatgcaaatactagggaaagactaggaggatgagccagggttgctactaaggactaagtgtcgcaccaaggtttgccttttgtatttgcataaagaaaggagttggagctgggtgcagtggcttgtgcctgtagtcccagctacttgggaggctgaggcaggagggttgcttgagactagcctaggtaacatagtgagaccctgtctcattaaaaaaaaaaaaaaaaggcatggtggcacgcactgtagtcccagctactcaggagactgaggctagaagatcctttgaacctaggagtttgagaccagcctgggcgatatagtgaggccccatctcaaaaaaaaaaaaaagcgggtgggggggagttgggctgtgttggaatgggcctgcagcccaacaaacaagggaactaggaccgacagtgacttcaccagcttgctaggtcagaatgagagactggtgggtctgtctacctgtttcttctacaagatccctatttgactgtaaaagtagctaatactcacatgttctccaatcccaggtagccatggtagagttgggtagagttgagcagctgccccaggatccaaatgtggtgtctgaaatggaaagaactaaggcaaccaggaaggcactgatctgccttataagcacagtcatctgaaagtcaggcctgctgcaggacaggatcccccagagaccccatttgcctctcaacactcagaccttcaactgttttttaataaatctactttttaaaaaaaaaaaata

SEQ ID NO: 82630 - DNA, 2834 bp, Homo sapiens
tttcctatgcccgctgaaggcatctgcgaacctctcggcatcgctccaccacacctcccaccagcaggtggcactgtcgccatctccataacatggactggccttccttgtggtgctcctgttttcttaagtcccggggcacttccggcactcgcggaactttggtgcagcctgatgcgcaacgtggggactcaggcgcgctgggcggcaggagttgcttccggccgtgttggtggtctgaattgagaagccgcgactaagggaagatggagacaatactggagcagcagcggcgctatcatgaggagaaggaacggctcatggacgtcatggctaaagagatgctcaccaagaagtccacgctccgggaccagatcaattctgatcaccgcactcgggccatgcaagataggtatatggaggtcagtgggaacctgagggatttgtatgatgataaggatggattacgaaaggaggagctcaatgccatttcaggacccaatgagtttgctgaattctataatagactcaagcaaataaaggaattccaccggaagcacccaaatgagatctgtgtgccaatgtcagtggaatttgaggaactcctgaaggctcgagagaatccaagtgaagaggcacaaaacttggtggagttcacagatgaagagggatatggtcgttatctcgatctccatgactgttacctcaagtacattaacctgaaggcatctgagaagctggattatatcacatacctgtccatctttgaccaattatttgacattcctaaagaaaggaagaatgcagagtataagagatacctagagatgctgcttgagtaccttcaggattacacagatagagtgaagcctctccaagatcagaatgaactttttgggaagattcaggctgagtttgagaagaaatgggagaatgggacctttcctggatggccgaaagagacaagcagtgccctgacccatgctggagcccatcttgacctctctgcattctcctcctgggaggagttggcttctctgggtttggacagattgaaatctgctctcttagctttaggcttgaaatgtggcgggaccctagaagagcgagcccagagactattcagtaccaaaggaaagtccctggagtcacttgatacctctttgtttgccaaaaatcccaagtcaaagggcaccaagcgagacactgaaaggaacaaagacattgcttttctagaagcccagatctatgaatatgtagagattctcggggaacagcgacatctcactcatgaaaatgtacagcgcaagcaagccaggacaggagaagagcgagaagaagaggaagaagagcagatcagtgagagtgagagtgaagatgaagagaacgagatcatttacaaccccaaaaacctgccacttggctgggatggcaaacctattccctactggctgtataagcttcatggcctaaatatcaactacaactgtgagatttgtggaaactacacctaccgagggcccaaagccttccagcgacactttgctgaatggcgtcatgctcatggcatgaggtgtttgggcatcccaaacactgctcactttgctaatgtgacacagattgaagatgctgtctccttgtgggccaaactgaaattgcagaaggcttcagaacgatggcagcctgacactgaggaagaatatgaagactcaagtgggaatgttgtgaataagaagacatacgaggatctgaaaagacaaggactgctctagtgttgagggatgtagctcagcttttgggctagcccaggcttccctaagatctgctttttctatttctcccaaccaaatcctcttaaagaccctttgctatgtagtctcatggtctagcatgcatcttgtagaaacaaggcatgctggcagattgcagggttgagatgtgttttatctgttttatattttaaaagattctgccagaaaataaaaccagaccttgttctaaagcccagggttatggaccaactcagtgcttcaggtcttaatgcctccatacctcttcctcaccaactttactagtagctgagatttaatgggcacctattatggctactaaggactaagtgtcgcaccaaggtttgccttttgtatttgcataaagaaaggagttggagctgggtgcagtggcttgtgcctgtagtcccagctacttgggaggctgaggcaggagggttgcttgagactagcctaggtaacatagtgagaccctgtctcattaaaaaaaaaaaaaaaaggcatggtggcacgcactgtagtcccagctactcaggagactgaggctagaagatcctttgaacctaggagtttgagaccagcctgggcgatatagtgaggccccatctcaaaaaaaaaaaaaagcgggtgggggggagttgggctgtgttggaatgggcctgcagcccaacaaacaagggaactaggaccgacagtgacttcaccagcttgctaggtcagaatgagagactggtgggtctgtctacctgtttcttctacaagatccctatttgactgtaaaagtagctaatactcacatgttctccaatcccaggtagccatggtagagttgggtagagttgagcagctgccccaggatccaaatgtggtgtctgaaatggaaagaactaaggcaaccaggaaggcactgatctgccttataagcacagtcatctgaaagtcaggcctgctgcaggacaggatcccccagagaccccatttgcctctcaacactcagaccttcaactgttttttaataaatctactttttaaaaaaaaaaaata

SEQ ID NO: 82631 - DNA, 2499 bp, Homo sapiens
tttcctatgcccgctgaaggcatctgcgaacctctcggcatcgctccaccacacctcccaccagcaggtggcactgtcgccatctccataacatggactggccttccttgtggtgctcctgttttcttaagtcccggggcacttccggcactcgcggaactttggtgcagcctgatgcgcaacgtggggactcaggcgcgctgggcggcaggagttgcttccggccgtgttggtggtctgaattgagaagccgcgactaagggaagatggagacaatactggagcagcagcggcgctatcatgaggagaaggaacggctcatggacgtcatggctaaagagatgctcaccaagaagtccacgctccgggaccagatcaattctgatcaccgcactcgggccatgcaagataggtatatggaggtcagtgggaacctgagggatttgtatgatgataaggatggattacgaaaggaggagctcaatgccatttcaggacccaatgagtttgctgaattctataatagactcaagcaaataaaggaattccaccggaagcacccaaatgagatctgtgtgccaatgtcagtggaatttgaggaactcctgaaggctcgagagaatccaagtgaagaggcacaaaacttggtggagttcacagatgaagagggatatggtcgttatctcgatctccatgactgttacctcaagtacattaacctgaaggcatctgagaagctggattatatcacatacctgtccatctttgaccaattatttgacattcctaaagaaaggaagaatgcagagtataagagatacctagagatgctgcttgagtaccttcaggattacacagatagagtgaagcctctccaagatcagaatgaactttttgggaagattcaggctgagtttgagaagaaatgggagaatgggacctttcctggatggccgaaagagacaagcagtgccctgacccatgctggagcccatcttgacctctctgcattctcctcctgggaggagttggcttctctgggtttggacagattgaaatctgctctcttagctttaggcttgaaatgtggcgggaccctagaagagcgagcccagagactattcagtaccaaaggaaagtccctggagtcacttgatacctctttgtttgccaaaaatcccaagtcaaagggcaccaagcggaagaatatgaagactcaagtgggaatgttgtgaataagaagacatacgaggatctgaaaagacaaggactgctctagtgttgagggatgtagctcagcttttgggctagcccaggcttccctaagatctgctttttctatttctcccaaccaaatcctcttaaagaccctttgctatgtagtctcatggtctagcatgcatcttgtagaaacaaggcatgctggcagattgcagggttgagatgtgttttatctgttttatattttaaaagattctgccagaaaataaaaccagaccttgttctaaagcccagggttatggaccaactcagtgcttcaggtcttaatgcctccatacctcttcctcaccaactttactagtagctgagatttaatgggcacctattatgctacatatcatgttaggtaaatctgacctgacctctttccccaccctcctttgttgctgcttccctgaatgagtattaccccaggatgaggtctgccatcagcttagttagccattgatgcaaatactagggaaagactaggaggatgagccagggttgctactaaggactaagtgtcgcaccaaggtttgccttttgtatttgcataaagaaaggagttggagctgggtgcagtggcttgtgcctgtagtcccagctacttgggaggctgaggcaggagggttgcttgagactagcctaggtaacatagtgagaccctgtctcattaaaaaaaaaaaaaaaaggcatggtggcacgcactgtagtcccagctactcaggagactgaggctagaagatcctttgaacctaggagtttgagaccagcctgggcgatatagtgaggccccatctcaaaaaaaaaaaaaagcgggtgggggggagttgggctgtgttggaatgggcctgcagcccaacaaacaagggaactaggaccgacagtgacttcaccagcttgctaggtcagaatgagagactggtgggtctgtctacctgtttcttctacaagatccctatttgactgtaaaagtagctaatactcacatgttctccaatcccaggtagccatggtagagttgggtagagttgagcagctgccccaggatccaaatgtggtgtctgaaatggaaagaactaaggcaaccaggaaggcactgatctgccttataagcacagtcatctgaaagtcaggcctgctgcaggacaggatcccccagagaccccatttgcctctcaacactcagaccttcaactgttttttaataaatctactttttaaaaaaaaaaaata

SEQ ID NO: 82632 - DNA, 1935 bp, Homo sapiens
tttcctatgcccgctgaaggcatctgcgaacctctcggcatcgctccaccacacctcccaccagcaggtggcactgtcgccatctccataacatggactggccttccttgtggtgctcctgttttcttaagtcccggggcacttccggcactcgcggaactttggtgcagcctgatgcgcaacgtggggactcaggcgcgctgggcggcaggagttgcttccggccgtgttggtggtctgaattgagaagccgcgactaagggaagatggagacaatactggagcagcagcggcgctatcatgaggagaaggaacggctcatggacgtcatggctaaagagatgctcaccaagaagtccacgctccgggaccagatcaattctgatcaccgcactcgggccatgcaagataggtatatggaggtcagtgggaacctgagggatttgtatgatgataaggatggattacgaaaggaggagctcaatgccatttcaggacccaatgagtttgctgaattctataatagactcaagcaaataaaggaattccaccggaagcacccaaatgagatctgtgtgccaatgtcagtggaatttgaggaactcctgaaggctcgagagaatccaagtgaagaggcacaaaacttggtggagttcacagatgaagagggatatggtcgttatctcgatctccatgactgttacctcaagtacattaacctgaaggcatctgagaagctggattatatcacatacctgtccatctttgaccaattatttgacattcctaaagaaaggaagaatgcagagtataagagatacctagagatgctgcttgagtaccttcaggattacacagatagagtgaagcctctccaagatcagaatgaactttttgggaagattcaggctgagtttgagaagaaatgggagaatgggacctttcctggatggccgaaagagacaagcagtgccctgacccatgctggagcccatcttgacctctctgcattctcctcctgggaggagttggcttctctgggtttggacagattgaaatctgctctcttagctttaggcttgaaatgtggcgggaccctagaagagcgagcccagagactattcagtaccaaaggaaagtccctggagtcacttgatacctctttgtttgccaaaaatcccaagtcaaagggcaccaagcgagacactgaaaggaacaaagacattgcttttctagaagcccagatctatgaatatgtagagattctcggggaacagcgacatctcactcatgaaaatgtacactacttgggaggctgaggcaggagggttgcttgagactagcctaggtaacatagtgagaccctgtctcattaaaaaaaaaaaaaaaaggcatggtggcacgcactgtagtcccagctactcaggagactgaggctagaagatcctttgaacctaggagtttgagaccagcctgggcgatatagtgaggccccatctcaaaaaaaaaaaaaagcgggtgggggggagttgggctgtgttggaatgggcctgcagcccaacaaacaagggaactaggaccgacagtgacttcaccagcttgctaggtcagaatgagagactggtgggtctgtctacctgtttcttctacaagatccctatttgactgtaaaagtagctaatactcacatgttctccaatcccaggtagccatggtagagttgggtagagttgagcagctgccccaggatccaaatgtggtgtctgaaatggaaagaactaaggcaaccaggaaggcactgatctgccttataagcacagtcatctgaaagtcaggcctgctgcaggacaggatcccccagagaccccatttgcctctcaacactcagaccttcaactgttttttaataaatctactttttaaaaaaaaaaaata

SEQ ID NO: 82633 - DNA, 2833 bp, Homo sapiens
tttcctatgcccgctgaaggcatctgcgaacctctcggcatcgctccaccacacctcccaccagcaggtggcactgtcgccatctccataacatggactggccttccttgtggtgctcctgttttcttaagtcccggggcacttccggcactcgcggaactttggtgcagcctgatgcgcaacgtggggactcaggcgcgctgggcggcaggagttgcttccggccgtgttggtggtctgaattgagaagccgcgactaagggaagatggagacaatactggagcagcagcggcgctatcatgaggagaaggaacggctcatggacgtcatggctaaagagatgctcaccaagaagtccacgctccgggaccagatcaattctgatcaccgcactcgggccatgcaagatatctgtgtgccaatgtcagtggaatttgaggaactcctgaaggctcgagagaatccaagtgaagaggcacaaaacttggtggagttcacagatgaagagggatatggtcgttatctcgatctccatgactgttacctcaagtacattaacctgaaggcatctgagaagctggattatatcacatacctgtccatctttgaccaattatttgacattcctaaagaaaggaagaatgcagagtataagagatacctagagatgctgcttgagtaccttcaggattacacagatagagtgaagcctctccaagatcagaatgaactttttgggaagattcaggctgagtttgagaagaaatgggagaatgggacctttcctggatggccgaaagagacaagcagtgccctgacccatgctggagcccatcttgacctctctgcattctcctcctgggaggagttggcttctctgggtttggacagattgaaatctgctctcttagctttaggcttgaaatgtggcgggaccctagaagagcgagcccagagactattcagtaccaaaggaaagtccctggagtcacttgatacctctttgtttgccaaaaatcccaagtcaaagggcaccaagcgagacactgaaaggaacaaagacattgcttttctagaagcccagatctatgaatatgtagagattctcggggaacagcgacatctcactcatgaaaatgtacagcgcaagcaagccaggacaggagaagagcgagaagaagaggaagaagagcagatcagtgagagtgagagtgaagatgaagagaacgagatcatttacaaccccaaaaacctgccacttggctgggatggcaaacctattccctactggctgtataagcttcatggcctaaatatcaactacaactgtgagatttgtggaaactacacctaccgagggcccaaagccttccagcgacactttgctgaatggcgtcatgctcatggcatgaggtgtttgggcatcccaaacactgctcactttgctaatgtgacacagattgaagatgctgtctccttgtgggccaaactgaaattgcagaaggcttcagaacgatggcagcctgacactgaggaagaatatgaagactcaagtgggaatgttgtgaataagaagacatacgaggatctgaaaagacaaggactgctctagtgttgagggatgtagctcagcttttgggctagcccaggcttccctaagatctgctttttctatttctcccaaccaaatcctcttaaagaccctttgctatgtagtctcatggtctagcatgcatcttgtagaaacaaggcatgctggcagattgcagggttgagatgtgttttatctgttttatattttaaaagattctgccagaaaataaaaccagaccttgttctaaagcccagggttatggaccaactcagtgcttcaggtcttaatgcctccatacctcttcctcaccaactttactagtagctgagatttaatgggcacctattatgctacatatcatgttaggtaaatctgacctgacctctttccccaccctcctttgttgctgcttccctgaatgagtattaccccaggatgaggtctgccatcagcttagttagccattgatgcaaatactagggaaagactaggaggatgagccagggttgctactaaggactaagtgtcgcaccaaggtttgccttttgtatttgcataaagaaaggagttggagctgggtgcagtggcttgtgcctgtagtcccagctacttgggaggctgaggcaggagggttgcttgagactagcctaggtaacatagtgagaccctgtctcattaaaaaaaaaaaaaaaaggcatggtggcacgcactgtagtcccagctactcaggagactgaggctagaagatcctttgaacctaggagtttgagaccagcctgggcgatatagtgaggccccatctcaaaaaaaaaaaaaagcgggtgggggggagttgggctgtgttggaatgggcctgcagcccaacaaacaagggaactaggaccgacagtgacttcaccagcttgctaggtcagaatgagagactggtgggtctgtctacctgtttcttctacaagatccctatttgactgtaaaagtagctaatactcacatgttctccaatcccaggtagccatggtagagttgggtagagttgagcagctgccccaggatccaaatgtggtgtctgaaatggaaagaactaaggcaaccaggaaggcactgatctgccttataagcacagtcatctgaaagtcaggcctgctgcaggacaggatcccccagagaccccatttgcctctcaacactcagaccttcaactgttttttaataaatctactttttaaaaaaaaaaaata

SEQ ID NO: 82634 - DNA, 2641 bp, Homo sapiens
gacataagtgcataggtacgaggcctggctgtaaatcggccgaggctgaattgagaagccgcgactaagggaagatggagacaatactggagcagcagcggcgctatcatgaggagaaggaacggctcatggacgtcatggctaaagagatgctcaccaagaagtccacgctccgggaccagatcaattctgatcaccgcactcgggccatgcaagatatctgtgtgccaatgtcagtggaatttgaggaactcctgaaggctcgagagaatccaagtgaagaggcacaaaacttggtggagttcacagatgaagagggatatggtcgttatctcgatctccatgactgttacctcaagtacattaacctgaaggcatctgagaagctggattatatcacatacctgtccatctttgaccaattatttgacattcctaaagaaaggaagaatgcagagtataagagatacctagagatgctgcttgagtaccttcaggattacacagatagagtgaagcctctccaagatcagaatgaactttttgggaagattcaggctgagtttgagaagaaatgggagaatgggacctttcctggatggccgaaagagacaagcagtgccctgacccatgctggagcccatcttgacctctctgcattctcctcctgggaggagttggcttctctgggtttggacagattgaaatctgctctcttagctttaggcttgaaatgtggcgggaccctagaagagcgagcccagagactattcagtaccaaaggaaagtccctggagtcacttgatacctctttgtttgccaaaaatcccaagtcaaagggcaccaagcgagacactgaaaggaacaaagacattgcttttctagaagcccagatctatgaatatgtagagattctcggggaacagcgacatctcactcatgaaaatgtacagcgcaagcaagccaggacaggagaagagcgagaagaagaggaagaagagcagatcagtgagagtgagagtgaagatgaagagaacgagatcatttacaaccccaaaaacctgccacttggctgggatggcaaacctattccctactggctgtataagcttcatggcctaaatatcaactacaactgtgagatttgtggaaactacacctaccgagggcccaaagccttccagcgacactttgctgaatggcgtcatgctcatggcatgaggtgtttgggcatcccaaacactgctcactttgctaatgtgacacagattgaagatgctgtctccttgtgggccaaactgaaattgcagaaggcttcagaacgatggcagcctgacactgaggaagaatatgaagactcaagtgggaatgttgtgaataagaagacatacgaggatctgaaaagacaaggactgctctagtgttgagggatgtagctcagcttttgggctagcccaggcttccctaagatctgctttttctatttctcccaaccaaatcctcttaaagaccctttgctatgtagtctcatggtctagcatgcatcttgtagaaacaaggcatgctggcagattgcagggttgagatgtgttttatctgttttatattttaaaagattctgccagaaaataaaaccagaccttgttctaaagcccagggttatggaccaactcagtgcttcaggtcttaatgcctccatacctcttcctcaccaactttactagtagctgagatttaatgggcacctattatgctacatatcatgttaggtaaatctgacctgacctctttccccaccctcctttgttgctgcttccctgaatgagtattaccccaggatgaggtctgccatcagcttagttagccattgatgcaaatactagggaaagactaggaggatgagccagggttgctactaaggactaagtgtcgcaccaaggtttgccttttgtatttgcataaagaaaggagttggagctgggtgcagtggcttgtgcctgtagtcccagctacttgggaggctgaggcaggagggttgcttgagactagcctaggtaacatagtgagaccctgtctcattaaaaaaaaaaaaaaaaggcatggtggcacgcactgtagtcccagctactcaggagactgaggctagaagatcctttgaacctaggagtttgagaccagcctgggcgatatagtgaggccccatctcaaaaaaaaaaaaaagcgggtgggggggagttgggctgtgttggaatgggcctgcagcccaacaaacaagggaactaggaccgacagtgacttcaccagcttgctaggtcagaatgagagactggtgggtctgtctacctgtttcttctacaagatccctatttgactgtaaaagtagctaatactcacatgttctccaatcccaggtagccatggtagagttgggtagagttgagcagctgccccaggatccaaatgtggtgtctgaaatggaaagaactaaggcaaccaggaaggcactgatctgccttataagcacagtcatctgaaagtcaggcctgctgcaggacaggatcccccagagaccccatttgcctctcaacactcagaccttcaactgttttttaataaatctactttttaaaaaaaaaaaata

SEQ ID NO: 82635 - DNA, 1892 bp, Homo sapiens
tttcctatgcccgctgaaggcatctgcgaacctctcggcatcgctccaccacacctcccaccagcaggtggcactgtcgccatctccataacatggactggccttccttgtggtgctcctgttttcttaagtcccggggcacttccggcactcgcggaactttggtgcagcctgatgcgcaacgtggggactcaggcgcgctgggcggcaggagttgcttccggccgtgttggtggtctgaattgagaagccgcgactaagggaagatggagacaatactggagcagcagcggcgctatcatgaggagaaggaacggctcatggacgtcatggctaaagagatgctcaccaagaagtccacgctccgggaccagatcaattctgatcaccgcactcgggccatgcaagataggtatatggaggtcagtgggaacctgagggatttgtatgatgataaggatggattacgaaaggaggagctcaatgccatttcaggacccaatgagtttgctgaattctataatagactcaagcaaataaaggaattccaccggaagcacccaaatgagatctgtgtgccaatgtcagtggaatttgaggaactcctgaaggctcgagagaatccaagtgaagaggcacaaaacttggtggagttcacagatgaagagggatatggtcgttatctcgatctccatgactgttacctcaagtacattaacctgaaggcatctgagaagctggattatatcacatacctgtccatctttgaccaattatttgacattcctaaagaaaggaagaatgcagagtataagagatacctagagatgctgcttgagtaccttcaggattacacagatagagtgaagcctctccaagatcagaatgaactttttgggaagattcaggctgagtttgagaagaaatgggagaatgggacctttcctggatggccgaaagagacaagcagtgccctgacccatgctggagcccatcttgacctctctgcattctcctcctgggaggagttggcttctctgggtttggacagattgaaatctgctctcttagctttaggcttgaaatgtggcgggaccctagaagagcgagcccagagactattcagtaccaaaggaaagtccctggagtcacttgatacctctttgtttgccaaaaatcccaagtcaaagggcaccaagcgagacactgaaaggaacaaagacattgcttttctagaagcccagatctatgaatatgtagagattctcggggaacagcgacatctcactcatgaaaatgtacagcgcaagcaagccaggacaggagaagagcgagaagaagaggaagaagagcagatcagtgagagtgagagtgaagatgaagagaacgagatcatttacaaccccaaaaacctgccacttggctgggatggcaaacctattccctactggctgtataagcttcatggcctaaatatcaactacaactgtgagatttgtggaaactacacctaccgagggcccaaagccttccagcgacactttgctgaatggcgtcatgctcatggcatgaggtgtttgggcatcccaaacactgctcactttgctaatgtgacacagattgaagatgctgtctcctgaagaatatgaagactcaagtgggaatgttgtgaataagaagacatacgaggattagcccaggcttccctaagatctgctttttctatttctcccaaccaaatcctcttaaagaccctttgctatgtagtctcatggtctagcatgcatcttgtagaaacaaggcatgctggcagattgcagggttgagatgtgttttatctgttttatattttaaaagattctgccagaaaataaaaccagaccttgttctaa

SEQ ID NO: 82636 - DNA, 1575 bp, Homo sapiens
tttcctatgcccgctgaaggcatctgcgaacctctcggcatcgctccaccacacctcccaccagcaggtggcactgtcgccatctccataacatggactggccttccttgtggtgctcctgttttcttaagtcccggggcacttccggcactcgcggaactttggtgcagcctgatgcgcaacgtggggactcaggcgcgctgggcggcaggagttgcttccggccgtgttggtggtctgaattgagaagccgcgactaagggaagatggagacaatactggagcagcagcggcgctatcatgaggagaaggaacggctcatggacgtcatggctaaagagatgctcaccaagaagtccacgctccgggaccagatcaattctgatcaccgcactcgggccatgcaagataggtatatggaggtcagtgggaacctgagggatttgtatgatgataaggatggattacgaaaggaggagctcaatgccatttcaggacccaatgagtttgctgaattctataatagactcaagcaaataaaggaattccaccggaagcacccaaatgagatctgtgtgccaatgtcagtggaatttgaggaactcctgaaggctcgagagaatccaagtgaagaggcacaaaacttggtggagttcacagatgaagagggatatggtcgttatctcgatctccatgactgttacctcaagtacattaacctgaaggcatctgagaagctggattatatcacatacctgtccatctttgaccaattatttgacattcctaaagaaaggaagaatgcagagtataagagatacctagagatgctgcttgagtaccttcaggattacacagatagagtgaagcctctccaagatcagaatgaactttttgggaagattcaggctgagtttgagaagaaatgggagaatgggacctttcctggatggccgaaagagacaagcagtgccctgacccatgctggagcccatcttgacctctctgcattctcctcctgggaggagttggcttctctgggtttggacagattgaaatctgctctcttagctttaggcttgaaatgtggcgggaccctagaagagcgagcccagagactattcagtaccaaaggaaagtccctggagtcacttgatacctctttgtttgccaaaaatcccaagtcaaagggcaccaagcgagacactgaaaggaacaaagacattgcttttctagaagcccagatctatgaatatgtagagattctcggggaacagcgacatctcactcatgaaaatgtacagcgcaagcaagccaggacaggagaagagcgagaagaagaggaagaagagcagatcagtgagagtgagagtgaagatgaagagaacgagatcatttacaaccccaaaaacctgccacttggctgggatggcaaacctattccctactggctgtataagcttcatggcctaaatatcaactacaactgtgagatttgtggaaactacacctaccgagggcccaaagccttccagcgacactttgctaatttgaccatcaggctcacggcactga

SEQ ID NO: 82637 - DNA, 2240 bp, Homo sapiens
ggaataacaagataccaaaaatagaaaccctttttgctttgtctgcattgtgtgttcctctgtagatacctagagatgctgcttgagtaccttcaggattacacagatagagtgaagcctctccaagatcagaatgaactttttgggaagattcaggctgagtttgagaagaaatgggagaatgggacctttcctggatggccgaaagagacaagcagtgccctgacccatgctggagcccatcttgacctctctgcattctcctcctgggaggagttggcttctctgggtttggacagattgaaatctgctctcttagctttaggcttgaaatgtggcgggaccctagaagagcgagcccagagactattcagtaccaaaggaaagtccctggagtcacttgatacctctttgtttgccaaaaatcccaagtcaaagggcaccaagcgagacactgaaaggaacaaagacattgcttttctagaagcccagatctatgaatatgtagagattctcggggaacagcgacatctcactcatgaaaatgtacagcgcaagcaagccaggacaggagaagagcgagaagaagaggaagaagagcagatcagtgagagtgagagtgaagatgaagagaacgagatcatttacaaccccaaaaacctgccacttggctgggatggcaaacctattccctactggctgtataagcttcatggcctaaatatcaactacaactgtgagatttgtggaaactacacctaccgagggcccaaagccttccagcgacactttgctgaatggcgtcatgctcatggcatgaggtgtttgggcatcccaaacactgctcactttgctaatgtgacacagattgaagatgctgtctccttgtgggccaaactgaaattgcagaaggcttcagaacgatggcagcctgacactgaggaagaatatgaagactcaagtgggaatgttgtgaataagaagacatacgaggatctgaaaagacaaggactgctctagtgttgagggatgtagctcagcttttgggctagcccaggcttccctaagatctgctttttctatttctcccaaccaaatcctcttaaagaccctttgctatgtagtctcatggtctagcatgcatcttgtagaaacaaggcatgctggcagattgcagggttgagatgtgttttatctgttttatattttaaaagattctgccagaaaataaaaccagaccttgttctaaagcccagggttatggaccaactcagtgcttcaggtcttaatgcctccatacctcttcctcaccaactttactagtagctgagatttaatgggcacctattatgctacatatcatgttaggtaaatctgacctgacctctttccccaccctcctttgttgctgcttccctgaatgagtattaccccaggatgaggtctgccatcagcttagttagccattgatgcaaatactagggaaagactaggaggatgagccagggttgctactaaggactaagtgtcgcaccaaggtttgccttttgtatttgcataaagaaaggagttggagctgggtgcagtggcttgtgcctgtagtcccagctacttgggaggctgaggcaggagggttgcttgagactagcctaggtaacatagtgagaccctgtctcattaaaaaaaaaaaaaaaaggcatggtggcacgcactgtagtcccagctactcaggagactgaggctagaagatcctttgaacctaggagtttgagaccagcctgggcgatatagtgaggccccatctcaaaaaaaaaaaaaagcgggtgggggggagttgggctgtgttggaatgggcctgcagcccaacaaacaagggaactaggaccgacagtgacttcaccagcttgctaggtcagaatgagagactggtgggtctgtctacctgtttcttctacaagatccctatttgactgtaaaagtagctaatactcacatgttctccaatcccaggtagccatggtagagttgggtagagttgagcagctgccccaggatccaaatgtggtgtctgaaatggaaagaactaaggcaaccaggaaggcactgatctgccttataagcacagtcatctgaaagtcaggcctgctgcaggacaggatcccccagagaccccatttgcctctcaacactcagaccttcaactgttttttaataaatctactttttaaaaaaaaaaaata

SEQ ID NO: 82638 - DNA, 2271 bp, Homo sapiens
ctggagagtttagacttactgctagattggctgtgaaatgtgtggtcctgccacagcctcaggaacacccaccctctggcctgcatttggggtttcccaaaaatctgttaatgtaatattgtgatttttctcttctttgtataggagttggcttctctgggtttggacagattgaaatctgctctcttagctttaggcttgaaatgtggcgggtaaggaatagtttttctatcaaaactatcgatttactgtgtgtttgcacagtcttctaagtagctctgattccattttttttgttgctccacactgcaaaaataagccagcctgtgtggtaaagtaaccctaaaatcctttgccgtcctgtctccttaggaccctagaagagcgagcccagagactattcagtaccaaaggaaagtccctggagtcacttgatacctctttgtttgccaaaaatcccaagtcaaagggcaccaagcgagacactgaaaggaacaaagacattgcttttctagaagcccagatctatgaatatgtagagattctcggggaacagcgacatctcactcatgaaaatgtacagcgcaagcaagccaggacaggagaagagcgagaagaagaggaagaagagcagatcagtgagagtgagagtgaagatgaagagaacgagatcatttacaaccccaaaaacctgccacttggctgggatggcaaacctattccctactggctgtataagcttcatggcctaaatatcaactacaactgtgagatttgtggaaactacacctaccgagggcccaaagccttccagcgacactttgctgaatggcgtcatgctcatggcatgaggtgtttgggcatcccaaacactgctcactttgctaatgtgacacagattgaagatgctgtctccttgtgggccaaactgaaattgcagaaggcttcagaacgatggcagcctgacactgaggaagaatatgaagactcaagtgggaatgttgtgaataagaagacatacgaggatctgaaaagacaaggactgctctagtgttgagggatgtagctcagcttttgggctagcccaggcttccctaagatctgctttttctatttctcccaaccaaatcctcttaaagaccctttgctatgtagtctcatggtctagcatgcatcttgtagaaacaaggcatgctggcagattgcagggttgagatgtgttttatctgttttatattttaaaagattctgccagaaaataaaaccagaccttgttctaaagcccagggttatggaccaactcagtgcttcaggtcttaatgcctccatacctcttcctcaccaactttactagtagctgagatttaatgggcacctattatgctacatatcatgttaggtaaatctgacctgacctctttccccaccctcctttgttgctgcttccctgaatgagtattaccccaggatgaggtctgccatcagcttagttagccattgatgcaaatactagggaaagactaggaggatgagccagggttgctactaaggactaagtgtcgcaccaaggtttgccttttgtatttgcataaagaaaggagttggagctgggtgcagtggcttgtgcctgtagtcccagctacttgggaggctgaggcaggagggttgcttgagactagcctaggtaacatagtgagaccctgtctcattaaaaaaaaaaaaaaaaggcatggtggcacgcactgtagtcccagctactcaggagactgaggctagaagatcctttgaacctaggagtttgagaccagcctgggcgatatagtgaggccccatctcaaaaaaaaaaaaaagcgggtgggggggagttgggctgtgttggaatgggcctgcagcccaacaaacaagggaactaggaccgacagtgacttcaccagcttgctaggtcagaatgagagactggtgggtctgtctacctgtttcttctacaagatccctatttgactgtaaaagtagctaatactcacatgttctccaatcccaggtagccatggtagagttgggtagagttgagcagctgccccaggatccaaatgtggtgtctgaaatggaaagaactaaggcaaccaggaaggcactgatctgccttataagcacagtcatctgaaagtcaggcctgctgcaggacaggatcccccagagaccccatttgcctctcaacactcagaccttcaactgttttttaataaatctactttttaaaaaaaaaaaata

SEQ ID NO: 82639 - DNA, 1668 bp, Homo sapiens
tttcctatgcccgctgaaggcatctgcgaacctctcggcatcgctccaccacacctcccaccagcaggtggcactgtcgccatctccataacatggactggccttccttgtggtgctcctgttttcttaagtcccggggcacttccggcactcgcggaactttggtgcagcctgatgcgcaacgtggggactcaggcgcgctgggcggcaggagttgcttccggccgtgttggtggtctgaattgagaagccgcgactaagggaagatggagacaatactggagcagcagcggcgctatcatgaggagaaggaacggctcatggacgtcatggctaaagagatgctcaccaagaagtccacgctccgggaccagatcaattctgatcaccgcactcgggccatgcaagataggtatatggaggtcagtgggaacctgagggatttgtatgatgataaggatggattacgaaaggaggagctcaatgccatttcaggacccaatgagtttgctgaattctataatagactcaagcaaataaaggaattccaccggaagcacccaaatgagatctgtgtgccaatgtcagtggaatttgaggaactcctgaaggctcgagagaatccaagtgaagaggcacaaaacttggtggagttcacagatgaagagggatatggtcgttatctcgatctccatgactgttacctcaagtacattaacctgaaggcatctgagaagctggattatatcacatacctgtccatctttgaccaattatttgacattcctaaagaaaggaagaatgcagagtataagagatacctagagatgctgcttgagtaccttcaggattacacagatagagtgaagcctctccaagatcagaatgaactttttgggaagattcaggctgagtttgagaagaaatgggagaatgggacctttcctggatggccgaaagagacaagcagtgccctgacccatgctggagcccatcttgacctctctgcattctcctcctgggaggagttggcttctctgggtttggacagattgaaatctgctctcttagctttaggcttgaaatgtggcgggtaaggaatagtttttctatcaaaactatcgatttactgtgtgtttgcacagtcttctaagtagctctgattccattttttttgttgctccacactgcaaaaataagccagcctgtgtggtaaagtaaccctaaaatcctttgccgtcctgtctccttaggaccctagaagagcgagcccagagactattcagtaccaaaggaaagtccctggagtcacttgatacctctttgtttgccaaaaatcccaagtcaaagggcaccaagcggaagaatatgaagactcaagtgggaatgttgtgaataagaagacatacgaggatctgaaaagacaaggactgctctagtgttgagggatgtagctcagcttttgggctagcccaggcttccctaagatctgctttttctatttctcccaaccaaatcctcttaaagaccctttgctatgtagtctcatggtctagcatgcatcttgtagaaacaaggcatgctggcagattgcagggttgagatgtgttttatctgttttatattttaaaagattctgccagaaaataaaaccagaccttgttctaa

SEQ ID NO: 82640 - DNA, 1954 bp, Homo sapiens
tttcctatgcccgctgaaggcatctgcgaacctctcggcatcgctccaccacacctcccaccagcaggtggcactgtcgccatctccataacatggactggccttccttgtggtgctcctgttttcttaagtcccggggcacttccggcactcgcggaactttggtgcagcctgatgcgcaacgtggggactcaggcgcgctgggcggcaggagttgcttccggccgtgttggtggtctgaattgagaagccgcgactaagggaagatggagacaatactggagcagcagcggcgctatcatgaggagaaggaacggctcatggacgtcatggctaaagagatgctcaccaagaagtccacgctccgggaccagatcaattctgatcaccgcactcgggccatgcaagataggtatatggaggtcagtgggaacctgagggatttgtatgatgataaggatggaaactacacctaccgagggcccaaagccttccagcgacactttgctgaatggcgtcatgctcatggcatgaggtgtttgggcatcccaaacactgctcactttgctaatgtgacacagattgaagatgctgtctccttgtgggccaaactgaaattgcagaaggcttcagaacgatggcagcctgacactgaggaagaatatgaagactcaagtgggaatgttgtgaataagaagacatacgaggatctgaaaagacaaggactgctctagtgttgagggatgtagctcagcttttgggctagcccaggcttccctaagatctgctttttctatttctcccaaccaaatcctcttaaagaccctttgctatgtagtctcatggtctagcatgcatcttgtagaaacaaggcatgctggcagattgcagggttgagatgtgttttatctgttttatattttaaaagattctgccagaaaataaaaccagaccttgttctaaagcccagggttatggaccaactcagtgcttcaggtcttaatgcctccatacctcttcctcaccaactttactagtagctgagatttaatgggcacctattatgctacatatcatgttaggtaaatctgacctgacctctttccccaccctcctttgttgctgcttccctgaatgagtattaccccaggatgaggtctgccatcagcttagttagccattgatgcaaatactagggaaagactaggaggatgagccagggttgctactaaggactaagtgtcgcaccaaggtttgccttttgtatttgcataaagaaaggagttggagctgggtgcagtggcttgtgcctgtagtcccagctacttgggaggctgaggcaggagggttgcttgagactagcctaggtaacatagtgagaccctgtctcattaaaaaaaaaaaaaaaaggcatggtggcacgcactgtagtcccagctactcaggagactgaggctagaagatcctttgaacctaggagtttgagaccagcctgggcgatatagtgaggccccatctcaaaaaaaaaaaaaagcgggtgggggggagttgggctgtgttggaatgggcctgcagcccaacaaacaagggaactaggaccgacagtgacttcaccagcttgctaggtcagaatgagagactggtgggtctgtctacctgtttcttctacaagatccctatttgactgtaaaagtagctaatactcacatgttctccaatcccaggtagccatggtagagttgggtagagttgagcagctgccccaggatccaaatgtggtgtctgaaatggaaagaactaaggcaaccaggaaggcactgatctgccttataagcacagtcatctgaaagtcaggcctgctgcaggacaggatcccccagagaccccatttgcctctcaacactcagaccttcaactgttttttaataaatctactttttaaaaaaaaaaaata

SEQ ID NO: 82641 - DNA, 1579 bp, Homo sapiens
atttgatccaacttttatagcaaagcaagatcatgatgaattttgcagtggaaagggttttgtctataggtggtccagaaccaaaactctggtttggggtaggcaagaatctcaaaggcagagtcttctagggagcatcctaatggcagggagagaggattataacactggatacccaacagatgttcagtccatcctgattgctgttcatttctcatcctgcagtgtgggccaaactgaaattgcagaaggcttcagaacgatggcagcctgacactgaggaagaatatgaagactcaagtgggaatgttgtgaataagaagacatacgaggatctgaaaagacaaggactgctctagtgttgagggatgtagctcagcttttgggctagcccaggcttccctaagatctgctttttctatttctcccaaccaaatcctcttaaagaccctttgctatgtagtctcatggtctagcatgcatcttgtagaaacaaggcatgctggcagattgcagggttgagatgtgttttatctgttttatattttaaaagattctgccagaaaataaaaccagaccttgttctaaagcccagggttatggaccaactcagtgcttcaggtcttaatgcctccatacctcttcctcaccaactttactagtagctgagatttaatgggcacctattatgctacatatcatgttaggtaaatctgacctgacctctttccccaccctcctttgttgctgcttccctgaatgagtattaccccaggatgaggtctgccatcagcttagttagccattgatgcaaatactagggaaagactaggaggatgagccagggttgctactaaggactaagtgtcgcaccaaggtttgccttttgtatttgcataaagaaaggagttggagctgggtgcagtggcttgtgcctgtagtcccagctacttgggaggctgaggcaggagggttgcttgagactagcctaggtaacatagtgagaccctgtctcattaaaaaaaaaaaaaaaaggcatggtggcacgcactgtagtcccagctactcaggagactgaggctagaagatcctttgaacctaggagtttgagaccagcctgggcgatatagtgaggccccatctcaaaaaaaaaaaaaagcgggtgggggggagttgggctgtgttggaatgggcctgcagcccaacaaacaagggaactaggaccgacagtgacttcaccagcttgctaggtcagaatgagagactggtgggtctgtctacctgtttcttctacaagatccctatttgactgtaaaagtagctaatactcacatgttctccaatcccaggtagccatggtagagttgggtagagttgagcagctgccccaggatccaaatgtggtgtctgaaatggaaagaactaaggcaaccaggaaggcactgatctgccttataagcacagtcatctgaaagtcaggcctgctgcaggacaggatcccccagagaccccatttgcctctcaacactcagaccttcaactgttttttaataaatctactttttaaaaaaaaaaaata

SEQ ID NO: 82642 - DNA, 1778 bp, Homo sapiens
ctggagagtttagacttactgctagattggctgtgaaatgtgtggtcctgccacagcctcaggaacacccaccctctggcctgcatttggggtttcccaaaaatctgttaatgtaatattgtgatttttctcttctttgtataggagttggcttctctgggtttggacagattgaaatctgctctcttagctttaggcttgaaatgtggcgggtaaggaatagtttttctatcaaaactatcgatttactgtgtgtttgcacagtcttctaagtagctctgattccattttttttgttgctccacactgcaaaaataagccagcctgtgtggtaaagtaaccctaaaatcctttgccgtcctgtctccttaggaccctagaagagcgagcccagagactattcagtaccaaaggaaagtccctggagtcacttgatacctctttgtttgccaaaaatcccaagtcaaagggcaccaagcggaagaatatgaagactcaagtgggaatgttgtgaataagaagacatacgaggatctgaaaagacaaggactgctctagtgttgagggatgtagctcagcttttgggctagcccaggcttccctaagatctgctttttctatttctcccaaccaaatcctcttaaagaccctttgctatgtagtctcatggtctagcatgcatcttgtagaaacaaggcatgctggcagattgcagggttgagatgtgttttatctgttttatattttaaaagattctgccagaaaataaaaccagaccttgttctaaagcccagggttatggaccaactcagtgcttcaggtcttaatgcctccatacctcttcctcaccaactttactagtagctgagatttaatgggcacctattatgctacatatcatgttaggtaaatctgacctgacctctttccccaccctcctttgttgctgcttccctgaatgagtattaccccaggatgaggtctgccatcagcttagttagccattgatgcaaatactagggaaagactaggaggatgagccagggttgctactaaggactaagtgtcgcaccaaggtttgccttttgtatttgcataaagaaaggagttggagctgggtgcagtggcttgtgcctgtagtcccagctacttgggaggctgaggcaggagggttgcttgagactagcctaggtaacatagtgagaccctgtctcattaaaaaaaaaaaaaaaaggcatggtggcacgcactgtagtcccagctactcaggagactgaggctagaagatcctttgaacctaggagtttgagaccagcctgggcgatatagtgaggccccatctcaaaaaaaaaaaaaagcgggtgggggggagttgggctgtgttggaatgggcctgcagcccaacaaacaagggaactaggaccgacagtgacttcaccagcttgctaggtcagaatgagagactggtgggtctgtctacctgtttcttctacaagatccctatttgactgtaaaagtagctaatactcacatgttctccaatcccaggtagccatggtagagttgggtagagttgagcagctgccccaggatccaaatgtggtgtctgaaatggaaagaactaaggcaaccaggaaggcactgatctgccttataagcacagtcatctgaaagtcaggcctgctgcaggacaggatcccccagagaccccatttgcctctcaacactcagaccttcaactgttttttaataaatctactttttaaaaaaaaaaaata

SEQ ID NO: 82643 - DNA, 1346 bp, Homo sapiens
  misc_feature (33)..(33): n is a, c, g, or t
  misc_feature (39)..(39): n is a, c, g, or t
tagtctgtcaggtcacccgccccaaacaaccgncctggnagaacgcaggaagaatatgaagactcaagtgggaatgttgtgaataagaagacatacgaggatctgaaaagacaaggactgctctagtgttgagggatgtagctcagcttttgggctagcccaggcttccctaagatctgctttttctatttctcccaaccaaatcctcttaaagaccctttgctatgtagtctcatggtctagcatgcatcttgtagaaacaaggcatgctggcagattgcagggttgagatgtgttttatctgttttatattttaaaagattctgccagaaaataaaaccagaccttgttctaaagcccagggttatggaccaactcagtgcttcaggtcttaatgcctccatacctcttcctcaccaactttactagtagctgagatttaatgggcacctattatgctacatatcatgttaggtaaatctgacctgacctctttccccaccctcctttgttgctgcttccctgaatgagtattaccccaggatgaggtctgccatcagcttagttagccattgatgcaaatactagggaaagactaggaggatgagccagggttgctactaaggactaagtgtcgcaccaaggtttgccttttgtatttgcataaagaaaggagttggagctgggtgcagtggcttgtgcctgtagtcccagctacttgggaggctgaggcaggagggttgcttgagactagcctaggtaacatagtgagaccctgtctcattaaaaaaaaaaaaaaaaggcatggtggcacgcactgtagtcccagctactcaggagactgaggctagaagatcctttgaacctaggagtttgagaccagcctgggcgatatagtgaggccccatctcaaaaaaaaaaaaaagcgggtgggggggagttgggctgtgttggaatgggcctgcagcccaacaaacaagggaactaggaccgacagtgacttcaccagcttgctaggtcagaatgagagactggtgggtctgtctacctgtttcttctacaagatccctatttgactgtaaaagtagctaatactcacatgttctccaatcccaggtagccatggtagagttgggtagagttgagcagctgccccaggatccaaatgtggtgtctgaaatggaaagaactaaggcaaccaggaaggcactgatctgccttataagcacagtcatctgaaagtcaggcctgctgcaggacaggatcccccagagaccccatttgcctctcaacactcagaccttcaactgttttttaataaatctactttttaaaaaaaaaaaata

SEQ ID NO: 82644 - DNA, 1396 bp, Homo sapiens
gcgactcgctggtcctccccttcgtgaggcccacaaccctgaaacttgcagacacggctctacagaatcagaatcggcagcccctgaacagctgacgcgaagaatatgaagactcaagtgggaatgttgtgaataagaagacatacgaggatctgaaaagacaaggactgctctagtgttgagggatgtagctcagcttttgggctagcccaggcttccctaagatctgctttttctatttctcccaaccaaatcctcttaaagaccctttgctatgtagtctcatggtctagcatgcatcttgtagaaacaaggcatgctggcagattgcagggttgagatgtgttttatctgttttatattttaaaagattctgccagaaaataaaaccagaccttgttctaaagcccagggttatggaccaactcagtgcttcaggtcttaatgcctccatacctcttcctcaccaactttactagtagctgagatttaatgggcacctattatgctacatatcatgttaggtaaatctgacctgacctctttccccaccctcctttgttgctgcttccctgaatgagtattaccccaggatgaggtctgccatcagcttagttagccattgatgcaaatactagggaaagactaggaggatgagccagggttgctactaaggactaagtgtcgcaccaaggtttgccttttgtatttgcataaagaaaggagttggagctgggtgcagtggcttgtgcctgtagtcccagctacttgggaggctgaggcaggagggttgcttgagactagcctaggtaacatagtgagaccctgtctcattaaaaaaaaaaaaaaaaggcatggtggcacgcactgtagtcccagctactcaggagactgaggctagaagatcctttgaacctaggagtttgagaccagcctgggcgatatagtgaggccccatctcaaaaaaaaaaaaaagcgggtgggggggagttgggctgtgttggaatgggcctgcagcccaacaaacaagggaactaggaccgacagtgacttcaccagcttgctaggtcagaatgagagactggtgggtctgtctacctgtttcttctacaagatccctatttgactgtaaaagtagctaatactcacatgttctccaatcccaggtagccatggtagagttgggtagagttgagcagctgccccaggatccaaatgtggtgtctgaaatggaaagaactaaggcaaccaggaaggcactgatctgccttataagcacagtcatctgaaagtcaggcctgctgcaggacaggatcccccagagaccccatttgcctctcaacactcagaccttcaactgttttttaataaatctactttttaaaaaaaaaaaata

SEQ ID NO: 82645 - DNA, 374 bp, Homo sapiens
gaagatggagacaatactggagcagcagcggcgctatcatgaggagaaggaacggctcatggacgtcatggctaaagagatgctcaccaagaagtccacggtgagtggggcctgagcagaggctgcggcaggagcacgagcctctatcccgtgtttgacctctgagagcttgctttggccctcagaacctccctgccttcctccgggctccctctccgagctccggtcttggtaacctcctcccggggtccggagccccagaggcctttctgcctcagctggtaaaagctgagcgggtaagctccgccctcgggcggccttttctactccagaacgcaaactaacggcgtttgtgtcaccgtttgttttttcag

SEQ ID NO: 82646 - DNA, 522 bp, Homo sapiens
aggggtcagcaaaagttacaggaaaacaggaaatttcccttcttattctgcactacttttttctgacttttcatttatggacctgctcttaggaacagcgacatctcactcatgaaaatgtacagcgcaagcaagccaggacaggagaagagcgagaagaagaggaagaagagcagatcagtgagagtgagagtgaagatgaagagaacgagatcatttacaaccccaaaaacctgccacttggctgggatggcaaagtaagtctcagcactaccactttctccccattccccattttggaaacagatacagagtttagtaggctaacacttcttggttttgttttgtttttttcttttttagcctattccctactggctgtataagcttcatggcctaaatatcaactacaactgtgagatttgtggaaactacacctaccgagggcccaaagccttccagcgacactttgctgtaaggaattcagagccatttttcctgggaattgaagtaaaaacatga

SEQ ID NO: 82647 - DNA, 2001 bp, Homo sapiens
tttcctatgcccgctgaaggcatctgcgaacctctcggcatcgctccaccacacctcccaccagcaggtggcactgtcgccatctccataacatggactggccttccttgtggtgctcctgttttcttaagtcccggggcacttccggcactcgcggaactttggtgcagcctgatgcgcaacgtggggactcaggcgcgctgggcggcaggagttgcttccggccgtgttggtggtctgaattgagaagccgcgactaagggaagatggagacaatactggagcagcagcggcgctatcatgaggagaaggaacggctcatggacgtcatggctaaagagatgctcaccaagaagtccacgctccgggaccagatcaattctgatcaccgcactcgggccatgcaagataggtatatggaggtcagtgggaacctgagggatttgtatgatgataaggatggattacgaaaggaggagctcaatgccatttcaggacccaatgagtttgctgaattctataatagactcaagcaaataaaggaattccaccggaagcacccaaatgagatctgtgtgccaatgtcagtggaatttgaggaactcctgaaggctcgagagaatccaagtgaagaggcacaaaacttggtggagttcacagatgaagagggatatggtcgttatctcgatctccatgactgttacctcaagtacattaacctgaaggcatctgagaagctggattatatcacatacctgtccatctttgaccaattatttgacattcctaaagaaaggaagaatgcagagtataagagatacctagagatgctgcttgagtaccttcaggattacacagatagagtgaagcctctccaagatcagaatgaactttttgggaagattcaggctgagtttgagaagaaatgggagaatgggacctttcctggatggccgaaagagacaagcagtgccctgacccatgctggagcccatcttgacctctctgcattctcctcctgggaggagttggcttctctgggtttggacagattgaaatctgctctcttagctttaggcttgaaatgtggcgggaccctagaagagcgagcccagagactattcagtaccaaaggaaagtccctggagtcacttgatacctctttgtttgccaaaaatcccaagtcaaagggcaccaagcgagacactgaaaggaacaaagacattgcttttctagaagcccagatctatgaatatgtagagattctcggggaacagcgacatctcactcatgaaaatgtacagcgcaagcaagccaggacaggagaagagcgagaagaagaggaagaagagcagatcagtgagagtgagagtgaagatgaagagaacgagatcatttacaaccccaaaaacctgccacttggctgggatggcaaacctattccctactggctgtataagcttcatggcctaaatatcaactacaactgtgagatttgtggaaactacacctaccgagggcccaaagccttccagcgacactttgctgaatggcgtcatgctcatggcatgaggtgtttgggcatcccaaacactgctcactttgctaatgtgacacagattgaagatgctgtctccttgtgggccaaactgaaattgcagaaggcttcagaacgatggcagcctgacactgaggaagaatatgaagactcaagtgggaatgttgtgaataagaagacatacgaggatctgaaaagacaaggactgctctagtgttgagggatgtagctcagcttttgggctagcccaggcttccctaagatctgctttttctatttctcccaaccaaatcctcttaaagaccctttgctatgtagtctcatggtctagcatgcatcttgtagaaacaaggcatgctggcagattgcagggttgagatgtgttttatctgttttatattttaaaagattctgccagaaaataaaaccagaccttgttctaa

SEQ ID NO: 82648 - DNA, 2992 bp, Homo sapiens
tttcctatgcccgctgaaggcatctgcgaacctctcggcatcgctccaccacacctcccaccagcaggtggcactgtcgccatctccataacatggactggccttccttgtggtgctcctgttttcttaagtcccggggcacttccggcactcgcggaactttggtgcagcctgatgcgcaacgtggggactcaggcgcgctgggcggcaggagttgcttccggccgtgttggtggtctgaattgagaagccgcgactaagggaagatggagacaatactggagcagcagcggcgctatcatgaggagaaggaacggctcatggacgtcatggctaaagagatgctcaccaagaagtccacgctccgggaccagatcaattctgatcaccgcactcgggccatgcaagataggtatatggaggtcagtgggaacctgagggatttgtatgatgataaggatggattacgaaaggaggagctcaatgccatttcaggacccaatgagtttgctgaattctataatagactcaagcaaataaaggaattccaccggaagcacccaaatgagatctgtgtgccaatgtcagtggaatttgaggaactcctgaaggctcgagagaatccaagtgaagaggcacaaaacttggtggagttcacagatgaagagggatatggtcgttatctcgatctccatgactgttacctcaagtacattaacctgaaggcatctgagaagctggattatatcacatacctgtccatctttgaccaattatttgacattcctaaagaaaggaagaatgcagagtataagagatacctagagatgctgcttgagtaccttcaggattacacagatagagtgaagcctctccaagatcagaatgaactttttgggaagattcaggctgagtttgagaagaaatgggagaatgggacctttcctggatggccgaaagagacaagcagtgccctgacccatgctggagcccatcttgacctctctgcattctcctcctgggaggagttggcttctctgggtttggacagattgaaatctgctctcttagctttaggcttgaaatgtggcgggaccctagaagagcgagcccagagactattcagtaccaaaggaaagtccctggagtcacttgatacctctttgtttgccaaaaatcccaagtcaaagggcaccaagcgagacactgaaaggaacaaagacattgcttttctagaagcccagatctatgaatatgtagagattctcggggaacagcgacatctcactcatgaaaatgtacagcgcaagcaagccaggacaggagaagagcgagaagaagaggaagaagagcagatcagtgagagtgagagtgaagatgaagagaacgagatcatttacaaccccaaaaacctgccacttggctgggatggcaaacctattccctactggctgtataagcttcatggcctaaatatcaactacaactgtgagatttgtggaaactacacctaccgagggcccaaagccttccagcgacactttgctgaatggcgtcatgctcatggcatgaggtgtttgggcatcccaaacactgctcactttgctaatgtgacacagattgaagatgctgtctccttgtgggccaaactgaaattgcagaaggcttcagaacgatggcagcctgacactgaggaagaatatgaagactcaagtgggaatgttgtgaataagaagacatacgaggatctgaaaagacaaggactgctctagtgttgagggatgtagctcagcttttgggctagcccaggcttccctaagatctgctttttctatttctcccaaccaaatcctcttaaagaccctttgctatgtagtctcatggtctagcatgcatcttgtagaaacaaggcatgctggcagattgcagggttgagatgtgttttatctgttttatattttaaaagattctgccagaaaataaaaccagaccttgttctaaagcccagggttatggaccaactcagtgcttcaggtcttaatgcctccatacctcttcctcaccaactttactagtagctgagatttaatgggcacctattatgctacatatcatgttaggtaaatctgacctgacctctttccccaccctcctttgttgctgcttccctgaatgagtattaccccaggatgaggtctgccatcagcttagttagccattgatgcaaatactagggaaagactaggaggatgagccagggttgctactaaggactaagtgtcgcaccaaggtttgccttttgtatttgcataaagaaaggagttggagctgggtgcagtggcttgtgcctgtagtcccagctacttgggaggctgaggcaggagggttgcttgagactagcctaggtaacatagtgagaccctgtctcattaaaaaaaaaaaaaaaaggcatggtggcacgcactgtagtcccagctactcaggagactgaggctagaagatcctttgaacctaggagtttgagaccagcctgggcgatatagtgaggccccatctcaaaaaaaaaaaaaagcgggtgggggggagttgggctgtgttggaatgggcctgcagcccaacaaacaagggaactaggaccgacagtgacttcaccagcttgctaggtcagaatgagagactggtgggtctgtctacctgtttcttctacaagatccctatttgactgtaaaagtagctaatactcacatgttctccaatcccaggtagccatggtagagttgggtagagttgagcagctgccccaggatccaaatgtggtgtctgaaatggaaagaactaaggcaaccaggaaggcactgatctgccttataagcacagtcatctgaaagtcaggcctgctgcaggacaggatcccccagagaccccatttgcctctcaacactcagaccttcaactgttttttaataaatctactttttaaaaaaaaaaaata

SEQ ID NO: 82649 - DNA, 2783 bp, Homo sapiens
ccccgcgggtgtaatggcacgaggctcgtgccgttgagaagccgcgactaagggaagatggagacaatactggagcagcagcggcgctatcatgaggagaaggaacggctcatggacgtcatggctaaagagatgctcaccaagaagtccacgctccgggaccagatcaattctgatcaccgcactcgggccatgcaagataggtatatggaggtcagtgggaacctgagggatttgtatgatgataaggatggattacgaaaggaggagctcaatgccatttcaggacccaatgagtttgctgaattctataatagactcaagcaaataaaggaattccaccggaagcacccaaatgagatctgtgtgccaatgtcagtggaatttgaggaactcctgaaggctcgagagaatccaagtgaagaggcacaaaacttggtggagttcacagatgaagagggatatggtcgttatctcgatctccatgactgttacctcaagtacattaacctgaaggcatctgagaagctggattatatcacatacctgtccatctttgaccaattatttgacattcctaaagaaaggaagaatgcagagtataagagatacctagagatgctgcttgagtaccttcaggattacacagatagagtgaagcctctccaagatcagaatgaactttttgggaagattcaggctgagtttgagaagaaatgggagaatgggacctttcctggatggccgaaagagacaagcagtgccctgacccatgctggagcccatcttgacctctctgcattctcctcctgggaggagttggcttctctgggtttggacagattgaaatctgctctcttagctttaggcttgaaatgtggcgggaccctagaagagcgagcccagagactattcagtaccaaaggaaagtccctggagtcacttgatacctctttgtttgccaaaaatcccaagtcaaagggcaccaagcgagacactgaaaggaacaaagacattgcttttctagaagcccagatctatgaatatgtagagattctcggggaacagcgacatctcactcatgaaaatgtacagcgcaagcaagccaggacaggagaagagcgagaagaagaggaagaagagcagatcagtgagagtgagagtgaagatgaagagaacgagatcatttacaaccccaaaaacctgccacttggctgggatggcaaacctattccctactggctgtataagcttcatggcctaaatatcaactacaactgtgagatttgtggaaactacacctaccgagggcccaaagccttccagcgacactttgctgaatggcgtcatgctcatggcatgaggtgtttgggcatcccaaacactgctcactttgctaatgtgacacagattgaagatgctgtctccttgtgggccaaactgaaattgcagaaggcttcagaacgatggcagcctgacactgaggaagaatatgaagactcaagtgggaatgttgtgaataagaagacatacgaggatctgaaaagacaaggactgctctagtgttgagggatgtagctcagcttttgggctagcccaggcttccctaagatctgctttttctatttctcccaaccaaatcctcttaaagaccctttgctatgtagtctcatggtctagcatgcatcttgtagaaacaaggcatgctggcagattgcagggttgagatgtgttttatctgttttatattttaaaagattctgccagaaaataaaaccagaccttgttctaaagcccagggttatggaccaactcagtgcttcaggtcttaatgcctccatacctcttcctcaccaactttactagtagctgagatttaatgggcacctattatgctacatatcatgttaggtaaatctgacctgacctctttccccaccctcctttgttgctgcttccctgaatgagtattaccccaggatgaggtctgccatcagcttagttagccattgatgcaaatactagggaaagactaggaggatgagccagggttgctactaaggactaagtgtcgcaccaaggtttgccttttgtatttgcataaagaaaggagttggagctgggtgcagtggcttgtgcctgtagtcccagctacttgggaggctgaggcaggagggttgcttgagactagcctaggtaacatagtgagaccctgtctcattaaaaaaaaaaaaaaaaggcatggtggcacgcactgtagtcccagctactcaggagactgaggctagaagatcctttgaacctaggagtttgagaccagcctgggcgatatagtgaggccccatctcaaaaaaaaaaaaaagcgggtgggggggagttgggctgtgttggaatgggcctgcagcccaacaaacaagggaactaggaccgacagtgacttcaccagcttgctaggtcagaatgagagactggtgggtctgtctacctgtttcttctacaagatccctatttgactgtaaaagtagctaatactcacatgttctccaatcccaggtagccatggtagagttgggtagagttgagcagctgccccaggatccaaatgtggtgtctgaaatggaaagaactaaggcaaccaggaaggcactgatctgccttataagcacagtcatctgaaagtcaggcctgctgcaggacaggatcccccagagaccccatttgcctctcaacactcagaccttcaactgttttttaataaatctactttttaaaaaaaaaaaata

SEQ ID NO: 82650 - DNA, 2853 bp, Homo sapiens
tttcctatgcccgctgaaggcatctgcgaacctctcggcatcgctccaccacacctcccaccagcaggtggcactgtcgccatctccataacatggactggccttccttgtggtgctcctgttttcttaagtcccggggcacttccggcactcgcggaactttggtgcagcctgatgcgcaacgtggggactcaggcgcgctgggcggcaggagttgcttccggccgtgttggtggtctgaattgagaagccgcgactaagggaagatggagacaatactggagcagcagcggcgctatcatgaggagaaggaacggctcatggacgtcatggctaaagagatgctcaccaagaagtccacgctccgggaccagatcaattctgatcaccgcactcgggccatgcaagataggtatatggaggtcagtgggaacctgagggatttgtatgatgataaggatggattacgaaaggaggagctcaatgccatttcaggacccaatgagtttgctgaattctataatagactcaagcaaataaaggaattccaccggaagcacccaaatgagatctgtgtgccaatgtcagtggaatttgaggaactcctgaaggctcgagagaatccaagtgaagaggcacaaaacttggtggagttcacagatgaagagggatatggtcgttatctcgatctccatgactgttacctcaagtacattaacctgaaggcatctgagaagctggattatatcacatacctgtccatctttgaccaattatttgacattcctaaagaaaggaagaatgcagagtataagagatacctagagatgctgcttgagtaccttcaggattacacagatagagtgaagcctctccaagatcagaatgaactttttgggaagattcaggctgagtttgagaagaaatgggagaatgggacctttcctggatggccgaaagagacaagcagtgccctgacccatgctggagcccatcttgacctctctgcattctcctcctgggaggagttggcttctctgggtttggacagattgaaatctgctctcttagctttaggcttgaaatgtggcgggaccctagaagagcgagcccagagactattcagtaccaaaggaaagtccctggagtcacttgatacctctttgtttgccaaaaatcccaagtcaaagggcaccaagcgagacactgaaaggaacaaagacattgcttttctagaagcccagatctatgaatatgtagagattctcggggaacagcgacatctcactcatgaaaatgtacagcgcaagcaagccaggacaggagaagagcgagaagaagaggaagaagagcagatcagtgagagtgagagtgaagatgaagagaacgagatcatttacaaccccaaaaacctgccacttggctgggatggcaaacctattccctactggctgtataagcttcatggcctaaatatcaactacaactgtgagatttgtggaaactacacctaccgagggcccaaagccttccagcgacactttgctgaatggcgtcatgctcatggcatgaggtgtttgggcatcccaaacactgctcactttgctaatgtgacacagattgaagatgctgtctccttgtgggccaaactgaaattgcagaaggcttcagaacgatggcagcctgacactgaggaagaatatgaagactcaagtgggaatgttgtgaataagaagacatacgaggatctgaaaagacaaggactgctctagtgttgagggatgtagctcagcttttgggctagcccaggcttccctaagatctgctttttctatttctcccaaccaaatcctcttaaagaccctttgctatgtagtctcatggtctagcatgcatcttgtagaaacaaggcatgctggcagattgcagggttgagatgtgttttatctgttttatattttaaaagattctgccagaaaataaaaccagaccttgttctaaagcccagggttatggaccaactcagtgcttcaggtcttaatgcctccatacctcttcctcaccaactttactagtagctgagatttaatgggcacctattatgctacatatcatgttaggtaaatctgacctgacctctttccccaccctcctttgttgctgcttccctgaatgagtattaccccaggatgaggtctgccatcagcttagttagccattgatgcaaatactagggaaagactaggaggatgagccagggttctaggtaacatagtgagaccctgtctcattaaaaaaaaaaaaaaaaggcatggtggcacgcactgtagtcccagctactcaggagactgaggctagaagatcctttgaacctaggagtttgagaccagcctgggcgatatagtgaggccccatctcaaaaaaaaaaaaaagcgggtgggggggagttgggctgtgttggaatgggcctgcagcccaacaaacaagggaactaggaccgacagtgacttcaccagcttgctaggtcagaatgagagactggtgggtctgtctacctgtttcttctacaagatccctatttgactgtaaaagtagctaatactcacatgttctccaatcccaggtagccatggtagagttgggtagagttgagcagctgccccaggatccaaatgtggtgtctgaaatggaaagaactaaggcaaccaggaaggcactgatctgccttataagcacagtcatctgaaagtcaggcctgctgcaggacaggatcccccagagaccccatttgcctctcaacactcagaccttcaactgttttttaataaatctactttttaaaaaaaaaaaata

SEQ ID NO: 82651 - DNA, 2443 bp, Homo sapiens
tttcctatgcccgctgaaggcatctgcgaacctctcggcatcgctccaccacacctcccaccagcaggtggcactgtcgccatctccataacatggactggccttccttgtggtgctcctgttttcttaagtcccggggcacttccggcactcgcggaactttggtgcagcctgatgcgcaacgtggggactcaggcgcgctgggcggcaggagttgcttccggccgtgttggtggtctgaattgagaagccgcgactaagggaagatggagacaatactggagcagcagcggcgctatcatgaggagaaggaacggctcatggacgtcatggctaaagagatgctcaccaagaagtccacgctccgggaccagatcaattctgatcaccgcactcgggccatgcaagataggtatatggaggtcagtgggaacctgagggatttgtatgatgataaggatggattacgaaaggaggagctcaatgccatttcaggacccaatgagtttgctgaattctataatagactcaagcaaataaaggaattccaccggaagcacccaaatgagatctgtgtgccaatgtcagtggaatttgaggaactcctgaaggctcgagagaatccaagtgaagaggcacaaaacttggtggagttcacagatgaagagggatatggtcgttatctcgatctccatgactgttacctcaagtacattaacctgaaggcatctgagaagctggattatatcacatacctgtccatctttgaccaattatttgacattcctaaagaaaggaagaatgcagagtataagagatacctagagatgctgcttgagtaccttcaggattacacagatagagtgaagcctctccaagatcagaatgaactttttgggaagattcaggctgagtttgagaagaaatgggagaatgggacctttcctggatggccgaaagagacaagcagtgccctgacccatgctggagcccatcttgacctctctgcattctcctcctgggaggagttggcttctctgggtttggacagattgaaatctgctctcttagctttaggcttgaaatgtggcgggaccctagaagagcgagcccagagactattcagtaccaaaggaaagtccctggagtcacttgatacctctttgtttgccaaaaatcccaagtcaaagggcaccaagcgagacactgaaaggaacaaagacattgcttttctagaagcccagatctatgaatatgtagagattctcggggaacagcgacatctcactcatgaaaatgtacagcgcaagcaagccaggacaggagaagagcgagaagaagaggaagaagagcagatcagtgagagtgagagtgaagatgaagagaacgagatcatttacaaccccaaaaacctgccacttggctgggatggcaaacctattccctactggctgtataagcttcatggcctaaatatcaactacaactgtgagatttgtggaaactacacctaccgagggcccaaagccttccagcgacactttgctgaatggcgtcatgctcatggcatgaggtgtttgggcatcccaaacactgctcactttgctaatgtgacacagattgaagatgctgtctccttgtgggccaaactgaaattgcagaaggcttcagaacgatggcagcctgacactgaggaagaatatgaagactcaagtgggaatgttgtgaataagaagacatacgaggatctgaaaagacaaggactgctctagtgttgagggatgtagctcagcttttgggctagcccaggcttccctaagatctgctttttctatttctcccaaccaaatcctcttaaagaccctttgctatgtagtctcatggtctagcatgcatcttgtagaaacaaggcatgctggcagattgcagggttgagatgtgttttatctgttttatattttaaaagattctgccagaaaataaaaccagaccttgttctaaagcccagggttatggaccaactcagtgcttcaggtcttaatgcctccatacctcttcctcaccaactttactagtagctgagatttaatgggcacctattatgctacatatcatgttaggtaaatctgacctgacctctttccccaccctcctttgttgctgcttccctgaatgagtattaccccaggatgaggtctgccatcagcttagttagccattgatgcaaatactagggaaagactaggaggatgagccagggttgctactaaggactaagtgtcgcaccaaggtttgccttttgtatttgcataaagaaaggagttggagctggagtgcagtggcgcggtctcggctcactgcaacctccgcctcctgggttcaagcgattctcctgcctcagcctcagaagttgctggttacaggtattttttcttgtgagatc

SEQ ID NO: 82652 - DNA, 2685 bp, Homo sapiens
ttttctactccagaacgcaaactaacggcgcttgtgtcaccgtttgttttttcagctccgggaccagatcaattctgatcaccgcactcgggccatgcaagataggtatatggaggtcagtgggaacctgagggatttgtatgatgataaggatggattacgaaaggaggagctcaatgccatttcaggacccaatgagtttgctgaattctataatagactcaagcaaataaaggaattccaccggaagcacccaaatgagatctgtgtgccaatgtcagtggaatttgaggaactcctgaaggctcgagagaatccaagtgaagaggcacaaaacttggtggagttcacagatgaagagggatatggtcgttatctcgatctccatgactgttacctcaagtacattaacctgaaggcatctgagaagctggattatatcacatacctgtccatctttgaccaattatttgacattcctaaagaaaggaagaatgcagagtataagagatacctagagatgctgcttgagtaccttcaggattacacagatagagtgaagcctctccaagatcagaatgaactttttgggaagattcaggctgagtttgagaagaaatgggagaatgggacctttcctggatggccgaaagagacaagcagtgccctgacccatgctggagcccatcttgacctctctgcattctcctcctgggaggagttggcttctctgggtttggacagattgaaatctgctctcttagctttaggcttgaaatgtggcgggaccctagaagagcgagcccagagactattcagtaccaaaggaaagtccctggagtcacttgatacctctttgtttgccaaaaatcccaagtcaaagggcaccaagcgagacactgaaaggaacaaagacattgcttttctagaagcccagatctatgaatatgtagagattctcggggaacagcgacatctcactcatgaaaatgtacagcgcaagcaagccaggacaggagaagagcgagaagaagaggaagaagagcagatcagtgagagtgagagtgaagatgaagagaacgagatcatttacaaccccaaaaacctgccacttggctgggatggcaaacctattccctactggctgtataagcttcatggcctaaatatcaactacaactgtgagatttgtggaaactacacctaccgagggcccaaagccttccagcgacactttgctgaatggcgtcatgctcatggcatgaggtgtttgggcatcccaaacactgctcactttgctaatgtgacacagattgaagatgctgtctccttgtgggccaaactgaaattgcagaaggcttcagaacgatggcagcctgacactgaggaagaatatgaagactcaagtgggaatgttgtgaataagaagacatacgaggatctgaaaagacaaggactgctctagtgttgagggatgtagctcagcttttgggctagcccaggcttccctaagatctgctttttctatttctcccaaccaaatcctcttaaagaccctttgctatgtagtctcatggtctagcatgcatcttgtagaaacaaggcatgctggcagattgcagggttgagatgtgttttatctgttttatattttaaaagattctgccagaaaataaaaccagaccttgttctaaagcccagggttatggaccaactcagtgcttcaggtcttaatgcctccatacctcttcctcaccaactttactagtagctgagatttaatgggcacctattatgctacatatcatgttaggtaaatctgacctgacctctttccccaccctcctttgttgctgcttccctgaatgagtattaccccaggatgaggtctgccatcagcttagttagccattgatgcaaatactagggaaagactaggaggatgagccagggttgctactaaggactaagtgtcgcaccaaggtttgccttttgtatttgcataaagaaaggagttggagctgggtgcagtggcttgtgcctgtagtcccagctacttgggaggctgaggcaggagggttgcttgagactagcctaggtaacatagtgagaccctgtctcattaaaaaaaaaaaaaaaaggcatggtggcacgcactgtagtcccagctactcaggagactgaggctagaagatcctttgaacctaggagtttgagaccagcctgggcgatatagtgaggccccatctcaaaaaaaaaaaaaagcgggtgggggggagttgggctgtgttggaatgggcctgcagcccaacaaacaagggaactaggaccgacagtgacttcaccagcttgctaggtcagaatgagagactggtgggtctgtctacctgtttcttctacaagatccctatttgactgtaaaagtagctaatactcacatgttctccaatcccaggtagccatggtagagttgggtagagttgagcagctgccccaggatccaaatgtggtgtctgaaatggaaagaactaaggcaaccaggaaggcactgatctgccttataagcacagtcatctgaaagtcaggcctgctgcaggacaggatcccccagagaccccatttgcctctcaacactcagaccttcaactgttttttaataaatctactttttaaaaaaaaaaaata

SEQ ID NO: 82653 - DNA, 2638 bp, Homo sapiens
aaatatgctaggtacgagactcggtgtttgaatcggccgaggctgaattgagaagccgcgactaagggaagatggagacaatactggagcagcagcggcgctatcatgaggagaaggaacggctcatggacgtcatggctaaagagatgctcaccaagaagtccacgctccgggaccagatcaattctgatcaccgcactcgggccatgcaagatatctgtgtgccaatgtcagtggaatttgaggaactcctgaaggctcgagagaatccaagtgaagaggcacaaaacttggtggagttcacagatgaagagggatatggtcgttatctcgatctccatgactgttacctcaagtacattaacctgaaggcatctgagaagctggattatatcacatacctgtccatctttgaccaattatttgacattcctaaagaaaggaagaatgcagagtataagagatacctagagatgctgcttgagtaccttcaggattacacagatagagtgaagcctctccaagatcagaatgaactttttgggaagattcaggctgagtttgagaagaaatgggagaatgggacctttcctggatggccgaaagagacaagcagtgccctgacccatgctggagcccatcttgacctctctgcattctcctcctgggaggagttggcttctctgggtttggacagattgaaatctgctctcttagctttaggcttgaaatgtggcgggaccctagaagagcgagcccagagactattcagtaccaaaggaaagtccctggagtcacttgatacctctttgtttgccaaaaatcccaagtcaaagggcaccaagcgagacactgaaaggaacaaagacattgcttttctagaagcccagatctatgaatatgtagagattctcggggaacagcgacatctcactcatgaaaatgtacagcgcaagcaagccaggacaggagaagagcgagaagaagaggaagaagagcagatcagtgagagtgagagtgaagatgaagagaacgagatcatttacaaccccaaaaacctgccacttggctgggatggcaaacctattccctactggctgtataagcttcatggcctaaatatcaactacaactgtgagatttgtggaaactacacctaccgagggcccaaagccttccagcgacactttgctgaatggcgtcatgctcatggcatgaggtgtttgggcatcccaaacactgctcactttgctaatgtgacacagattgaagatgctgtctccttgtgggccaaactgaaattgcagaaggcttcagaacgatggcagcctgacactgaggaagaatatgaagactcaagtgggaatgttgtgaataagaagacatacgaggatctgaaaagacaaggactgctctagtgttgagggatgtagctcagcttttgggctagcccaggcttccctaagatctgctttttctatttctcccaaccaaatcctcttaaagaccctttgctatgtagtctcatggtctagcatgcatcttgtagaaacaaggcatgctggcagattgcagggttgagatgtgttttatctgttttatattttaaaagattctgccagaaaataaaaccagaccttgttctaaagcccagggttatggaccaactcagtgcttcaggtcttaatgcctccatacctcttcctcaccaactttactagtagctgagatttaatgggcacctattatgctacatatcatgttaggtaaatctgacctgacctctttccccaccctcctttgttgctgcttccctgaatgagtattaccccaggatgaggtctgccatcagcttagttagccattgatgcaaatactagggaaagactaggaggatgagccagggttgctactaaggactaagtgtcgcaccaaggtttgccttttgtatttgcataaagaaaggagttggagctgggtgcagtggcttgtgcctgtagtcccagctacttgggaggctgaggcaggagggttgcttgagactagcctaggtaacatagtgagaccctgtctcattaaaaaaaaaaaaaaaaggcatggtggcacgcactgtagtcccagctactcaggagactgaggctagaagatcctttgaacctaggagtttgagaccagcctgggcgatatagtgaggccccatctcaaaaaaaaaaaaaagcgggtgggggggagttgggctgtgttggaatgggcctgcagcccaacaaacaagggaactaggaccgacagtgacttcaccagcttgctaggtcagaatgagagactggtgggtctgtctacctgtttcttctacaagatccctatttgactgtaaaagtagctaatactcacatgttctccaatcccaggtagccatggtagagttgggtagagttgagcagctgccccaggatccaaatgtggtgtctgaaatggaaagaactaaggcaaccaggaaggcactgatctgccttataagcacagtcatctgaaagtcaggcctgctgcaggacaggatcccccagagaccccatttgcctctcaacactcagaccttcaactgttttttaataaatctactttttaaaaaaaaaaaata

SEQ ID NO: 82654 - DNA, 2942 bp, Homo sapiens
tttcctatgcccgctgaaggcatctgcgaacctctcggcatcgctccaccacacctcccaccagcaggtggcactgtcgccatctccataacatggactggccttccttgtggtgctcctgttttcttaagtcccggggcacttccggcactcgcggaactttggtgcagcctgatgcgcaacgtggggactcaggcgcgctgggcggcaggagttgcttccggccgtgttggtggtctgaattgagaagccgcgactaagggaagatggagacaatactggagcagcagcggcgctatcatgaggagaaggaacggctcatggacgtcatggctaaagagatgctcaccaagaagtccacgctccgggaccagatcaattctgatcaccgcactcgggccatgcaagataggtatatggaggtcagtgggaacctgagggatttgtatgatgataaggatggattacgaaaggaggagctcaatgccatttcaggacccaatgagtttgctgaattctataatagactcaagcaaataaaggaattccaccggaagcacccaaatgagatctgtgtgccaatgtcagtggaatttgaggaactcctgaaggctcgagagaatccaagtgaagaggcacaaacatgactgttacctcaagtacattaacctgaaggcatctgagaagctggattatatcacatacctgtccatctttgaccaattatttgacattcctaaagaaaggaagaatgcagagtataagagatacctagagatgctgcttgagtaccttcaggattacacagatagagtgaagcctctccaagatcagaatgaactttttgggaagattcaggctgagtttgagaagaaatgggagaatgggacctttcctggatggccgaaagagacaagcagtgccctgacccatgctggagcccatcttgacctctctgcattctcctcctgggaggagttggcttctctgggtttggacagattgaaatctgctctcttagctttaggcttgaaatgtggcgggaccctagaagagcgagcccagagactattcagtaccaaaggaaagtccctggagtcacttgatacctctttgtttgccaaaaatcccaagtcaaagggcaccaagcgagacactgaaaggaacaaagacattgcttttctagaagcccagatctatgaatatgtagagattctcggggaacagcgacatctcactcatgaaaatgtacagcgcaagcaagccaggacaggagaagagcgagaagaagaggaagaagagcagatcagtgagagtgagagtgaagatgaagagaacgagatcatttacaaccccaaaaacctgccacttggctgggatggcaaacctattccctactggctgtataagcttcatggcctaaatatcaactacaactgtgagatttgtggaaactacacctaccgagggcccaaagccttccagcgacactttgctgaatggcgtcatgctcatggcatgaggtgtttgggcatcccaaacactgctcactttgctaatgtgacacagattgaagatgctgtctccttgtgggccaaactgaaattgcagaaggcttcagaacgatggcagcctgacactgaggaagaatatgaagactcaagtgggaatgttgtgaataagaagacatacgaggatctgaaaagacaaggactgctctagtgttgagggatgtagctcagcttttgggctagcccaggcttccctaagatctgctttttctatttctcccaaccaaatcctcttaaagaccctttgctatgtagtctcatggtctagcatgcatcttgtagaaacaaggcatgctggcagattgcagggttgagatgtgttttatctgttttatattttaaaagattctgccagaaaataaaaccagaccttgttctaaagcccagggttatggaccaactcagtgcttcaggtcttaatgcctccatacctcttcctcaccaactttactagtagctgagatttaatgggcacctattatgctacatatcatgttaggtaaatctgacctgacctctttccccaccctcctttgttgctgcttccctgaatgagtattaccccaggatgaggtctgccatcagcttagttagccattgatgcaaatactagggaaagactaggaggatgagccagggttgctactaaggactaagtgtcgcaccaaggtttgccttttgtatttgcataaagaaaggagttggagctgggtgcagtggcttgtgcctgtagtcccagctacttgggaggctgaggcaggagggttgcttgagactagcctaggtaacatagtgagaccctgtctcattaaaaaaaaaaaaaaaaggcatggtggcacgcactgtagtcccagctactcaggagactgaggctagaagatcctttgaacctaggagtttgagaccagcctgggcgatatagtgaggccccatctcaaaaaaaaaaaaaagcgggtgggggggagttgggctgtgttggaatgggcctgcagcccaacaaacaagggaactaggaccgacagtgacttcaccagcttgctaggtcagaatgagagactggtgggtctgtctacctgtttcttctacaagatccctatttgactgtaaaagtagctaatactcacatgttctccaatcccaggtagccatggtagagttgggtagagttgagcagctgccccaggatccaaatgtggtgtctgaaatggaaagaactaaggcaaccaggaaggcactgatctgccttataagcacagtcatctgaaagtcaggcctgctgcaggacaggatcccccagagaccccatttgcctctcaacactcagaccttcaactgttttttaataaatctactttttaaaaaaaaaaaata

SEQ ID NO: 82655 - DNA, 1298 bp, Homo sapiens
tttcctatgcccgctgaaggcatctgcgaacctctcggcatcgctccaccacacctcccaccagcaggtggcactgtcgccatctccataacatggactggccttccttgtggtgctcctgttttcttaagtcccggggcacttccggcactcgcggaactttggtgcagcctgatgcgcaacgtggggactcaggcgcgctgggcggcaggagttgcttccggccgtgttggtggtctgaattgagaagccgcgactaagggaagatggagacaatactggagcagcagcggcgctatcatgaggagaaggaacggctcatggacgtcatggctaaagagatgctcaccaagaagtccacgctccgggaccagatcaattctgatcaccgcactcgggccatgcaagataggtatatggaggtcagtgggaacctgagggatttgtatgatgataaggatggattacgaaaggaggagctcaatgccatttcaggacccaatgagtttgctgaattctataatagactcaagcaaataaaggaattccaccggaagcacccaaatgagatctgtgtgccaatgtcagtggaatttgaggaactcctgaaggctcgagagaatccaagtgaagaggcacaaaacttggtggagttcacagatgaagagggatatggtcgttatctcgatctccatgactgttacctcaagtacattaacctgaaggcatctgagaagctggattatatcacatacctgtccatctttgaccaattatttgacattcctaaagaaaggaagaatgcagagtataagagatacctagagatgctgcttgagtaccttcaggattacacagatagagtgaagcctctccaagatcagaatgaactttttgggaagattcaggctgagtttgagaagaaatgggagaatgggacctttcctggatggccgaaagagacaagcagtgccctgacccatgctggagcccatcttgacctctctgcattctcctcctgggaggagttggcttctctgggtttggacagattgaaatctgctctcttagctttaggcttgaaatgtggcgggaccctagaagagcgagcccagagactattcagtaccaaaggaaagtccctggagtcacttgatacctctttgtttgccaaaaatcccaagtcaaagggcaccaagcgagacactgaaaggaacaaagacattgcttttctagaagcccagatctatgaatatgtagagattctcggggtaagtgactgactgctgaaagtggaa

SEQ ID NO: 82656 - DNA, 1835 bp, Homo sapiens
aagaaccttatccttggaagtaaggggtcagcaaaagttacaggaaaacaggaaatttcccttcttattctgcactacttttttctgacttttcatttatggacctgctcttaggaacagcgacatctcactcatgaaaatgtacagcgcaagcaagccaggacaggagaagagcgagaagaagaggaagaagagcagatcagtgagagtgagagtgaagatgaagagaacgagatcatttacaaccccaaaaacctgccacttggctgggatggcaaacctattccctactggctgtataagcttcatggcctaaatatcaactacaactgtgagatttgtggaaactacacctaccgagggcccaaagccttccagcgacactttgctgaatggcgtcatgctcatggcatgaggtgtttgggcatcccaaacactgctcactttgctaatgtgacacagattgaagatgctgtctccttgtgggccaaactgaaattgcagaaggcttcagaacgatggcagcctgacactgaggaagaatatgaagactcaagtgggaatgttgtgaataagaagacatacgaggatctgaaaagacaaggactgctctagtgttgagggatgtagctcagcttttgggctagcccaggcttccctaagatctgctttttctatttctcccaaccaaatcctcttaaagaccctttgctatgtagtctcatggtctagcatgcatcttgtagaaacaaggcatgctggcagattgcagggttgagatgtgttttatctgttttatattttaaaagattctgccagaaaataaaaccagaccttgttctaaagcccagggttatggaccaactcagtgcttcaggtcttaatgcctccatacctcttcctcaccaactttactagtagctgagatttaatgggcacctattatgctacatatcatgttaggtaaatctgacctgacctctttccccaccctcctttgttgctgcttccctgaatgagtattaccccaggatgaggtctgccatcagcttagttagccattgatgcaaatactagggaaagactaggaggatgagccagggttgctactaaggactaagtgtcgcaccaaggtttgccttttgtatttgcataaagaaaggagttggagctgggtgcagtggcttgtgcctgtagtcccagctacttgggaggctgaggcaggagggttgcttgagactagcctaggtaacatagtgagaccctgtctcattaaaaaaaaaaaaaaaaggcatggtggcacgcactgtagtcccagctactcaggagactgaggctagaagatcctttgaacctaggagtttgagaccagcctgggcgatatagtgaggccccatctcaaaaaaaaaaaaaagcgggtgggggggagttgggctgtgttggaatgggcctgcagcccaacaaacaagggaactaggaccgacagtgacttcaccagcttgctaggtcagaatgagagactggtgggtctgtctacctgtttcttctacaagatccctatttgactgtaaaagtagctaatactcacatgttctccaatcccaggtagccatggtagagttgggtagagttgagcagctgccccaggatccaaatgtggtgtctgaaatggaaagaactaaggcaaccaggaaggcactgatctgccttataagcacagtcatctgaaagtcaggcctgctgcaggacaggatcccccagagaccccatttgcctctcaacactcagaccttcaactgttttttaataaatctactttttaaaaaaaaaaaata

SEQ ID NO: 82657 - DNA, 450 bp, Homo sapiens
ataatagaggtatgttgacatgaaagcacatgagctgcttaatgttgggtcatagcatcatcacatatggaagacacactgaagccttatgtttagcaataagactgataaagtttatctgtctagattgtaaaaatcctcacagcatcagcctaactctcatattaatcattctaactcaccacttctttttgtagtcatctgccactacatttatcccattccctatttatagttgtaactgtatagtgattacagtattcatctagatgattctttcagtaccttagcctcttattccttttgttctccatttattactccctttaccactcttacctattactaggagtccatttgtgatctatttcagactttctgttttccctaccgctacttctgtctttccaggttcacttcctgtagggctctaactctgtagtcttttgc

SEQ ID NO: 82658 - DNA, 709 bp, Homo sapiens
cttaaattggcaactttgacacataattccatgtagtagttaatcttgctagaagatcccaatgttgttattctaatacaatctgataatgttcactggcattttccactgttggcatctttactatagcctacagttgtttgtttgtttatttgagatggagtcttgctctgttgcctaggctagagtgcagtggcgtgatcttggctcactgcaacctccccctcccaggttcaagcagttctcctgcctcggcctccctagaagctgggattacaggcacgtgctaccacgcccagctaatttttgtatttttggtagagacgtggtttcatcatattggccaggctggtcttgaactcctgacctcaggtgatcagcctgtctcggcctcccacacacagtgctggggttacaggtgtgagccacgattcctggctgcctacagttctttgtaaagcagacaaaatagtttcattttttaaagaaatgaacatatatgaggcaacctgtacctaacttaggagttcagaaattccctggactgcctatacattttggtttctcattcctaattcccaaagattaaaatctgtcaggaatttggaaacattgaatcacaggccaaaataggaccatgtctccattcattcattcattcaacaattatttattgagcgcatgctatttttcaggcactgtgccacat

SEQ ID NO: 82659 - DNA, 564 bp, Homo sapiens
ccctcccctgcagggagggatcatggcttttcctcctccacatacacacctggctggacagttttcactttttgttaatatttagatattacataatagttatgcacattatatgatccgtatttaggggcgtgtgtgtgtctgtgtgtgtgttagacatgggatcttgctctgttacccaggctggaatacataatagttatgcacattatatgatctgtatttaggggcgtgtgtgtgtctgtgtgtgtgtgagacatgggatcttgctctgttacccaggctggaatacataatagttatgcacattatatgatccgtatttaggggtgtgtgtgtgtctgtgtgtgtgttagacatgggaacttgctctgttacccaggctggaatgcagtggcaccataatggctcagtgcatcctcaaacttctgagctcaagggatcgtcttcaaactcctgagcctccccagtagctgggattacagtgtgccaccaacacacctggctcattgtgtattttccactagagacagggttctccaatgttggcaggctgtctcgagt

SEQ ID NO: 82660 - DNA, 425 bp, Homo sapiens
tcttatacccttactatctgcctaaataatttctatctcctgtatcaataacagtaataatcatgatgtttatttaccacttacaacaggacacacactgttctaaatgctttgtgaagattaacttgtttacaggctctgagcaaatgctgttattttgtccttttaacaaatgaggaagcacaagcacagagaggttaagtaatttgcccacagtcacacagctatgcagtagaatagggagtcaaatccacacagcccagcccctgaatccatggatttatctactgcaccatccttcaagtgtctctttatgcagatacgagcaaatctaaacatattttcttttcttcttttttttttccaaaaggtagcacactgctgccattgttctgcaatttggttttgttctgcacttaacacga

SEQ ID NO: 82661 - DNA, 157 bp, Homo sapiens
cattgacttgtgacaaccaaaaaatctctagaaattgccaaatgtcccctgagagccaagatcacatgtgacagaggatcactgcctttcacgactctcagtaaaaagaatacaaaccaccgggcacggtggctcacgcctgtaatcccagcacttt

SEQ ID NO: 82662 - DNA, 402 bp, Homo sapiens
ccatgttggtcaggctggtctcgaactcccgacctcaggtgatccgcccgcctgggcaactaaggatacatgggaagatacctggagatgccccttgcatgcaaacatctagatacaaaggtggtgctagttatggaaatgtacaagtgcagggaatgatcaaagctcctgaaagagggccccctcaggaggtgctggaacaatagggagagcaagggagagtgaatggagaaggcttccgatgtcccaatgtgctacagaatccatgttataagtggcatgcgtgggaccctattaatacaggtggcctttgaaggcaagtctaagaatgttatatcattgtttccatgaataaatatagccacagtgtgtttgttttgttttgagacagagtttcgctct

SEQ ID NO: 82663 - DNA, 372 bp, Homo sapiens
aaaataaaaacatcagcaggcctatatgccttcgctttcatcttagcagtgcctgttaacagtgaaataatgtgctcattttcatattcgcactgattactctaggggcgcagatttaccagagagacatatcatgaaacccagcaaagggatactgcatctagcagttctggtggtgttttatcattaccttttcacttgagcataaaaactgtttgacaaatactaattgtaaccagcagagctgaatagaatattttaagaaacaaccctaattttcatgaattacatatttgagttcatactgctgcatgtcaagaatgaaaatcactattacaatgatgaaataaagggcatctgtggatttcatct

SEQ ID NO: 82664 - DNA, 409 bp, Homo sapiens
accccttgaaatgtgacctgagttggaaatgggatctttgcagatgtcattagtgaagacgaagtcacactggagtaggctgggccctaaatcaaatggctgttagttttataagaagagggaaatttggacacagacacacacaaagaggaacaaccagcgtgtgaagacagaggcagagattggaatgaggcagccacaagccaatgaaccgctgcagctcccagaggccagaagaggcaagggaatatcctcccctagaggctgcagagggagcacagccctgccagtgccttgattcgagacttcgagacttccagcctccagaactgggaaagaataaatatctgctgttttaagcactttggtttgtggtgctttgtcactggcagccctgggagtagtccag

SEQ ID NO: 82665 - DNA, 443 bp, Homo sapiens
ttaattggttcttggctctgcacgctgtactggatgatacaggatgcatgatgctgacatctgctcggctactggggaggcctcaggaagcttctaatcatggtggaagatgaagggggagcaggcatctcacgtggccagagcaggagcaaggggttgggtcacacacttttaaacaaccagatctcatgagaactcaccattgccagaacagcaccaagccatgagggatccacccccatgacccaaacacttcccaccaagccccacctccaacaccggggattattgtcaacatgagatttcggggacaaacatccacactatgtcgtagccttaaggggatcttacctctttgaagcattgtagagttcagagagtaggacattttgtctactgtattttaaaatactaaatgttctgattatgaaagtcagtcctgg

SEQ ID NO: 82666 - DNA, 248 bp, Homo sapiens
caatcgctcacacaaaagtgcaagtgcgttcacagcgccaaagaggggtgggtggaaatcttaaactgctcttacaagcactggtaacagtttgggaaaatacgtcctacagcatcccacgcgtaggtgaacttgggctctccgtgtgttcagtttggaggacatcgaccacacacaccaatcagcccagcagtggacgattgtaccaccatcgtcttctatctgaaattgttacagcgcttctctgg

SEQ ID NO: 82667 - DNA, 279 bp, Homo sapiens
tggcagactgaagagtttggactttattcctcccctttggattttatgagcttagaataggatggaggtgctactttaggacaattggttccagagcaataacaaagatggtaagaagagagaaaagaaactagaggtagagaggcagtcagggcagcctttgaaacagttgacctactttcttgactctctcctgccctgcagttgctcaggcacccttgctgctcctcctcatcttcctgtcctctatacctggaagtgcctggggctcagccttta

SEQ ID NO: 82668 - DNA, 447 bp, Homo sapiens
cactgttgcccaggctggtcttgaactcctgacctcaagtgatcctcccacctcgactcccaaagcactgggattataggcgtgagccactgtgcctggccagaaagtgttggttgaataaatgattaagactccctagcccagtgccctggggaaaggaaggcatggtataagtcaatcatagtccaagcaaaattataatatttgtatagtatatggagttaaacagactaggctgtttgctctgccccttatggctgaccccaagggctgatggcatcaataccctattagctaggttattgcataccttgcatacctattacctgttctgggcataccagttagggaattaagatatagatagttgctggagtacttggtccctctggagcagtactaggtctgtgaccctgagggtatgttgtccccactgcctgagcctac

SEQ ID NO: 82669 - DNA, 452 bp, Homo sapiens
gtgtatagaagagaacatttcccactggctgctgctttgtgggaagaagaggcataacaaaattcactcacccttccttaaacaaaagtagaggtgcaacttccctgtttgggtttataacactgtagcatctgaaactcagctgcaatactgaattaactgttttccttgtatggctgtggaaaatgaaaccaataactcctcttaatttctgagagcctaaatcccctaggtctgctgcattggaataggagtgtggtttctcgcccttacctttacaacttcctatcatctgaaattatttcaaaatataaagttaggaaaaaagaaagcaacagctctaagtgcagtatggcatcctggattgggctgctgcagcaggaaaagggacattgggaaaaatggtaaaatcccaaataaactcctagctattagtatgattgcaccttttt

SEQ ID NO: 82670 - DNA, 363 bp, Homo sapiens
tcaggacagttgtcctctgctggagagagctatcttggtggaatgcgttcctgagggcagaccacatccacagactggtcaatgtgggggtagaaagatcagctctattataaaggtatagtggttacaccccaacctggtgtaactgtgcacggccattccgccccagaactccctgtgggattgtctcagacctgcgttgagatcatctcctcgcaggccaaagtcatcctcttcccagtcccgtttcctttattctcccccagatgttgatcctgggagcatcaaggggaactccatctgtgaaacctggaggtcccctcaggatttgcagagatctaggggaaaagacccagacttttt

SEQ ID NO: 82671 - DNA, 745 bp, Homo sapiens
gggcaaagtaaggcgacatggttgtggtccctgtcctagcttcagccctgttctcttcttttctggatgccctcctccatctcccatgcccagcacactgtccatgaaaggggcttgtcttaggttctctagactcagaggctgagatggaattcttgtgcaaatgattaattgagggaaagccctgagaagaaacctatagtgagggggtggggatgaggagagaagcagtgtggggcagaaggggctgggcaaagatggggtttaggaatagtctagcctagacccggtcccactgggaggtctgcagcatctgctgcatctcagaggttgtcctgcccagctaaaggggctgagctgttacactctcccatctgtcaaccaaatgccatgcactgccccagggtagggtaaaatgtcccaggcatcatccaccaagaggctctttgtaaccaaggatagtgctttcaataaatgaacaagcatgtgagccgctagcagccagcatctggggcatgggtgctctgtgctggaatgattaagcagttccattcatgctagtgacatcccttaatgagaccccctacctccctccctctcttcccctcttctttccttcaacagatatttattagtaaaccaatcctcttggagtttagagtctaagtaaggggataggcagtaaacatgtaaatgaatgagcacaaaataattccaaattgtgaccattgtgaagtacagtacc

SEQ ID NO: 82672 - DNA, 252 bp, Homo sapiens
gagagatcaagcaatttgcccaaagtgacaacactagtaaactctagagctggaagtcaaattcagtctagcaccggaggccattctcttaaccactctattcttcctctgctctgctgctagttgacatcttttaagagatgccaggaagagaaataccctcatgagttgatgaaggccagttagctagcagtgcattcacacagcattgtcatttaactgcatgatttacccggttacctcaaaagaaaa

SEQ ID NO: 82673 - DNA, 235 bp, Homo sapiens
caatgtagtcgctcttattattcttatatgaccttcctatgaaatgagatgggttccacctgttcatgagccttttttgaggaaaggacaatatcacttagattcttaattcctaataaagatggaaatgggatgggataaaggttgctccattgaaaataaattgcattacaaagatgaatgtaataaacttgatgttttttagatctaaaacagactgattcagctttttaaa

SEQ ID NO: 82674 - DNA, 429 bp, Homo sapiens
tcctgtgatattctactttctgcacatcactctggccatggttatttagtttccccaaacagcccatggttgctcatggtccaccttcttggctgaccagaatcctgtgtggcctcacagtgatctgtcttccttgcctcttctcctgctttgctccagctaaaaggaaccactggctaggggcaggtccctagaaaaccagaaaatgaaatggccaaaatgcttgattttgttgctaagtaagaggccctacctcctctgagcacgaattcttcatggaaccgcagggtgctctagtctgggtggaaggcagcttcctgtaagtcacctgcatctaacaaaacgtagaggaatttgacatactgtcctcccccgaggttccacttcatttatgtgtgtgtgtgtgtgtgtgagtgtgtgtcaatttgt

SEQ ID NO: 82675 - DNA, 453 bp, Homo sapiens
ctgtctactttatattcctaagataatcaggcaggtgtgtgaagcaaatgtgagtggctcagtttcattttgaactcctgatacggatattagggatcttggacttagaaggtttgattgctatagtatttcagtaataggaggtctgcaatggcatccgatgttaataccctctctcaggaaagatgataatggcttttctccatccctaaatgaaccaaaaaatgatagaacagacatctgtggatggagattgctggaagattagtgtgaaggggaaaaaggatcagcaatagcgctgccgttgctgggaagggggtggggagaggctgtcgcagaggaagactaaacagtgacgagttaatgggtgcagcacaccaacatggcacatgtatacatatgtaacaaacctgcacattgtgcccatgtaccctagaacttaaactattatta

SEQ ID NO: 82676 - DNA, 440 bp, Homo sapiens
accaatgatgtcatgccttttcccgcatgtgtgtatacctttactgttgcctgactggcaaatctttctttctctctctctctctcacacacacaacccccccccgccaatgtgctcacgcatactcactcaggcacaaaattatctatctttagatttttgttggactcttctcttttgtaaaacaatcagcataacaactgaaaaaagaatttgaaagaaaggaatatttttcttcctcttctcctctctggctacctcccagcaaactaagctatgcagttctggattctgtctgacacatcttaactactgacatttagcagatgcttctcgaagaaatgggggagggtgaaggtgaagcaggggtgtgatataagtaattagactaacgatgtctcaattatcaagatgttcccacagtgtccccttctgttagc

SEQ ID NO: 82677 - DNA, 770 bp, Homo sapiens
ccatttggaacaaggtctttagaattagattttaatagattaaaactcttcttatttactgtatttgtagctcttaatgattgaatagatctctgtggttccttttcaaggatttcttgaaacatactgaaattcatgggtagatcatttaaggctcctgcgccctttaatatattacctagaaatggtagaatattttagaacacatacaaagaaggaggccgggcgcagtggctcacacctgtaatcccagcactttgggaggccgaggtgggtggatcacgaggtcaggagatcgagaccatcctggctaacatggtgaaatcccgtctctactaaaaatacaaaaaattagccgggcgtggcaacggccgcctgtggtcccagctactcgggaggctgaggcaggagaatcgcttgaacccaggaggcggaggttgcagtgagccaagaccgcaccactgcactccagcctgggcaacaaagtgagactccgtctcaaaaaaaaaaaaaacacatacgcaaaaggttaaggtaaaacacaattcattgtatatacatttgcaacaaagttcattaaagtctggggaaaaattgtataatgtaaagctccttagcttgatgtataatgaaaaaatgtagatattacgttaataataaatagcgtgaataatattggcactgggtatacacttactgaaaaggctgggcttttctaatgttaatcctgaggaagaggagagtctcttgcttaaaagtcaacactggta

SEQ ID NO: 82678 - DNA, 270 bp, Homo sapiens
atgtaggggtgaatgtacctcacacatgctattacatttcattctcaccacaactttgggaagtagatattatcatccccacgtgacagatggggacacagtatacacagattgagtaacatccaagattatacaattagtggcagagcagctctaactccaaagtccatttattttccagcatattattaagattgtaaagcactgcttttcaaagttaaatgtttgtagtgatcatctggtttttgtttttattttttaatgcatact

SEQ ID NO: 82679 - DNA, 397 bp, Homo sapiens
gatttgtatgagattagccggccgtggattcagaatcgctctttgtgtgatgggtcccaggggttccttttgaccacagagccagcctgaaactacccacgggtgctgtggaccccttgatcatggcgggatggaaatgggctgtgccctcagccgggactcaggactgcagcatgtctgggcagcagcctggaagctggccagcctcggcgcccttggggacagcccttgacactctggctcggtgccctgagtgagggggcgccaccctgggctccctgggatgcgagcaggacccaagccaggctgctggaccgggacagtcgcgtcatgttgctgttgtccccttcctgcagcatctccatactctcctaaaatcccatctgtcagacagtgt

SEQ ID NO: 82680 - DNA, 856 bp, Homo sapiens
ttccacctgaaactaccaaaatagaaaaaaaaaattttcctattaaaatggaaaaagtctaagtgctcaggtagaatcattgaattatcatttttgctagagttgaccttatgcatttcaaggctggcaccatcatgtacaggaacaatatgctcattgctcctcccacccatccccaccatgatgaagaaaagagctgattagtgaacaactaataaatatgtgccatctgggtactagtaactttaaatttttatttaatgtatttttcattttttaagaaaataccttgtgaagtagaagttatcatgcctttacaataaaaaaaaagctgaagctcaggggtgttaaattatttcccccaagtcaaacagcctggaagtcacataagcgaagattcaaacccaactgtcatgtaatagagcccacattctctccaccgtatttacgtgtgccctcagataccgaaaattctccacaaccagcaagaataggaggtacacatatttctgtactcttctcttccatttctctttttcccgaagaatcatactcattacagataaagtatctctctgggagatgctgttctttctttacctggaaccttcttccctttctggctccttctcatccttgaagtctcaacctgaatttttagacaggtcttccctctttagagaggtctttgctaacgccctagtctgaattagattccccctgaattctttcccgtaacaccctattcttgtcttttatagccctctccaaagttgaaatacgtatttatgtatagcgttacttgtgtaaagtctctccccagctataatacaatagcccaggctgtggtatattt

SEQ ID NO: 82681 - DNA, 417 bp, Homo sapiens
caaaggaagcccttggcaaaaaggtaaaaatgaaggacgcttcattcattctcaacattttgaaaattgtgtcttttattatcttcctgaacctctgctactttctgacccctgattccatagttttctctttaaccaattttcagctttagttttccctcaggtaacgcagagcaattcaacatttttataatcctttcagaaattgttgctttaatcctcttctctcaaacctcactcctagaccctggctgaaacatcttttggttctgaggaaacctctgtgaactgaaaatatactgaaaactggtcctgtattcgttgttcaaaattaattaaatagaagagttactttccaaaatagcagaactcattagagcatcagaactcagatacacacttatatgaaagggaaca

SEQ ID NO: 82682 - DNA, 392 bp, Homo sapiens
  misc_feature (93)..(93): n is a, c, g, or t
  misc_feature (337)..(337): n is a, c, g, or t
aggaccttgtggcaagagggactgtcccatgtggtggaactgaaagaaaacaggaaggccagagggcagagggcagagggcaggcagcggcancgggaggggggttagcaaggccaggccaggcaagccatggcccaggtttttctttgtggcctaaggtcattgggaagttatcacaacgttttaattagagttaaaaagcaaaagaactgtaagttcttaaaaatgggtcattattacattttttaaaatatctattgtcataattggttttcactgggaaaaagtcattgttgagataagtatgtgtttctgaaaacagttcatctctttttantgccatatattcttgtgtttagtaatctaaattcttaccatgtcggttggctcct

SEQ ID NO: 82683 - DNA, 134 bp, Homo sapiens
catgtttttatctggacagggccagcggggctttctggtttgacacaccatccaatgtagaaatgcctctccaacattagcgatagtcatgatctgacaagcatgtgcaccaagaacttcccttgggccaggca

SEQ ID NO: 82684 - DNA, 352 bp, Homo sapiens
ggctaaaattaaaaagattgataataacaactgctggtgaggaagcgagacagctggaaattttagacattgttagtaggagtttaaatttgtttaaccactttggaaaattttatggcagtttctacctaagctaaatgtttgcttcccttttgaatcagcatttctgctcctagctatgcactaggaaaaatgagttcatatgtccaccaatggatatctcaaataatgttcatagcagcattattcacaatagccccaaagtagaaacaacctaaatgtcttttaacaggagaatttataaacaaattgtagtatattcatacagtggaatactccacagcaataaaaa

SEQ ID NO: 82685 - DNA, 604 bp, Homo sapiens
ttgcagagtgcattcactttggtgctagtttcttcataagaatcatttaaaaactcatatttataaaataatgtctttgccaaaactaaattgagaattctgtgcttcctgtcagttaatggtgacttgttttgacctattcataccaaaagatctaaatgttagaatctgctaaaagtagaaattataactagaaaaatatgaaaatgtaagcaactccctagtaatgaatatttgaagttgtgtgaacaccttacctctactcgtatctacaaattctggatcagggaaatatcttttttaggttgttttaaagtagtctaggacctaaacaaacatgcattatttcattaaatcttagcaagtatgaatcaacaggccagactttgcctccagtttttttctgtgcctactaagcagcttccttctttatgttaaccagatctcctattagtcactgggcaagtatttgtttaaaagtcttgagaagccagacctggtggtgtgtgtctgtagccctagcaactcaggaggcataggtgggaagatcactttagcccaggagtttggggccagccttggcactgtagcaatacttcatctt

SEQ ID NO: 82686 - DNA, 568 bp, Homo sapiens
gcgtcttggtggtagtggtcccccgggcccaggtgtcttttggctgggatgggggatgggggatggagtggctggggtgggggatagggcggctggggtgggggatggggtgggttccacagcatcttctcttctctgggttgtgcttcaccagcacgtgggaaggagctggtgacgggtggtgccgagtgcgccagtccctgcagttagcgtcctggtcatggctttgctcaggttttcttggtctcctaaatataaaataccaactttatattcctcaggcacctttccctccccccctcattggttctctctcggccctgtgtagagggcagttcaacagagtcctgtaatatcctgaagtggaggggaggctgcctgcctgccagagagcagcctcaccagccctgtccccaaggccgagatgcaggcagcaggctggggcctcggcgtccagtactcttgtgaacccgcgtccgtccctcccggccatccgacccccccgagtggcgttttctgggctgtgtgtctgtcacctggccccacagttcgtgatttagagcagccc

SEQ ID NO: 82687 - DNA, 750 bp, Homo sapiens
atctgttagtaaattctgcctaggtcctggccagtggtgagccatccatgcacagagagaccccagagtccagcagaaggaggcagccggaaggtcaacagcaccaagcagagactgcagcagagattttcatttgagtccagacaaattaacttccagaacaaaaatcaacactcttcagaaaaaagaagtcactacagttaccatctacaatgtccagtacaccatcaaataacactagatgttcaaagaaacaggaagatgtggcccatagttggaagaagccaatagaaattgatcctgaggtaatgcaggtgttgaaattagcagaaaagaacattaaagccgctagtatgtgttcaaagatttaatgacagtatgatcacaataaacaaatgacagagcagagaaatggcaaccataaaaaataagtgaaaattctagaaataaaaactactgtaactgaaattttaaaatgcacgaaacttaatagcagtttgaagatggtgaaaaattacatatccaagaagttcaacaaaccctgagcaggacaaatacaaagcaaaccctcctaagaacatcacaatcaaactgctggaagccaaaaatcccaggaggagcttgaaagcacctcatcatataacataaaggagcaacgcagctaccagagtgactgacttcttagaaacagcaaaggggcaacatgacgagactatgaaaaaataaaatgaaaagtaaaaattgccagtt

SEQ ID NO: 82688 - DNA, 615 bp, Homo sapiens
acggcagctaaacagtcagccaattagaggttcacttggcagcagaggccagagccatgtgctgatctcatccaggctcaggaaagcacatcaaaagggcagagtaggccgggtgtggtggctcacgcctgtaatcccggcactttgggaggccgaggtgggcggatcatgaggtcaggagatcaagaccatcctggctaacacagtgaaaccccgtctctactaaaaatacaaaaatattagctgggcgtggtggcaggtgcctgtagtcccagctactccagaggctgaggcgggagaatggcgtgaacccgggaggtggagcttgcagtgagtggagatcgtgccactgcactccagcctgggtgacagagcaagactccgtctcaaaaaaaaaaaaaaaaaaagcagagtggcagctgtcaagagcaagactcacgtccattaggctgcactgacttttagtgtcacttttgcagtggatttcagaaccaccaagagtcttttaaaaatacagtagttttctacacaatagaaaaaatttaaaaatcttggactataaataagtttaatcttactatgtatcttctgcatctagatgttttggttcagcat

SEQ ID NO: 82689 - DNA, 750 bp, Homo sapiens
gattgaccctggtttttagtttattgggtatactgagcaaactcatactacaatatttgcttttacatatgctaaatataaaggaaatataaatctttgaagagagaaaaaatgttaaaagcacacaagctaaagaatgtttattttcaaagcattaaccatttagtaaaagggaatttaagggagcaaatggatcataacattttagagttataaagaatattacatgttattcaggccactctcctgacatcataggtgaggaaattaaagcccccaaaggttaactgaattgctgtgagtccaaatggttatttgatgggacaattggtttaaattcattgtttctaaacaatgcaaccaagaaaccatttattgggtatggcttaccatgcttcattctgcaagacacttaacacactgaacacaactgattagaccagggttgcttcttcagttgaagactatgaatggactagatgagaatttatgaagacattggcttggggtcttttgctcagtggatccattaattcctacaaaaacaaagcaacaaataaaaacaaaacctaactgaaccagttagatccttttggaagagtttgagtacaagaaatacttaaggttaccaaatagtagttggaaaaagtagaaagagatgttggagtcagaggagctgagtcatgagaaaaaaaagacttatggactgctgttccattctgaataagaattctactctttattcactct

SEQ ID NO: 82690 - DNA, 215 bp, Homo sapiens
ccttaggaaaacactttaaagtttaagagtgaaaaataagaattgaagtccttcctgggatgctaaagcacaggacaccaaatatcttggctgctggatatgaattaatttggagcatcacctctggctttccctgcaggaagaactaaatctttttttgtttgtttaaatagagacagggtctcctcatgttgcccaggctggtcttgaactcc

SEQ ID NO: 82691 - DNA, 438 bp, Homo sapiens
taatacataaaattggtaccaggggtggggtattactataaagatacctgaaaatgtggaaccaactttggaggaaaggttggtacaatttggagggctcagaagaaggcagaaagatgatggaaagtttggagcttcctagagacttgttaaattgttatgaccgaaatgctgatagtgacatggacaataaggtccatactgaggtggtctctgatgaagatgaagaacttatttgaaactggagtaatggtcacaactactgtgcttcagcaaagagactggtgacactgtgccccagctcaagggatctgttgaaatttgcacttgagagagatggtttagggcaagcttgtcaaacctgtggtctgtgggctgcatgctgcccaggacagctttgaatgtggctgtattagtctgttttcatgctgctcataa

SEQ ID NO: 82692 - DNA, 216 bp, Homo sapiens
ctggagttactggtagggaaatgatggcagccagtgtaggtgccttaacgaacaggtgacccactagcatctgggacataatcctcctgggccagtggaaaactccactgtggaaagccagcttcagtatttttccatttaagggcctacatttgggactgcccccaggagtattaaacacctcagcacttctggcctgcccatcctgcctgccaa

SEQ ID NO: 82693 - DNA, 156 bp, Homo sapiens
tgttgggattacaggtgtgagccactgcacctggcccttgtaactgatttttaaatatagtatgaggggtctaatttggtgaggaatttaattttgttttttccctatgagtaaccagttgtctcaacatcattagtgaatagtttttccttttct

SEQ ID NO: 82694 - DNA, 364 bp, Homo sapiens
ttttgtcgccaaaagtgaccttgaggaaccctgggagctcaggaaggaaggagcgcccagaagcagggacagggagctggttggggaggaccagaaatcaggttatcaatactctggctgaccatcatcatcgtgggactgactttggtggaagtccttggttacatattattattgcgtttccgacaagttataaagttgtcattaccctctggatagtttacctttgggtgtctctcctgaagactatcttctggtctcgaaatggacatgatggatccacggatgtacagcagagagcctggaggtccaaccgccgtagacaggtccagggcagaggaccaacgtcgacgcggccgcgaat

SEQ ID NO: 82695 - DNA, 541 bp, Homo sapiens
ttttgtcgccaaaagtgaccttgaggaaccctgggagctcaggaaggaaggagcgcccagaagcagggacagggagctggttggggaggaccagaaatcaggttatcaatactctggctgaccatcatcatcgtgggactgactttggtggaagtccttggttacatattattattgcgtttccgacaagttataaagttgtcattaccctctggatagtttacctttgggtgagtatactaactttctgtagaggtatacttgtaatcacaaataagaataaattatataaaacaattcacatttctggacttcattatgaatatgtggttttacccaaaaaatcagggaaatgatttattagcataagaattatgaaaatatctgccatttgcgttatgaaaattaaataggtcactgtttgtttaatagaatgtcaacagagcttttggtcaaaaataagtttttttaacctttgtgctatttatcacaaatggagtatgaggtttcgtcacttaaataggaaattctttctaaactc

SEQ ID NO: 82696 - DNA, 746 bp, Homo sapiens
tgtttctccatgttggtgaggctggtctcaaactcccgacctcaggtgatccgcctgcctcagcctcccaaagtgctgggattacaggagtgagccactgtgccagcctcatgtcattcttgtgtgtgtgtgtgtgtatgtgacagagtctcattctgtcgctcaggctggagtgcagtggtgtgatctcggctcactgcaacctccgcctcccagcttcaaacggttctctgcctcagcctcccgagtagcttggattacaggcgcccgctgccatgcccggctaatttttgtatttttagtagagatggggtttcaccatcttggccaggctggtcttgctcctgaccccgtgatccacctgcctcagcttcccgaagtactgggattatacgcatgagccaccgtgcccagccgtcattcttatattattatttcctaggtgtctctcctgaagactatcttctggtctcgaaatggacatgatggatccacggatgtacagcagagagcctggaggtccaaccgccgtagacaggaaggtatggctctgttggaatccgcatagtgtggaaatgagtttgccctggaaagggaaagaacagcttcttgccctcaggtttctcaccttctcctctcctcactctcaccaagggctgaggtccatttgtatgcacacaaagaaaagagtttcttcctttcgaggaaataaaattggcctgaaagacgtcattactctacggagg

SEQ ID NO: 82697 - DNA, 369 bp, Homo sapiens
agcgtcagctcactccccttccaccctcagctccaccctcagcagatgataatatcaagacaactgccgagcgtctgcgggggccgcttccaccctcagcggatgataatctcaagacaccttctgagcgtcagctcactccccttccaccctcagctccaccctcagctccaccctcagcggatgataatctcaagacacgtgccgagtgtctgctccatccccttccaccctcagcggatgataatctcaagacaccttccgagcgtcagctcactccccttccaccctcagctccaccctcagcagatgataatatcaagacacctgccgagcgtctgcgggggccgcttccaccctcagcggatg

SEQ ID NO: 82698 - DNA, 1197 bp, Homo sapiens
ttttgtcgccaaaagtgaccttgaggaaccctgggagctcaggaaggaaggagcgcccagaagcagggacagggagctggttggggaggaccagaaatcaggttatcaatactctggctgaccatcatcatcgtgggactgactttggtggaagtccttggttacatattattattgcgtttccgacaagttataaagttgtcattaccctctggatagtttacctttgggtgtctctcctgaagactatcttctggtctcgaaatggacatgatggatccacggatgtacagcagagagcctggaggtccaaccgccgtagacaggaagggctgaggtccatttgtatgcacacaaagaaaagagtttcttcctttcgaggaaataaaattggcctgaaagacgtcattactctacggaggcatgtggaaacaaaagttagagctaaaatccgtaagaggaaggtgacaacgaaaatcaaccatcatgacaaaatcaatggaaagaggaagaccgccagaaaacagaaaatgtttcaacgtgcgcaagagttgcggcggcgggcagaggactaccacaaatgcaaaatccccccttctgcaagaaaggctctttgcaactgggtcagaatggcggcagcggagcatcgtcattcttcaggattgccctactggccctacctcacagctgaaactttaaaaaacaggatgggccaccagccacctcctccaactcaacaacattgtataactgataactccctgagcctcaagacacctctcgagtgtctgctcactccccttccaccctcagcggatgataatctcaagacacctcccgagtgtctgctcactccccttccaccctcagcggatgataatctcaagacacctcccgagtgtctgctcactccccttccaccctcagcggatgataatctcaagacacctcccgagtgtctgctcactccccttccaccctcagctccaccctcagctccaccctcagcggatgataatctcaagacacgtgccgagtgtctgctccatccccttccaccctcagcggatgataatctcaagacaccttccgagcgtcagctcactccccttccaccctcagctccaccctcagcagatgataatatcaagacacctgccgagcgtctgcgggggccgcttccaccctcagcggatg

SEQ ID NO: 82699 - DNA, 411 bp, Homo sapiens
ttaatttctccataatctcttcatctgtcatcttagtcttctttttctgtttgttctaaagacttggcagcaccatccacatgtgaatcaccaactggtgcaggaacagggtcaattacagaccgtgtgtaaattgatttcgtatgatccggtcgcggggcaataacgggaggagcagtctcttcatcatcatgctcctcctttgtcagccaatcacagtttgaaacctttgccctctgttccagaagagaaaaagcccaggcataaaatcatctccatattctcaggcacagagaaaggaagtaaaaagaaagaaaaggaacggccagaaatttctcctccatctgattttgagcacaccatccatgttggctttgatgctgttactggagaattcactgacatgccctg

SEQ ID NO: 82700 - DNA, 2275 bp, Homo sapiens
ggtctcttagaatccattgattagaccagtagcttttggtagtaccatgatgtttccatttgacttttcaaacatttttcagctgaccattaccagctttgttgggggtaaactcaagagagttacatcttttacacattgatttttccagattttgcaaatgtcactataaatggataatattttctaattgggagttgtggcaggggtagttattactgttttttgcttgttcgtgctattttttactttgttactaattgtattttttccaattccaggccatttcataattctgaatcatgtctgataacggagaactggaagataagcctccagcacctcctgtgcgaatgagcagcaccatctttagcactggaggcaaagaccctttgtcagccaatcacagtttgaaacctttgccctctgttccagaagagaaaaagcccaggcataaaatcatctccatattctcaggcacagagaaaggaagtaaaaagaaagaaaaggaacggccagaaatttctcctccatctgattttgagcacaccatccatgttggctttgatgctgttactggagaattcactggcatgccagaacagtgggctcgattactacagacctccaatatcaccaaactagagcaaaagaagaatcctcaggctgtgctggatgtcctaaagttctacgactccaacacagtgaagcagaaatatctgagctttactcctcctgagaaagatggccttccttctggaacgccagcactgaatgccaagggaacagaagcacccgcagtagtgacagaggaggaggatgatgatgaagagactgctcctcccgttattgccccgcgaccggatcatacgaaatcaatttacacacggtctgtaattgaccctgttcctgcaccagttggtgattcacatgttgatggtgctgccaagtctttagacaaacagaaaaagaagcctaagatgacagatgaagagattatggagaaattaagaactatcgtgagcataggtgaccctaagaaaaaatatacaagatatgaaaaaattggacaaggggcttctggtacagttttcactgctactgacgttgcactgggacaggaggttgctatcaaacaaattaatttacagaaacagccaaagaaggaactgatcattaacgagattctggtgatgaaagaattgaaaaatcccaacatcgttaactttttggacagttacctggtaggagatgaattgtttgtggtcatggaataccttgctggggggtcactcactgatgtggtaacagaaacgtgcatggatgaagcacagattgctgctgtatgcagagagtgtttacaggcattggagtttttacatgctaatcaagtgatccacagagacatcaaaagtgacaatgtacttttgggaatggaaggatctgttaagctcactgactttggtttctgtgcccagatcacccctgagcagagcaaacgcagtaccatggtcggaacgccatactggatggcaccagaggtggttacacggaaagcttatggccctaaagtcgacatatggtctctgggtatcatggctattgagatggtagaaggagagcctccatacctcaatgaaaatcccttgagggccttgtacctaatagcaactaatggaaccccagaacttcagaatccagagaaactttccccaatatttcgggatttcttaaatcgatgtttggaaatggatgtggaaaaaaggggttcagccaaagaattattacagcatcctttcctgaaactggccaaaccgttatctagcttgacaccactgatcatggcagctaaagaagcaatgaagagtaaccgttaacatcactgctgtggcctcatactcttttttccattttctacaagaagccttttagtatatgaaaattattactctttttggggtttaaagaaatggtctgcataacctgaatgaaagaagcaaatgactattctctgaagacaaccaagagaaaattgcgaaaagacaagtatgacttttatatgaaccccttctttaggggtccagaaggatttgtgggactgaattcactaggcttaggtctttcaggaaacaggctatcaggggcatttatcatgtgtgagattggattctacttgggtgatttggtggatagacccatgaatggcccctgggggttttcaatcttggattggaggtgggggtttcagagtgttgccacgtctagctcctctccc

SEQ ID NO: 82701 - DNA, 1704 bp, Homo sapiens
ttcccgccccgcttccccttccctcccctcccctccccgcaccgcgcgctagcccggggcggctccgcagcccgccgggagctctgaccgaggcgcctcgctggggcggggaccttgccttgcccggggccatttcataattctgaatcatgtctgataacggagaactggaagataagcctccagcacctcctgtgcgaatgagcagcaccatctttagcactggaggcaaagaccctttgtcagccaatcacagtttgaaacctttgccctctgttccagaagagaaaaagcccaggcataaaatcatctccatattctcaggcacagagaaaggaagtaaaaagaaagaaaaggaacggccagaaatttctcctccatctgattttgagcacaccatccatgttggctttgatgctgttactggagaattcactggcatgccagaacagtgggctcgattactacagacctccaatatcaccaaactagagcaaaagaagaatcctcaggctgtgctggatgtcctaaagttctacgactccaacacagtgaagcagaaatatctgagctttactcctcctgagaaagatggccttccttctggaacgccagcactgaatgccaagggaacagaagcacccgcagtagtgacagaggaggaggatgatgatgaagagactgctcctcccgttattgccccgcgaccggatcatacgaaatcaatttacacacggtctgtaattgaccctgttcctgcaccagttggtgattcacatgttgatggtgctgccaagtctttagacaaacagaaaaagaagcctaagatgacagatgaagagattatggagaaattaagaactatcgtgagcataggtgaccctaagaaaaaatatacaagatatgaaaaaattggacaaggggcttctggtacagttttcactgctactgacgttgcactgggacaggaggttgctatcaaacaaattaatttacagaaacagccaaagaaggaactgatcattaacgagattctggtgatgaaagaattgaaaaatcccaacatcgttaactttttggacagttacctggtaggagatgaattgtttgtggtcatggaataccttgctggggggtcactcactgatgtggtaacagaaacgtgcatggatgaagcacagattgctgctgtatgcagagagtgtttacaggcattggagtttttacatgctaatcaagtgatccacagagacatcaaaagtgacaatgtacttttgggaatggaaggatctgttaagctcactgactttggtttctgtgcccagatcacccctgagcagagcaaacgcagtaccatggtcggaacgccatactggatggcaccagaggtggttacacggaaagcttatggccctaaagtcgacatatggtctctgggtatcatggctattgagatggtagaaggagagcctccatacctcaatgaaaatcccttgagggccttgtacctaatagcaactaatggaaccccagaacttcagaatccagagaaactttccccaatatttcgggatttcttaaatcgatgtttggaaatggatgtggaaaaaaggggttcagccaaagaattattacagcatcctttcctgaaactggccaaagaaccctctcccgggatcctttaaagtcggcccgcaaggatcc

SEQ ID NO: 82702 - DNA, 515 bp, Homo sapiens
ggtctcttagaatccattgattagaccagtagcttttggtagtaccatgatgtttccatttgacttttcaaacatttttcagctgaccattaccagctttgttgggggtaaactcaagagagttacatcttttacacattgatttttccagattttgcaaatgtcactataaatggataatattttctaattgggagttgtggcaggggtagttattactgttttttgcttgttcgtgctattttttactttgttactaattgtattttttccaattccaggccatttcataattctgaatcatgtctgataacggagaactggaagataagcctccagcacctcctgtgcgaatgagcagcaccatctttagcactggaggcaaagaccctttgtcagccaatcacagtttgaaacctttgccctctgttccagaagagaaaaagcccaggcataaaatcatctccatattctcaggcacagagaaaggtaaatagcgcttctggctttcagag

SEQ ID NO: 82703 - DNA, 2122 bp, Homo sapiens
ttcccgccccgcttccccttccctcccctcccctccccgcaccgcgcgctagcccggggcggctccgcagcccgccgggagctctgaccgaggcgcctcgctggggcggggaccttgccttgcccggggccatttcataattctgaatcatgtctgataacggagaactggaagataagcctccagcacctcctgtgcgaatgagcagcaccatctttagcactggaggcaaagaccctttgtcagccaatcacagtttgaaacctttgccctctgttccagaagagaaaaagcccaggcataaaatcatctccatattctcaggcacagagaaaggaagtaaaaagaaagaaaaggaacggccagaaatttctcctccatctgattttgagcacaccatccatgttggctttgatgctgttactggagaattcactggcatgccagaacagtgggctcgattactacagacctccaatatcaccaaactagagcaaaagaagaatcctcaggctgtgctggatgtcctaaagttctacgactccaacacagtgaagcagaaatatctgagctttactcctcctgagaaagatggccttccttctggaacgccagcactgaatgccaagggaacagaagcacccgcagtagtgacagaggaggaggatgatgatgaagagactgctcctcccgttattgccccgcgaccggatcatacgaaatcaatttacacacggtctgtaattgaccctgttcctgcaccagttggtgattcacatgttgatggtgctgccaagtctttagacaaacagaaaaagaagcctaagatgacagatgaagagattatggagaaattaagaactatcgtgagcataggtgaccctaagaaaaaatatacaagatatgaaaaaattggacaaggggcttctggtacagttttcactgctactgacgttgcactgggacaggaggttgctatcaaacaaattaatttacagaaacagccaaagaaggaactgatcattaacgagattctggtgatgaaagaattgaaaaatcccaacatcgttaactttttggacagttacctggtaggagatgaattgtttgtggtcatggaataccttgctggggggtcactcactgatgtggtaacagaaacgtgcatggatgaagcacagattgctgctgtatgcagagagtgtttacaggcattggagtttttacatgctaatcaagtgatccacagagacatcaaaagtgacaatgtacttttgggaatggaaggatctgttaagctcactgactttggtttctgtgcccagatcacccctgagcagagcaaacgcagtaccatggtcggaacgccatactggatggcaccagaggtggttacacggaaagcttatggccctaaagtcgacatatggtctctgggtatcatggctattgagatggtagaaggagagcctccatacctcaatgaaaatcccttgagggccttgtacctaatagcaactaatggaaccccagaacttcagaatccagagaaactttccccaatatttcgggatttcttaaatcgatgtttggaaatggatgtggaaaaaaggggttcagccaaagaattattacagcatcctttcctgaaactggccaaaccgttatctagcttgacaccactgatcatggcagctaaagaagcaatgaagagtaaccgttaacatcactgctgtggcctcatactcttttttccattttctacaagaagccttttagtatatgaaaattattactctttttggggtttaaagaaatggtctgcataacctgaatgaaagaagcaaatgactattctctgaagacaaccaagagaaaattgcgaaaagacaagtatgacttttatatgaaccccttctttaggggtccagaaggatttgtgggactgaattcactaggcttaggtctttcaggaaacaggctatcaggggcatttatcatgtgtgagattggattctacttgggtgatttggtggatagacccatgaatggcccctgggggttttcaatcttggattggaggtgggggtttcagagtgttgccacgtctagctcctctccc

SEQ ID NO: 82704 - DNA, 1999 bp, Homo sapiens
  misc_feature (4)..(4): n is a, c, g, or t
  misc_feature (76)..(76): n is a, c, g, or t
cccnttattgccccgcgaccggttcatacgaaatcaatttacacacggtctgtaattgaccctgttcctgcaccanttggtgattcaccatctttagcactggaggcaaagaccctttgtcagccaatcacagtttgaaacctttgccctctgttccagaagagaaaaagcccaggcataaaatcatctccatattctcaggcacagagaaaggaagtaaaaagaaagaaaaggaacggccagaaatttctcctccatctgattttgagcacaccatccatgttggctttgatgctgttactggagaattcactggcatgccagaacagtgggctcgattactacagacctccaatatcaccaaactagagcaaaagaagaatcctcaggctgtgctggatgtcctaaagttctacgactccaacacagtgaagcagaaatatctgagctttactcctcctgagaaagatggccttccttctggaacgccagcactgaatgccaagggaacagaagcacccgcagtagtgacagaggaggaggatgatgatgaagagactgctcctcccgttattgccccgcgaccggatcatacgaaatcaatttacacacggtctgtaattgaccctgttcctgcaccagttggtgattcacatgttgatggtgctgccaagtctttagacaaacagaaaaagaagcctaagatgacagatgaagagattatggagaaattaagaactatcgtgagcataggtgaccctaagaaaaaatatacaagatatgaaaaaattggacaaggggcttctggtacagttttcactgctactgacgttgcactgggacaggaggttgctatcaaacaaattaatttacagaaacagccaaagaaggaactgatcattaacgagattctggtgatgaaagaattgaaaaatcccaacatcgttaactttttggacagttacctggtaggagatgaattgtttgtggtcatggaataccttgctggggggtcactcactgatgtggtaacagaaacgtgcatggatgaagcacagattgctgctgtatgcagagagtgtttacaggcattggagtttttacatgctaatcaagtgatccacagagacatcaaaagtgacaatgtacttttgggaatggaaggatctgttaagctcactgactttggtttctgtgcccagatcacccctgagcagagcaaacgcagtaccatggtcggaacgccatactggatggcaccagaggtggttacacggaaagcttatggccctaaagtcgacatatggtctctgggtatcatggctattgagatggtagaaggagagcctccatacctcaatgaaaatcccttgagggccttgtacctaatagcaactaatggaaccccagaacttcagaatccagagaaactttccccaatatttcgggatttcttaaatcgatgtttggaaatggatgtggaaaaaaggggttcagccaaagaattattacagcatcctttcctgaaactggccaaaccgttatctagcttgacaccactgatcatggcagctaaagaagcaatgaagagtaaccgttaacatcactgctgtggcctcatactcttttttccattttctacaagaagccttttagtatatgaaaattattactctttttggggtttaaagaaatggtctgcataacctgaatgaaagaagcaaatgactattctctgaagacaaccaagagaaaattgcgaaaagacaagtatgacttttatatgaaccccttctttaggggtccagaaggatttgtgggactgaattcactaggcttaggtctttcaggaaacaggctatcaggggcatttatcatgtgtgagattggattctacttgggtgatttggtggatagacccatgaatggcccctgggggttttcaatcttggattggaggtgggggtttcagagtgttgccacgtctagctcctctccc

SEQ ID NO: 82705 - DNA, 131 bp, Homo sapiens
aatgtaggaagctgggacatcattctgcctaccacactattattcttattaaatttatataatctgattttgtgccactttcctgcccctcagggttttaaacattcttagaaggtcaccttttcctctat

SEQ ID NO: 82706 - DNA, 629 bp, Homo sapiens
gtctagacgggtcacttacatggttggcagtgcatattggctgctgagtgtgatgcctatctgacctctccatgttacctggagtgctcacaacgtggtagtttgtcccaagacacacaggcaaatactacaaagcttcttaggacctagccttggaggtcctagaatacgacttctgctgcatcctattggaaaagcaagtcattgtgaccagcacagattcaagaaatgggagattcgactctacctgtcaatgtaaacagcagcatgtgcatgcagggaggaaagaaattgagggcatcatcttgaagactatcatatcacaccattattccaactagtgaacattatgttttagatgggtagtactagctactcatctgtcccccagaaacccaagctaagcatggacatattgaagagaatgtcagcaccattaaaaaaactctagaaaaatcacatgtgatgactgaggttaattcagtctgtcaattacatcagtataattgccttcttgtaaccctaagtatggtgaagcagaattgaattctacaaaagtctttcatctgttttcctatggaataattaacaaacccaataaatgtataaatagcatgaaaaaaaaaaaa

SEQ ID NO: 82707 - DNA, 430 bp, Homo sapiens
  misc_feature (2)..(2): n is a, c, g, or t
tntacaggatcttcaaacacgcaatctcaagatgaaggggtctgtgtgagagagagaacgtctgtgcatgtgtgtatgtgtgtgagtgtgtgtgtgagagagaggagagacgggcgggggaggggagagagagagaaaagagagagagagaaaaaaaaacacagcctctttgtaatacctggttgactcagtgaagtctggctctctgagctttactgaattcctccttacttattttggggccggaggtggagatgagttcaaaagtagataaaatttgcctgttacctaaatgagcagaatagattgcggtgtttgcaaacaccggaaatctcaaccctcttttggtgatgggaaccaaaatgatggccctcagcagggaccaccccaaacaatgaggtcagcagaaaacaaggtaccaaccaactcc

SEQ ID NO: 82708 - DNA, 384 bp, Homo sapiens
agtgtagaggtttccccaactgtctgatgattcttagatccctatttatgtttaaggataagaaatcaaaattgggtttaaagctctaagcccatgagtggtgctgttgactgaacttcaccataaggtgatttggccaagccatttcattaaggaatctctgatatattttcagatctttcctcctgggctggccagattctgcagagaacatcttccagttgtctgatgcatagtgagggcctggccagcattctaggacctgagggggcaggtagagaggagtcgcagcacccagggtgcacacatgttcgctgaatcccctttgtcagtaggactaatgtctgctgtgtcctgtgcctcccaattcagagacgcactatt

SEQ ID NO: 82709 - DNA, 364 bp, Homo sapiens
tccaggtagaatcatgttttcttttaattgaatacttaactcacaatgtttcctgttttgcagctgctctgctaataattaggttcccacctctcaagatcattaggagcttcttttccaattcctctgttttgcatgcattggaaggtaagtttccttgtaaaccagattttggactctgcaggctttgcaaatggcctttttaccctcatgtatattgcattttctttggatagtctcatggattctcaaggatattgtattcctgtattttaccattcatgagtttagaagtgtgtttactttcctgagttttcattttctttttcttctgtcatatgtaatttacagagcaaatacctac

SEQ ID NO: 82710 - DNA, 385 bp, Homo sapiens
tttactatctactggtgcgtaacttggggtctttccagggttagcagcctcctaagagttttcctgtctgaattggaagactgtctcatccttggttctggggtccaaatctttcatcagcaattcctcagtgtctttactcgtattatctcattctgccttctctgcaggaaggtggtaggggagaagggacagaaggaagaaagagaaccatttatgtagcacctccagtgtctagcactggactttgattagaaaaagtaatcaataaacatatgtggaatgaattgcattatagagttcctcgtaagatttctccctatttcatactccccgcttccaccctccaacctcccccaaataggaatctctttgagaacaggga

SEQ ID NO: 82711 - DNA, 225 bp, Homo sapiens
aactgtcacttcgtatcaggcccagaaaccttaagactgtaggcaaaatctatagtctgccttggtttggcttcccagcctcaggaggttgttaaaatcggagtgatttttttcttgtgtgatcaatgtagagagaagcagccatgtttctgaagaaaagctgcaatactcctgttattagactggagccctgtgcactgtttccaagctcctcaattcttccag

SEQ ID NO: 82712 - DNA, 103 bp, Homo sapiens
ctgtgatttcgtttagattatttatgttgaaattttttttttttttgcagtgcacagaagcctcaccaatacatgttttatttcagataccatgatagtgtca

SEQ ID NO: 82713 - DNA, 527 bp, Homo sapiens
accacatccacctcattttacagatgagaaactgaggcccgaagagactaagtccaaaggtcctcactaacaagtaggagcaagaaccctatttccagttcagggttttgttgtcaattacgtgttatttgtttatttaaaaaagagaaaaacctattctagtatctcaaaatgcttctacatagttgggaagaaaatgaatacctagaataagtaaatatttaatgaaagctaaatactgaaaacaaattaatgtcatccctaccctgcagtaaacatgctgaaagggctcctaggacagaaataagtagaatcatagccacacttcacagcatctagtagaagttaggtgccccattgctaacatcaccaaacaccaccaccagagtgccttctttttttttttttttttttgagatggagtcttgcattgtcacccaggctggagtgcagtggcactatctcggctcactgcaacctccgcctcccaggttcaagcgtttcttctgcctcagtctcctgagtag

SEQ ID NO: 82714 - DNA, 388 bp, Homo sapiens
aaatattgtatgttctgtggctttagtgctttggctgttgtttgtccctatgtggggagggtactttttctgccaaatccctccttcccttaccccaagtctcgaattccaagttccatttgtgttccagagttccctcaaaggctacctgctccaaaactatcttcatggttttgcacaacgcctagttctctcttctgaactcccatagctttttcccttcaactttttttttcttttttttgagacggagtcttgttctgtcgcccaggttggagtgcaaaggcgtgatcttagctcactgcagcctctgcctctcgggttcaagcgattcttctgcctcagcctcccaagtagctggctaatttttgtatttttagtagagacg

SEQ ID NO: 82715 - DNA, 856 bp, Homo sapiens
ggttctcatttcaggtcatttgaggcagcagatactcgggtgctaaaaatccctccaaacatctcaacattttttccccctcgggatcagtatggtgtcacgggaagaagtttaaagaatgaatagcatgtccagccatcccactgtgtgtctatagatgccaggccagcccaggagatgcactttcagattcctgatggcagccgctataagcaaaagtttcctggaggtgctcctctctctccaatcagcttcccagttctacaaaactggacttcaggttgtcacatatagaggttttcaaccactatcagctttggtcttccatggtattcagcaaagaactagcccacatattgtagtgaagactcccttagatcacatgacagtatttgagactggagatgccatgtagtgagtttgttttttttttttgaaatgagaagcgagacatcaactcacgggtaaagtacccatagccgttattttttccctccattcttccctctctcccttcaccccagctaaagacagaatttgacttcaaattaatttgaggccaatgtttttcatactgctagtgctgagagaagaaaggcaacggcttctcacccgtgttaacttatactttctcttaacccaaggaatcaatactgtatcacttagtcctgggaagagggagtaaaaggtagttgcctgaatgaacctttggcattcatttatctacagaaccctccaaaaacaaaattcctattgaaaggaaacctgcacagcaccagcttgtaccttgcacctgttctgttaaagtcattcacagagcagaatacattagaatagataaaatgttttggtgtgc

SEQ ID NO: 82716 - DNA, 272 bp, Homo sapiens
acaaatgaggcttttgtaggggttgagattcaggaatttagaggaattttagaaatcttctcttagccggccggacatggtggctcacgcctgtaatcccagcactttgggaggccaaggtgggcggatcacctgaggtcgggagttcgagaccagcctgaccaacatggagagaccccgtctctactaaaaacacaaaattagccaggcgtggtggcacatgcctgtaatcccagctactagggaggctgaggcaggagaattgcttgaac

SEQ ID NO: 82717 - DNA, 479 bp, Homo sapiens
caaagctgctgtgctgcaggagacagcagaccagaactaagaaaccaaacctctcctcttgcaccttctatttacaaaatgtcagtgctagctggcgaaggaaaaaaacctataaagggcctaagtccattttttttcacagagcaatccaaaagggtaaaattggagctagaggaaataagtcagtcatccgcacagatcatcccaaccctttgactactcaccttccatatgtactcttctgcacgcatttgtccggtacaatggcaacgcaactctgtatttctgcttaacaagatacagctttctttcttgcaagtgaagaagtgttcatcctctctctaaactgaggagatgaacagccccaagggtcattgtattcatcactggctatataatcaccccagaaattcagtcacagtttgttacctaaagactgaattataaaacctaacatgtaataacttgtgaataaggta

SEQ ID NO: 82718 - DNA, 350 bp, Homo sapiens
ggctataagtcaggggtggggcggggggtggttgggggtgggggctaccgcagggtggggaaccagctaaggctgaaagtttccttgaaaaaatcagcttttgagaaagttcctgttgatgcaaagttactcaacactttctcttgcccagcccagaactacttcctcattctcccagcttggtatctgtaaagacaatcatcctttttgggtaaaggtaaaagagaaaccctagaggaagtacttgctgagaagacaaggttatcccattttacagggaaaagtgttaaaatctgtattgttaacagtagtaacgataacaataacaataaaggtatttccacacaatt

SEQ ID NO: 82719 - DNA, 363 bp, Homo sapiens
gtggggccaggaggctaattaacaacaggatttgtgattcatgtcaccaatacctgctcatcagtaatgcaaagcctgaagtcagttagaaaagtaggcaaaggaaacggaggctgcagggccgcacttctcacttaacagaaagaatgccgtcctgttgggcatggtaatatgtccagctaaaaccatattttgcaactctccttgatgatagagccatgtgacagttttaatcagcaaaatgtaatgacaaattgctaggtgtggcctccaagaaagcaccttgaaaggaaggtagattcagctggcacatgccttatactgtttgcctttctcctctcctcacctgggatatagatgcaa

SEQ ID NO: 82720 - DNA, 782 bp, Homo sapiens
atagtctgctctgagaaaagagccaagttcagggcagagactaccttcctgggtaccccccaagaaggagtcttgatcacttctctaaacatgccctggatgttcccagagctcatgaaaacgctgctctccagtggtgctagcagctctgatgaaggctaagtccaagctctgaattcaggagagcagagctgcctcctgctcccaccaccgtggttctcaggcagtaatggttctattattggccatgtcaattggagcaaccatttggaaagtcatttggcaacatctcccaaagctgaatatacatgaagcctaggagccaggaattccacttccaggatatgcccaatagaaatgaatacatatgttcaccaaaaggcgtgtcctagaatgtttataattgtgaacagaccaaagctagaaactatccaagtgtccatcaacaatggagtgggaaataaaatgtctcttcgtacaatggaatctacatagcaatgagaacaaagaacttacaaaagtacacagcaacatggatgaaattcacaagcataattccgaacaaaaaatgccatgtaccaaaaagcttatagcatatgactccatttatgtacagtagaaaaacaggcaaaacagctagcctgttagaagtcagaatggtggttaccctttgaggggctgttcctagatggggactcatggggtaatgttcattccatgtcttgaactgtgcactgattacactggtgtgtttagcttgtgaaatgtatccacctatacac

SEQ ID NO: 82721 - DNA, 462 bp, Homo sapiens
aaattgtgtcctcaatctcttttctccaaagaaaatgttctaaaattgctgggtaaattgtctactcagatatccacattggagtgtaactttggccatatcgtgtggactgagggcatgcggagactcgcgatgctagtgggaagggcattggaatttggtgaacctgtgctgctggttggagacactgggtaaagatctgtgacagtgactcatgagggttcatttcaattccataggattacttgagttatcactgaagaactcatgaaagtattaatccccccttctttcctccttcctcttttttcttttttttttttttttttaagaagagactaagagtgggtcgggggctgggggagggatagcattaggagaaatacctaatgtaaatcacgagttgaggggtgcagcaaaccaacatggcacatgtatacctatgtaataagcctgcacatt

SEQ ID NO: 82722 - DNA, 435 bp, Homo sapiens
aaattgtgtcctcaatctcttttctccaaagaaaatgttctaaaattgctgggtaaattgtctactcagatatccacattggagtgtaactttggccatatcgtgtggactgagggcatgcggagactcgcgatgctagtgggaagggcattggaatttggtgaacctgtgctgctggttggagacactgggtaaagatctgtgacagtgactcatgagggttcatttcaattccataggattacttgagttctgcacactccgctgctttcctcctacctcatctggcgtcctttctattcttctttttagcttgttttgtctgtcgccttcgtgtcctattggtaattcgcccctgttcctctgtggtgtcctgcgcttcttctcttcttcctacctgcgccttctataaccgaactttttcaggcctgtttt

SEQ ID NO: 82723 - DNA, 3736 bp, Homo sapiens
  misc_feature (2279)..(2279): n is a, c, g, or t
cccccacttgcagcggcgctcgggagccgggcggctgggccaggcggcgccttcggggctgctgcgcgcccgcgcctagagctgccgccccagggagcccgccacggccgcgccccgggcacgctcggcggcgcccaacgatgaccgctccctggcggcgcctccggagtctggtttgggaatactgggccgggctcctcgtgtgcgccttctggatcccggactcgcgcgggatgccccacgtcatccggatcggaggaatcttcgagtatgcggacggccccaacgcccaggtcatgaatgccgaggagcatgcctttcgattttctgccaacatcatcaacaggaacaggactctgctgcccaacacaaccttgacctatgacatacagaggattcacttccatgacagcttcgaggcgaccaaaaaggcctgtgaccagctggcactgggcgtggtggcgatcttcggcccatcacagggctcctgcaccaatgccgtccagtccatctgcaatgccctggaggtgccccacatccagctgcgttggaagcaccacccgctggacaacaaggacaccttctacgtgaacctctaccccgactacgcctcgctcagccatgccatcctcgacctggtccagtacctcaagtggcggtcagccaccgtggtctatgacgacagtacagggctcatccgactgcaggagctcatcatggccccatcaagatacaacatccgcctgaagatccgtcagctccccatcgactctgacgactcgcgccccttgctcaaggagatgaagcgaggccgggaattccgcattatcttcgactgcagccacactatggcggcccagatcctcaagcaggccatggccatgggcatgatgactgagtactaccacttcatcttcaccactctggatctctacgctttagacctggagccctaccgctactcaggcgtgaacctgacaggattccggattctcaatgtggacaacccacacgtctcggccattgtggagaagtggtccatggagcggctgcaggcagctccccgggccgagtctggcctgctggatggagtgatgatgactgatgcagccttactgtacgacgccgtccatatcgtgtccgtgtgctaccagcgggcaccacagatgaccgtgaactccctgcagtgccatcggcacaaggcctggcgctttggcggccgcttcatgaacttcatcaaggaggctcaatgggaaggattaactggacgaattgttttcaacaaaactagtggcttgcggacggattttgatctggacatcatcagcctgaaagaggatggcctggagaaggttggggtgtggagtcctgccgacgggctcaacatcactgaggttgccaaaggccgaggccctaatgtcaccgactctctgacaaacagatcactcattgtcaccacagtgctggaggagcccttcgtcatgtttcggaaatcagacaggacgctatacgggaatgaccggttcgagggctactgcatcgacctgctaaaggagctggcccacatccttggtttctcctatgagatccggctggtggaggacggcaagtacggggcacaggatgacaagggccagtggaacggcatggtcaaggagctcatcgaccacaaggcagatctggccgtggcccccctgaccatcacccatgttcgagagaaggccatcgacttctccaagcccttcatgacacttggtgtgagcatcctgtatcgaaagcccaatggcaccaaccccagcgtcttctccttcctcaatcccctgtccccagacatctggatgtatgttctcctcgcctacctgggggtcagctgtgtcctcttcgtcatcgccaggttcagcccttatgagtggtacgatgctcacccctgcaaccctggctccgaggtggtggaaaataacttcactctgcttaacagcttctggtttggaatgggatccctgatgcagcaagggtctgagctgatgcccaaagccctgtccacacgcatcattggtggcatctggtggttcttcacgctcatcatcatctcttcctacacggccaacctggctgcctttctgaccgtggagcgcatggaatcacccattgactctgctgatgacctggccaagcaaaccaaaatcgagtatggggctgtcaaggatggggccaccatgaccttcttcaagaaatccaagatctccaccttcgagaagatgtgggccttcatgagcagnaagccatcggcgctggtgaagaacaacgaggagggcatccagagggccctgacggccgactacgcgctgctcatggagtccaccaccatcgagtacgtcacgcagaggaactgcaacctcacccagatcgggggcctcattgactccaagggctacggcatcggcacgcccatgggctccccataccgggacaagatcaccatcgccatcctgcagcttcaggaggaggacaagctgcatatcatgaaggagaagtggtggcggggcagcgggtgtcctgaggaggaaaacaaagaggccagtgccctggggatccagaagatcgggggcatcttcattgtcctggccgccgggctggtcctctctgtgctggtggccgtgggcgagtttgtgtacaagctccgcaaaacagcagagagagagcagcgttccttctgcagcaccgtggccgatgagatccgtttctcccttacctgccagcgtcgagtcaagcacaagcctcagcctcccatgatggtcaagactgacgccgtcatcaacatgcacacattcaatgaccgccggcttcccggcaaggacagcatggcctgcagcacatccttagcccctgtgttcccctaggcacaactggggtggggacctcaggcctgggggctgggcagaggaaagcaaaggagattggaaggaacgtcccctgtacccgcactgggcttggggaccagagctgccacctgcctgttgggccaggagcctcctgcccttacctgccaggaagccagcaggctctcaggccagctgcttgggcttcatcctcctcagatcttctgtgggtttctaaagctgccagccgagatagccaaggccaaaggaagcacatgcctctctcaggccaaactcacctgcccctcaactctcctccagagtcagaagtttctgccgcagccctgcagagggcacagaaaatggaagacagctcttatattgccatttcttccacaagagcccaggcctcctacagcttgaccgtgaggccagagacacaacttcggcgccttaaggatgttctagcatggctgccaatgggagctcatggtgagggatacccatcccatatgcctgggcagaaggaagacttcatccctctggggctgttcacgtggtcctaatcttctgaacttggcgctgcccctggcagcccctgttctggcagagttgaagacagagctacacaggggaaaagaggagtttggggtatgggagagaagagaatgcacaaacagaggccgccattttggattcttatggacaatgacccagtggttcctaatcctctaggaggtctctaagaatataagtgggggagtggccacagaaaattcttctccactttctagccagaggagagaggaccccctgaatttctcacaaaggatgcccaaagatgcagccggtatttg

SEQ ID NO: 82724 - DNA, 2759 bp, Homo sapiens
  misc_feature (2279)..(2279): n is a, c, g, or t
cccccacttgcagcggcgctcgggagccgggcggctgggccaggcggcgccttcggggctgctgcgcgcccgcgcctagagctgccgccccagggagcccgccacggccgcgccccgggcacgctcggcggcgcccaacgatgaccgctccctggcggcgcctccggagtctggtttgggaatactgggccgggctcctcgtgtgcgccttctggatcccggactcgcgcgggatgccccacgtcatccggatcggaggaatcttcgagtatgcggacggccccaacgcccaggtcatgaatgccgaggagcatgcctttcgattttctgccaacatcatcaacaggaacaggactctgctgcccaacacaaccttgacctatgacatacagaggattcacttccatgacagcttcgaggcgaccaaaaaggcctgtgaccagctggcactgggcgtggtggcgatcttcggcccatcacagggctcctgcaccaatgccgtccagtccatctgcaatgccctggaggtgccccacatccagctgcgttggaagcaccacccgctggacaacaaggacaccttctacgtgaacctctaccccgactacgcctcgctcagccatgccatcctcgacctggtccagtacctcaagtggcggtcagccaccgtggtctatgacgacagtacagggctcatccgactgcaggagctcatcatggccccatcaagatacaacatccgcctgaagatccgtcagctccccatcgactctgacgactcgcgccccttgctcaaggagatgaagcgaggccgggaattccgcattatcttcgactgcagccacactatggcggcccagatcctcaagcaggccatggccatgggcatgatgactgagtactaccacttcatcttcaccactctggatctctacgctttagacctggagccctaccgctactcaggcgtgaacctgacaggattccggattctcaatgtggacaacccacacgtctcggccattgtggagaagtggtccatggagcggctgcaggcagctccccgggccgagtctggcctgctggatggagtgatgatgactgatgcagccttactgtacgacgccgtccatatcgtgtccgtgtgctaccagcgggcaccacagatgaccgtgaactccctgcagtgccatcggcacaaggcctggcgctttggcggccgcttcatgaacttcatcaaggaggctcaatgggaaggattaactggacgaattgttttcaacaaaactagtggcttgcggacggattttgatctggacatcatcagcctgaaagaggatggcctggagaaggttggggtgtggagtcctgccgacgggctcaacatcactgaggttgccaaaggccgaggccctaatgtcaccgactctctgacaaacagatcactcattgtcaccacagtgctggaggagcccttcgtcatgtttcggaaatcagacaggacgctatacgggaatgaccggttcgagggctactgcatcgacctgctaaaggagctggcccacatccttggtttctcctatgagatccggctggtggaggacggcaagtacggggcacaggatgacaagggccagtggaacggcatggtcaaggagctcatcgaccacaaggcagatctggccgtggcccccctgaccatcacccatgttcgagagaaggccatcgacttctccaagcccttcatgacacttggtgtgagcatcctgtatcgaaagcccaatggcaccaaccccagcgtcttctccttcctcaatcccctgtccccagacatctggatgtatgttctcctcgcctacctgggggtcagctgtgtcctcttcgtcatcgccaggttcagcccttatgagtggtacgatgctcacccctgcaaccctggctccgaggtggtggaaaataacttcactctgcttaacagcttctggtttggaatgggatccctgatgcagcaagggtctgagctgatgcccaaagccctgtccacacgcatcattggtggcatctggtggttcttcacgctcatcatcatctcttcctacacggccaacctggctgcctttctgaccgtggagcgcatggaatcacccattgactctgctgatgacctggccaagcaaaccaaaatcgagtatggggctgtcaaggatggggccaccatgaccttcttcaagaaatccaagatctccaccttcgagaagatgtgggccttcatgagcagnaagccatcggcgctggtgaagaacaacgaggagggcatccagagggccctgacggccgactacgcgctgctcatggagtccaccaccatcgagtacgtcacgcagaggaactgcaacctcacccagatcgggggcctcattgactccaagggctacggcatcggcacgcccatgggctccccataccgggacaagatcaccatcgccatcctgcagcttcaggaggaggacaagctgcatatcatgaaggagaagtggtggcggggcagcgggtgtcctgaggaggaaaacaaagaggccagtgccctggggatccagaagatcgggggcatcttcattgtcctggccgccgggctggtcctctctgtgctggtggccgtgggcgagtttgtgtacaagctccgcaaaacagcagagagagagcaggtaagccttagagcttggagcctgcacaggatgggaaatggagattcgcgctga

SEQ ID NO: 82725 - DNA, 1773 bp, Homo sapiens
cccccacttgcagcggcgctcgggagccgggcggctgggccaggcggcgccttcggggctgctgcgcgcccgcgcctagagctgccgccccagggagcccgccacggccgcgccccgggcacgctcggcggcgcccaacgatgaccgctccctggcggcgcctccggagtctggtttgggaatactgggccgggctcctcgtgtgcgccttctggatcccggactcgcgcgggatgccccacgtcatccggatcggaggaatcttcgagtatgcggacggccccaacgcccaggtcatgaatgccgaggagcatgcctttcgattttctgccaacatcatcaacaggaacaggactctgctgcccaacacaaccttgacctatgacatacagaggattcacttccatgacagcttcgaggcgaccaaaaaggcctgtgaccagctggcactgggcgtggtggcgatcttcggcccatcacagggctcctgcaccaatgccgtccagtccatctgcaatgccctggaggtgccccacatccagctgcgttggaagcaccacccgctggacaacaaggacaccttctacgtgaacctctaccccgactacgcctcgctcagccatgccatcctcgacctggtccagtacctcaagtggcggtcagccaccgtggtctatgacgacagtacagggctcatccgactgcaggagctcatcatggccccatcaagatacaacatccgcctgaagatccgtcagctccccatcgactctgacgactcgcgccccttgctcaaggagatgaagcgaggccgggaattccgcattatcttcgactgcagccacactatggcggcccagatcctcaagcaggccatggccatgggcatgatgactgagtactaccacttcatcttcaccactctggatctctacgctttagacctggagccctaccgctactcaggcgtgaacctgacaggattccggattctcaatgtggacaacccacacgtctcggccattgtggagaagtggtccatggagcggctgcaggcagctccccgggccgagtctggcctgctggatggagtgatgatgactgatgcagccttactgtacgacgccgtccatatcgtgtccgtgtgctaccagcgggcaccacagatgaccgtgaactccctgcagtgccatcggcacaaggcctggcgctttggcggccgcttcatgaacttcatcaaggaggctcaatgggaaggattaactggacgaattgttttcaacaaaactagtggcttgcggacggattttgatctggacatcatcagcctgaaagaggatggcctggagaaggttggggtgtggagtcctgccgacgggctcaacatcactgaggttgccaaaggccgaggccctaatgtcaccgactctctgacaaacagatcactcattgtcaccacagtgctgttcccaggcaaaagcctttcccacaagtcaccccagctgtggtgggtgctgtggccacacctcgagagcccagcaggtgctgggagcctgtacacatgccgcattctatagtggcccttccgagagccgtcagccactgccacaccccctgcctggaatcacaccccatcttctctctattccccaactgaatagcaccgccttctcctgacctgtttcaaaccaagaagcaactctgggggcctcccatgggctctctgcacctttgagctcatgcgggggcaggaggacagacccaggctgctga

SEQ ID NO: 82726 - DNA, 2103 bp, Homo sapiens
cccccacttgcagcggcgctcgggagccgggcggctgggccaggcggcgccttcggggctgctgcgcgcccgcgcctagagctgccgccccagggagcccgccacggccgcgccccgggcacgctcggcggcgcccaacgatgaccgctccctggcggcgcctccggagtctggtttgggaatactgggccgggctcctcgtgtgcgccttctggatcccggactcgcgcgggatgccccacgtcatccggatcggaggaatcttcgagtatgcggacggccccaacgcccaggtcatgaatgccgaggagcatgcctttcgattttctgccaacatcatcaacaggaacaggactctgctgcccaacacaaccttgacctatgacatacagaggattcacttccatgacagcttcgaggcgaccaaaaaggcctgtgaccagctggcactgggcgtggtggcgatcttcggcccatcacagggctcctgcaccaatgccgtccagtccatctgcaatgccctggaggtgccccacatccagctgcgttggaagcaccacccgctggacaacaaggacaccttctacgtgaacctctaccccgactacgcctcgctcagccatgccatcctcgacctggtccagtacctcaagtggcggtcagccaccgtggtctatgacgacagtacagggctcatccgactgcaggagctcatcatggccccatcaagatacaacatccgcctgaagatccgtcagctccccatcgactctgacgactcgcgccccttgctcaaggagatgaagcgaggccgggaattccgcattatcttcgactgcagccacactatggcggcccagatcctcaagcaggccatggccatgggcatgatgactgagtactaccacttcatcttcaccactctggatctctacgctttagacctggagccctaccgctactcaggcgtgaacctgacaggattccggattctcaatgtggacaacccacacgtctcggccattgtggagaagtggtccatggagcggctgcaggcagctccccgggccgagtctggcctgctggatggagtgatgatgactgatgcagccttactgtacgacgccgtccatatcgtgtccgtgtgctaccagcgggcaccacagatgaccgtgaactccctgcagtgccatcggcacaaggcctggcgctttggcggccgcttcatgaacttcatcaaggaggctcaatgggaaggattaactggacgaattgttttcaacaaaactagtggcttgcggacggattttgatctggacatcatcagcctgaaagaggatggcctggagaaggttggggtgtggagtcctgccgacgggctcaacatcactgaggttgccaaaggccgaggccctaatgtcaccgactctctgacaaacagatcactcattgtcaccacagtgctggtaagagcctgcagcccctgcaggaaggactgtccgacctgggggtggggtggccgttcgggctggagagtcccctctatcccccccacccagaagatggaggctgcaggtaggtggagacttttagagtcagcaggaagttctcagagagcagctggagcgcagcagcgctgctcgctgccacgggcggaagccgctgcgtttttgtgtctcactcccactcactccccaagtccttgatgtctgagtaggaaccatgctggatggtggaattaagggggtttgacagcccattgcaacctgagtgaggattcgcctctcccaccccagttcccaggcaaaagcctttcccacaagtcaccccagctgtggtgggtgctgtggccacacctcgagagcccagcaggtgctgggagcctgtacacatgccgcattctatagtggcccttccgagagccgtcagccactgccacaccccctgcctggaatcacaccccatcttctctctattccccaactgaatagcaccgccttctcctgacctgtttcaaaccaagaagcaactctgggggcctcccatgggctctctgcacctttgagctcatgcgggggcaggaggacagacccaggctgctga

SEQ ID NO: 82727 - DNA, 459 bp, Homo sapiens
gtgagtgccccacagcccccaccagggttgtctccccgggactgtgggccctgtagagcagcagagtggtctgggagtcaggaaggattgattctcatccatgtgacctcaggcaagttgcctcatgtctccgagcctcagtttcccgtgtgaaaatgggctccataggaccaaacttatggcatgattgaggggcatacatcttgggcatgtggtaagtgctcagcagctggtcagcattgccagcaagatgcagcgtgggcttgaaagtacaacagatgagggtgtttgcttcctcgctgtatgaccttgggcgagctggagagccttgctgagcctcagtcacctcatctgtgaaatgggtatatgaagcataacctacctcgtgggcatgtgagatgaagttagacattgcgtggaaagtgcttagtgcaggaggagggtcaatacataataatc

SEQ ID NO: 82728 - DNA, 624 bp, Homo sapiens
ggtgccccgcctttctctgggacacagttgggggctggcttctgagggattcctttctcccctctttgtgtggccccagccagggcggtgggcagtcctggtgtagagcacaagcctctccaccctagagaaatgcctctgtaccacggctaccatgtggaaccttaacttgcagaaggcttgttaacaattgttttgagagagatggctggtcatgccacagctgctggggactccgcctactccagccctcttgggacacactgtgggatttgtggcccttccccagaggaattgtggagactgtcccatggaacaaaccctcaggcaccagcacagggctctgggtgactcagtaaaactaacgtttgtctctgacaagatcagctgtaggctcaccggccagagaagaccactgtgagcattttgccgtatatcctgccctgccatttgttcactttttaaactaaaataggaacatccgacacacaccgtttgcatcgtcttctcccttgatattttaagcattttcccatgtcatgagtttctcagaaacatgtttttaacaattgtactatttagtcattgtccatttactataatttatctgaccatttccctact

SEQ ID NO: 82729 - DNA, 543 bp, Homo sapiens
ggtgccccgcctttctctgggacacagttgggggctggcttctgagggattcctttctcccctctttgtgtggccccagccagggcggtgggcagtcctggtgtagagcacaagcctctccaccctagagaaatgcctctgtaccacggctaccatgtggaaccttaacttgcagaaggcttgttaacaattgttttgagagagatggctggtcatgccacagctgctggggactccgcctactccagccctcttgggacacactgtgggatttgtggcccttccccagaggaattgtggggcctctcttggcaccttgaggtagttgctcgtttcctccaccgggccttatctttcccttctgggcgtttccagccctgtgttttcacactcagggctctggctgagattctgtcagttggtgctttcatctctgcacagtcatggaggccctaagaccttgtcttggatctgggaacttctctcagaatcctcaaacatcaccctggctgtgcatgggagctcacacctgtaatcctaggg

SEQ ID NO: 82730 - DNA, 505 bp, Homo sapiens
cagcctagccaaatggcaaaaccccgtttctactaaaaatacaaaaattagctgggcgtggtggcgagcacctgcaatcccagctactcgggaggctaaggcaggagaatcccttgaacctgggaagcggaggttgcagtgggccgagattgtgccactgcactccaccctgggcaagagtgagactgagtctcaaaaacaaaaaaaaaaaacacaggcctcagcatcgcctggacctgttcttgcttggggcatcccgtcggtcaccaaccatgacagcgaggcgggcctggcctgtgctccaccggagggggcttcttgcacagatgacctgctcatttcagcccctccagaatcttctggcaggcgcagagcaacaggacgtccattttacagacgaggaaaccgagacacagggaaggttgccatctgcaacccagcccggtttttatcttgtttttctgtgttttaactttttatttagacttacagtttgaaacagtgc

SEQ ID NO: 82731 - DNA, 376 bp, Homo sapiens
tagacacattgtttgctgccatttcattcagcagctgcgttattcataagatcactttataatgacatacttttccatcttactgttttataattattaaatggttcccctgatattgctccattttttttttttttcaggagaaacattctcaggttagtactgttaatccctccttacgtgtttaattagattatagagtgttggttttttccttccttataaaatcttacgtagagttttctatactgatgtgtctggtcaacctgtgcttcctgacttagctgagtcttcctgcagtctttatggggtttcataaagtgagcaggtaccatgctcacttagttataacttccctgaggtctagaaatctcct

SEQ ID NO: 82732 - DNA, 665 bp, Homo sapiens
caggccacacttgctgcatggggttgctctcggccccactcttggtgcacagcgagtcactgtgggttcattagcatctggttatgagacagtaactgctcctttggaggggctcgtggagaccatgcaggagggcacggtcttgaggtcatgccgtccagagcacacctgaggataggccaggacgggctgcacgctgtaggtaaaattcctccagcaagctcttcactggcattgaggagttccctgagtgcggtcatctggaaggcagctgtaacaggcactgcagtctctccctgggtgggtaccagagaggagcataggggagcataaccgatttaaagagagggctttcctgtggtgaggtaagagattagctggtcattatcatagagccccctctgcctttgtgcagatgggctgtgggaatcctggggttccgttgggtcctttgtcacctcactgaaggcatgtaagctgagctggccagaccgtgagctgatcctgccacttgaacagcatcaagcctgcctctggattcttctgtgcatggcacttgtctgagcacctcacgcacagagaactggacttcagagtttacagaaataagctgtatggttcattttcatgcctgcttgccaataaacatatctgagctgaacctc

SEQ ID NO: 82733 - DNA, 162 bp, Homo sapiens
agccctacatcccactgcagatgctacagctctggaagctctcggagcctgcagagcatcctctcgtgcgggccatggtgatcagcgatgctttcagagctggaatccatgagggcagctcggaagatgttgtaacagaagaagcacaggatgagggctgat

SEQ ID NO: 82734 - DNA, 692 bp, Homo sapiens
cccggtctagtagggagggcttcctggagtagggacagccacattcatcccggctgtggactgaactgtgtccccttcagatgtcatatgttgaagcccttgcctccactgtgactgcatttggagactgggcctatcaggagataagagatcacatggagacacagcaagaaggcagctgtctgcagccaggaagagagccctcagcagaacctgcgcctgccagcaccatggtcttggactcccagtctccagaactatgagaaactgtaagtcagagttaagactggagcccaggccatctccctccaccacccacacctgacatccgcacactgcgcttcctgcatggtggacagtgcctgcctgctcacaactgggaccactgcctcctctgcttctctgtagccctggccctagctcgtggaaggagcaacagggccatatttgagtttcagagcactgctcaggggggcagaaggcagggtcagattcttctggaagaggtcggaggtttcccagccagaacaaaactgggatgagaagctggggttcctcccacccctctccaggacctgtgaatgtccctcccctgtggagctggaaagccagcccgaaggcacctgccccgtgggaggacacacccctgagcctggatgcctcatctcctgcagctttggaattctagcccc

SEQ ID NO: 82735 - DNA, 469 bp, Homo sapiens
gggctgacaaggaggcaacccctagccctggacccttcagctaagttcaactccaggtcaagtcaggggcccccagcagctcaggggcacaggatccacaaggaagaaattccaggatgttgccagaagctaacaacagttcccagctgttcccagtcgcctcttgccattgaagtagtttggagtgggggtcttcacacagacacagcagaaggaaggtcaaatgaatgactgtgcctctgggccagggtggaggacaggccagtgagaacagaagcctctttgttattggcagctcctgcacatggccccctagacccttgacggagacctccctctccccccagatcttggggaccttgacatcggtggtatttatgcagctctcctcatgtcatcgtggtaaaactgctgcttgcggcttgcctacggcctggagcctcgctctgcaattccttttggagcacat

SEQ ID NO: 82736 - DNA, 480 bp, Homo sapiens
aggaattcaagcctgcagcagaaatttgcataagtaacaaggagccaaatgccaatgaccaagacaaaagggaaaatgtgtccaggacatgtcagagacattcccagcagcccctcccatcacagtcttggaggcctaggagctctgggaataattttttaaatgtttgtaaaaaataagaaaaagtttaaattgaaagtacatttagaaaaataaaagcagactataaaaagcatagaactgataaatcctaaaatggtttccttgggtaaaataaaaataatacataaactattttagactagctaatataatggaaaaatgagggaaacttttattaatcacaaaatctggaagggtaaagggaatgtgattataagaaagtaattggaaaatgattataaaaggatcaatttacaactgtatgctaatatatatgaaaatatagtgcaataaatgattttctaagaaaatataaat

SEQ ID NO: 82737 - DNA, 927 bp, Homo sapiens
agaacagtgggcccaggggaccggcacactcagcatgcgaggacccgcaccagtgccggtctctgagttccttcagtatttattgatcattatttttactgtcttggcgaggcgagtgtagcagggcaacaggtggcgagaaggtcagcagggaaacgtgagcaaaggaatctgtatcatgaataagttcaaggaaaggtactgtgcctggatgtgcacataggctagatttatgtttcactttacacaaatatctaactagcagagagcaacaaagcagtattgctgccagcatatctcgcctccagccacagggcggttttctcctatctcagaatagaacgaatgggaatggtcgactttacactaagacattccattcccagggacgagcaggagacagaagccttcatcttatctcaactgcaaagaggcctccctctttcactactcctcctcagcacagaccctttacaggtgtcgggctgggggatgtaaggtctttcctttcccacgaggccatatctcaggctgtctcagttgggggaaacctggacaatacccaggcttttctgggcaggggtccctgcggccttccgcagtgcattgtgtctctggttaatcgagaatggagaatggcgatggcttttaccaagcatactgcctgcaaacatattgttaacaaggcacatcctgcacagccctaaatccattaaaccttgattcaatatagcacatgtttctgggggcacagagttggggctaaatttacagattaacagcatctcaaagcagaacaatttttcttagtacagatcaaaatggagtttcttatgtcttccttttctacgtagacacaggaacaatctgatctctttttccccacacttcctatatgttaatgtattttaattgtctgttagcttt

SEQ ID NO: 82738 - DNA, 359 bp, Homo sapiens
agagcttttgatttaggcagttctgagtttatattccaggtaactaggtgatttggctcgttcaccttacatctctgggcctccattttataatctgtaaaatagggttattgtgaaaattagaggtaatacctttaataaactattgtgcctggcacataataaattaaattgcacactatagctggaattattagatgttattgacttaaatcattataattttgctgtgagttattttaacagcaatgatgatggcttgtcatgcctcctgtattcttttgttttatgaccagtggaacatatctggtgaatagctcacttttttaattgatgtatttctgtgttttgttttgttt

SEQ ID NO: 82739 - DNA, 501 bp, Homo sapiens
cctgtttttcaagaaaatcctgtcaacaaatctgccttttctcccttacatcattcatggctttccttttttctctaaaatcttaaatttccaccccagccaaactatataccaattgagcctctaacatcttcatgggtacatgactgctgctggcacagacctgctctaaaatcagtttcattccttcccctactgctctgctagcagcattcttctcttaaattcctttgttcatagcacctgcagctcacctcacatcctgtatgcttcatactgtccttgggactgagccaagcagaactggaactggatgctgtggtgacccagagcaaattacaaacttctcagagcctgttttctcacgggcaaaatgcagttaatgccagggcatggctgggaggtcaaatgaggtgacggaggtaagtaatgcctgacagtgagaagctccatgatggttagctctattctcccacatgcctgcaccctgagttgcttcag

SEQ ID NO: 82740 - DNA, 3629 bp, Homo sapiens
  misc_feature (2430)..(2431): n is a, c, g, or t
tccactgcccccaaacccgttgttattttggttgctttgtgtttgcccttcgcatgctgtgctttccggcctgtgtgtgtgtttcttctgttgttttgttttgctcttttggttttgtggtttttttggtttggtttgtgtcgcctgcagctgcaccgagcaacctcttcgccagcctggacgagacgctgctggcgcgggccgaggcgctggcggccgtggacatcgccgtgtcccagggcaagagccatcctttcaagccggacgccacgtaccacacgatgaacagcgtgccgtgcacgtcacacttccacggtgcctctggcgcaccaccaccaccaccaccaccaccaccaggcgctcgaacccggcgatctgctggaccacatctcctcgccgtcgctcgcgctcatggccggcgcgggcggcgcgggcgcggcggccggcggcggcggcgcccacgacggccgcggggggcggtggcggccgcggggcggcggcggcggcccgggcggcggcggccccgggggaggcggcggtggcggccgcggggggcggcggcggcggcccgggcggcgggctcctgggcggcgtccgcgcaccctcacccgcatatgcacagcctgggccacctgtcgcaccccgcggcggcggccgccatgaacatgccgtccgggctgccgcaccccgggctggtggcggcggcggcgcaccacggcgcggcagcggcagcggcggcggcggcggccgggcaggtggcagcggcatcggcggcggcggccgtggtgggcgcgagcgggcctggcgtccatctgcgactcggacacggacccgcgcgagctcgaggcgttcgcggagcgcttcaagcagcggcgcatcaagctgggcgtgacgcaggccgacgtgggctcggcgctggccaacctcaagatcccgggcgtgggctcactcagccagagcaccatctgcaggttcgagtcgctcacgctctcgcacaacaacatgatcgcgctcaagcccatcctgcaggcgtggctcgaggaggccgagggcgcccagcgcgagaaaatgaacaagcctgagctcttcaacggcggcgagaagaagcgcaagcggacttccatcgccgcgcccgagaagcgctccctcgaggcctacttcgccgtgcagccccggccctcgtccgagaagatcgccgccatcgccgagaaactggacctcaaaaagaacgtggtgcgggtgtggttttgcaaccagagacagaagcagaagcggatgaaattctctgccacttactgagggggctgggaggtgtcgggcgggacagaatggggagctgaggaggcatttttggggggctttcctctgcttgcctcccctcggatttggagtgtccgttatcctgcctgcatttggggagtcccttctcgctctctttcctccacccattctctgattttcctgcctttgctgtcccctagccttagaggactggggtgctgggtgtggggattggagtatagggtaggggagaagggggggagcattcgggggagtggggagtggggggaaggaaagcggagacccgagcaggggttttaaggagcaggatggttctggggtttgggtggggggagacgcgggaagggtaggaaaatggactgtttctgaccagagacacttacctaaatatcctggggaccaaggaactatgtacaaaaacaaacctaccaaccaccaaaaactagacaaataaagacaaactaaaacaaaacagaacaaaagcaaaggaaaatgctttagaaattttaactccggggagccataatctgcaacttcattttcccccatagaagagaaaaaagagcaccaccattattaccacctccccaaccctacacgcacgaactgagtcgaaaaacgaaaaccaaacgagcgagaagttgaagttctgggtatcaaagctagttgttctgtctgcgtgtttaatttttccctctctcacctccaccccatccatatcctctttatttcctccgttccaatgagaggcctatggctgctctccaatcccgggaagtgagtgggagcacagctgaaaagagagggtcagggggaggctggctgcttgcttaggtggaatccaagttttcccgtggccctgcctatactctggtggcctggtcctgttggggtgggggtctttggagagaagggcatagtctttgagctactaaaaagcagaattccggagcttcgagatatcttattctaggaaaatgaaacaattttaacaacagttttttttcctcttatgtcgaagatctagttttagacaatttcaaaataagcttttcccactcatagaactttaacttgccctttcagttttatcttttttttagagagaggtttaaactactgattttnnctgttgattcaaatagactaatggggtgaaagttattaggagagatactctctcctgttttctccactgaacgagactcatcttgctcttctaggtcccgtttcttcctctcttggaggacatgaaattatagaaatgttgagaagtctgcctgctttcttttgcggtaggacttggctgtgagaaaatcacctaaatcccagaaaagaggaagacagatttaaagtgcccccacccccatttgtttcaaagaggtctgcatgttgggcgaaaacagaacaactgtgtttccttttacttgttcttattattcaagagtcatttattacaggggataaatgttgggtagcaagaactttaatttgcactaccagtctcccaaatagaaaatcatgtatagtatttcatagtaataatcaggtaccttacaagctgctggtggattttaaaaaattaagatagttgaaggtggttaggtaaaatgcctgctttgtgtacaagatactctttggatctctcgtagagatggtttgttaccatcctttaatcataactaaaacattgaaaacagaacaaatgagaaaagaaaaaaaacctgccgattaacaagactgaaatcatgcatgatctgaaaggtgtggaaagaaacacaattaggtctcactctggttaggcattatttatttaattatgttgtatatcattgtttgcagggcaaacattctatgcatttgaaactgagcactaaactgggctagctttctggtagaccgttttgtggctagtgcgatttcacagtctactgcctgtttccactgaaaacatttttgtcatattcttgtattcaaagaaaaaggaaaaaagattattgtaaatattttatttaatgcacacattcacacagtggtaacagactgccagtgttcatcctgaaatgtctcacggattgatctacctgtccatgtatgtctgctgagctttctccttggttatgttttttctcttttacctttctcctcccttacttctatcagaaccaattctatgcgccaaaatacaacagggggatgtgtcccagtacacttacaaataaaacataactgaaagaagagcagttttatgatttgggtgcgtttttgtgtttatactgggccaggtcctggtagaacctttcaacaaacaaccaaacaaaaaaaaa

SEQ ID NO: 82741 - DNA, 3836 bp, Homo sapiens
  misc_feature (2637)..(2638): n is a, c, g, or t
gcggggctagagctgtcggagaagcgggaccgcgaggccggcgcgcggcgctctgcgcggtcagagggagcgcctggcagcagcaggagcagcagcagcagcccgcggcggggccgccgccagccgccgcgaccgccgcggctgcagcctccgaagggaggccgggtgagccggcgtacgcactttcccgcggactttcggagtgtttgtggatatacatgccaagccgccacgatgatgtccatgaacagcaagcagcctcactttgccatgcatcccaccctccctgagcacaagtacccgtcgctgcactccagctccgaggccatccggcgggcctgcctgcccacgccgccgctgcaccgagcaacctcttcgccagcctggacgagacgctgctggcgcgggccgaggcgctggcggccgtggacatcgccgtgtcccagggcaagagccatcctttcaagccggacgccacgtaccacacgatgaacagcgtgccgtgcacgtcacacttccacggtgcctctggcgcaccaccaccaccaccaccaccaccaccaggcgctcgaacccggcgatctgctggaccacatctcctcgccgtcgctcgcgctcatggccggcgcgggcggcgcgggcgcggcggccggcggcggcggcgcccacgacggccgcggggggcggtggcggccgcggggcggcggcggcggcccgggcggcggcggccccgggggaggcggcggtggcggccgcggggggcggcggcggcggcccgggcggcgggctcctgggcggcgtccgcgcaccctcacccgcatatgcacagcctgggccacctgtcgcaccccgcggcggcggccgccatgaacatgccgtccgggctgccgcaccccgggctggtggcggcggcggcgcaccacggcgcggcagcggcagcggcggcggcggcggccgggcaggtggcagcggcatcggcggcggcggccgtggtgggcgcgagcgggcctggcgtccatctgcgactcggacacggacccgcgcgagctcgaggcgttcgcggagcgcttcaagcagcggcgcatcaagctgggcgtgacgcaggccgacgtgggctcggcgctggccaacctcaagatcccgggcgtgggctcactcagccagagcaccatctgcaggttcgagtcgctcacgctctcgcacaacaacatgatcgcgctcaagcccatcctgcaggcgtggctcgaggaggccgagggcgcccagcgcgagaaaatgaacaagcctgagctcttcaacggcggcgagaagaagcgcaagcggacttccatcgccgcgcccgagaagcgctccctcgaggcctacttcgccgtgcagccccggccctcgtccgagaagatcgccgccatcgccgagaaactggacctcaaaaagaacgtggtgcgggtgtggttttgcaaccagagacagaagcagaagcggatgaaattctctgccacttactgagggggctgggaggtgtcgggcgggacagaatggggagctgaggaggcatttttggggggctttcctctgcttgcctcccctcggatttggagtgtccgttatcctgcctgcatttggggagtcccttctcgctctctttcctccacccattctctgattttcctgcctttgctgtcccctagccttagaggactggggtgctgggtgtggggattggagtatagggtaggggagaagggggggagcattcgggggagtggggagtggggggaaggaaagcggagacccgagcaggggttttaaggagcaggatggttctggggtttgggtggggggagacgcgggaagggtaggaaaatggactgtttctgaccagagacacttacctaaatatcctggggaccaaggaactatgtacaaaaacaaacctaccaaccaccaaaaactagacaaataaagacaaactaaaacaaaacagaacaaaagcaaaggaaaatgctttagaaattttaactccggggagccataatctgcaacttcattttcccccatagaagagaaaaaagagcaccaccattattaccacctccccaaccctacacgcacgaactgagtcgaaaaacgaaaaccaaacgagcgagaagttgaagttctgggtatcaaagctagttgttctgtctgcgtgtttaatttttccctctctcacctccaccccatccatatcctctttatttcctccgttccaatgagaggcctatggctgctctccaatcccgggaagtgagtgggagcacagctgaaaagagagggtcagggggaggctggctgcttgcttaggtggaatccaagttttcccgtggccctgcctatactctggtggcctggtcctgttggggtgggggtctttggagagaagggcatagtctttgagctactaaaaagcagaattccggagcttcgagatatcttattctaggaaaatgaaacaattttaacaacagttttttttcctcttatgtcgaagatctagttttagacaatttcaaaataagcttttcccactcatagaactttaacttgccctttcagttttatcttttttttagagagaggtttaaactactgattttnnctgttgattcaaatagactaatggggtgaaagttattaggagagatactctctcctgttttctccactgaacgagactcatcttgctcttctaggtcccgtttcttcctctcttggaggacatgaaattatagaaatgttgagaagtctgcctgctttcttttgcggtaggacttggctgtgagaaaatcacctaaatcccagaaaagaggaagacagatttaaagtgcccccacccccatttgtttcaaagaggtctgcatgttgggcgaaaacagaacaactgtgtttccttttacttgttcttattattcaagagtcatttattacaggggataaatgttgggtagcaagaactttaatttgcactaccagtctcccaaatagaaaatcatgtatagtatttcatagtaataatcaggtaccttacaagctgctggtggattttaaaaaattaagatagttgaaggtggttaggtaaaatgcctgctttgtgtacaagatactctttggatctctcgtagagatggtttgttaccatcctttaatcataactaaaacattgaaaacagaacaaatgagaaaagaaaaaaaacctgccgattaacaagactgaaatcatgcatgatctgaaaggtgtggaaagaaacacaattaggtctcactctggttaggcattatttatttaattatgttgtatatcattgtttgcagggcaaacattctatgcatttgaaactgagcactaaactgggctagctttctggtagaccgttttgtggctagtgcgatttcacagtctactgcctgtttccactgaaaacatttttgtcatattcttgtattcaaagaaaaaggaaaaaagattattgtaaatattttatttaatgcacacattcacacagtggtaacagactgccagtgttcatcctgaaatgtctcacggattgatctacctgtccatgtatgtctgctgagctttctccttggttatgttttttctcttttacctttctcctcccttacttctatcagaaccaattctatgcgccaaaatacaacagggggatgtgtcccagtacacttacaaataaaacataactgaaagaagagcagttttatgatttgggtgcgtttttgtgtttatactgggccaggtcctggtagaacctttcaacaaacaaccaaacaaaaaaaaa

SEQ ID NO: 82742 - DNA, 491 bp, Homo sapiens
gcggggctagagctgtcggagaagcgggaccgcgaggccggcgcgcggcgctctgcgcggtcagagggagcgcctggcagcagcaggagcagcagcagcagcccgcggcggggccgccgccagccgccgcgaccgccgcggctgcagcctccgaagggaggccgggtgagccggcgtacgcactttcccgcggactttcggagtgtttgtggatatacatgccaagccgccacgatgatgtccatgaacagcaagcagcctcactttgccatgcatcccaccctccctgagcacaagtacccgtcgctgcactccagctccgaggccatccggcgggcctgcctgcccacgccgccggtaagcgccccacgcccgcggccccggcccgcgcgcccgcccctccccgtctccgaaacgctgcatgtcgggggctggtgtgtgcaggtcccggtgcggggaactgcgggcagggggtgtagagcagtcccgca

SEQ ID NO: 82743 - DNA, 349 bp, Homo sapiens
tcatcatgatggtgtgaaatcagtgtagagttcttgaactcaatcagcagccctttgttaagcttctgccacaggcccagtagagttactaacaggatttgagcccaactgagggcagggtcagatttggtggcagtgtgccaggtggatcacagagaggtgtaagcaactataaaattataaggacctgagatgataaaggtttggaactattgctgttggcagtaagaatggtaagtagttggtggtctgagagacttaaaatagaggactagaaaatgcttgcctgcttctaaaggcacttgttaggtagggtctgcgggatcagagtgggaatgggagaacttga

SEQ ID NO: 82744 - DNA, 292 bp, Homo sapiens
atattgttagctatttctgagccacatttaaaaggcatggttctataagctatgggcttttcttttttttttctttttttcttacctccttttgcagttttcccagatctgcaccttctgaagagcaaatgcaccttcctgggtttgtccaaatgcagatcatttatgctctcttatcacacacccacagaatgccgctctcataccgcaaaagcactggcttgccacattgtcatgtagtctcccagagacctgtctatttctagttgtgttttgtgaggcaggcaggaga

SEQ ID NO: 82745 - DNA, 357 bp, Homo sapiens
cccccaccgcccagccacgtggaactctgagtccattaaacctctttttctttataaattacccagtcttgggtatgtctttgtcagcagcatgaaagtggactaatacagctagttaacccttactcatctcttgggatctcaactcaaaagtaactttctcaggagagggatggtctaaaatttatactctcacagaccttttacatttataatgaagcatgttccatacttgggtattatatatagtatttatgaaattatttatctaaggtctgtttgcccactagaataaaagtttcatgagagcaggaagaatgtgtgatttgttccaacacggaacatgatatatactca

SEQ ID NO: 82746 - DNA, 671 bp, Homo sapiens
  misc_feature (409)..(409): n is a, c, g, or t
ggccttcgctggacttggggttccagctgctggggctgcagcaggcactggcatagttgtcaacagccccatcagccaaatgaattatttacaagttttcaagaaaggagactgcaggcagctgttggaccagacagaggatagaagcctccaggagaaataggcagttttcaaggtttcctggtataatgattcatccagaaatttatttgaaaaattacacacaaaacaacaaaaaaaaagaaaaaaaacaaaaaaaaaaaaaaaaaaaaaaaaaaaaaaaaaaaaaaaaacaaaaaaaacaaaaaaaagagaggggggggcggcgcgcccaaaaaaaatatccccgcgggggaggcgccgaaaatatcagcagagcggcaacgaccacacagttatgataaaaaanaagaagagggcgccaccaataagaggaggagggaagataaaaaaaggcgaggggagcaggcgcggcacgcagtgctaaaacaaacccgcggcagggcgggggagcagaaacagcgacgtccagggggacgcgcctctagtcggggggaaggagacgccacacaaagagagggggggggaagaaaagacaaagtaggggggaagaacaacacagcaccacgaagaaaatgatggaagaagccgccaggagagggaagaaaaac

SEQ ID NO: 82747 - DNA, 661 bp, Homo sapiens
  misc_feature (35)..(35): n is a, c, g, or t
agggaactgatttgctgtctctcagcaataaaggnttactgcatgaataaggatgacaaatgagaattctggactgtcccccccggctcctgaataatcccaggcattcaagaatacttctcttctgctattacaatgaattacatgtggagctatgaggacttcgggcttgaacagttgccgtagagctctccgtcttgctggaagggcttcttccaggccttggtcaggaggctccctgggtgctacatacaggattttttttgaggatatggagatgcgcaggacacgatcccagcaatccaggtgcttacaggctgattgtacagccatgcacacagagtgccacgatgcaaaataggatgtggtaagggtcatgcagttcagaggagaaagcaagtgtggctgatgaacatcacggagcagtgaccttcatggacagacagaatttgagctggccctttaaccaatgaggaggattcaaacagagtttgtattatcctgaaaagaaattccactaaagatgaatagcagagaactgtgttcagaatacaagttccacaaaggtagagatcttgtccctctggctacctgttgactctcctgtgcctaatacagtgcctgattcatactactcaataaatacttatggaatgaatga

SEQ ID NO: 82748 - DNA, 782 bp, Homo sapiens
  misc_feature (35)..(35): n is a, c, g, or t
agggaactgatttgctgtctctcagcaataaaggnttactgcatgaataaggatgacaaatgagaattctggactgtcccccccggctcctgaataatcccaggcattcaagaatacttctcttctgctattacaatgaattacatgtggagctatgaggacttcgggcttgaacagttgccgtagagctctccgtcttgctggaagggcttcttccaggccttggtcaggaggctccctgggtgctacatacaggattttttttgaggatatggagatgcgcaggacacgatcccagcaatccaggtgcttacaggctgattgtacagccatgcacacagagtgccacgatgcaaaataggatgtggtaagggtcatgcagttcagaggagaaagcaagtgtggctgatgaacatcacggagcagtgaccttcatggacagacagaatttgagctggccctttaaccaatgaggaggattcaaacagagaggtgtttccagttcttctcaagtacttacccttgggaaatccaagctaacagaagtcctagaggtcaacttttctctccctgaccatttgtctactatccttgtataatgaccaatcaggtttgtattatcctgaaaagaaattccactaaagatgaatagcagagaactgtgttcagaatacaagttccacaaaggtagagatcttgtccctctggctacctgttgactctcctgtgcctaatacagtgcctgattcatactactcaataaatacttatggaatgaatga

SEQ ID NO: 82749 - DNA, 472 bp, Homo sapiens
taagtagtctaagtttctggcagaacagaaaggatgggggacgctcagcaacagagggaggaaatatggagctagctaaagccacttcatgaggcgcaagcttcttccagatggcatcagagtgcatgccagcaatgggggctgtagcccaggcagagcctggcccctgtctgccaggaattagcagttcattgttcagatagcagagttgggagggtgtctgctcgtcattttacagaaaatgacagcgaggctgagatggctgaagttcccttggcttctccactaagataacttcttgagaggacaatgtgaagtgtatctcgtgcctgtgtataagctctactttctaggggtggaaaagctggtggcctgtatctggatacctgtctatccagcttccacatggtctgaatctaccctttcaatctcagaggtgtttccagttcttctcaagtacttacccttggga

SEQ ID NO: 82750 - DNA, 250 bp, Homo sapiens
tttgtattatcctgaaaagaaattccactaaagatgaatagcagagaactgtgttcaggtaagctgaattaattcctttctctggggagttatattatcaccttgatatagctagtttcacttgtttctatttcaacatttgtttttatcccgtcttcactcctccccttccctactgccaccaccctacctcgaggcgcatcctctctcacctggactactgcaggagttctgtctcttggctttaact

SEQ ID NO: 82751 - DNA, 633 bp, Homo sapiens
taaggtgtgcacttttaccgaactggtctcaagtcagtgtacaggtatgccctggctgcctccacacttccacccactcccagggagaccaaaagccttcttacatctcaaggtagggacaaaaatggggaccatgatggctgattattcaaaataaaacaaaaagtattaaggtgaagattttttaaaatgctgcattacataatttacatgaaagcaatcctgtaacctcccctttgtggactcaggagagaactgggccgttctcctgagagaagtggggtggcttttgggagggcaagggacttcctgtaacaatgcatctcacaatatgtggaatgactatttaaaaaaaaaaaaaaaaagccaggcgcagtggctcatggctgtaatctcagcactttgggacgccgaggcaggcagatcacctgaggtcaggagttcaagaccggcctgaccaacatggagaaaccccgtctctattaaaaatacaaaattagccgggcatagtggcgcatgcctgtaatcccagctacttgggaggctgaggcaggagaatcacttgaacccgggaggcggaggttgtggtgagccaagatcacgccattctactccagtctgaacaatgaaagc

SEQ ID NO: 82752 - DNA, 681 bp, Homo sapiens
ggctttgccaagccatcacacactttaaaatatagctatggttttgaatttccaaatgcattcacattaagtaattttataatgttgatattttttaaatgggaaaatgtgagttgggtcagaaagctacctttcaccctgagttctccagcttggtgacgtgtggtaccatttcattatgcaggactcagtgaacaagaagtcagttgtcatagccgtctgtttcctggtagtttacacaccagaaactgaaatctgagaatggtacttgaaggaaaacaaagagctttacagtatttttttttcttttcaggaaaacacacagaagctaattttagcgtcttgatcaaattgacccagcctttaaccctggcaaacgttaccacgacacacttccaatagacaatagtttgcataccagcattgcactggaaacagatgtgcatgcagaattggcgtcccctcccccgccgcaagactgagcccgccactgtcatgaaagttgaaatgtggtccttcctaattggggaaaaaactaggtcttctttcaaatttcaaactacaagctttcatgacttctttaaaaatttattatgtcacagttatgttttgaccagagtttcaaaatatcattcactagagaaacatctcttggctttagcatgatttttatcttggtaa

SEQ ID NO: 82753 - DNA, 915 bp, Homo sapiens
ggtaaatatattaaagaccaagatttgcagtaacatttatcatatcaaatctccaaatctagtggaggaatttaaacagaggacacagacagctcttgggagagtcttcatatttttattgatgagaatcctgaagcacagatcacagagtgagatgccagcaaatctcaaactggaattcaaggaggctgatttctgatcagtacttacaactacgattcaacaaaccagttcgctatgctgccacagtcatctacattgtacagacgattctctacacaggagtggtggtgtatgctcctgccctggcactcaatcaagtgactgggtttgatctctggggctctgtgtttgcaacaggaattgtttgcacattctactgtaccctgggaggattaaaagcagtggtgtggacagatgcatttcagatggttgtcatgattgtgggcttcttaacggttctcattcaaggatcaactcatgctgggggattccacaatgtattagagcaatcaacaaatggatctcgactacatatatttgactttgatgtagatcctctcaggcgacacactttttggactatcacagtgggaggaacttttacttggctcggaatctatggggtcaatcaatcaactattcagcgatgcatctcttgcaaaacagaaaagcatgctaagcttgccttgtattttaacttgctgggtctctggatcattctggtgtgtgctgtcttctctggcttaatcatgtactctcactttaaagactgtgacccttggacttctggcatcatctcagcaccagaccagctgatgccgtactttgtcatggagatatttgccacaatgccaggactgccaggacttttgtggcttgtgccttcagtggaactctgaggttagtatagca

SEQ ID NO: 82754 - DNA, 833 bp, Homo sapiens
ggtaaatatattaaagaccaagatttgcagtaacatttatcatatcaaatctccaaatctagtggaggaatttaaacagaggacacagacagctcttgggagagtcttcatatttttattgtacttacaactacgattcaacaaaccagttcgctatgctgccacagtcatctacattgtacagacgattctctacacaggagtggtggtgtatgctcctgccctggcactcaatcaagtgactgggtttgatctctggggctctgtgtttgcaacaggaattgtttgcacattctactgtaccctgggaggattaaaagcagtggtgtggacagatgcatttcagatggttgtcatgattgtgggcttcttaacggttctcattcaaggatcaactcatgctgggggattccacaatgtattagagcaatcaacaaatggatctcgactacatatatttgactttgatgtagatcctctcaggcgacacactttttggactatcacagtgggaggaacttttacttggctcggaatctatggggtcaatcaatcaactattcagcgatgcatctcttgcaaaacagaaaagcatgctaagcttgccttgtattttaacttgctgggtctctggatcattctggtgtgtgctgtcttctctggcttaatcatgtactctcactttaaagactgtgacccttggacttctggcatcatctcagcaccagaccagctgatgccgtactttgtcatggagatatttgccacaatgccaggactgccaggacttttgtggcttgtgccttcagtggaactctgaggttagtatagca

SEQ ID NO: 82755 - DNA, 1387 bp, Homo sapiens
cagtggttattaatttcagaacacatctgaattccttctctgtggcatatgctttaggagaggagcagacagctcttagctagggtcagatttcaaattctcatctcttggtgccaataccaccaccagattcttctttgaagtcaacttttgagatcttcactaagtacacgttggtgtctgaagattcacacgagtgcctctggtaatcattttcttcagggaatcacagtctctcctctcagcaaagcatccactgtactgaactttgcttttggaaacatcttcttcctgagacctcgttgaaagaaactctctggtgtcatactttccaatatggaggtgaagaactttgcagtttgggattatgttgtatttgcagccctctttttcatttcctctggaattggggtgttctttgccattaaggagagaaaaaaggcaacttcccgagagttcctggttgggggaaggcaaatgagctttggccctgtcggcttgtctctgacagccagcttcatgtcagctgtcacggtcctggggaccccttctgaagtctaccgctttggggcatccttcctagtcttcttcattgcttacctatttgtcatcctcttaacatcagagctctttctccctgtgttctacagatctggtatcaccagcacttatgagtacttacaactacgattcaacaaaccagttcgctatgctgccacagtcatctacattgtacagacgattctctacacaggagtggtggtgtatgctcctgccctggcactcaatcaagtgactgggtttgatctctggggctctgtgtttgcaacaggaattgtttgcacattctactgtaccctgggaggattaaaagcagtggtgtggacagatgcatttcagatggttgtcatgattgtgggcttcttaacggttctcattcaaggatcaactcatgctgggggattccacaatgtattagagcaatcaacaaatggatctcgactacatatatttgactttgatgtagatcctctcaggcgacacactttttggactatcacagtgggaggaacttttacttggctcggaatctatggggtcaatcaatcaactattcagcgatgcatctcttgcaaaacagaaaagcatgctaagcttgccttgtattttaacttgctgggtctctggatcattctggtgtgtgctgtcttctctggcttaatcatgtactctcactttaaagactgtgacccttggacttctggcatcatctcagcaccagaccagctgatgccgtactttgtcatggagatatttgccacaatgccaggactgccaggacttttgtggcttgtgccttcagtggaactctgaggttagtatagca

SEQ ID NO: 82756 - DNA, 365 bp, Homo sapiens
tgtcatgagagaaaatcactattggctcctaaattaaactataaaagcatagcaacaattcttgctttatgttgtgaggaaaactgcacttttaaatatcattggtgcaagcattatttccttcaatgtgtctgttcatatgactaaaatgtacttgatacacaagtttcttttagaaatagaaatattaaaataagtatttcctataataaattatatataatatgtattatataggcaataatacataatattataccaccagtaataggcataaattctaagcccaaaagacaaaatttgataaatgactcctttttttttttttttttgaaatggagtctggctctgttgcccaggctgga

SEQ ID NO: 82757 - DNA, 411 bp, Homo sapiens
gaatcttggcggtttttcccttgggtctctataatgtctatcaagtactttagtttcagtgtgattttcaaggaatgtgacctggggtgaaatccctggagcaaccgtgtacactctttgactgactttcagccctcgcaaatctaaacatcttgtgcttggaaaatccagactataagaaggccttttgattggcctgtttctgattataggtaagtgtgactcttacctctgaaaccctagagacacctctcatgtgctttccccacttcccaagctactgcttccatttggccctattgtgcatccttcaatccttcaacacccttttctgaaggtttttgtggaagaaagaagagttgtcttgggccacacataaatacactaatgctaacgatagctggtgagcta

SEQ ID NO: 82758 - DNA, 361 bp, Homo sapiens
actttgttctatatgcagagagagccaaaagatttttttagcaggagaatggtggggtgaaaaggataattgggtaagattcatttagccccggttatttggcatggagagaccctggagataaaggaatgaaaggtgaatataaagaccattctagaaatgtgtgcttgcctaagactttaaatggtgtcagaaggaatggggagtgaggaattaatgcaaatatatattctgaaggaagactttattggtgaaggacaggggtatctaaacttttggcttccctgggtgacactggaagaagaagagttgtcttgggccacacataaatacactaatgctaacgatagctggtgagcta

SEQ ID NO: 82759 - DNA, 417 bp, Homo sapiens
gtgggggctcagcaggacgtagaaaatccacaaattcagagatagttatatggaaaaaaatagatagaaaattgttaagaatatagaagatctgaacagcatcacccaccaatttgacctagttgacttttatagaccaatcaaagcacacagtgtttcaaatgcacacagaaagactatatatttggccataaaataaaagaaataaagacacatgtccacacaagtacatatataaaagtgtttattgtatgttactctgtaatattcaaaacctggaaacaacccaaaatgccatcaaaggtgagtggataaacatactgtgatacagccacacaatggaacactacacagcaaagaattaaataagccgttgataaacatgaaaacatgggtgaatcccaaaataactgtgtg

SEQ ID NO: 82760 - DNA, 836 bp, Homo sapiens
agaaaggattgaaaatattgaggaaaaagagattatcctgtcatgtgagatgcataagaagccatgcctccatgctgcacccctggaactcacaacaattcttgacccacaccctggatggaattttggcctctggttgccaacactcatgctgagctacgcgtagtccctctttacacccagcacactttcttctggaactttgggctatagatcccagtattgctccacctccattgaggaaactgcaaataactcaaaccagagagcttggccctctttctctgcttagccacatcagaatttcacccagtcctgtcaatttggtctcctagatgtagaaaatgtttacaggtttttcttccctatagtctccacttatctgcccccactgtgattcccaggaagcactgacaagtcctgtctgttaccacatgttaccaccctttcattcctttcttgctttgacccttgaagaagatcagaatatgacaccccaaaatgtgacactttgggcagaaggattattttgacctgcaggaaattgagaaccaacagatgtagaaacagttctctgccttccccttatctgcctaaaagcagggggatgaatttccctttgagaaaggtgctcccctaatatggttggggtttgtgtccccacccaaatctcatgtcgaattgtaatccccctcctctgtctgttcctcctgctgtggtcatggaagagatgcctgcttctcttttgccttctaccatgattgtaagtttcctgagacctccccagaagccatcatgctttctgtacagcctgtggaaccatatgccaattaaac

SEQ ID NO: 82761 - DNA, 962 bp, Homo sapiens
agaaaggattgaaaatattgaggaaaaagagattatcctgtcatgtgagatgcataagaagccatgcctccatgctgcacccctggaactcacaacaattcttgacccacaccctggatggaattttggcctctggttgccaacactcatgctgagctacgcgtagtccctctttacacccagcacactttcttctggaactttgggctatagatcccagtattgctccacctccattgaggaaactgcaaataactcaaaccagagagcttggccctctttctctgcttagccacatcagaatttcacccagtcctgtcaatttggtctcctagatgtagaaaatgtttacaggtttttcttccctatagtctccacttatctgcccccactgtgattcccaggaagcactgacaagtcctgtctgttaccacatgttaccaccctttcattcctttcttgctttgacccttgaagaagatcagaatatgacaccccaaaatgtgacactttgggcagaaggattattttgacctgcaggaaattgagaaccaacagatgtagaaacagttctctgccttccccttatctgcctaaaagcagggggatgaatttccctttgagaaaggtgctcccctaatatggttggggtttgtgtccccacccaaatctcatgtcgaattgtaatccccaatgttggaggaggggcctggtgggaaatgattggatcttggggacagatttcctccttgctgttcttgtgatagtgaatgacttctcatgatatctggtgttaaaaagtgtgtagccccccccccctcctctgtctgttcctcctgctgtggtcatggaagagatgcctgcttctcttttgccttctaccatgattgtaagtttcctgagacctccccagaagccatcatgctttctgtacagcctgtggaaccatatgccaattaaac

SEQ ID NO: 82762 - DNA, 852 bp, Homo sapiens
cgtgatgtgcctctggggcaactgaaggattgctatctgacttatgcatttaaaaccttcaaagtggaagtttgtctggaatggcttaggcaaacagactgggttggattgagaattgaatgtatacataaaatttggtttggtcagatgagaacaccaaatgtggtagctagctcacctttatttatgagatttttattgggttgatttgtcttgaaagaatcaaatctaagagaaatgtttggaatggctagatgatcctaacagaagaaatcttacaggtctttactgctaaacctaaggagatgagagtaaacagtaagtggccaactcaaagaagcatggactatgttgaaacatggactatagctgcaatttcccagtggtgcagttttcaagcgctttaccccaggagagaaaaaaataaataaatgaaaagtagccatttcaccattcagaggatagatactgttgcccagtgaaaactgcatgaattatgtaatagttttatgcttgtttcccccactcaccattccaaaactgtaagacttcaagatagaacaggaggtatgaaattttaacagcacataaaaaaatagtgaacattctatccccgcacttcattgccgttactaaggctaaggcaggactgagtttagaatgcagcaaagctttgaaatgtataagagataatatctctaatattcaaatacaccataaactcaaaacttagaatcaatcctatttttaaaatactgaatgtgactagaaacgttataaaagttttcaagatatcagtatatgatagaaagagatgtattgctttagcacaaatcattctacaaaaaaaaa

SEQ ID NO: 82763 - DNA, 940 bp, Homo sapiens
ataagtataagtatgaaggagttgaactctgttcaagtaactcagagccctttttctttttccttctaaagaacttcttaatcttccatcctcagtaattaagaagaaagttcatttcagtggggaaagtaaagagaacatcatgaggagtgagaattctgagagtcagctcacatctaagtccaagtgcaaggacctgaagaaaaggcttcacgctgcccagctgcgggctcaagccctgtcagatattgagaaaaattaccaactgaaaagcagacagatcctgggcatgcgctagccaggtagagagacacagagctgtgtacaggatgtaatattaccaacctttaaagactgatattcaaatgctgtagtgttgaatacttggttccatgagccatgcctttctgtatagtacacatgatatttcggaattggttttactgttcttcagcaactattgtacaaaatgttcacatttaatttttctttcttcttttaagaacatattataaaaagaatactttcttggttgggcttttaatcctgtgtgtgattactagtaggaacatgagatgtgacattctaaatcttgggagaaaaaataatgttaggaaaaaaatatttatgcaggaagagtagcactcactgaatagttttaaatgactgagtggtatgcttacaattgtcatgtctagatttaaattttaagtctgagattttaaatgtttttgagcttagaaaacccagttagatgcaatttggtcattaataccatgacatcttgcttataaatattccattgctctgtagttcaaatctgttagctttgtgaaaattcatcactgtgatgtttgtattctttttttttttctgtttaacagaatatgagctgtctgtcatttacctacttctttcccactaaataaaagaattcttc

SEQ ID NO: 82764 - DNA, 2129 bp, Homo sapiens
agcggttaaacggggcccaaggcaggggtggcgggtcagtgctgctcgggggcttctccatccaggtccctggagttcctggtccctggagctccgcacttggcggcgcaacctgcgtgaggcagcgcgactctggcgactggccggccatgccttcccgggctgaggactatgaagtgttgtacaccattggcacaggctcctacggccgctgccagaagatccggaggaagagtgatggcaagatattagtttggaaagaacttgactatggctccatgacagaagctgagaaacagatgcttgtttctgaagtgaatttgcttcgtgaactgaaacatccaaacatcgttcgttactatgatcggattattgaccggaccaatacaacactgtacattgtaatggaatattgtgaaggaggggatctggctagtgtaattacaaagggaaccaaggaaaggcaatacttagatgaagagtttgttcttcgagtgatgactcagttgactctggccctgaaggaatgccacagacgaagtgatggtggtcataccgtattgcatcgggatctgaaaccagccaatgttttcctggatggcaagcaaaacgtcaagcttggagactttgggctagctagaatattaaaccacgacacgagttttgcaaaaacatttgttggcacaccttattacatgtctcctgaacaaatgaatcgcatgtcctacaatgagaaatcagatatctggtcattgggctgcttgctgtatgagttatgtgcattaatgcctccatttacagcttttagccagaaagaactcgctgggaaaatcagagaaggcaaattcaggcgaattccataccgttactctgatgaattgaatgaaattattacgaggatgttaaacttaaaggattaccatcgaccttctgttgaagaaattcttgagaaccctttaatagcagatttggttgcagacgagcaaagaagaaatcttgagagaagagggcgacaattaggagagccagaaaaatcgcaggattccagccctgtattgagtgagctgaaactgaaggaaattcagttacaggagcgagagcgagctctcaaagcaagagaagaaagattggagcagaaagaacaggagctttgtgttcgtgagagactagcagaggacaaactggctagagcagaaaatctgttgaagaactacagcttgctaaaggaacggaagttcctgtctctggcaagtaatccagaacttcttaatcttccatcctcagtaattaagaagaaagttcatttcagtggggaaagtaaagagaacatcatgaggagtgagaattctgagagtcagctcacatctaagtccaagtgcaaggacctgaagaaaaggcttcacgctgcccagctgcgggctcaagccctgtcagatattgagaaaaattaccaactgaaaagcagacagatcctgggcatgcgctagccaggtagagagacacagagctgtgtacaggatgtaatattaccaacctttaaagactgatattcaaatgctgtagtgttgaatacttggttccatgagccatgcctttctgtatagtacacatgatatttcggaattggttttactgttcttcagcaactattgtacaaaatgttcacatttaatttttctttcttcttttaagaacatattataaaaagaatactttcttggttgggcttttaatcctgtgtgtgattactagtaggaacatgagatgtgacattctaaatcttgggagaaaaaataatgttaggaaaaaaatatttatgcaggaagagtagcactcactgaatagttttaaatgactgagtggtatgcttacaattgtcatgtctagatttaaattttaagtctgagattttaaatgtttttgagcttagaaaacccagttagatgcaatttggtcattaataccatgacatcttgcttataaatattccattgctctgtagttcaaatctgttagctttgtgaaaattcatcactgtgatgtttgtattctttttttttttctgtttaacagaatatgagctgtctgtcatttacctacttctttcccactaaataaaagaattcttc

SEQ ID NO: 82765 - DNA, 2105 bp, Homo sapiens
agcggttaaacggggcccaaggcaggggtggcgggtcagtgctgctcgggggcttctccatccaggtccctggagttcctggtccctggagctccgcacttggcggcgcaacctgcgtgaggcagcgcgactctggcgactggccggccatgccttcccgggctgaggactatgaagtgttgtacaccattggcacaggctcctacggccgctgccagaagatccggaggaagagtgatggcaagatattagtttggaaagaacttgactatggctccatgacagaagctgagaaacagatgcttgtttctgaagtgaatttgcttcgtgaactgaaacatccaaacatcgttcgttactatgatcggattattgaccggaccaatacaacactgtacattgtaatggaatattgtgaaggaggggatctggctagtgtaattacaaagggaaccaaggaaaggcaatacttagatgaagagtttgttcttcgagtgatgactcagttgactctggccctgaaggaatgccacagacgaagtgatggtggtcataccgtattgcatcgggatctgaaaccagccaatgttttcctggatggcaagcaaaacgtcaagcttggagactttgggctagctagaatattaaaccacgacacgagttttgcaaaaacatttgttggcacaccttattacatgtctcctgaacaaatgaatcgcatgtcctacaatgagaaatcagatatctggtcattgggctgcttgctgtatgagttatgtgcattaatgcctccatttacagcttttagccagaaagaactcgctgggaaaatcagagaaggcaaattcaggcgaattccataccgttactctgatgaattgaatgaaattattacgaggatgttaaacttaaaggattaccatcgaccttctgttgaagaaattcttgagaaccctttaatagcagatttggttgcagacgagcaaagaagaaatcttgagagaagagggcgacaattaggagagccagaaaaatcgcaggattccagccctgtattgagtgagctgaaactgaaggaaattcagttacaggagcgagagcgagctctcaaagcaagagaagaaagattggagcagaaagaacaggagctttgtgttcgtgagagactagcagaggacaaactggctagagcagaaaatctgttgaagaactacagcttgctaaaggaacggaagttcctgtctctggcaagtaatccaggtatgagaatcaacttggtcaacagaagctggtgctacaaatgaagaaatgtgcaccagtgttgctcccaaagtggcttaggtagcccttttcatttacaaatctcaaattttaagatggatttcattgaatatatgcatttcaatggaaacaaaattctgttatagcaatgatttatttcctgggttcatagacctgaggcaatgagtcatagaatttcatgtttgattttctttaccttatcaaactacatgtttagtaattgatacttatttttattatcattatttatttttttattttttttgagatggagtctcactctgtagcccaggctggagtgcagtggcacaatctcggctcactgcaagctctgcctcccgggttcacgccattcttctgcctcagcctcccaagtagctgggactacagacacccgccaccaagcccggctaatttttgtatttttagtagagacggggtttcaccgtgttagccaggatggtctcgatttcctgacctcgtgatccgcctgcctcggcctcccaatgtgctgggattacaggcatgagacaccgtgcccagccgatacttatttttaaaaattagggcatttacaaaactattgtatgtttcagatttcagagagataaactgcatttcaagtaaaaataaacattttaatattgccatgcctcatttttcatagaaagcatggcttaaaaggcatgataagccacctgcagaataggctgtcacgtttggatctttgctaacaccctttcaagttgaaagacatatttgttgaaatttgattgtttaatatctacatatgttctctgcat

SEQ ID NO: 82766 - DNA, 2105 bp, Homo sapiens
agcggttaaacggggcccaaggcaggggtggcgggtcagtgctgctcgggggcttctccatccaggtccctggagttcctggtccctggagctccgcacttggcggcgcaacctgcgtgaggcagcgcgactctggcgactggccggccatgccttcccgggctgaggactatgaagtgttgtacaccattggcacaggctcctacggccgctgccagaagatccggaggaagagtgatggcaagatattagtttggaaagaacttgactatggctccatgacagaagctgagaaacagatgcttgtttctgaagtgaatttgcttcgtgaactgaaacatccaaacatcgttcgttactatgatcggattattgaccggaccaatacaacactgtacattgtaatggaatattgtgaaggaggggatctggctagtgtaattacaaagggaaccaaggaaaggcaatacttagatgaagagtttgttcttcgagtgatgactcagttgactctggccctgaaggaatgccacagacgaagtgatggtggtcataccgtattgcatcgggatctgaaaccagccaatgttttcctggatggcaagcaaaacgtcaagcttggagactttgggctagctagaatattaaaccacgacacgagttttgcaaaaacatttgttggcacaccttattacatgtctcctgaacaaatgaatcgcatgtcctacaatgagaaatcagatatctggtcattgggctgcttgctgtatgagttatgtgcattaatgcctccatttacagcttttagccagaaagaactcgctgggaaaatcagagaaggcaaattcaggcgaattccataccgttactctgatgaattgaatgaaattattacgaggatgttaaacttaaaggattaccatcgaccttctgttgaagaaattcttgagaaccctttaatagcagatttggttgcagacgagcaaagaagaaatcttgagagaagagggcgacaattaggagagccagaaaaatcgcaggattccagccctgtattgagtgagctgaaactgaaggaaattcagttacaggagcgagagcgagctctcaaagcaagagaagaaagattggagcagaaagaacaggagctttgtgttcgtgagagactagcagaggacaaactggctagagcagaaaatctgttgaagaactacagcttgctaaaggaacggaagttcctgtctctggcaagtaatccagtaattaagaagaaagttcatttcagtggggaaagtaaagagaacatcatgaggagtgagaattctgagagtcagctcacatctaagtccaagtgcaaggacctgaagaaaaggcttcacgctgcccagctgcgggctcaagccctgtcagatattgagaaaaattaccaactgaaaagcagacagatcctgggcatgcgctagccaggtagagagacacagagctgtgtacaggatgtaatattaccaacctttaaagactgatattcaaatgctgtagtgttgaatacttggttccatgagccatgcctttctgtatagtacacatgatatttcggaattggttttactgttcttcagcaactattgtacaaaatgttcacatttaatttttctttcttcttttaagaacatattataaaaagaatactttcttggttgggcttttaatcctgtgtgtgattactagtaggaacatgagatgtgacattctaaatcttgggagaaaaaataatgttaggaaaaaaatatttatgcaggaagagtagcactcactgaatagttttaaatgactgagtggtatgcttacaattgtcatgtctagatttaaattttaagtctgagattttaaatgtttttgagcttagaaaacccagttagatgcaatttggtcattaataccatgacatcttgcttataaatattccattgctctgtagttcaaatctgttagctttgtgaaaattcatcactgtgatgtttgtattctttttttttttctgtttaacagaatatgagctgtctgtcatttacctacttctttcccactaaataaaagaattcttc

SEQ ID NO: 82767 - DNA, 1477 bp, Homo sapiens
ccttacccgtcgcgcgttcaggcacccgcttccccctaccccccacaccctagaacaaatgaatcgcatgtcctacaatgagaaatcagatatctggtcattgggctgcttgctgtatgagttatgtgcattaatgcctccatttacagcttttagccagaaagaactcgctgggaaaatcagagaaggcaaattcaggcgaattccataccgttactctgatgaattgaatgaaattattacgaggatgttaaacttaaaggattaccatcgaccttctgttgaagaaattcttgagaaccctttaatagcagatttggttgcagacgagcaaagaagaaatcttgagagaagagggcgacaattaggagagccagaaaaatcgcaggattccagccctgtattgagtgagctgaaactgaaggaaattcagttacaggagcgagagcgagctctcaaagcaagagaagaaagattggagcagaaagaacaggagctttgtgttcgtgagagactagcagaggacaaactggctagagcagaaaatctgttgaagaactacagcttgctaaaggaacggaagttcctgtctctggcaagtaatccagaacttcttaatcttccatcctcagtaattaagaagaaagttcatttcagtggggaaagtaaagagaacatcatgaggagtgagaattctgagagtcagctcacatctaagtccaagtgcaaggacctgaagaaaaggcttcacgctgcccagctgcgggctcaagccctgtcagatattgagaaaaattaccaactgaaaagcagacagatcctgggcatgcgctagccaggtagagagacacagagctgtgtacaggatgtaatattaccaacctttaaagactgatattcaaatgctgtagtgttgaatacttggttccatgagccatgcctttctgtatagtacacatgatatttcggaattggttttactgttcttcagcaactattgtacaaaatgttcacatttaatttttctttcttcttttaagaacatattataaaaagaatactttcttggttgggcttttaatcctgtgtgtgattactagtaggaacatgagatgtgacattctaaatcttgggagaaaaaataatgttaggaaaaaaatatttatgcaggaagagtagcactcactgaatagttttaaatgactgagtggtatgcttacaattgtcatgtctagatttaaattttaagtctgagattttaaatgtttttgagcttagaaaacccagttagatgcaatttggtcattaataccatgacatcttgcttataaatattccattgctctgtagttcaaatctgttagctttgtgaaaattcatcactgtgatgtttgtattctttttttttttctgtttaacagaatatgagctgtctgtcatttacctacttctttcccactaaataaaagaattcttc

SEQ ID NO: 82768 - DNA, 2138 bp, Homo sapiens
agcggttaaacggggcccaaggcaggggtggcgggtcagtgctgctcgggggcttctccatccaggtccctggagttcctggtccctggagctccgcacttggcggcgcaacctgcgtgaggcagcgcgactctggcgactggccggccatgccttcccgggctgaggactatgaagtgttgtacaccattggcacaggctcctacggccgctgccagaagatccggaggaagagtgatggcaagatattagtttggaaagaacttgactatggctccatgacagaagctgagaaacagatgcttgtttctgaagtgaatttgcttcgtgaactgaaacatccaaacatcgttcgttactatgatcggattattgaccggaccaatacaacactgtacattgtaatggaatattgtgaaggaggggatctggctagtgtaattacaaagggaaccaaggaaaggcaatacttagatgaagagtttgttcttcgagtgatgactcagttgactctggccctgaaggaatgccacagacgaagtgatggtggtcataccgtattgcatcgggatctgaaaccagccaatgttttcctggatggcaagcaaaacgtcaagcttggagactttgggctagctagaatattaaaccacgacacgagttttgcaaaaacatttgttggcacaccttattacatgtctcctgaacaaatgaatcgcatgtcctacaatgagaaatcagatatctggtcattgggctgcttgctgtatgagttatgtgcattaatgtaagtatgatgaagacagattcctagtctaaggcctccatttacagcttttagccagaaagaactcgctgggaaaatcagagaaggcaaattcaggcgaattccataccgttactctgatgaattgaatgaaattattacgaggatgttaaacttaaaggattaccatcgaccttctgttgaagaaattcttgagaaccctttaatagcagatttggttgcagacgagcaaagaagaaatcttgagagaagagggcgacaattaggagagccagaaaaatcgcaggattccagccctgtattgagtgagctgaaactgaaggaaattcagttacaggagcgagagcgagctctcaaagcaagagaagaaagattggagcagaaagaacaggagctttgtgttcgtgagagactagcagaggacaaactggctagagcagaaaatctgttgaagaactacagcttgctaaaggaacggaagttcctgtctctggcaagtaatccagtaattaagaagaaagttcatttcagtggggaaagtaaagagaacatcatgaggagtgagaattctgagagtcagctcacatctaagtccaagtgcaaggacctgaagaaaaggcttcacgctgcccagctgcgggctcaagccctgtcagatattgagaaaaattaccaactgaaaagcagacagatcctgggcatgcgctagccaggtagagagacacagagctgtgtacaggatgtaatattaccaacctttaaagactgatattcaaatgctgtagtgttgaatacttggttccatgagccatgcctttctgtatagtacacatgatatttcggaattggttttactgttcttcagcaactattgtacaaaatgttcacatttaatttttctttcttcttttaagaacatattataaaaagaatactttcttggttgggcttttaatcctgtgtgtgattactagtaggaacatgagatgtgacattctaaatcttgggagaaaaaataatgttaggaaaaaaatatttatgcaggaagagtagcactcactgaatagttttaaatgactgagtggtatgcttacaattgtcatgtctagatttaaattttaagtctgagattttaaatgtttttgagcttagaaaacccagttagatgcaatttggtcattaataccatgacatcttgcttataaatattccattgctctgtagttcaaatctgttagctttgtgaaaattcatcactgtgatgtttgtattctttttttttttctgtttaacagaatatgagctgtctgtcatttacctacttctttcccactaaataaaagaattcttc

SEQ ID NO: 82769 - DNA, 1498 bp, Homo sapiens
  misc_feature (82)..(82): n is a, c, g, or t
  misc_feature (84)..(84): n is a, c, g, or t
aatgaatcgcatgtcctacaatgaccagatatctgatttctcattgtaggacatgcgattcatttgttcaggagacatgtantnggggtgtgccaacaatgagaaatcagatatctggtcattgggctgcttgctgtatgagttatgtgcattaatgcctccatttacagcttttagccagaaagaactcgctgggaaaatcagagaaggcaaattcaggcgaattccataccgttactctgatgaattgaatgaaattattacgaggatgttaaacttaaaggattaccatcgaccttctgttgaagaaattcttgagaaccctttaatagcagatttggttgcagacgagcaaagaagaaatcttgagagaagagggcgacaattaggagagccagaaaaatcgcaggattccagccctgtattgagtgagctgaaactgaaggaaattcagttacaggagcgagagcgagctctcaaagcaagagaagaaagattggagcagaaagaacaggagctttgtgttcgtgagagactagcagaggacaaactggctagagcagaaaatctgttgaagaactacagcttgctaaaggaacggaagttcctgtctctggcaagtaatccagaacttcttaatcttccatcctcagtaattaagaagaaagttcatttcagtggggaaagtaaagagaacatcatgaggagtgagaattctgagagtcagctcacatctaagtccaagtgcaaggacctgaagaaaaggcttcacgctgcccagctgcgggctcaagccctgtcagatattgagaaaaattaccaactgaaaagcagacagatcctgggcatgcgctagccaggtagagagacacagagctgtgtacaggatgtaatattaccaacctttaaagactgatattcaaatgctgtagtgttgaatacttggttccatgagccatgcctttctgtatagtacacatgatatttcggaattggttttactgttcttcagcaactattgtacaaaatgttcacatttaatttttctttcttcttttaagaacatattataaaaagaatactttcttggttgggcttttaatcctgtgtgtgattactagtaggaacatgagatgtgacattctaaatcttgggagaaaaaataatgttaggaaaaaaatatttatgcaggaagagtagcactcactgaatagttttaaatgactgagtggtatgcttacaattgtcatgtctagatttaaattttaagtctgagattttaaatgtttttgagcttagaaaacccagttagatgcaatttggtcattaataccatgacatcttgcttataaatattccattgctctgtagttcaaatctgttagctttgtgaaaattcatcactgtgatgtttgtattctttttttttttctgtttaacagaatatgagctgtctgtcatttacctacttctttcccactaaataaaagaattcttc

SEQ ID NO: 82770 - DNA, 1405 bp, Homo sapiens
cttgtggacccagaacctcatgagttaaaaccaccagtgaacttatttttccaagtgtttaagacctagccataaaggagtcctttcttttgtcttggaaacacatttttgtccttttattttaactgctgtcttaggaggactattctgttatgcaatctgactataatactgagtattttttccccaggattaccatcgaccttctgttgaagaaattcttgagaaccctttaatagcagatttggttgcagacgagcaaagaagaaatcttgagagaagagggcgacaattaggagagccagaaaaatcgcaggattccagccctgtattgagtgagctgaaactgaaggaaattcagttacaggagcgagagcgagctctcaaagcaagagaagaaagattggagcagaaagaacaggagctttgtgttcgtgagagactagcagaggacaaactggctagagcagaaaatctgttgaagaactacagcttgctaaaggaacggaagttcctgtctctggcaagtaatccagaacttcttaatcttccatcctcagtaattaagaagaaagttcatttcagtggggaaagtaaagagaacatcatgaggagtgagaattctgagagtcagctcacatctaagtccaagtgcaaggacctgaagaaaaggcttcacgctgcccagctgcgggctcaagccctgtcagatattgagaaaaattaccaactgaaaagcagacagatcctgggcatgcgctagccaggtagagagacacagagctgtgtacaggatgtaatattaccaacctttaaagactgatattcaaatgctgtagtgttgaatacttggttccatgagccatgcctttctgtatagtacacatgatatttcggaattggttttactgttcttcagcaactattgtacaaaatgttcacatttaatttttctttcttcttttaagaacatattataaaaagaatactttcttggttgggcttttaatcctgtgtgtgattactagtaggaacatgagatgtgacattctaaatcttgggagaaaaaataatgttaggaaaaaaatatttatgcaggaagagtagcactcactgaatagttttaaatgactgagtggtatgcttacaattgtcatgtctagatttaaattttaagtctgagattttaaatgtttttgagcttagaaaacccagttagatgcaatttggtcattaataccatgacatcttgcttataaatattccattgctctgtagttcaaatctgttagctttgtgaaaattcatcactgtgatgtttgtattctttttttttttctgtttaacagaatatgagctgtctgtcatttacctacttctttcccactaaataaaagaattcttc

SEQ ID NO: 82771 - DNA, 825 bp, Homo sapiens
gaaggattgaaccaagagggtgactgggctgagtacacagaaccttcagtgactgattgattgaccagaacactgctgctcaagcatatgagaggatatagatctggctggacaagtttgccagcccgactctagagaaatctcagctgagaaagtctgcaaagaaatttggctgtgtctaccttggtctttacctcattatcaatgagcaggggctaatttcttcacctgcaaccctattgcacggtcattatcaggactgagtcaataactgcaaaacatttcaaatagagccacatgaagaggaactcaaacatcagatgaatggaatcacatattttatggaagtcagccaagcctcaagagacccttgaaccaagcagctatggcagcagggatggcaggtctacacaggatcaacaacatagattcccttccaccaagtctaagccagcaactgccactgctgagtgctcaatccctcaatgaagagaacaacacacagcccttgatatgacaccattcatcactggacatctccaccttaaggggacagaagctcatctttatcagaatctatacctacttcatatcaccttccctgccttcattgcctctgccagctccagcaactgggagtttataggatgcctaatctcaacatggcactctgcattatgtcttctcaaacctctcatcttaaggaggtacaagagtgggcccatgaccataggatttcctggtcctactatctaccccattaccagaaacagccagcctgacagaacagtggaggagcttactgaagactcagttgaagagtct

SEQ ID NO: 82772 - DNA, 728 bp, Homo sapiens
gtctcccgggagctgcttctccccacactccgcccctgcgcctccccgagcttcagcctctcctgtaaagagcagagatggagaggaagcgacagtcacaacttccggttagcgtggcggaggctctcggagtctttgggacctcagcaccgggataccgggagactccctcgtgtccccatgtgggccacctaccagacagaagagacaggcttggaattcaaaactctgacagactctccatcccatgcaaattccatctctttgtgactgtgctcttctctttggttcatgccacatcattgcaaagttaaatgaggttctaggtagcacagggcgtggagtttgctgaaggatcactcacacaagcggctgcccgctgttcctggctcagtgctcaccactgcacgtcacaaggagcggcaccatggctcccgtaacaggaaaaccctgcatttgctactcccggctgcacgagagtggagggaggcttggacctttccaccacccccttccctttgttgccagctactcttacccactagtctactcaagtcacctcagcagacacccaagacccaaactgagaggcgctgctggtggtgcggagagcgacacagtccaaaataagacgcggagcccgagctgtcaggctgtgagtgacagccgggctcctagggctgactgacaagttctctcccttcttgtggcaagccatgtgcgagccc

SEQ ID NO: 82773 - DNA, 185 bp, Homo sapiens
cgcctggtctggcactcttcacatgccctctccatgcccatctccagcaaaggatagcgggcttacccttgctatcaaaggtgcttggcttagaccaatcacccaaaactgatgtttcagagatgcctgctggaggagtgtaggcagatattactgatgtcagaaaaacagtttgagcgccactt

SEQ ID NO: 82774 - DNA, 454 bp, Homo sapiens
tttagaggtgcaccagtttctttcaaatcttgaaacagcgcaactaagagatctaggagattgctacattgttgaggttgggctccttgaaagccaatttcccatgaaaatcaggtgcatatgcacagtgatataagctattcaacaagtatctgaatgtatttgtcatcaatgatctttgtccctgatatggcctggctctgtgtccccacccaaatctcatcttgaattgtaatccaaactgtaatccccacatgttgcgggagggaccttgtgggaggtgattagatcatggggctggttcccccatgctgttctcatgatagtgaatgagttctcatgagatctgatggttttataaggggctttccctgcttcactctgcacttgtctctcctgccaccatgtgaagaaagacgtgtttgcttccccttccgccaggattgtaagtttc

SEQ ID NO: 82775 - DNA, 409 bp, Homo sapiens
gcagcagagtacatattcttttcaagtgcaaatgtaacattcaccaagatagaccatattccaggccatacaaatctcattaaacttaactgaattgagataaaataatacaatgtatgttctctggccaaaagaaaatagaaatagaaattaattacagaaagatatattaaaaatctccaaatattaaaaaactaaacactatgcttttaataaaatacgagtcaaagaagataccatagttaaaattataaaatattttgaatgaaaccaaatgaaaacaaaacctattaggatttgttagtgtgacccaaacagcacttggttggaaagttataacattaaatgcatatattcaaaaagaagaaagttctcacattaatgatccaagcttcaatcttaacatact

SEQ ID NO: 82776 - DNA, 802 bp, Homo sapiens
ttcagaaatggacatgtgacccaatcaaagccagagatgcagaaactcttgctgggactttcggagaaaagactcactctcaactcctcaaagttgggtggatgtgaggccagagttgctgttgctatcttgctaccatcagatgacagcctgagaatggagtttacccaaagggaatggagacaacagatgaagtgcaagaagccaggacaagatatccatgtttgcaccctggtcaaatgttacctgaagccactttagctcctggagtttgcagttacatgagggaacaaacttcatttttgcttatgtcagaatttttgttacttataatggaatcaatccaaagtggtacagtgctttttatcccataagctacatagtgatctctttttcctttctttgcagtatctaaaccattcattctttaaatcccacttaaatgctacctcatccatgaaacaatctctgctttcttgtgccataagaactctctcccttctttgaaatcccagagcattttacatgttggtctcttatggaacatcccttactatagtgtactaattttctttagatacatggcttgtcccctgtaagctcttggcagcttcagggcaggacttttgttgtgattatctttttatcacaggacacacaaggtgctttgaataaaatgaggtctcaattcatatttatggaatgaacagatgaatcaatgaaatggactttgtctctgagcaggcaatacactctgggaagaagccagttttgctccataggaggaagagaacaaactgct

SEQ ID NO: 82777 - DNA, 581 bp, Homo sapiens
gacaactagtggggatgaggagcagcgtggacaggcccaaggagctgggggacagatggtggtgacagggtctcactctggggcccaggctggagtgcggtatcatgatcacaactcactgcagcctcaacctcctgggctcaaagatggctcacagatggctgctttgatgtttacaaggaggtgttgcgtcacaggttgggaggtcatgaattatgtcatgctccatgtgggggacatgaattatgtcatgctccgtgtgggggacatgaattatggacggcagtaagggattccagaggcagctcaccagtggcccacggagcccttctcagcttggcctccccacctcccaccgtggccacccctcctgcccctgcaggccttcataactgcgcatccaggcagcttccttgctgaagcaccctctccgcagaactcctgctcattcctcaagacccagctcgactgtctgtcctctgtgacacgtcctgattccaggcagcatgaggggcgtccgccaccccacgttggttcctacagcacactgtgtcagtgtggcatcatccatccatgtcccc

SEQ ID NO: 82778 - DNA, 202 bp, Homo sapiens
aattaggagagtttcaaactcacagtgtcttagtttgatttctgttccttataacaatacctgaaactgggtaattaataaagaaaaggaatttatttctttgttatggaggctgggaagtctaaggtcaaagggtggcatctgtgagagccttcttgctggtggggactctgcagtgtcctggggcagcgcaggcactaca

SEQ ID NO: 82779 - DNA, 688 bp, Homo sapiens
  misc_feature (679)..(679): n is a, c, g, or t
cttgattcctggactcatgaatcctggacatggaagaaacagcaccataaattggatgctgattcagagcatatacagccttctgcagaactttgccccagccctgaaatatgttgccaactagctagtgctgtaactgaagctccaaaaggccattccactgtactatcaaaccagctgcttcaggatggtgaagaacatggtcaagtaaaaattgagtgggcttcctatctatttcacttcgagaaacaccaggattaactagccaacaccataggtctgcatgagtcagattattctgattgctgcattgaatctgctgtccggacgggacacagaaggaattgaataaagtcatggaaaatgaaactcaggttggtcttctcactggcttcttaaaggaatgagcacattgtgatcctgctctgtatcgtggagaaagacccaaggatgatgagaagttctgcttttggaatagcagcatcaacagctacatggacctgcttctgggaaaaacaagtgtaactgccatcttttcatcacaatgggacagcctgtctgagaatgaggccagtgcaaagaagaaagtggagcccacgtacagagagatgatacattgatgatatcatgtgtcctagattcatgcttcatatgaaggagtcccattataccgatactnaaacacaaa

SEQ ID NO: 82780 - DNA, 449 bp, Homo sapiens
aaactattagtaatcaaattcctgttggacataaatcgtaactagtgaggcagagtaaccaggtggaatatcacagaccttggaatgaatgagaactgttttccaacccaggcttgtgagctgtgagattgtgaacatgtttcctaacctctgtgagcctctgtttcctcatttatgaaacagaaataataatacatgcctcacagggttgttaagagggtcaagtgacatagtgcatgtcaggctgttagcagtaacaggtgacaaggcttctaactattgaattctgtttccctctcccctatttctaacttatctgtggctgtaaatagacactttgagggatttaaatgtacagtgtatatgttccatgaaacccagaacttatctgtatccccaaggaatattacttagcacatagttgaggttcaataaatatttgtttaatg

SEQ ID NO: 82781 - DNA, 1868 bp, Homo sapiens
atccaaacgggaatgcagaaagaatggaacaggatgcgaagagatttggtcaggctgcctgggccacagcaattcccaggttggaaaaacttcagctaatgctagctcgagagactctgcaactcatgagagcgaaagagttgtgtttaaatcacaaaagagctgaaattcagggaaagatggaagatcttccagaacaagaaaaaaatacaaatgttgtagatgaattagaaatacaattttatgaaattcaattagaactatatgaagttaaatttgagatattaaaaaacgaagaaatactgcttactacacagttggactctcttaaaagacttataaaagaaaaacaagatgaagttgtctattacgatccatgtgaaaatccagaggaacttaaagtcattgactgtgtggtggggctgcaggatgataagaatttggaagtgaaagaactcagaaggcagtgccagcagctggagtctaaacggggcaggatctgtgccaaaagagcctctctccggagtagaaaggatcagtgcaaagaaaatcatcggttcagattgcaacaggctgaagaaagcataagatactctcgtcagcatcacagtattcagatgaaaagagacaagataaaagaagaggagcaaaagaaaaaagaatggatcaaccaagaacgtcaaaaaacactccaacgattgagatcatttaaagataaacgcctagctcaatctgtccgaaacacctctggctcagaacctgtggctccaaacctgccaagtgatctttcccagcagatgtgcttgccagcttcccacgcggtgtcagtaattcacccgtcctctaggaaaactagaggtgttcccctatcggaagctggtaatgtgaaaagccccaagtgtcaaaactgtcatggaaatatccctgtccaggtttttgttccagttggtgatcaaacacattccaaatccagtgaggaattgtcactgccaccacctcctcctcctccaccaccaccaccgccgccaccgccgcccccaccccctcctctccgtgctctgtcctcatcctctcaagctgcaactcatcagaacttaggcttccgggctccagtgaaagatgaccagccacgtcctctagtgtgcgaatcacctgctgagcgaccacgtgactccttggaaagtttttcatgtccaggatctatggatgaagtgttggcctccttaaggcatggcagagctcctctccggaaggtggaagtgccggcggtgcgccctccccacgcctcaatcaatgagcacattctggctgccataaggcaaggggtcaaactgaagaaagttcaccctgatcttggcccaaaccccagcagcaaaccaaccagcaacagacgcaccagtgaccttgagaggagcatcaaggctgcgctccagagaatcaagagggtgtctgctgactctgaggaggacagtgatgagcaggaccctggccagtgggatggttaggctcaagtttgacaaaggcacctgccacagtaggcttgaataaagtgggtgagtcttagacctatcgaaaagcatactaacagggtgctgatagatgggccacataacaccccggaagatcagcagggccttgtgtaggctgctgcagcattttttttttttttcttttttgagatggagtctcactctgtcgcccaggctggggtgcagtggcgccatctcggctcaccgcaagctccgcttcccaggctggggtgcagtggtgcgatcttggctcactgcaagctccgcctcctgggttcacgccattctcctgcctcagcctcccgagtagctgggactacaggcgccaccaccttgccc

SEQ ID NO: 82782 - DNA, 1700 bp, Homo sapiens
tcagtggtgggattacaagtgatctttatttttcttacatttaaaaaaattcaatgcattttttaaaataataaaatatgttttaaacaatcattaatacatttttagaaaaacaagatgaagttgtctattacgatccatgtgaaaatccagaggaacttaaagtcattgactgtgtggtggggctgcaggatgataagaatttggaagtgaaagaactcagaaggcagtgccagcagctggagtctaaacggggcaggatctgtgccaaaagagcctctctccggagtagaaaggtaggtacgctcagagcggctttcttttcttttctctttcagagatttattcttgtatgaaggataaaggtattgaaataaggtttttaccaacacagtgattacattttgtgtgcttatgtacttatccatggctatagttaaaatgcttttaaatatttttcttaaaaatattttttttcttttgggatttaagcatttagcaaatctcaaggttttaatttattcattcaacaactatttgttgaatgcccattgcatacacaggcacacaggcactttatttttatttttttgagacagagtcttgctctgtcacccaggctagagtgcagaggcatgatgttggctcactgcaacttctgcctcctaggttcaagcgatcctcatgccttagcctgccaagtagctgggtttacaggcacgcgccagcacgcccagctaatttttgtatattttgtagaggtggggtttcaccatgttggctaggctggtcttgaactcctgacctcaagtgatccgcccaccttggcctcccaaagtgctgggattacaggtgtgagccaccacccctggaccacagtactttaaaaaccacaataggtagaaactctatttctaatagccaactataacaattctaaatatattttactgtaaattattgagtacacaaaagaattacagataacaatattcagctcacctcagacattatatttggtgattttttttcttaattttaaaaaatccatgaatacataaaaagataacactaagaaatttaattttctctgacagaaaaggaagctcctatatatcatttttatacagacttttatatgtatttactcatatttactatacttttctcctttttttttttttgaaacagagtctcgctctgtctcctagtctggagtgcaatggcgcaatctcagctcactgcaacctccacctcccaggttcaagcgagtcttctgcctcagcctcccgtgtagctgggattacaggtgcctgccaccacacccggctaatatatatatatatatatttttgagatgggagtctcactctgtcgccaggctggagtgcagtggcacgatctcggctcactgcaaccttcatctccaggattcaagcctgcctcagccccctgagtagctgggattacaggcatgtgccaccacccctggctaatttttgtatttttagtagagacggggtttcaccatgttggccaagctggtcttgaactcctgacctcaggtgatccacccgccttggcctcccaaagtgctgggattacgggcatgagtcacagcgcctggccacacccggctaatttttgtatttttagtagagacggggtttcaccatgttggtcagactggtcttgaattc

SEQ ID NO: 82783 - DNA, 671 bp, Homo sapiens
atccaaacgggaatgcagaaagaatggaacaggatgcgaagagatttggtcaggctgcctgggccacagcaattcccaggttggaaaaacttcagctaatgctagctcgagagactctgcaactcatgagagcgaaagagttgtgtttaaatcacaaaagagctgaaattcagggaaagatggaagatcttccagaacaagaaaaaaatacaaatgttgtagatgaattagaaatacaattttatgaaattcaattagaactatatgaagttaaatttgagatattaaaaaacgaagaaatactgcttactacacagttggactctcttaaaagacttataaaagaaaaacaagatgaagttgtctattacgatccatgtgaaaatccagaggaacttaaagtcattgactgtgtggtggggctgcaggatgataagaatttggaagtgaaagaactcagaaggcagtgccagcagctggagtctaaacggggcaggatctgtgccaaaagagcctctctccggagtagaaaggtgatttgtattattccaccaggatcagtgcaaagaaaatcatcggttcagattgcaacaggctgaagaaagcataagatactctcgtcagcatcacagtattcagatgaaaagagacaagataaaagaagaggagca

SEQ ID NO: 82784 - DNA, 396 bp, Homo sapiens
aaccttttttgggaggttactctcgctctgctgccatgagtcctgggaccattcccaagcaaaacctgggactcttccaggcacagcctggagttctgctcgggcctctccctttatggcttcttcaaagagcagcctcactcctggctgctggggtataccaaccgacataccaccactgctagaagaaaatggatcatcttgggttctgtccctgggatagtattcctgccaagagttctgcaactgtggctgtggctctatttttgtaacaattcaattccacagatatttactgagcccctatgttaagcagaagactgtgctaggtgctttgatgattatacaatataaaacatggtccctgccctctgagagtgacagtcccctcagcca

SEQ ID NO: 82785 - DNA, 1398 bp, Homo sapiens
caacatttgaatttaatttgacttctattttcagtaaattagagtgaaattttagggatgtctttatctcctatagtgtgtgttttgccaagatttattaagggtaatttggattttagaaaatgtacagtttctaaaggcttgtgaacgttttatattgatagaaaatgtaagtaagactagtaacacattattttctccaaaggatcctgtgactgacacaaaaaatatgatataatattgaatctgccaaaagatgcactgttaatctagggttatgttatgttgttattttattaggtatgtgatactatggtgtgaattttagaatataggtaattatttaagtaattactgtaattctaaacatcttctgagatgttttctctaaagcagaaactcagcttttactcatgtttagataatgtgatatagctgttctagatatttgagattagggttgaggcaaattgttgacatataattaaaatgtattttataactaaaatttagaagaatggaaaaagtttacattgtatttataagactttgctaacatgctttatgacattacggagaagtactaggaagaaggagatctttaaaaggagtgatattctgtttgctttgctggagtaccttatcaggaaatttgaaatcttagccctttaattgtgatatctgttaattctaaaacttacactgaatttaactttgaaggtcaacatatggatttttttaaaaacaatatttactctatcaaaagattagttgtatttttgacttgaggaaatagcttaatctgaacagcacgaaacttgacaaaaaagtttgctaatacataaatattggctattttaatctgttgaaaacggaaggctagtaccaagggagacggtagtaaaattatagaaggagctagtgaaaagtaaacattatgcaacatgaaaagaatactaggggaaaaactgacagagtagaataacaggaagattagtcacttctggaaggaaaaaagtaggtaggggcagggggatgaagtactttaaacaggaatgtggaactggaagtgctagggctaaaagacagatgtgagcttatttgggagctaaactgggctttgaaaaaggaataatactggtagcatttaatatcaaaatttaaattttatgttaacaataagaaaaaaatggagaaaaatttttgttagggattataaaatgcctgttaaaataaaaagacttatatttactcctttgtggagctgaattggtttcggtcagacagcaatgtcaaatgcaaatcaagaaaatacatttctgaggccaaggcaggagatttcttgaccccagaaatttgcaacaaccccaaggaacatagtgagactctgtctctacc

SEQ ID NO: 82786 - DNA, 1037 bp, Homo sapiens
tgattttatatgacaaaagaatctgcactttgatttgtatttctgctgcttccacaaatacactttcttattttttccgtatggagtaaaataacaaggtgagttaatatttattgaaacttaatgtatgtcaatcagtgttttcagtgcttttcatttttttcatagtattttgtccctataaaatctcatcgagatagttactggtgttacttccatttcacagatggacacactgaaatacagagaagttaggtaatacatgcaaggtcagtcagccagtaaaatgtggacttggagcctcgtaatctgatttcacagcctgtactcttaattgttttgttatgtttgctggaaaacattgcttcttaatttccatatgcatattctaaggattcgacaaagaaaatataactaacagcagtacttaagaataaaaatgaatatccaagacaaatttatagtacagggcctaaaacagtaagtactcagaagtaatcactgtattttaagtcaacaaatgagtcaaggagtgaaccctaaaattatagaaggagctagtgaaaagtaaacattatgcaacatgaaaagaatactaggggaaaaactgacagagtagaataacaggaagattagtcacttctggaaggaaaaaagtaggtaggggcagggggatgaagtactttaaacaggaatgtggaactggaagtgctagggctaaaagacagatgtgagcttatttgggagctaaactgggctttgaaaaaggaataatactggtagcatttaatatcaaaatttaaattttatgttaacaataagaaaaaaatggagaaaaatttttgttagggattataaaatgcctgttaaaataaaaagacttatatttactcctttgtggagctgaattggtttcggtcagacagcaatgtcaaatgcaaatcaagaaaatacatttctgaggccaaggcaggagatttcttgaccccagaaatttgcaacaaccccaaggaacatagtgagactctgtctctacc

SEQ ID NO: 82787 - DNA, 448 bp, Homo sapiens
taacttctacattttgaaaattttatgtcaattatttaatagaatatctctaaatttaggtttgtctcatttttcaatgtaattggattcaggttacgcatttttgatagattagagtggtgctgtgttattcttattgcacaggtctgttgggttgagtggggtgagttaaatcattcctttttggcctctcataatactgaatcaagtgaaagttggcctgagtcatcagaagacttgtctcggctgaatgtacaaggtgctcactgacatatacagatccaaagttgagtcggactggtctgactgttggctgaaagctcacctggggctgccagaggtcttcaaccatagcgtctccacgtaacttaagcttcttatatcatgtgcctaaattctgagacagaggaatagagaagagagaaaggaagagcaagagagagaaggg

SEQ ID NO: 82788 - DNA, 407 bp, Homo sapiens
atgaaaataatattttaaattaatttatatactgctgaattccacaatggatttgaatcaggtattccaaaaacataaggctgcagaatttttcctctgtttgggctcttttgttctctttattaatgcatgattttgctttcactcgttaaggcacacacatttgatctcttgagcccgaggtatagtatgactaacaagctggcccatctctagaggtactgacttttccttttcaagtgctagagcggctacaaactccgatattgtcatggattggtgatgtgacaaacttattggtaagtttcatagccacagaggattactggaacgtctctaggtttagaagctttgtgccaattttcctagctaatagagtaagaagtcaactcccaaggatgtctggc

SEQ ID NO: 82789 - DNA, 769 bp, Homo sapiens
gtataattttgtttttagttggtgtgggtaagacagttttttatctttgtttccctggtcttctattatcttactttttgataggaatagtatagtagaatgaatagttctttttggcttgtagaaatgacttaagctatgatttttccttcctcccttcaacaaaggtgattgaccctgcagggaacagagcactggatttaaaactatatgataaaaccccagacaaatctgattgttttgccacttccaacttttaggaggatgggggaaaagttatgccaatatgttatatcaggtttaattaaaaagtaatttccaggccaggcacagtggctgggattacaggcgtgagccactgtgcccagccaaccacagaatattgtgtctattcatgagtacctcaagttttccctcttcatttacaatagtagcttaggaagaacccaagtattttgctagaagatggtattggagcttgggaggaggaagagtaacagtggtgaggctgcagttgctaggaggccggcttgggtgagagggaagggagaacatggtctttgatactgggagagagtatcctgccttcttttcctgtgggtttaggtcagatgagaaatgaatccttgacaatgtgcagcaagtgagaagaggtgattatctcttcacctcttcccctctctgagaagaagtagaagggctgtttggagagaccaagggtctctgctaggctctggctaagggaatgaagtgattctttcaggggaaa

SEQ ID NO: 82790 - DNA, 424 bp, Homo sapiens
  misc_feature (371)..(371): n is a, c, g, or t
  misc_feature (373)..(373): n is a, c, g, or t
  misc_feature (382)..(382): n is a, c, g, or t
  misc_feature (395)..(395): n is a, c, g, or t
gtataattttgtttttagttggtgtgggtaagacagttttttatctttgtttccctggtcttctattatcttactttttgataggaatagtatagtagaatgaatagttctttttggcttgtagaaatgacttaagctatgatttttccttcctcccttcaacaaaggtgattgaccctgcagggaacagagcactggatttaaaactatatgataaaaccccagacaaatctgattgttttgccacttccaacttttaggaggatgggggaaaagttatgccaatatgttatatcaggtttaattaaaaagtaatttccaggccaggcacagcctcttttttttgttgttgttaagactggggtgttgcncngttgttttngggcttggagttngttgatgtggatccatgggctccattggc

SEQ ID NO: 82791 - DNA, 374 bp, Homo sapiens
  misc_feature (7)..(7): n is a, c, g, or t
cgccggnacccaacacctaataagtttacttgccaaaaaaaaaaaatctattaaaaatctctcaacccagggccagcaatctgttttttttttttaatggaaacagggttcccctctgtcacccagactggaatgcaacagcgtgatcacagctaactgcagcctaaacctccccaggctaaagcgattctcccacctaagcctcctgagtaactggaattacaaggacacaccacgacacccggttttttttctgggtctttagaagacacggggttttgccatgttgcccaggctggtctcaaaactcctgagctcaagcaatccgtccaccttggcctcccaaagtgctgggattacaggcgtgagccacc

SEQ ID NO: 82792 - DNA, 819 bp, Homo sapiens
ctggctgctgtcctcatgtccttggctctgcctggtgaagccaagggcacttcagaacctccctgtgcctccatgtgccaggttggggctggcacgaggccacagcaggggctggcaggtggtgacctctgctcctcgacctgggatgctccaggttgagacgtagggtagctgcagtcccacgcaatgacaagctctgggtaaccctgtgtgagtggacggccaagtgcgagcccagcctcagtcactggggggtggacgtgccaatggtggatgcccatgcctctgtgtcacttgggggggtggactggccaacggggagcccatgcctcgtgtcacgtgcgcgggtggactgtgccaattgtgtgatgcccatgcctcgtgtcacctgggtggtgtgtgagactgtgccaatggtggatgccctatgcctcgagtccacttggtgtgtggtgttgtgactgtgcccaatgtgcggatgctccaagcactacagagatcatatgccgggggctgagacagtgctcataggcggatgcgcctagcactacggtacacttgcgtggtgtggaccggcccaatggcgatgtcccatggagcgtcagctggaaggagtgagaaactgcagggacagaatcgtgcagctagtcacatatgtctgcaaggaggatgcgacatgagtccgcttgacaggagcccatgctgtaagtgttgccgtagggatgtgctgcacggtgcgagccatgcgtcagcggaggccggcaccaaggtacaccaaagagcagggtgatagcctgaagtgagtgtactagggacaag

SEQ ID NO: 82793 - DNA, 528 bp, Homo sapiens
ccagaattgcaaattttctctgctgatttgtgtcctaccgattctggcttgctttccccctacactactagggctactctcactttcacacctagcaaaacttcacctttcaaagaatttaggcagaatagtcctaatttagttaataagctttcattttaaatcttagggaagcagtgttagtttcagttattctataggaacagaaattggagctgccacagccttttgaaccagagcccggcagaccctcagcttcagccctgctcagtgttttgtgtctatgaaagtctttttaattttctcattacacattttatatatcatgctatgtatttagaacagaggggttgtgtaagattatgactctatgttctttatcttgtctttgtattaatttgaagttgtgttttttctttatttgtagccaactaattaaaataccaacatatttatttttattcatttttatgtgacaaacttttaaactgaagactgcatcaataaaattgcatgccattaaatatg

SEQ ID NO: 82794 - DNA, 401 bp, Homo sapiens
ttaagcacacgctttatttagggcacataaattggtacagaaaaagaaagaatggagccttctcctagaaaggtctataccctacaacaggagtccccagacccgggctgcagactggtactggtctgtggtcctgttaggaacctggccacacagcaagaggtgagtggagggtgagtgagcattaccacctgagctctgccttgtgtcagatcagtggcagcattagattctcacgagagcacgaaccctattgcgaactgtgtatatgagggatttaggttgcgggctccttatgagaatctaatgcctgatgatctgaggtagaacagtttgagcctgaaaccatctccccaccccccactcccctcaccacctaataaaggaatagttaacactca

SEQ ID NO: 82795 - DNA, 704 bp, Homo sapiens
caaaacctcagccaaagaggtgagtcctcactgcatggtttgtgaaggaagtgactgtaaacatccagtatcagaggcccaagtggatacactacggtgcctccctacgctgggccatgagctgttaaagtgcggctgtgactaaatatggattgacgtggagagagattcaaggtgacgctgaaaaacgtgcatgctgcaaaacagtatgcaggatttaactgtatttttataaaatatgcaatcacgtctagataaatgactggaataacgtatatgcaaaggtatcaatagccatcattcatccctgtataatgggaatatatgggcctttatgctaatctgtgttttctataataagaaaaattaagcataaacaaaacaataatttagttgtaattttttcaaaaggcagcactggagtgtcatgggccaattaccacccaggaaaacctgaagtctggaagaaagacttgttgcacccataccaggagaccaggagggtgaggataaagcttgtctgtccccagcccagcacagactgcacctactgaccactcgccatcccaagagagaagacaatttgtcttcccaaatgccagtgcaggaagggacctctgattattcaaccctcatgtcaccaggtagaaaaagaaggtctccaaagggggctttgcctaggtcacacaagtagttggtgacct

SEQ ID NO: 82796 - DNA, 554 bp, Homo sapiens
tctggtcgcaggaggcaatgtctaggtgtgcagcagattgcaggggagggcagatggtagtagggagatttgattcccttctgacttaattctcactgcttttttgtatcaccttcccactgtggaccccatggccctaacattgccctggaacggtacagcttcttgttcagtgtttatctgaacctacttctggatggcatttcctcctgtgtcttcatgttctctgctccccttcggccattgtatctatgaagaaggcattgtcaccatgtgccatggctcacccctgtaatcccagcactttgggaggctgaggcaggaggatcacttgaacccaggaatttgagaatttgagaccagcctggtcaacatagcaagaccctatctctatgaaaacaatttaaaaatcagctaagcgtgacagcctgcatctgtaatctcagctacttggaggctgaagtgggaggatccttagactcagggagctgaggctgcagtaagacgactgcatcactgcactgcagcctaggtgacagagggagatcttatct

SEQ ID NO: 82797 - DNA, 444 bp, Homo sapiens
tgtggcaggaggccatgcaattgggctctagtcttgcttcattcaactgaaccaggaaagaaacagatccacgcactctgatacccatttccgttgttctaggaggtaaatgatttcgttcctacaagccagacagtagccagctttcactaaagaagaatcgactccttagtatcttgtcatgccattggttctgatgcataagtgaaccctgtttttaacggaagctccttttttttcacctcaggacctacccaagactgtctagatactggcaggacaaggtacaggagttttcagcagaaagtggagttgccaggagagatgctgggcacttgcactgtgactttggagtgccgggaaaagttccagggtccccagtgcttacttagataaatggcatttaaaatagtgcagccttttatcattgcttagtctaattta

SEQ ID NO: 82798 - DNA, 468 bp, Homo sapiens
ccagcagctccctgctgagcctggaaaaggaggaaaaagtaaagaataagccaggggaaatcagacacaacagagccccaactaggtttcatgggtagcatagggaagtggttaaaaaactaaaaggatagatccattaatgaggtaacaaattattgccttcatgttgggacagaacagggccaaatggaaaagaatgaaagagaaagacagatagacacacacacacacacacacacacacacacacacacacacacacagagagagagagaacgagctcagtgaattgtccaggtgacgcactgatgagggagtaacaggacactctgagttagtgccctcaggacacacagcatacagggatcatgaaaagactgtgctcaataattttccataaaatgtgctcaagtttccatgcagtcgccatgagaatacagtttttgaagtctggtccacctacagtagg

SEQ ID NO: 82799 - DNA, 1047 bp, Homo sapiens
gcgaaatcactagtgattccccaccaagccaattgtgtctgagagaaatgaacttcttattcagtttttatcagacttaagtttaactgcagatgggtttattggtcactacatattcaggccaaaaaaactgcctacaactacagaacagcctgtcaccaccacattccctgtaaccacgggtttaaaacccaccgtggccttgtgtcaacaaaagtgtagacggacggggactctggagggcaattattgttcaagtgactttgtattagccggcactgttatcacaaccatcactcgcgatgggagtttgcacgccacagtctcgatcatcaacatctacaaagagggaaatttggcgattcagcaggcgggcaagaacatgagtgccaggctgactgtcgtctgcaagcagtgccctctcctcagaagaggtctaaattacattattatgggccaagtaggtgaagatgggcgaggcaaaatcatgccaaacagctttatcatgatgttcaagaccaagaatcagaagctcctggatgccttaaaaaataagcaatgttaacagtgaactgtgtccatttaagctgtattctgccattgcctttgaaagatctatgttctctcagtagaaaaaaaaatacttataaaattacatattctgaaagagcattccgaaagatgggactggttgactcttcacatgatggaggtatgaggcctccgagatagctgagggaagttctttgcctgctgtcagaggagcagctatctgattggaaacctgccgacttagtgcggtgataggaagctaaaagtgtcaagcgttgacagcttggaagcgtttatttatacatctctgtaaaaggatattttagaattgagttgtgtgaagatgtcaaaaaaagattttagaagtgcaatatttatagtgttatttgtttcaccttcaagcctttgccctgaggtgttacaatcttgtcttgcgttttctaaatcaatgcttaataaaatatttttaaaggattacaaaaaaaaaactaaact

SEQ ID NO: 82800 - DNA, 1833 bp, Homo sapiens
cctgtggctgccagagcagctcctcaggggaaactaagcgtcgagtcagacggcaccataatcgcctttaaaagtgcctccgccctgccggccgcgtatcccccggctacctgggccgccccgcggcggtgcgcgcgtgagagggagcgcgcgggcagccgagcgccggtgtgagccagcgctgctgccagtgtgagcggcggtgtgagcgcggtgggtgcggaggggcgtgtgtgccggcgcgcgcgccgtggggtgcaaaccccgagcgtctacgctgccatgaggggcgcgaacgcctgggcgccactctgcctgctgctggctgccgccacccagctctcgcggcagcagtccccagagagacctgttttcacatgtggtggcattcttactggagagtctggatttattggcagtgaaggttttcctggagtgtaccctccaaatagcaaatgtacttggaaaatcacagttcccgaaggaaaagtagtcgttctcaatttccgattcatagacctcgagagtgacaacctgtgccgctatgactttgtggatgtgtacaatggccatgccaatggccagcgcattggccgcttctgtggcactttccggcctggagcccttgtgtccagtggcaacaagatgatggtgcagatgatttctgatgccaacacagctggcaatggcttcatggccatgttctccgctgctgaaccaaacgaaagaggggatcagtattgtggaggactccttgacagaccttccggctcttttaaaacccccaactggccagaccgggattaccctgcaggagtcacttgtgtgtggcacattgtagccccaaagaatcagcttatagaattaaagtttgagaagtttgatgtggagcgagataactactgccgatatgattatgtggctgtgtttaatggcggggaagtcaacgatgctagaagaattggaaagtattgtggtgatagtccacctgcgccaattgtgtctgagagaaatgaacttcttattcagtttttatcagacttaagtttaactgcagatgggtttattggtcactacatattcaggccaaaaaaactgcctacaactacagaacagcctgtcaccaccacattccctgtaaccacgggtttaaaacccaccgtggccttgtgtcaacaaaagtgtagacggacggggactctggagggcaattattgttcaagtgactttgtattagccggcactgttatcacaaccatcactcgcgatgggagtttgcacgccacagtctcgatcatcaacatctacaaagagggaaatttggcgattcagcaggcgggcaagaacatgagtgccaggctgactgtcgtctgcaagcagtgccctctcctcagaagaggtctaaattacattattatgggccaagtaggtgaagatgggcgaggcaaaatcatgccaaacagctttatcatgatgttcaagaccaagaatcagaagctcctggatgccttaaaaaataagcaatgttaacagtgaactgtgtccatttaagctgtattctgccattgcctttgaaagatctatgttctctcagtagaaaaaaaaatacttataaaattacatattctgaaagagcattccgaaagatgggactggttgactcttcacatgatggagaatctcctattggtgaatgacaagcagcatgctggcgggtatcaagcttctgcatgaccagcggaaagacttcttcaggccgtcaccagatgtgggcccttgactttggacttcccagcctccagaactgtaagaaataaatatctgttctttatg

SEQ ID NO: 82801 - DNA, 2012 bp, Homo sapiens
cctgtggctgccagagcagctcctcaggggaaactaagcgtcgagtcagacggcaccataatcgcctttaaaagtgcctccgccctgccggccgcgtatcccccggctacctgggccgccccgcggcggtgcgcgcgtgagagggagcgcgcgggcagccgagcgccggtgtgagccagcgctgctgccagtgtgagcggcggtgtgagcgcggtgggtgcggaggggcgtgtgtgccggcgcgcgcgccgtggggtgcaaaccccgagcgtctacgctgccatgaggggcgcgaacgcctgggcgccactctgcctgctgctggctgccgccacccagctctcgcggcagcagtccccagagagacctgttttcacatgtggtggcattcttactggagagtctggatttattggcagtgaaggttttcctggagtgtaccctccaaatagcaaatgtacttggaaaatcacagttcccgaaggaaaagtagtcgttctcaatttccgattcatagacctcgagagtgacaacctgtgccgctatgactttgtggatgtgtacaatggccatgccaatggccagcgcattggccgcttctgtggcactttccggcctggagcccttgtgtccagtggcaacaagatgatggtgcagatgatttctgatgccaacacagctggcaatggcttcatggccatgttctccgctgctgaaccaaacgaaagaggggatcagtattgtggaggactccttgacagaccttccggctcttttaaaacccccaactggccagaccgggattaccctgcaggagtcacttgtgtgtggcacattgtagccccaaagaatcagcttatagaattaaagtttgagaagtttgatgtggagcgagataactactgccgatatgattatgtggctgtgtttaatggcggggaagtcaacgatgctagaagaattggaaagtattgtggtgatagtccacctgcgccaattgtgtctgagagaaatgaacttcttattcagtttttatcagacttaagtttaactgcagatgggtttattggtcactacatattcaggccaaaaaaactgcctacaactacagaacagcctgtcaccaccacattccctgtaaccacgggtttaaaacccaccgtggccttgtgtcaacaaaagtgtagacggacggggactctggagggcaattattgttcaagtgactttgtattagccggcactgttatcacaaccatcactcgcgatgggagtttgcacgccacagtctcgatcatcaacatctacaaagagggaaatttggcgattcagcaggcgggcaagaacatgagtgccaggctgactgtcgtctgcaagcagtgccctctcctcagaagaggtctaaattacattattatgggccaagtaggtgaagatgggcgaggcaaaatcatgccaaacagctttatcatgatgttcaagaccaagaatcagaagctcctggatgccttaaaaaataagcaatgttaacagtgaactgtgtccatttaagctgtattctgccattgcctttgaaagatctatgttctctcagtagaaaaaaaaatacttataaaattacatattctgaaagagcattccgaaagatgggactggttgactcttcacatgatggaggtatgaggcctccgagatagctgagggaagttctttgcctgctgtcagaggagcagctatctgattggaaacctgccgacttagtgcggtgataggaagctaaaagtgtcaagcgttgacagcttggaagcgtttatttatacatctctgtaaaaggatattttagaattgagttgtgtgaagatgtcaaaaaaagattttagaagtgcaatatttatagtgttatttgtttcaccttcaagcctttgccctgaggtgttacaatcttgtcttgcgttttctaaatcaatgcttaataaaatatttttaaaggattacaaaaaaaaaactaaact

SEQ ID NO: 82802 - DNA, 2034 bp, Homo sapiens
cctgtggctgccagagcagctcctcaggggaaactaagcgtcgagtcagacggcaccataatcgcctttaaaagtgcctccgccctgccggccgcgtatcccccggctacctgggccgccccgcggcggtgcgcgcgtgagagggagcgcgcgggcagccgagcgccggtgtgagccagcgctgctgccagtgtgagccagcgctgctggcagtgtgagcggcggtgtgagcgcggtgggtgcggaggggcgtgtgtgccggcgcgcgcgccgtggggtgcaaaccccgagcgtctacgctgccatgaggggcgcgaacgcctgggcgccactctgcctgctgctggctgccgccacccagctctcgcggcagcagtccccagagagacctgttttcacatgtggtggcattcttactggagagtctggatttattggcagtgaaggttttcctggagtgtaccctccaaatagcaaatgtacttggaaaatcacagttcccgaaggaaaagtagtcgttctcaatttccgattcatagacctcgagagtgacaacctgtgccgctatgactttgtggatgtgtacaatggccatgccaatggccagcgcattggccgcttctgtggcactttccggcctggagcccttgtgtccagtggcaacaagatgatggtgcagatgatttctgatgccaacacagctggcaatggcttcatggccatgttctccgctgctgaaccaaacgaaagaggggatcagtattgtggaggactccttgacagaccttccggctcttttaaaacccccaactggccagaccgggattaccctgcaggagtcacttgtgtgtggcacattgtagccccaaagaatcagcttatagaattaaagtttgagaagtttgatgtggagcgagataactactgccgatatgattatgtggctgtgtttaatggcggggaagtcaacgatgctagaagaattggaaagtattgtggtgatagtccacctgcgccaattgtgtctgagagaaatgaacttcttattcagtttttatcagacttaagtttaactgcagatgggtttattggtcactacatattcaggccaaaaaaactgcctacaactacagaacagcctgtcaccaccacattccctgtaaccacgggtttaaaacccaccgtggccttgtgtcaacaaaagtgtagacggacggggactctggagggcaattattgttcaagtgactttgtattagccggcactgttatcacaaccatcactcgcgatgggagtttgcacgccacagtctcgatcatcaacatctacaaagagggaaatttggcgattcagcaggcgggcaagaacatgagtgccaggctgactgtcgtctgcaagcagtgccctctcctcagaagaggtctaaattacattattatgggccaagtaggtgaagatgggcgaggcaaaatcatgccaaacagctttatcatgatgttcaagaccaagaatcagaagctcctggatgccttaaaaaataagcaatgttaacagtgaactgtgtccatttaagctgtattctgccattgcctttgaaagatctatgttctctcagtagaaaaaaaaatacttataaaattacatattctgaaagagcattccgaaagatgggactggttgactcttcacatgatggaggtatgaggcctccgagatagctgagggaagttctttgcctgctgtcagaggagcagctatctgattggaaacctgccgacttagtgcggtgataggaagctaaaagtgtcaagcgttgacagcttggaagcgtttatttatacatctctgtaaaaggatattttagaattgagttgtgtgaagatgtcaaaaaaagattttagaagtgcaatatttatagtgttatttgtttcaccttcaagcctttgccctgaggtgttacaatcttgtcttgcgttttctaaatcaatgcttaataaaatatttttaaaggattacaaaaaaaaaactaaact

SEQ ID NO: 82803 - DNA, 1075 bp, Homo sapiens
gccccgaacattacgatataacaccatcaacacaccaaagcacacaacccggctagccaattgtgtctgagagaaatgaacttcttattcagtttttatcagacttaagtttaactgcagatgggtttattggtcactacatattcaggccaaaaaaactgcctacaactacagaacagcctgtcaccaccacattccctgtaaccacgggtttaaaacccaccgtggccttgtgtcaacaaaagtgtagacggacggggactctggagggcaattattgttcaagtgactttgtattagccggcactgttatcacaaccatcactcgcgatgggagtttgcacgccacagtctcgatcatcaacatctacaaagagggaaatttggcgattcagcaggcgggcaagaacatgagtgccaggctgactgtcgtctgcaagcagtgccctctcctcagaagaggtctaaattacattattatgggccaagtaggtgaagatgggcgaggcaaaatcatgccaaacagctttatcatgatgttcaagaccaagaatcagaagctcctggatgccttaaaaaataagcaatgttaacagtgaactgtgtccatttaagctgtattctgccattgcctttgaaagatctatgttctctcagtagaaaaaaaaatacttataaaattacatattctgaaagagcattccgaaagatgggactggttgactcttcacatgatggaggtatgaggcctccgagatagctgagggaagttctttgcctgctgtcagaggagcagctatctgattggaaacctgccgacttagtgcggtgataggaagctaaaagtgtcaagcgttgacagcttggaagcgtttatttatacatctctgtaaaaggatattttagaattgagttgtgtgaagatgtcaaaaaaagattttagaagtgcaatatttatagtgttatttgtttcaccttcaagcctttgccctgaggtgttacaatcttgtcttgcgttttctaaatcaatgcttaataaaatatttttaaaggattacaaaaaaaaaactaaact

SEQ ID NO: 82804 - DNA, 1813 bp, Homo sapiens
cctgtggctgccagagcagctcctcaggggaaactaagcgtcgagtcagacggcaccataatcgcctttaaaagtgcctccgccctgccggccgcgtatcccccggctacctgggccgccccgcggcggtgcgcgcgtgagagggagcgcgcgggcagccgagcgccggtgtgagccagcgctgctgccagtgtgagcggcggtgtgagcgcggtgggtgcggaggggcgtgtgtgccggcgcgcgcgccgtggggtgcaaaccccgagcgtctacgctgccatgaggggcgcgaacgcctgggcgccactctgcctgctgctggctgccgccacccagctctcgcggcagcagtccccagagagacctgttttcacatgtggtggcattcttactggagagtctggatttattggcagtgaaggttttcctggagtgtaccctccaaatagcaaatgtacttggaaaatcacagttcccgaaggaaaagtagtcgttctcaatttccgattcatagacctcgagagtgacaacctgtgccgctatgactttgtggatgtgtacaatggccatgccaatggccagcgcattggccgcttctgtggcactttccggcctggagcccttgtgtccagtggcaacaagatgatggtgcagatgatttctgatgccaacacagctggcaatggcttcatggccatgttctccgctgctgaaccaaacgaaagaggggatcagtattgtggaggactccttgacagaccttccggctcttttaaaacccccaactggccagaccgggattaccctgcaggagtcacttgtgtgtggcacattgtagccccaaagaatcagcttatagaattaaagtttgagaagtttgatgtggagcgagataactactgccgatatgattatgtggctgtgtttaatggcggggaagtcaacgatgctagaagaattggaaagtattgtggtgatagtccacctgcgccaattgtgtctgagagaaatgaacttcttattcagtttttatcagacttaagtttaactgcagatgggtttattggtcactacatattcaggccaaaaaaactgcctacaactacagaacagcctgtcaccaccacattccctgtaaccacgggtttaaaacccaccgtggccttgtgtcaacaaaagtgtagacggacggggactctggagggcaattattgttcaagtgactttgtattagccggcactgttatcacaaccatcactcgcgatgggagtttgcacgccacagtctcgatcatcaacatctacaaagagggaaatttggcgattcagcaggcgggcaagaacatgagtgccaggctgactgtcgtctgcaagcagtgccctctcctcagaagaggtctaaattacattattatgggccaagtaggtgaagatgggcgaggcaaaatcatgccaaacagctttatcatgatgttcaagaccaagaatcagaagctcctggatgccttaaaaaataagcaatgttaacagtgaactgtgtccatttaagctgtattctgccattgcctttgaaagatctatgttctctcagtagaaaaaaaaatacttataaaattacatctctgtaaaaggatattttagaattgagttgtgtgaagatgtcaaaaaaagattttagaagtgcaatatttatagtgttatttgtttcaccttcaagcctttgccctgaggtgttacaatcttgtcttgcgttttctaaatcaatgcttaataaaatatttttaaaggattacaaaaaaaaaactaaact

SEQ ID NO: 82805 - DNA, 277 bp, Homo sapiens
aagaacatttaagtagttcatacaaagaaatataaattgttcttaaatatatcaaaatatactcacctcattcatagtaaaagaaataaaaaactgtgctctgatgacatttttcatctatgagatttacaaagatctaaaaattgagaatatacattttctattgcctttggatggcaatttggcagtaactatcaaaagtataaatatctataccctttgaggtgtcaatctcattttaaagaatttattcttcagctatgtacatacatgtagg

SEQ ID NO: 82806 - DNA, 220 bp, Homo sapiens
  misc_feature (194)..(194): n is a, c, g, or t
gaattccacgggtatacagtcataaattgcaatttaaataaaagcgtttcagtgcctacaagacccaggctccaaattgagggctttggggtgatggggatcttcttctgcttgtttcttttttacttaaaccacattggaaggtaagaattttcaggaggaaaaacattgtcttacttccgtgttgcccaccngctctgtattttagctgaacttctaa

SEQ ID NO: 82807 - DNA, 403 bp, Homo sapiens
caaaatcactcccaaaagtagttattgtcctctttattttgtagatggagaaacaaagaggacttatatgactcatagctgctcagtggcagaggtggggtgaaatccagggctacttccattccaaagctgatacccgcctcattctgttttctttcccagcctgggcaacaagagcaaaaactccatcacacacacacatacaaaagaaattactgtagaaacaaaacttggcataaagcagcagtaggctctgtccttgtgaaggaagtgggggctttcccccttctagttttactacttcatgacctttgaccatatttttagttttttctttagaaaaaaatcgagattgcgccattgcactccaccctgggtaacaagagtgaaacaccttctcaaa

SEQ ID NO: 82808 - DNA, 339 bp, Homo sapiens
tgctaggattacaggcgtgagtcactgcgcccggcctcgaaagccctttctctatggtggatcaaaggcacactcccctcagtctgtctcttcctgtctggaaatgtggcctggggttgccaagccccctcaggtatgccaagcaccctgtcccagaatctgtagccggtcagataagcttagcaaggcctgactcattcattcagcaaacctttcctaagttccctctaaggaccaagctttgtcaagaccccgtggatacaactgtaaacaaaacaaagtacctccccctcagagccagtgatcaggcacacagatcataccatactttagtaactc

SEQ ID NO: 82809 - DNA, 444 bp, Homo sapiens
acaggaataactaatatttattgaatatttaccatgtgcctgccagacactgggctaagcattttatacagattaacttatttattttccacatcaatcctataagataagaacttttattataaccatattacagataaggacattgaagttcagagtagctaaatgatttacccaagaccacacaggtagaaactgatggagctgggttcaaacccaggattgttggaccccagaacacactcttttaaccactggacaataccactttcctgaacagctgaagtcccttttgagcttccctttcaaaaaccaaaacctaatatctttatgtcatttctttctctgagttgtacattctttaaataataccaatgtaactgacatcaggtctcaatgtacctgatgttagattatacaaaagaatataaatgacattcatag

SEQ ID NO: 82810 - DNA, 394 bp, Homo sapiens
aggtggtagatattaaagctggaggggaggctcagatgattctctgtcctgtactattataatatttctggtctttatgcaattttcatttacaggcaatccaggaagcaagtgcaggaaaggctcagttgggtggttgactatactcaagtcttgccaggacttctaaagttgacaaccacaaccataaatagaaacaccacttcattctcaacattctccctccccacagcaccctcaccccttaagtcacctcccccttccttccttacactgtcgctgaagacagagatgactcttctgcttcaatccaggatattaatgtctacaaaagacttaaagaattgaaatagagatcaggtcactagctcactggctcattctctctctcatt

SEQ ID NO: 82811 - DNA, 652 bp, Homo sapiens
ctttgtaagaattgagacctatgtgaaaaacctaagtctttactaaagctagaagaccttatcaatgaagagatgtaccgcaatcctgaatgtgaagacaaaatagaaataaatttatacattaaatactatgctagtaaaaatctttcatttttcttggtgtgcatatggggtggggagggggatttgacttccaaattcatctgaaatccagtccatgtggtactggcacaggaatagtcaaagaggtcagtgacactgcagcagtggctttcaaccttggttttagattgaaatcattttggaacttgaaaaaacactacccattctactttaattcatgtgagatgaggttcaggttgtgctatactttaagtgttttcaaaggcaattctgatgggtagccaaggttgtgaattactgaactataaagaccaagaaatggcttgtgcacatatagcatgataaataagaaagactttcaaatcagcaggttattgggacaactactttaaggacaaaaataaagctagatttcttactaacactaatagtaagacagaaataaatttcagacagacaagaaccgtgatatacaataaatacataaaatttaaaaaatgcaataaataatataattaattaattgatt

SEQ ID NO: 82812 - DNA, 590 bp, Homo sapiens
gttcctggcttgtaacagaaactcattacacatttattgaatgaatgaataaataattctctcctctcttggtttctttggctctgcctttgtctgtcctgtgagatctctctgctcccccagaatctcatctctatgacatccctatcctggccctcccccaaccacgtttttctttgttgctggttctccaggaagcagacacctctcactcccgacaggacatgctggagtctggcctcggccaccagaaacgcttagcacgtcaccaaagacactccctgctccggaagcctcaggacaagaagaggcaagcatctcctcatctccaggatgtgaggctggaggggaatccaggggcccccgatcctgcatccaggcagcctctgaccttcctccttatcctcttcctcctcttcctcctcctggtgggtgccatgtttctcctgcccgcgtcaggaggcccctgctgctctcatgcccgaatacccaggacaccctacctggtgctcagctatgtcaatggtcttcccccagtctgatgtgtgtaataaatggtcactgtcaaaggatgtgtgaaaaaaaaaggt

SEQ ID NO: 82813 - DNA, 623 bp, Homo sapiens
ctgcagcctcaggcccgggtgactccagcggaggagctctgggacacccttgtctagggaagaggtcttactggctgccctcacctgactttgtgtccccaggcccccagccatggccctgtccctgcctctgggccctagacttggctcagagcccctcaaccacccaccgggagcacctagagaggcggacattgttggatgcaccgtctgccccgcgtccggagaggagagcacgagcccagagcaggcccagaccctgggacaggactccttgggccctcctgagcacttccagggtgggccaaggggcaatgagcctgccgctcaccccccgagatggtcaacaccctcttcctacgaggacccagctgggggcaaacactgtgagggcccccgatcctgcatccaggcagcctctgaccttcctccttatcctcttcctcctcttcctcctcctggtgggtgccatgtttctcctgcccgcgtcaggaggcccctgctgctctcatgcccgaatacccaggacaccctacctggtgctcagctatgtcaatggtcttcccccagtctgatgtgtgtaataaatggtcactgtcaaaggatgtgtgaaaaaaaaaggt

SEQ ID NO: 82814 - DNA, 577 bp, Homo sapiens
ctgcagcctcaggcccgggtgactccagcggaggagctctgggacacccttgtctagggaagaggtcttactggctgccctcacctgactttgtgtccccaggcccccagccatggccctgtccctgcctctgggccctagacttggctcagagcccctcaaccacccaccgggagcacctagagaggcggacattgttggatgcaccgtctgccccgcgtccggagaggagagcacgaggaagcagacacctctcactcccgacaggacatgctggagtctggcctcggccaccagaaacgcttagcacgtcaccaaagacactccctgctccggaagcctcagggcccccgatcctgcatccaggcagcctctgaccttcctccttatcctcttcctcctcttcctcctcctggtgggtgccatgtttctcctgcccgcgtcaggaggcccctgctgctctcatgcccgaatacccaggacaccctacctggtgctcagctatgtcaatggtcttcccccagtctgatgtgtgtaataaatggtcactgtcaaaggatgtgtgaaaaaaaaaggt

SEQ ID NO: 82815 - DNA, 1375 bp, Homo sapiens
ctgcagcctcaggcccgggtgactccagcggaggagctctgggacacccttgtctagggaagaggtcttactggctgccctcacctgactttgtgtccccaggcccccagccatggccctgtccctgcctctgggccctagacttggctcagagcccctcaaccacccaccgggagcacctagagaggcggacattgttggatgcaccgtctgccccgcgtccggagaggagagcacgagcccagagcaggcccagaccctgggacaggactccttgggccctcctgagcacttccagggtgggccaaggggcaatgagcctgccgctcaccccccgagatggtcaacaccctcttcctacgaggacccagctgggggcaaacactgtgagcaccccatttctggcctggaggtactagaggctgagcagaacagcctgcacctgtgcctgctggggctgggccgccggctgcaggacctggagcaaggcctggggcactgggcattggcccagagtgggatggtgcagctgcaggccctccaggtggacctacgaggggcagctgagcgtgtggaggcgctgctagcgtttggtgaggggctggcacagcggagtgagcccagggcctgggcagccctggagcagatcctgcgggccctgggagcttaccgagactccatcttccggcggctctggcagctgcaggcccagctggtcagctacagcctggtgttcgaggaggccaacacgctggaccaggacttggaggtcgagggagactcggactggccaggacctggtggggtctgggggccctgggcacccagtagcctccccacttccacagagttggagtgggatccggcgggggacattgggggccttgggcccttgggacaaaagacagcccggacactaggagtgccctgtgagctgtgtggccacagggggccccagggcaggggacaaggccttgaggaagcagacacctctcactcccgacaggacatgctggagtctggcctcggccaccagaaacgcttagcacgtcaccaaagacactccctgctccggaagcctcaggacaagaagaggcaagcatctcctcatctccaggatgtgaggctggaggggaatccaggggcccccgatcctgcatccaggcagcctctgaccttcctccttatcctcttcctcctcttcctcctcctggtgggtgccatgtttctcctgcccgcgtcaggaggcccctgctgctctcatgcccgaatacccaggacaccctacctggtgctcagctatgtcaatggtcttcccccagtctgatgtgtgtaataaatggtcactgtcaaaggatgtgtgaaaaaaaaaggt

SEQ ID NO: 82816 - DNA, 1196 bp, Homo sapiens
ctgcagcctcaggcccgggtgactccagcggaggagctctgggacacccttgtctagggaagaggtcttactggctgccctcacctgactttgtgtccccaggcccccagccatggccctgtccctgcctctgggccctagacttggctcagagcccctcaaccacccaccgggagcacctagagaggcggacattgttggatgcaccgtctgccccgcgtccggagaggagagcacgagcccagagcaggcccagaccctgggacaggactccttgggccctcctgagcacttccagggtgggccaaggggcaatgagcctgccgctcaccccccgagatggtcaacaccctcttcctacgaggacccagctgggggcaaacactgtgagcaccccatttctggcctggaggtactagaggctgagcagaacagcctgcacctgtgcctgctggggctgggccgccggctgcaggacctggagcaaggcctggggcactgggcattggcccagagtgggatggtgcagctgcaggccctccaggtggacctacgaggggcagctgagcgtgtggaggcgctgctagcgtttggtgaggggctggcacagcggagtgagcccagggcctgggcagccctggagcagatcctgcgggccctgggagcttaccgagactccatcttccggcggctctggcagctgcaggcccagctggtcagctacagcctggtgttcgaggaggccaacacgctggaccaggacttggaggtcgagggagactcggactggccaggacctggaagcagacacctctcactcccgacaggacatgctggagtctggcctcggccaccagaaacgcttagcacgtcaccaaagacactccctgctccggaagcctcaggacaagaagaggcaagcatctcctcatctccaggatgtgaggctggaggggaatccaggggcccccgatcctgcatccaggcagcctctgaccttcctccttatcctcttcctcctcttcctcctcctggtgggtgccatgtttctcctgcccgcgtcaggaggcccctgctgctctcatgcccgaatacccaggacaccctacctggtgctcagctatgtcaatggtcttcccccagtctgatgtgtgtaataaatggtcactgtcaaaggatgtgtgaaaaaaaaaggt

SEQ ID NO: 82817 - DNA, 1080 bp, Homo sapiens
ctgcagcctcaggcccgggtgactccagcggaggagctctgggacacccttgtctagggaagaggtcttactggctgccctcacctgactttgtgtccccaggcccccagccatggccctgtccctgcctctgggccctagacttggctcagagcccctcaaccacccaccgggagcacctagagaggcggacattgttggatgcaccgtctgccccgcgtccggagaggagagcacgaggccctccaggtggacctacgaggggcagctgagcgtgtggaggcgctgctagcgtttggtgaggggctggcacagcggagtgagcccagggcctgggcagccctggagcagatcctgcgggccctgggagcttaccgagactccatcttccggcggctctggcagctgcaggcccagctggtcagctacagcctggtgttcgaggaggccaacacgctggaccaggacttggaggtcgagggagactcggactggccaggacctggtggggtctgggggccctgggcacccagtagcctccccacttccacagagttggagtgggatccggcgggggacattgggggccttgggcccttgggacaaaagacagcccggacactaggagtgccctgtgagctgtgtggccacagggggccccagggcaggggacaaggccttgaggaagcagacacctctcactcccgacaggacatgctggagtctggcctcggccaccagaaacgcttagcacgtcaccaaagacactccctgctccggaagcctcaggacaagaagaggcaagcatctcctcatctccaggatgtgaggctggaggggaatccaggggcccccgatcctgcatccaggcagcctctgaccttcctccttatcctcttcctcctcttcctcctcctggtgggtgccatgtttctcctgcccgcgtcaggaggcccctgctgctctcatgcccgaatacccaggacaccctacctggtgctcagctatgtcaatggtcttcccccagtctgatgtgtgtaataaatggtcactgtcaaaggatgtgtgaaaaaaaaaggt

SEQ ID NO: 82818 - DNA, 364 bp, Homo sapiens
gtagggcctttggaaagtaattaggattagataaaatcatcagggtggggccaccataatggggctggtggctttataagaggaagagagacctgagctgacacgcatgttcttgccctcttgctatgtggtgccctcagccatgttagggcacagcaagaaggccctcaccagatattggggtggtcttggacctcccaccctccagaactgtaagaaatagatttttttatatattacccagtctatgatattctgttacggcaacagaaaacagactaagacaagcttctaaacaaatggaaaatagagttttaagatgcagactttcattgccttaacagggccaagaatatctatttca

SEQ ID NO: 82819 - DNA, 119 bp, Homo sapiens
gcctccagagtcacgcagcttggagtcctggctgcagcccaggaagggtgagtggacggtgcagcacagcagacggcgcacaggcttggagtcgcccactcaggacaagtgtcaccttg

SEQ ID NO: 82820 - DNA, 381 bp, Homo sapiens
ctaggttatttatgatatctaatacaatgcaaatgctatgtaagcagctgttgtactgtattatttagggaataatgtcaaggaaaatagtctatatgtgttcaacagagacgcaatttttttcctgaatatttctgatccatgattgattggagtcatggatgtagaacccatgaatatggaggaccgctgtactaatcttgttgaggctctaggtagtcaaggaaaaaagacacataccacaatgtggaaaattatgattaaaagagtgcttcaaatcagtggagaaaagatgaattatttcagcaaatgattttttaataactggctagtcactgtgggaatccagaacaggaagctatatattccttactgtatgtt

SEQ ID NO: 82821 - DNA, 382 bp, Homo sapiens
aagacataattccaacacagcttccctatgaccactatttagaagtgtttagaggctgtgccgttaaagtgctgtgtgcacaacctcttgtgcaggtccaagaacattgctcatgatgtgggttgtcaagccagtgataccagccctcattccactataaatctcctgcctcagcctcctgagcagctgggattacaggcatgtgccaccacacttggctaattttgtatttttagtagggaccaggtttctccatgttgatccggctggtctcaaactcctgacctcaggagaatcgcttgaacccgggaggcggaggttgcaatgagccgagattgtgccagtgcactccagcctggcaacagatcaagactccatctca

SEQ ID NO: 82822 - DNA, 464 bp, Homo sapiens
ctcaaaacaaacaaacaaacaaaaaaaactccaactcattgatttattgctattgtctgatggagacatgggtgtaaccttaagaattttttttcatgattcattcagcctgggaaattggtaggaagaaagagaggatacccatgcatgtgagttttagagattatagaagcatcagttattatttttttcttcttggaagagacatgatattttacataggatgaaaaaagagaagctgtgtgtgtctgtgtgtgtgattttttttccttcctggaaaacacatgatacattttacataggatgaaaaaagagaagtgtgtgtgtgtgtgtgtgtgtgtgcgtgtgcttgtaacatttagcaaaatagtcattatctgagttttctgtgcagaagatgtaggaataataagtcatgggccttgccctcaaagggtttacagtctcttgaggtagctaagcat

SEQ ID NO: 82823 - DNA, 383 bp, Homo sapiens
aatggcatttaatacacctactgaatatcatagcttagcctagcctaccttaaatgtgctaagaacactgacattaggctatagttggcaaaaccatctaacacaaagcttattttgtaatacagtgttgaatatctcatgtaatttatttaatactgtacccaaagtgagaaacagaattgttgtatgggtactcaaagtgtgttttctactgaatgcatatggctttcacaccatcataaagctgaaaactcttaagtcgggacctggctgcactatgttctgctgcagcatctaccctccctctaagtaaggaggtgacttctcacttccgagcaacaaagacattcaggccagtgctgcctgctgatgggaaatgactg

SEQ ID NO: 82824 - DNA, 304 bp, Homo sapiens
tttatgaacaactttttttttttctcttagggcatctgttagatgcattccaagctccaggggagacctgtgtggaggtgcaagaaggaggagctctaaggttattttaatttagatttatctgagactccagaaaaatcacgtacgtggtgtggaaattatcctcacataggcagagggagaaaacactaaattcatattctacatgtatcttcttgtatcaagaccagtgttttcagaaatgagtttgccaataaatataaaaaccatccatcggttttcttcccaatactcattcttcccc

SEQ ID NO: 82825 - DNA, 351 bp, Homo sapiens
gtctcactctgtccccaggctggagtgcagtgacacgtacttggctcactgcaacctctgcctcctgggttcaagagattctcctgccttggcctccccaggagctgggattacaggcatgcgccaccatgcatggctaatttttgtatttttagtagagccagggtttcaccctgttggccaggctgatcttgaactcttgacctcaggtgatctgcccaccttggcctcccaaagtgctaggattacaggcgtgagccactgcacctggccccattcacagttcttaaactattatcaaagatgtcctacattcatgccccacccccacccatatgaaatcttgatctt

SEQ ID NO: 82826 - DNA, 564 bp, Homo sapiens
aagcatctctacctgcatatctgaaagttacctttaaataacatgtcaaaaatggaactaattacctatcatcatcctacaaacctgctcccctctcatatccctatttacattggtggtatcacaatttacccagacatctaggctggaaacctaaatgtattttccactactctttggcccttatggctatattcaatatatctaaatcagtcttcaagtcttattgattttatatctcacaaatctttctaatctgtctctcatctccattctcacctataatcacactttagctctggcctttagcatctcttgtcttgacttttacaaaagcaccctactacactagttctggtctcttgtctcatcccctcctacccattttgtataatgctaccagaatggtttttaaaaataaatctgaccacgtcatttctttccctaaacccttcaatgttcacactgcctaaaggataaaagtccaagatcctctctaacttgaacccttccctattctctggctttggctcctacacccccagcttgtattttaccagcaat

SEQ ID NO: 82827 - DNA, 1581 bp, Homo sapiens
actctgcgcacgcgcgccgggtgccccggcctaaggccgttgacctcgggttctccccggcacagtcgaatccacgccagggccctcaggccggtagctgtcctgcagtccgagcggagctgcgacctcgggcagctggaagcctgtgggctgctgcttctccaggcaggcggcggagggatgcaggcaggatgagcggcggtcccttcgccgccacccggagaaccgcggctggtgcccttgaaggccctgggatgcctgggttgggtgggtgggtgaacgagaaccctgagtgagtgaggggagggcgggtcccctcctggcttcaaattcaacccaatcagctctgccgatggtttgaaactgcacacgccgacccacccgccccgaagtctgaaagttatgccctggagacctgcgagctgcggagtgcagctggagagggagctgccccacgaggaggcctccagaataactcccggagtcggaacagcgctgggctgctgaagtttgcagcctccggatccgcgccccgccctgcagatccaccggatttcggggagggaatcggggggctgcccgtcctcccgtaaagctgacttgacaacaattacgaaagtttttaattagctccttgttataattcattttatttccagaactctccgaccataaattattcaaagagtaagccaacccgagcggggcggccgcgcgccttccccacgcgcgccgggctggctctggccgctcagctcacccgatgccccgtgagccagccccgcgccagaagccgcggtggcaggaaggtttgatcaaacattaaataacgtaatgtttgcgacaaggcttatctcacaagtggaaaagaggacctcgcgagaattagaattcggctgctattttaaaaaatcaattaagcttgcggtcttttttgaaacagctcgaaaggactgcgtggctatcatcgtggcgctaagactgagatggcaataacaccgatggcagaactgtaccagtattaattgtcatcacctttatcatcccgctggccaccaaggccgttcgaatggggtgggaaaggctagttttagccaggatcagaagccccagttccaacttcacggacgaaaaactgcgaaagcctatcaacttgaaagatgagtagggatacttcacgcaggtgccaggtgctatcaggagaggccggggcggcggggcagaggcagagggcagggatcgctgagtgagtcctgcgggcttggggcgccctgttctctcacgtgcgctgccacgtgtaggaggaactggaccgaagtagtctcagtatcacaagaaaacaaaaatcgatacaatcacggcagtgggtgcctacagtttatttatgaaactgtaatcgaagttgagagcaatttcagaacacgcattaaacaaaaattattcagaagttagttgatgggtcttgaggacataatttttttagacctacagaaggaacacgacctggagctagaactggggaaaagaggaaatttaagacaaatggatggcataaatgtggcagatgctttaatgcttatt

SEQ ID NO: 82828 - DNA, 539 bp, Homo sapiens
ccagatgtataacattgtaattttaaaaaatattttaatgatcatcagacataatttgcaatttgaatccaactctgaacaagaacaaaaatgaaaaaacccatctcttaaacagagctaggctactttaaacacaggaataaggcaaatgccctactcagtaatgagaagctcctcatgtaactgtttctacaacatagctatcaccaggcctgaattcttttgggctcagaatttgttctaagaaatggctattattaaaaagtcaaaaaataacagatgctggcgagcctgtggagaaaagggaatgtatatacatttctggtgggaatgtaaattagttcagccattgtagaaagtagtttggtgatttctcaaataacttaaaacagaattaccatttgacctagcaatcccattactgagtatatacccaaaggaatataaattgttctaccataaagtcacatgcacacacatgttcagtgctgtactattcacaatagcaaagacatggagtcaacctatatgcccatcaa

SEQ ID NO: 82829 - DNA, 344 bp, Homo sapiens
aaaaggaattttttttttcagggaggagaaataaacaactgtatttcagaatgactgttttagtaactctcaagtaggtaactcatatgaaaataacccaggagaaatacccgtgatagcccaaaacattttagttgaaggggaaaaaatacacatctaaaggaaaaaaggaatctgtctatccaaagctacagcctaaagacaaaagagacattgcattccttcatggccacagaaaaacctgtgcattcaggggcactccagatgaggagcagccaagatgacaatgctttacagtggtgatgtttattaaaaggcccctggatgcaatagaaggatctgtt

SEQ ID NO: 82830 - DNA, 682 bp, Homo sapiens
agtaaatgtattatttaaaatgttttctttggaagcatatttttataatctcagggaggctcatccccattttatagaaatccatattacagagtactagaaggaataaaatgataaggtaagtccttgtcttaaggaatttacagggtaaatccaaaagtgaaaaaatattttttcatggatataaatattttgattgtaacttctcttcttattaaaaagggcacagtggctcatgcctgtaatgctagcactttgggaggctgaggtgagacgatcacgaggccaggagtttgagactagcctggccaacatggtgaaacccctctctactaaaaatgcaaaaattagccaggcatggtggtgcacacctgtagtcccagctacttgggaggctgaggcagaagaatcgcttgaacccaggaggcggaggttgcggtgagccgagatcacgccactgcactccagccagggtgacagagcgagactccgtctcaaaaaaaaaaaaaaaaaaaaaaagtagtatataattcaggaaggaacacgctattctttctcaggctttattaatcatgtttaaatctgcctatgtaactgcactacacactcatgtgtgcttactatgtgccagggacttactaaccataatacaaaaattaatttatttaatcctcataataac

SEQ ID NO: 82831 - DNA, 791 bp, Homo sapiens
  misc_feature (607)..(607): n is a, c, g, or t
  misc_feature (708)..(708): n is a, c, g, or t
  misc_feature (773)..(773): n is a, c, g, or t
  misc_feature (783)..(783): n is a, c, g, or t
cacactggggagaggccttatgagtgcagtgaatgtgggaagttctttccctacagctccagtctccgaaaacaccagagagttcacactggatcaagaccctatgagtgcagtgaatgtgggaaatcctttactcaaaattccggcctcattaagcacaggagggttcacactggggagaagccttatgagtgcacggaatgtgggaaatcctttagccataactccagccttattaaacatcagagaattcatagtcgataaaagccttatgagtggcaaatgtggaaatctgttagcaccctggagaaagtccttgagtacacagtgaatgtcagaaagcttcagctgaaggccatatctcattgagtgccacacagttcacaagggaaagacacttttgatatgtagggatgtccagttgatataacagctctgaaggagatcccttatgagggtggcatcagcctgaattgaacatcctatatctgaacatctgcataaatccaggtatgtgtgaactgcattgcaccttttgccctgcccagggcccatgtcagatttatgtctctgctgatactatagtggaagccattttacctctacngcctggcaggtgaccaccagtgtgcaccactcacccatcccagtgtattcaggtaagtgaaccttggtgttctgttcatgggaggaatttgtaaatagccnaagcatttattccgttttttttttttcctttctgatgagttaggccatggacctgacccagtttngccagaggantctgctgg

SEQ ID NO: 82832 - DNA, 616 bp, Homo sapiens
cgaaggggaagaaaagctgtatcgattgttgagatctggcgacttgtttaaatttcatcagcctcacttctatgaactctcaggcctcacgtgtaccagctctctgctctcctttgccttgggacgttccatccctggaagtttccctgcccacatctttgtagagagtccattctccaagcttcagtgtgtcatctgtgaggaccgtgacccacctggtacatcgcctcagggcattcatttcaggctccttctaaatggccaagagacaacaccaacatttttgtaatggcctgcaaggccttccgagatctacctcctgcaactcagcttctcctgtgctctccttctggactcactctgcctcagcaacactggtccctgttgccccaccaatatgccaggccatgagagaagcagtaccttataatggttccttgttcaaagcactcaatattcctaggatgtggtctcccagctgacttcataactgaatcatcagtaattaatttcattgttctattaggactttactgaagactctaaggaggacctgtatctgttgggatcctcagggcaagccacagaaacaagctttggatactagaagcagaaa

SEQ ID NO: 82833 - DNA, 2872 bp, Homo sapiens
ggttcttttccaaacttgttccctggcttccaagtgacgaaaccagctgtaatttgagagcagagagatcctcaggatatctttagccaaaggaaaagctccgcattcccacccagtccagaaattgaaatactatcagggggcaagagcctttctctccagctacacactccatctcccgggacaagccagctgggactgaggcggacgctgtctcagggagacgctgactcgcaaagacactcccttccttgtgcctgggtaaaaagtctcctcctggggtccctggccatcctgaatatccagaatggtgtttctgaagttcttctgcatgagtttcttctgccacctgtgtcaaggctacttcgatggccccctctacccagagatgtccaatgggactctgcaccactacttcgtgcccgatggggactatgaggagaacgatgaccccgagaagtgccagctgctcttcagggtgagtgaccacaggcgctgctcccagggggaggggagccaggttggcagcctgctgagcctcaccctgcgggaggagttcaccgtgctgggccgccaggtggaggatgctgggcgcgtgctggagggcatcagcaaaagcatctcctacgacctagacggggaagagagctatggcaagtacctgcggcgggagtcccaccagatcggggatgcctactccaactcggacaaatccctcactgagctggagagcaagttcaagcagggccaggaacaggacagccggcaggagagcaggctcaacgaggactttctgggaatgctggtccacaccaggtccctgctgaaggagacactggacatctctgtggggctcagggacaaatacgagctgctggccctcaccattaggagccatgggacccgactaggtcggctgaaaaatgattatcttaaagtataggtggaaggatacaaatgctagaaagagggaatcaaatcagccccgttttggagggtgggggacagaagatggggctacatttcccccatacctactatttttttatatcccgatttgcactttgagaatacatctaaggtcatctttcaaaagagaaaaattggacacttgagtgactttgtttttagttttgtttttgtacattatttatgtgattgttatggaattgtcacctggaaagaacaattttaagcaatgtcatttctagatgggtttctaattctgcagagacacccgtttcagccacatctaaaagagcacagtttatgtggtgcggaattaaacttccccatcctgcagattatgtggaaatacccaaagataatagtgcatagctcctttcagcctctagccttcactcctgggctccaaaagctatcccagttgcctgtttttcaaatgaggttcaaggtgctgctttgcatgcctgccaacccatggaagttgtttcttacttcttttctctcttatttattaaccatggtctgagagttgtttttgttctatgtaacagtattgccacaaaactataggcaaatcgtgtttgcagggagatttctgatgcctctgtgggtgtgtgtaagttaaagtggccacatttaagaaggccaagctttgtagtggttgcacagtcacactgatatgctgatttgctctttctcattgtatgtctatgctttgtcatcagtgctatagtaaattacaaagaaataggtagattgtatgaacatacccacaaatgcctatgatttaggttaccaatgtattctttctcatttggggttttgcttctgtctgtctgtttattggaaacttgtacttcaagtagggggaatcctaattctaataactccttagctaagttttattattcaggcaataaacatgttttcatgtaatactggcttactttgtaatttacatctgtaactttcatatttctaaaaggggccaatgcaaaaggagagagaaggactggatttaagccagtttacttagagtatatgataaagaaggcagaggaatagctacatatttggcaattctcctctctgtagtcaccctgacatcctcacaagaaaacaaatctagccattgcccaaactttaaatttgatctctataggtctgcttaaagactcaaattttctccagtttctctcataaattcaattgcaaaagtttctgacaaggctcataccctgtacccttatgcagagcaagcattccatcctaagttataaactacagtgatgtttaattttgaagccaggtctacattatttaattaatggcttcaaaaggtggagatgcactttatttaatgtctttccctagctaattcttactctcaccttaaatatgctttcttgttgcatatatgcacagatacacacacacacacacacgaaaataaataaatgttcatattcttctgttcaacagacatttattttctcctctcccttgaataagaaaataagttttccattcctatgaactgtctaatatctttctattacagaaggggaaactgaggctgggaaaggctaaatgacttatcctccatcagttataacagcccctggtcttcttaaatttaaacacgggacttcccgaactaatttttttaaggatactgaaaaatgagagagagtggtcgaatgcctgaaattttgcttaacttactgtacttaaaatcaattataacttctttttgttactcagggccccactttttgttgctttctagacttgtgtgtagaaagaagattaatgatcacttaaagtagtttccttctttattctgaaaaaatgaggaaaaaataacaacagtggcaaataaaatcatatttggtactaaaaaaat

SEQ ID NO: 82834 - DNA, 1305 bp, Homo sapiens
ggttcttttccaaacttgttccctggcttccaagtgacgaaaccagctgtaatttgagagcagagagatcctcaggatatctttagccaaaggaaaagctccgcattcccacccagtccagaaattgaaatactatcagggggcaagagcctttctctccagctacacactccatctcccgggagcaaggggaaactccgagaggagggcaacagagccagcatcttgccaggccccggaggaggggttccccgctacgcctgtgccggaggagttccagtcaccgagcgaggggcgcaagggtgggtgcatcctgcgctgcggcgggcgcgctacccagacgctggtgtgcagagccacatgaagcctgctggggactgggggccagggagcagcaagccagctgggactgaggcggacgctgtctcagggagacgctgactcgcaaagacactcccttccttgtgcctgggtaaaaagtctcctcctggggtccctggccatcctgaatatccagaatggtgtttctgaagttcttctgcatgagtttcttctgccacctgtgtcaaggctacttcgatggccccctctacccagagatgtccaatgggactctgcaccactacttcgtgcccgatggggactatgaggagaacgatgaccccgagaagtgccagctgctcttcagggtgagtgaccacaggcgctgctcccagggggaggggagccaggttggcagcctgctgagcctcaccctgcgggaggagttcaccgtgctgggccgccaggtggaggatgctgggcgcgtgctggagggcatcagcaaaagcatctcctacgacctagacggggaagagagctatggcaagtacctgcggcgggagtcccaccagatcggggatgcctactccaactcggacaaatccctcactgagctggagagcaagttcaagcagggccaggaacaggacagccggcaggagagcaggctcaacgaggactttctgggaatgctggtccacaccaggtccctgctgaaggagacactggacatctctgtggggctcagggacaaatacgagctgctggccctcaccattaggagccatgggacccgactaggtcggctgaaaaatgattatcttaaagtataggtggaaggatacaaatgctagaaagagggaatcaaatcagccccgttttggagggtgggggacagagaagtgacagggaagctacaggttacaacagatttgtgaactcagccaagcacagtggtggcagggacccactcggggtaccgag

SEQ ID NO: 82835 - DNA, 3083 bp, Homo sapiens
ggttcttttccaaacttgttccctggcttccaagtgacgaaaccagctgtaatttgagagcagagagatcctcaggatatctttagccaaaggaaaagctccgcattcccacccagtccagaaattgaaatactatcagggggcaagagcctttctctccagctacacactccatctcccgggagcaaggggaaactccgagaggagggcaacagagccagcatcttgccaggccccggaggaggggttccccgctacgcctgtgccggaggagttccagtcaccgagcgaggggcgcaagggtgggtgcatcctgcgctgcggcgggcgcgctacccagacgctggtgtgcagagccacatgaagcctgctggggactgggggccagggagcagcaagccagctgggactgaggcggacgctgtctcagggagacgctgactcgcaaagacactcccttccttgtgcctgggtaaaaagtctcctcctggggtccctggccatcctgaatatccagaatggtgtttctgaagttcttctgcatgagtttcttctgccacctgtgtcaaggctacttcgatggccccctctacccagagatgtccaatgggactctgcaccactacttcgtgcccgatggggactatgaggagaacgatgaccccgagaagtgccagctgctcttcagggtgagtgaccacaggcgctgctcccagggggaggggagccaggttggcagcctgctgagcctcaccctgcgggaggagttcaccgtgctgggccgccaggtggaggatgctgggcgcgtgctggagggcatcagcaaaagcatctcctacgacctagacggggaagagagctatggcaagtacctgcggcgggagtcccaccagatcggggatgcctactccaactcggacaaatccctcactgagctggagagcaagttcaagcagggccaggaacaggacagccggcaggagagcaggctcaacgaggactttctgggaatgctggtccacaccaggtccctgctgaaggagacactggacatctctgtggggctcagggacaaatacgagctgctggccctcaccattaggagccatgggacccgactaggtcggctgaaaaatgattatcttaaagtataggtggaaggatacaaatgctagaaagagggaatcaaatcagccccgttttggagggtgggggacagaagatggggctacatttcccccatacctactatttttttatatcccgatttgcactttgagaatacatctaaggtcatctttcaaaagagaaaaattggacacttgagtgactttgtttttagttttgtttttgtacattatttatgtgattgttatggaattgtcacctggaaagaacaattttaagcaatgtcatttctagatgggtttctaattctgcagagacacccgtttcagccacatctaaaagagcacagtttatgtggtgcggaattaaacttccccatcctgcagattatgtggaaatacccaaagataatagtgcatagctcctttcagcctctagccttcactcctgggctccaaaagctatcccagttgcctgtttttcaaatgaggttcaaggtgctgctttgcatgcctgccaacccatggaagttgtttcttacttcttttctctcttatttattaaccatggtctgagagttgtttttgttctatgtaacagtattgccacaaaactataggcaaatcgtgtttgcagggagatttctgatgcctctgtgggtgtgtgtaagttaaagtggccacatttaagaaggccaagctttgtagtggttgcacagtcacactgatatgctgatttgctctttctcattgtatgtctatgctttgtcatcagtgctatagtaaattacaaagaaataggtagattgtatgaacatacccacaaatgcctatgatttaggttaccaatgtattctttctcatttggggttttgcttctgtctgtctgtttattggaaacttgtacttcaagtagggggaatcctaattctaataactccttagctaagttttattattcaggcaataaacatgttttcatgtaatactggcttactttgtaatttacatctgtaactttcatatttctaaaaggggccaatgcaaaaggagagagaaggactggatttaagccagtttacttagagtatatgataaagaaggcagaggaatagctacatatttggcaattctcctctctgtagtcaccctgacatcctcacaagaaaacaaatctagccattgcccaaactttaaatttgatctctataggtctgcttaaagactcaaattttctccagtttctctcataaattcaattgcaaaagtttctgacaaggctcataccctgtacccttatgcagagcaagcattccatcctaagttataaactacagtgatgtttaattttgaagccaggtctacattatttaattaatggcttcaaaaggtggagatgcactttatttaatgtctttccctagctaattcttactctcaccttaaatatgctttcttgttgcatatatgcacagatacacacacacacacacacgaaaataaataaatgttcatattcttctgttcaacagacatttattttctcctctcccttgaataagaaaataagttttccattcctatgaactgtctaatatctttctattacagaaggggaaactgaggctgggaaaggctaaatgacttatcctccatcagttataacagcccctggtcttcttaaatttaaacacgggacttcccgaactaatttttttaaggatactgaaaaatgagagagagtggtcgaatgcctgaaattttgcttaacttactgtacttaaaatcaattataacttctttttgttactcagggccccactttttgttgctttctagacttgtgtgtagaaagaagattaatgatcacttaaagtagtttccttctttattctgaaaaaatgaggaaaaaataacaacagtggcaaataaaatcatatttggtactaaaaaaat

SEQ ID NO: 82836 - DNA, 3029 bp, Homo sapiens
ggttcttttccaaacttgttccctggcttccaagtgacgaaaccagctgtaatttgagagcagagagatcctcaggatatctttagccaaaggaaaagctccgcattcccacccagtccagaaattgaaatactatcagggggcaagagcctttctctccagctacacactccatctcccgggagcaaggggaaactccgagaggagggcaacagagccagcatcttgccaggccccggaggaggggttccccgctacgcctgtgccggaggagttccagtcaccgagcgaggggcgcaagggtgggtgcatcctgcgctgcggcgggcgcgctacccagacgctggtgtgcagagccacatgaagcctgctggggactgggggccagggagcagcaagccagctgggactgaggcggacgctgtctcagggagacgctgactcgcaaagacactcccttccttgtgcctgggtaaaaagtctcctcctggggtccctggccatcctgaatatccagaatggtgtttctgaagttcttctgcatgagtttcttctgccacctgtgtcaaggctacttcgatggccccctctacccagagatgtccaatgggactctgcaccactacttcgtgcccgatggggactatgaggagaacgatgaccccgagaagtgccagctgctcttcagggtgagtgaccacaggcgctgctcccagggggaggggagccaggttggcagcctgctgagcctcaccctgcgggaggagttcaccgtgctgggccgccaggtggaggatgctgggcgcgtgctggagggcatcagcaaaagcatctcctacgacctagacggggaagagagctatggcaagtacctgcggcgggagtcccaccagatcggggatgcctactccaactcggacaaatccctcactgagctggagagcaagttcaagcagggccaggaacaggacagccggcaggagagcaggctcaacgaggactttctgggaatgctggtccacaccaggtccctgctgaaggagacactggacatctctgtggggctcagggacaaatacgagctgctggccctcaccattaggagccatgggacccgactaggtcggctgaaaaatgattatcttaaagtataggtggaaggatacaaatgctagaaagagggaatcaaatcagccccgttttggagggtgggggacagaagatggggctacatttcccccatacctactatttttttatatcccgatttgcactttgagaatacatctaaggtcatctttcaaaagagaaaaattggacacttgagtgactttgtttttagttttgtttttgtacattatttatgtgattgttatggaattgtcacctggaaagaacaattttaagcaatgtcatttctagatgggtttctaattctgcagagacacccgtttcagccacatctaaaagagcacagtttatgtggtgcggaattaaacttccccatcctgcagattatgtggaaatacccaaagataatagtgcatagctcctttcagcctctagccttcactcctgggctccaaaagctatcccagttgcctgtttttcaaatgaggttcaaggtgctgctttgcatgcctgccaacccatggaagttgtttcttacttcttttctctcttatttattaaccatggtctgagagttgtttttgttctatgtaacagtattgccacgtgtaagttaaagtggccacatttaagaaggccaagctttgtagtggttgcacagtcacactgatatgctgatttgctctttctcattgtatgtctatgctttgtcatcagtgctatagtaaattacaaagaaataggtagattgtatgaacatacccacaaatgcctatgatttaggttaccaatgtattctttctcatttggggttttgcttctgtctgtctgtttattggaaacttgtacttcaagtagggggaatcctaattctaataactccttagctaagttttattattcaggcaataaacatgttttcatgtaatactggcttactttgtaatttacatctgtaactttcatatttctaaaaggggccaatgcaaaaggagagagaaggactggatttaagccagtttacttagagtatatgataaagaaggcagaggaatagctacatatttggcaattctcctctctgtagtcaccctgacatcctcacaagaaaacaaatctagccattgcccaaactttaaatttgatctctataggtctgcttaaagactcaaattttctccagtttctctcataaattcaattgcaaaagtttctgacaaggctcataccctgtacccttatgcagagcaagcattccatcctaagttataaactacagtgatgtttaattttgaagccaggtctacattatttaattaatggcttcaaaaggtggagatgcactttatttaatgtctttccctagctaattcttactctcaccttaaatatgctttcttgttgcatatatgcacagatacacacacacacacacacgaaaataaataaatgttcatattcttctgttcaacagacatttattttctcctctcccttgaataagaaaataagttttccattcctatgaactgtctaatatctttctattacagaaggggaaactgaggctgggaaaggctaaatgacttatcctccatcagttataacagcccctggtcttcttaaatttaaacacgggacttcccgaactaatttttttaaggatactgaaaaatgagagagagtggtcgaatgcctgaaattttgcttaacttactgtacttaaaatcaattataacttctttttgttactcagggccccactttttgttgctttctagacttgtgtgtagaaagaagattaatgatcacttaaagtagtttccttctttattctgaaaaaatgaggaaaaaataacaacagtggcaaataaaatcatatttggtactaaaaaaat

SEQ ID NO: 82837 - DNA, 748 bp, Homo sapiens
gtgggctccacccagttcgagcttcccagctgctttgtttacctaatcaagcctgggcaatggcatgtgcccctcccccagcctcgctgccgccttgcagtttgatctcagactgctgtgctagcaatcagcgagactccgtgggcgtaggaccctccgagccaggtgcgcgatataatctcgtggtgcgccgttttttaagcccgtcggaaaagcgcagtattcgggtgggagtgacccgattttccaggtgccgtccgtcacccctttctttgactgggaaagggaactccctgaccccttgggcttcccaagtgaggcaatgcttcgccctgcttcggctcgcacaaggtgcgcgcacccactgacctgcgcccactgtctggcactccctagtgagatgaacccggtacttcagatggaaatgcagaaatcacctgtcgtctgcgtcgctcacgctgggagctgtagaccggagctgttcctattcggccatcttggctcctcgatcctgaccatcacttcccccttgtgtgaaaatcttggaatctcatgttcatatggcggtgccaaacaattgaagcagcctgcaatgctgagtgtacatttggaggacaactgttatggagagctgcccagacctagaatggatttttacaacaggaaagtaaatttctgatgatgcagatgattaaaaagatgatcatgaagacacactctttaaatgactggggaaaacatcagacca

SEQ ID NO: 82838 - DNA, 712 bp, Homo sapiens
ctaaaattggaatgatacagagaagattagcatggcccctgtgcaaggatgacacacaaactcatgaacaattccatatttttaacaaaagaagtaaaaaataataataacacctttctaaaaattacttgttagataaaacaatgcatataaagcatctagcagagtgcctgggacatgataccccctcaataaatggtacctatttttattttctgtggaatgaatgaatgaaaaaaaaatggcttaacgaagcataaaaaacatcaggttgtgacaatctttacaatttaattactgtattataataattactgtattataagtgagctatgattatgccactgcactccagcctgggtgacacagcaagagacctcgactctttaaaaaaaaaaaaatactgtattatatggtaacaaatagaaccactaggttatttctatttatagaatgaatttttattttcaaataaactctaactggcttcattttagacatgtagcaactgttgaattaaagagttcactatattaaaaaataggcaaagttttattttggtattatagtaatctcaaatgtatcttgtaaaaaaattaatgttttcactccagttaagtatagtatatattgctccttcataattataagtctataagttatcttatcccttaggtggtactgtagcaatcatgagattaacaaaataggc

SEQ ID NO: 82839 - DNA, 408 bp, Homo sapiens
gagatcttgtcccagctcccaaacatgaattaggacatgaggctcactgctttggaaagccctctaatttttctgcttgttcccagcatgcctcaatcttggggtttggcctagaaggaaagtcatatctgcctgcttgcacttcccctccctggcctcttcttcctagttccccaccccactgcctccctaggctggaggaaacatactctctgtcatttgctgagtgttcactaccaatgacttataggaaaacttgacattcagacctccaaagttttcttttgataggtacaggtaatttttggaatttataaattcctctttgctcccaacaaatactgtgcttcaagattttgtctaagcttgccaaaatggccccaactgagcagtggcttctcaattcta

SEQ ID NO: 82840 - DNA, 483 bp, Homo sapiens
taaacttggcaactgcttttatgttctgtctccttccataaatttttcaaaatactaattcaacaaagaaaaagctctaattttcattggaaataatttatatacttgtttagagcagagaaaaattaagaaaaactttgaaatggtctcaaaaaattgctaaatattttcaatggaaaactaaatgttagtttagctgattgtatggggtttctgaacctttcactttttgtttgttttacctatttcacaactgtgtaaattgccaataattcctgtccatgaaaatgcaaattatccagtgtagatatatttgaccatcaccctatggatattggctagttttgcctttattaagcaaattcatttcagcctgaatgtctgcctatatattctctgctctttgtattctcctttgaacccgttaaaacatcctgtggcactcttatttattaatcagttaaataaaatcatgaacatata

SEQ ID NO: 82841 - DNA, 487 bp, Homo sapiens
gtggcttccctggcttttggactcagactggggtttcactgtatgtttccctgattctcaggcctttggacttgaattgaattacagcatgaactttcctagttctctagcttgcatatggcatattgtgggacttcttgacctccataatcatgtgagctaattcccataataaatctcctcttatgtatctataattcatatagatatgatatctatatatcaatcccatagataaatagatgtctcatatatatatcaatgtctctatatgtagatgtctcatatatggtatctatgtatctgtatcatctctatatatctaatcatctaatatagatgtctcatgatatctatatagatatatctatatcatagatgcagagatatcatatatatgtctgtttctttggagaattctgactgatacaggttgcttccgccttttggctatcatgagtaatgccgctgtaaccatgggtatgca

SEQ ID NO: 82842 - DNA, 583 bp, Homo sapiens
cctcagtctcccagagggtggcgacccccgcgtcccgctccggcaccggcgggaagagagcgcctcccggaatctggtgggcaaagagggcggctccttacgtaggcgggcagagacagaagctggcgtggccgggctcctgctcccctattctccgacccccgccacctagcccgcgccacccagggctcctggatcgtctggctcggggcctcctccccgctgcgttccctccctggcggctgcagagccctcctgggcagcggaaacaaacttccccgagcaggaagcccgtgccccagcctcctctcggcaaggaccagcccgcggaacaccccggcccctcggcgcctgccctgtccttctggctacgggtccaggagggctggcatgagaccaatcgcgaccctgcggttccagagcctgcgtcccgcactgccgagaccacacagtctcctctcttaggagccttgacatggccctcttgacgggtggttgggggaccagggtgtgtgtatatgggggacagttggtcaaaagtggctttttgtttccccaaaaataaagacccctttgaaattta

SEQ ID NO: 82843 - DNA, 1025 bp, Homo sapiens
actccttcagttgtcctgtgagctgggcgttgcagtccgctcgaatcaagtgttggaaaccccccaccccacccctcagcccatcgtgaaacgacagctgtcagcctggggggtggctgctgaggaggtgcagcaggaatggggctgggcccttaggttttactttccaagccaatggcccctggaacatgccagcacacactgccatgtcctggggctaagagctgcctttagggacaggctcgtgttgtccagtttgccctgagagatgcacctgaccaggggcccgtcgtggctgcaacccacggtggtatgttagtgtttccaggcagttgtcagcagctgccgggtagtgtgtgtgtgcgacagcaggagagttcctggaggaaagggactggggacactttctcagaggttctcctgcctggaatcaagtgatgcgtgtccagaaggcaagagagggcggctccgcctggttaaagtttgggaacgggacggagccaactcctccttccaggactgtgggccccactcttttgcgctaacacttcccctccctcgggtcactgaggaaagagctgctctgtcccctccagtgccctgaaggtccctggcctccactggctgccatggcagggggcccttctgacaggggctgccccaagctgctgttcctcctctgaaccttcaccccaacacccagcccgtggcccctgcaagggggaccctgccagctgggaaacccaaaggcctgtccaaatgcgcgcaccaggaccgaggggagctccctccccacatctgctgcgaattgccagcttttaaatggatggggttttttatgggttgaacctctgttaatacttttgtacactctcactacagtttatatttttataggctattttctcaaggtgtttctagattccacatatctattttatataacaagttcttatgttatgtgtgtgactcccttgtgtgtatctgtgccagcctcagcctccgagttgcttttccctctggcc

SEQ ID NO: 82844 - DNA, 277 bp, Homo sapiens
acgtgctaggttgtctcacatctaggaaagagaatgttcatattatatagaaatgggcattttccctgtggcctgatatgaggtatccagaatattcctttaggtattattaagtcataggtttctgttttgatagaaacagcaggtggttcagttagtatttttgttgttgtaatagtagcttagatctcttgtttttgttttctttggccaagacagaaaacattctgccacacacattacttcatgactctggttatatattgagagcagcatt

SEQ ID NO: 82845 - DNA, 692 bp, Homo sapiens
aattcttgttagtattacaggttgagcatccctaatctgaaaatctgatatctgaaatgctaaaaaacccagaactttttgagggccaacaggacaccacaagtggaaagttccacaccttatgtgatggggcacaaagtgtaggggcacaacacatagtttattcagtgtccctaagggaaaaagactctctcaaccccctttagccgtgatatatctttgtatacatgcatagtatattagtcctcgcattgctatatgcattctcgcattgctataaagaactacctgagactgggtaatttataaagggaagagttttaattggctcacagttctgcaggctgtataggaaacataactcggaggcctcaggaaacttacactcatagtggaaggtgaagggcaaacaagcacgtcttatgtggccagagcaggaagaagagagagaggtgggaggtgccacacacatttaaacaactacatttcttgagacctgtgtcacgagaacagcaccaaaggggggaaatcagcccccatgatgcaatcacctcccaccaggcccacctccagcattggggattgcaatccgacatgagatttgggcagggacacgaatccaaaccatatcacctagattccctcacacaagtactccctcaaaggacaatatacaaatattccaaaatctg

SEQ ID NO: 82846 - DNA, 1224 bp, Homo sapiens
  misc_feature (820)..(820): n is a, c, g, or t
gtgcgcgcctgccttgaggccaggcctcagagaagggtgtcccagatgtaggcaaagcgtcctccatgtgttcctggaggaccgtcccaagtccttctccattctcccaacctcttgggcctggaagtcagacaagtaccggtgattgccggtttcttgtctgatttttgcacttctctggcaagctgccccctctgaagagttgactatttgggagttactcactgatggttcagccacttccagaacctaccccaagagcaagacttgaaaccaactcgcaccctcaaagctccggaagccattcagtgtttccatcttggctgagtgagttcttcactgaaactcaatttgactttgacagtcatctaatgagaactcaaaagtcattcttggttcagccacagtcaaagaacttgcagagcattctctgacgaggtcctcaaggacaactgagagaaggtcccattccaggtcttgcccaagtctttctgattggtgggacttaaatcacacccaaaattccagctgcaggagagctctgagatttcatctttccaacctctgtgtgctacgtgggggttggagcacttgctgacaagccttgcaaccaccattgacaggatgtcctccaccttttcaatctgatttgctctttgccatgcagacctgtggatgaagagccagagtcctccaaggtgaagctggactgaatatttctgtccataagactattagaatcccccaaagtgggataccagtgaggacctcaccagcagctgctgtctctccaatgcagggcaaggaaggactgtgcatngagtgtttcatgctgcggtggctcctccagtgtttcattgatgggagtgcctcatgaagccttccctggagcaccatctgggagtttcaggagcgactttttcagagctgggccccggagggacacgtggtcctcaagaaccttcaaaactccgtgaaggactccccaggaaaccctgggactggcacccccagtgcaggcagtctgcacccggaggcctggccaaaaggccccggtggcctaagtccactatgccaactgtgtgcccccggagggttccgaggccttgcttggttgcaccacccggccttcctgagggcgttggttcttgcagccttaaccctggccgaggccacggcgggccccattgccaattgctttccagccgggtttcccgatgggca

SEQ ID NO: 82847 - DNA, 885 bp, Homo sapiens
  misc_feature (481)..(481): n is a, c, g, or t
gtgcgcgcctgccttgaggccaggcctcagagaagggtgtcccagatgtaggcaaagcgtcctccatgtgttcctggaggaccgtcccaagtccttctccattctcccaacctcttgggcctggtcccattccaggtcttgcccaagtctttctgattggtgggacttaaatcacacccaaaattccagctgcaggagagctctgagatttcatctttccaacctctgtgtgctacgtgggggttggagcacttgctgacaagccttgcaaccaccattgacaggatgtcctccaccttttcaatctgatttgctctttgccatgcagacctgtggatgaagagccagagtcctccaaggtgaagctggactgaatatttctgtccataagactattagaatcccccaaagtgggataccagtgaggacctcaccagcagctgctgtctctccaatgcagggcaaggaaggactgtgcatngagtgtttcatgctgcggtggctcctccagtgtttcattgatgggagtgcctcatgaagccttccctggagcaccatctgggagtttcaggagcgactttttcagagctgggccccggagggacacgtggtcctcaagaaccttcaaaactccgtgaaggactccccaggaaaccctgggactggcacccccagtgcaggcagtctgcacccggaggcctggccaaaaggccccggtggcctaagtccactatgccaactgtgtgcccccggagggttccgaggccttgcttggttgcaccacccggccttcctgagggcgttggttcttgcagccttaaccctggccgaggccacggcgggccccattgccaattgctttccagccgggtttcccgatgggca

SEQ ID NO: 82848 - DNA, 402 bp, Homo sapiens
aaaggaaaaaaattcccattattatttccttcaaccccctctaccttctatgccaccattactcaaaagtcactcaaacattttgctggctgacatgacgccacgctgtcacttgatcaggtgtggagtaccacatggaatgaataaatacttatccacaaccgcatattaaatgggaattcgcacaggcgggctctggagacaaagacgtttctatacagaaatattaactaagaatttaagtaaatggccccactggaaaaaaaaaaggtctgaagtagcaatataaactatatttaatagcaacaaaaaatattttccttttgggaaagcaatttgggcttctaaaagttactgcctttcacgtgacttagtacagtatgcctgaattctttcatttcc

SEQ ID NO: 82849 - DNA, 356 bp, Homo sapiens
cactaagcctctaaagtaccacctctaaaggccactcagctactgggtgacaagctgatcacatcagaccccttccatcctggaaggggaagtgctgaatctggtcctaaataaaagttgcctttcctgcccacagaagctcagccacagccccaacgcccaaaggctcacagagtatttgattgaacgggacagggtaccgagaacatggcattaaacaaagggacccgctttatagcagaggacgtgccacaatgggcgcatgactgtgagatccactgggcctgccgtatcctccaacacccagaaatgccagcctgatggagcaatggaggggggagccacagtgccagctg

SEQ ID NO: 82850 - DNA, 357 bp, Homo sapiens
gttgagtctagaggatccctggccaggctctctactaattctttctttctatctatctctaggcatccaaaatctatctatctatctatctatctatctatctatctatctatctacacctatctatatcaaatctatctatctatctctatccatccaaaatatatctatctatccatctatacctatctaaaatctatctatctccatccaaaatctatctatctatctatctatctatctatctatagcactccaccatagaaaaggataaaatcatgtcctttacagcaacagaactggaggcgattattttaggtgaaataacccagaaacagacagccaaataatgtatgt

SEQ ID NO: 82851 - DNA, 138 bp, Homo sapiens
gttttaaacaaccagatctctcaggaactcattgttgttagaaaaggaattaaaagaaatcaaagagtgtgtaagcagaaactcagttgtacgtaagaaaacccaattccccctgagaaagagaaagagctggagtcc

SEQ ID NO: 82852 - DNA, 933 bp, Homo sapiens
caaccacggaccagcacctcaaggaagaccacctgttgcagctgatttcctgcccaggtggaagttgttagaaaggttgggttcatcttcctcaggacttgcgtggtgcttctggcacccaacacaaacatgggagcatcctcggaaaagggacttaaaagcagtgaatctcagctgaagtcaagcagatccttttcaccattactttttggctactgctgaggcagcacctcacagagcaaaaagctctgcaagaaaaggaagctcttttatcggaagtcaaaattggcagtcaggaaaatgaagaaaaagatgaggaacttcaagatatacaagtggaaggagagcccaaagaggaggaagaagaggaagcgaaggaagagaagcaagagagaaagaaggtagagcaagaggaagctgaagaagaagatgagcaggacatcatgaaagtcctgggcaatctggtggtggccatgttcatcaagtactggatctacgtctgcggaggcatgttcttcttcgtcagcttcgagggtaaaatcgtaatgtacaaaatcatctacatggtgctgttcctgttctgtgtggccctataccaggtgcactatgaatggtggaggaaaattctaaaatatttttggatgtcagtggttatttacactatgctggtgcttatctttatatacacatatcagtttgagaacttcccaggcctgtggcaaaatatgactggactgaaaaaagaaaagcttgaggatcttggcttaaagcagtttactgtggctgaactattcactcgcatattcatcccaacctcctttctgctggtgtgcattttacacctgcactacttccatgaccggttccttgaactcacagacctcaagtccattcccagcaaagaagacaacacccatctacaggtgagccact

SEQ ID NO: 82853 - DNA, 301 bp, Homo sapiens
gatgaaatattttaaagctaaataccctgagactctcactatagtattttttaaatgtcaattatatgtgagccttttcgtttatttacctgatttgtcttaaaaaacgatgtataacttctttcacactttgaaaatttacctgaaggagtagatatatacgtggttcttgttctgccctctggagcaactgagatatactctgtcttacatatgactgcctgtcagatagctgaagatagtcattacccacagagaaggaagacatcagttctacataaggaagtgttctgtagataag

SEQ ID NO: 82854 - DNA, 613 bp, Homo sapiens
tgtagagacaggggtcttgctatgttgcccaagctggtcttgaacccagcttcaggcaatcctcctgccttggcctcccaaagtgctaggattacaggcgtgagccacactgcacctggcctcaaactgccattgttttaggcttctctaattacacattttaaaatgtataacctttctctggcagaatatatgggctgcctatttacaacagatgtatctattaaatcttcagaattttttctactcatatagaattttaaacatcttcattaatatatttctttctctatttatatcacattgtatgcatatatgtaaccactggacttttttaacttaagtaatcaggaggttgagagttccgcacagtttgcataaatatggtgtactggataggaatgtgggatctggaattcaggagacatagactgcaatcctggctatcaaatttgctagttatatgaccttggtaatttacttaacctctctgttcctcacatcctcatttataaagtggctataacacctaccccatagagttgaataagaaatgaagaatacaaaaaacactcttagcacagagtatagcatgcatatagcaaatactaaa

SEQ ID NO: 82855 - DNA, 515 bp, Homo sapiens
gctcatcataggggaaacctgctgctacatcatgagatagccctgtggaaaggtccacatgagtgaactttgaagcatatcctcccccagtttagcctttagatgaggaccacagccaaatagcttgactgtaagccagatagcttgactcatgagggaccttcagccagaggcatcttttgagccatacgaattcctgacccatagaaactgcaagacaataaatgttgttttaagttgctaaattttagggtaatttgttacacagtaataggttaataatacactggcccagattaggaaggttctgccatccatcccagccatcccaaacaactaccagaataatggattaaaacgttaactgttttaagtcactaagttttgggcagcatgataacaacccagcaaaaagctaactgatacattgattatttattgcatttcttcctccactattcttctctaacagatgaccaatactaataaactactgtgaacactttcatgtttta

SEQ ID NO: 82856 - DNA, 673 bp, Homo sapiens
tgcagttttgtgaataagctgtagggggtaagtatagtaatggggagatcaattagcaggctatatcagtcgtctaggtgggagatactcatagtttggaccagggtagttgcagttgatgtggggagaaattgtcagttttgagatatatatttgaaggtagagccatcaggatttcccgacagattggatgtggattatgagagaaagtatttttcctggcgagtggtaggatggagttacagttagctgagataaggaatatctcgagtgaagcagtttccagggagagatcaggagttcagttttgggcatattaacctttgagatgtctaataacagacatctgagtagacatgtcagttaagcagttggtataggaatgtgaagttccatggagaagtttgggctagaggtacatatttgagaatcagttcatttggatgatattgaaagccatgagactggatgaaattaccaagggagggagtgtagataaaaaaagaggtcccaggccaggtgcagtggtgtgagcctgtagtccctgctactctggaggctgaggcaggaggatctcttgagcccaggagtttgaggctgtattgtgttatgattgtgcctgtgaatagctactgcattacagcctgggcaacagaatgagactttgtctctt

SEQ ID NO: 82857 - DNA, 377 bp, Homo sapiens
aaaaactgcctctgtgccatgtgcatttaaaggagttcctcaagtgtttttaatgccaacacagcccttttctagggttcacatgtatttactttttttaagaggcaaggtcgctaggagtgcgtgcgcggcctgaattttctacataattctattactgtaggaaaaaaaactccatctcagattttcaggatctacttgaaaaacatacatacatatatattttttgagacagcgtcttactctgtctccaaaaaataaaaataaaaacataaaatgtctagtgtggctggaagaggcagattacacctgtaatcacagtactttgggaggccaagatgggaggactgcttgaacccaggaatttgagaccagcc

SEQ ID NO: 82858 - DNA, 643 bp, Homo sapiens
ataccacaggtgtcctagattgtcaacagaccatttaatcatttttgttaacaaagcaggtgacaattgagccctaatttgcgttatcattagttgttacaggatcttgcttgttctcctgaggccacgccacgatttccgagaagcaggttgcacactcagcagtctcccactagccagtggcactgcaggtgcaggggctgcctcctggacctttcaggacgctttgcaaggtcactgaggatctccattgcacatttggtagaattaaaagactgccagactcagtcttactgttgttagtgtattcgtgctgtcaatatgtgatgaggacatattatattccgttattctctttagctcaaggaagaataaagaatttggaccaaaattacaaccacattatgacgaattttctaagcaaaagaaacaaagtaactgctgaggttaacaaagatgtaataattctcttcacacagccttgtactgttttattgactgtattatcacaaatcctgagcttaacgaaagtctttataagtcagctcatgaaaacaggcacgtggccagtaagaatttaatttcataccaataacacttcagacttcggatgtatttaaggctgtttgcacatatttataga

SEQ ID NO: 82859 - DNA, 455 bp, Homo sapiens
catctgttctaaaaactcagattgggctgggcatggtggctcacacctgtaatcccggcactttgggaggccgaggcaggtggatcaccggaggccaggagttcgagaccagcctggccaacatggtgaaatcccatctctactaaaaatgaaaaaattagccaggcatggtggcaggtgcctgtagtcccagctactcgggcggctgagggagaatctcctgggagatggaggttacagtgagctaagatcgcaccactgcactccagcctgggcaacagagtgagactgtctcaatcaatcaatcaatcaatccatcaataaatataaaactcagcttgaagccctggctaccctgtgaagtcttcactaccatccagcccctggaattcattccattttgtcaattccaggaacatatattttactatatacctgtgctacccaatacagta

SEQ ID NO: 82860 - DNA, 585 bp, Homo sapiens
ttcaaagcgaacaaatcagtggcaggtagcacattcacagtgctgtgcacgcaccacctctatctagttctaagacgtttccattgcccccaaaggaaccccgtatctgttaaacactcactcccacaggcccctcgcaacccccagtcagcttctgttatttgcccattctggacatttcatataaatgggatcattttataggtgaccttctgtgtctggctggaatgttttcgaggtacacccatggcatagcacagatcaggactttgctcctttttaaggctgaatcatattcccaagtatgaaaataccgcaactgggccgggcgcggtggctcacacctgtaatcccagcactttgagaggccaaggcaggtggatcacctgaggtcaggagtttgagaccagcttggccaacatggtgaaatcccgtctctactaaaaatacaaaaattagctgggtgtggtggtacacacctgtaatcccagctacttgggaggctgaggcaggagaattgcttgaacccgggaggtggaggttgcagtgagccgagatcgagccactacactccggcttgggtga

SEQ ID NO: 82861 - DNA, 343 bp, Homo sapiens
gggagggaagcccagccatggctgatgcgtggtgggacacgggggcctctggtgtggtcagaaggaatttgcacaagtggtttctggccggaccgtttccttggttttgttgctgtgtaaataagtcgtgggaagcacaactgtacggcgtctacctttccttgctgttcgtgaccatctgccctgctggggagagcttgggatgttgcagagcctttaggaacaggcggtggtcacaagggcctcccctcagcattggttgcaaaatggacctgagttttccagtaaagtcctgaagggtagcatgtgaggctcaaggatgacccctgggcagcctgccagc

SEQ ID NO: 82862 - DNA, 528 bp, Homo sapiens
aacaacaataaaaaggcaaaaaattctatcagaagaactgcaacagaacaggagatggaattccagggaagtaccagacatttctatcagagcaagacttggaggttggacaagccctctgaaagttactcccttacaacctcatcatgaaggacgctcattaagtcacatatttacatttgatgaggaggcaacatgtacagatgaaggtgaaccacttgttcaaacaaacaagaaatgtaatgcaaaggactcattttacaagtcctctacacaaaaagcttatgaagatgttccttgggataagatgctaccaccaaaacttgttccagaagaaacaacattggaaaaaaccgctgaccccatctcacagtgttttactctgaaaagatataaaggggtgccagcaataactcagatggttggtgagctctgggacagatttcaaacaagatctttcttggcaccagtcaaaccaattaattttgtgagttcaagttctagaagtaaatatattcctctctatac

SEQ ID NO: 82863 - DNA, 502 bp, Homo sapiens
gtattttcccagacaggaaggaagaattaaaactagttacaagtttacaagttagaaagaaaacttgtaaaaacttcctctggtatatactaagcaaaattttataatctgttagtttttgaaaaacacatttttcatttttacatcatttaagtgtaattgctctccaagtcccgtcccccagttccagggcataattacaagttttcattctgtttatttagcgcgtggaaaagacacatttccttagaaagatttatcatcatctttgacactccaataagacataaatatgttgggaacaggcccccccaaaatctcgccatcaactggccccaaaactggccataaacaaaatctttgcaccactgtgacatgttcgtgatgggccgtgacgcccacgctgggaaggttgtgggtttaccagaatgagggcaagggaacacctggcccacccgggcggaaaaccgcttaaaggcgttcttaaaccacaaacgatagc

SEQ ID NO: 82864 - DNA, 381 bp, Homo sapiens
gtttgatttgcttttttttttagagttttacatcagtgtttttcaggaatattggtctttcattttcttttcttggaatattttctagttttactttgtcagagtaaattctggcttcacagaattatttgtagtctctcctgtcttagtttattcatgctgctataacaaaataccacagacaaggtggtaataaataacacaaatttatttttcccagttctggaggctaggagttcaagaagctggcaagttcaatgtctggtgagaacccattcttcataggtggcaccatctaggtgtccttacatgacaagagatggaaggacaaaaagatgtgaactattgtgaagcccttttttaagggccttaaatccattc

SEQ ID NO: 82865 - DNA, 333 bp, Homo sapiens
ctggtgacttctttcaaatggtgactgatgtgataaggtgtacaatagtaatgctggtaaatattttcatagacaaggaattactgaagtgaccattacaatcaaaatcattttaattacgtgagacttcaactaatttaaaatcctgtttccacaggagcctccttgagcttctaaaactgtctccaccttgattacctggagatagtctgggaaattttcttctatctttcagtgagcaactaggggaattcaggtagacaggcagctgggtagatgataggtaggagctgggcccctaagaaggctattctgctctccaacgaagcctgg

SEQ ID NO: 82866 - DNA, 2888 bp, Homo sapiens
  misc_feature (1782)..(1782): n is a, c, g, or t
agaaggaaaccagagatctggtgctattacgtcccagcgtctgagagaacgagtaagcacagaattcaaagcattctgcagcctgaattttgaaggagtgtgtttaggcactaagcaagctgatttatgataactgctttaaacttcaacaaccaaaggcataagaactaggagctgctgacatttcaatatgaagggcaactccacccttgccactactagcaaaaacattaccagcggtcttcacttcgggcttgtgaacatctctggcaacaatgagtctaccttgaactgttcacagaaaccatcagataagcatttagatgcaattcctattctttactacattatatttgtaattggatttctggtcaatattgtcgtggttacactgttttgttgtcaaaagggtcctaaaaaggtttctagcatatacatcttcaacctcgctgtggctgatttactccttttggctactcttcctctatgggcaacctattattcttatagatatgactggctctttggacctgtgatgtgcaaagtttttggttcttttcttaccctgaacatgtttgcaagcattttttttatcacctgcatgagtgttgataggtaccaatctgtcatctacccctttctgtctcaaagaagaaatccctggcaagcatcttatatagttccccttgtttggtgtatggcctgtttgtcctcattgccaacattttattttcgagacgtcagaaccattgaatacttaggagtgaatgcttgcattatggctttcccacctgagaaatatgcccaatggtcagctgggattgccttaatgaaaaatatccttggttttattatccctttaatattcatagcaacatgctattttggaattagaaaacacttactgaagacgaatagctatgggaagaacaggataacccgtgaccaagtcctgaagatggcagctgctgttgttctggccttcatcatttgctggcttcccttccatgttctgaccttcctggatgctctggcctggatgggtgtcattaatagctgcgaagttatagcagtcattgacctggcacttccttttgccatcctcttgggattcaccaacagctgcgttaatccgtttctgtattgttttgttggaaaccggttccaacagaagctccgcagtgtgtttagggttccaattacttggctccaagggaaaagagagagtatgtcttgccggaaaagcagttctcttagagaaatggagacctttgtgtcttaaacggagagcaaaatgcatgtaatcaacatggctacttgctttgaggctcaccagaattatttttaagtggttttaataaaataataaaatttcccctaatcttttctgaatcttctgaaaccaaatgtaactatgttttatcgtccagtgactttcaggaattgcccattgtttttctgatatgtttgtacaagattgtcattagtgagacatatttacaacctagaagtaactggtgatatatctcaaattgtaattaataatagattgtgaataatgatttggggattcagatttctctttgaaacatgcttgtgtttcttagtggggttttatatccatttttatcaggatttcctcttgaaccagaaccagtctttcaactcattgcatcatttacaagacaacattgtaagagagatgagcacttctaagttgagtatattataatagattagtactggattattcaggctttaggcatatgcttctttaaaaangctataaattatattcctcttgcatttcacttgagtggaggtttatagttaatctataactacatattgaatagggctaggaatatagattaaatcatactcctatgctttagcttatttttacagttatagaaagcaagatgtactataacatagaattgcaatctataatatttgtgtgttcactaaactctgaataagcactttttaaaaaactttctactcattttaatgattgtttaaaggtttctattttctctgatacttttttgaaatcagtaaacactgtgtattgttgtaaaatgtaaaggtcacttttcacatccttgactttttagatgtgctgctttgatatataggacattgatttgatttttattattaatgctttggttctgggttgtttcctaaaatatctgggtggcttaaaaaaaactctttaacttgtaataaacccttaactggcataggaaatggtatccagaatggaattttgctacatggggtctgggtgggggcaaagagacccagtcaattacatgtttggtaccaagaaaggaacctgtcagggcagtacaatgtgactttgaaaatatataccgtgggggtagttttaccctatatctataaacactgtttgttccagaatctgtatgattctatggagctattttaaaccaattgcaggtctagatacctccttctcagcactattaaagctcctaagttagaggagtgcctaaaactgagttacctaaagtttacttacattaaagtatgaatattaattttagaaatttgagactttattctgtaccagccctgtataataacaggttatctaggaccttcctctgaggtaggtctaaatactgatctctgaggcggaactaacgttttggggactcagcatctctgccaggttccaggattatagacagaagagtcctgtcataccactttctggaaaagtcctaatttcatgtaatccttttattttcaataaaaacaaatagctaaatgtataaccaactatgatgttatgttttcaataattttgtaaaacagctcatataaataaaatttttaattggaagaaaaaacgt

SEQ ID NO: 82867 - DNA, 213 bp, Homo sapiens
ttttcctcaccaaagtacaatgctcagaagaaattagaaaaaggtctattttacacaataaggttaatagggtattttgctttataattttaagacatttttaatttcgtttaaaaagcacactacaggccagtggtggtggctcatgcctgtaatcccagcactttggtagggactgagcccaggagttggagaccagcgtgcgcaacatag

SEQ ID NO: 82868 - DNA, 746 bp, Homo sapiens
gcaatgcagaaatcccatgtccccaaggacacgcgctgccgttcagaagtagcaggagagggggtggaataaatcatttcctctgatcttgttagtgttgagaatattttagggggtagcaaatgcattgcaggtctaataccagaaggctactgcaggcagaaggaaaaaaaataacaaaatttctctgtttttcctttaaatatgatttcctctttatatatttttaaaattgttttatgaggggtttttcccccctttctgattctgcaggttcttccttctacattatcatgttttctgtcatccagggattcttcctgatactgcccctggcagctgtaatatacttaatgtcaattgttactccagtaatatgttcggttcatttagtgtaaatggtcctatcattctgggaggtttccctgagccaagtgagaaatggctttcatgaatatccaggcttgcatggctagaggaatctgccacgtgcgagcctggtaattattttttctttctagaaaatatactgtatttaatttttaaaatgccagcgatttggggttttttaagacaatgggcagttgtggaaagaatagagcagttgaaatttcttcaagttgggagcagaggcacagaatgtattcatcttgaggagttaaactttgatgtgaggagatatacatagttgcaaactgtgttttttcccttgtcccctaagaaataaaattaaaaggtgatatgta

SEQ ID NO: 82869 - DNA, 500 bp, Homo sapiens
tgggaatagggaccaaactccctctttcaagcctttttgtagtgacattaattcatttatgaggatgccaccatcatgacataatcatttcccaaaggatttcacctcctcccactgttgcattggggattaattttccaacacatgaattttgagggacacattcaaaccatagcaactggtatatagtaactaggtggcccgatggtcttcataataaagttatattttactttagtataaaataaaaggtcaaggcttgtaactgtgatgagactgcttcatgtatatctcccctagtgactatcacagttgactgacagctccaggggttcatctttgtatccatcactacctatagtccaaaatccccatctcacagctgttgtcagccaatgacaaagcatagtgaggtgctgttcctgctcaatatggaggaaaactttggcttgataactctccattggcctgccaaaatatgttaagtattgtgctactat

SEQ ID NO: 82870 - DNA, 772 bp, Homo sapiens
aaatgtaaaaattagcggggcacagtggcatgcgcctgtagtcccagctacttgggagactgaggtggggggaatacttgagcccgggaggtcaaggttgcagtgagtcatgatggtgccactgcactccagcctgggtgacagagagagaccctgtctcaagaaaaagaaagaaaagaaaagaaaagaaaaaaacaggattgtaacaaatccattcacttcctgtccctctctctttacagcttcagcagcacagcctccatctttggacccaagcttggaaagcatagctccctcttttagacgttgtccatttcaaagcatctccagtctggatcaacagaaggatgatgtgtttatgtccttccctgtctgttccttaaagcaaccttaagtctggaacatgaattctcttttttaaacaaatttaaaaactttgtagagaattcaaaaggtacaaagggtagccacacaggctaccattgtcaccgcttccttgtagcttctggactcttggtggcatttgccaattcaaacaaagaaaaagtctatgtgaatagttttgttttcccctgtgactttaagctacttaaaagaaaatttggccagacaccgtggctcactcctgtaatcccagcactttgggaagctgtggcaggcagatcacgaggtcaggagtttgagaccagcctgaccaacatagagaaacctcgtctctactaaaaatacaaaacaattagccgggcgtggtggcacatgcctgtgatcccag

SEQ ID NO: 82871 - DNA, 503 bp, Homo sapiens
acagcgtatctcacataacattacagaggtctcaaaatctggagccagtgtaccttaaatggcaattatattgggttttcagttcttgtatttctcttctttctttctttttttttgagacggagttttgctttatgttgtcccaggctgtgggtgcaacatggtgcgagtctcagactcacctgcaaacctcagacctcccaaagtatctgaggattacagagcatcctgccaccacacccgtgctaaattttttactgtttagtggtagaagacggatgtttacaccaatgttgggccacggctggatctcaacacatcctgaccttcaagttgtattgcgcccacctcgtgcctctcaacagtgctgcaggttacagagtgtgagccacatgtgcccgcgccggatagttcaagcaattctcttgcctcagcctcctgagtagctgggattacaggtgcccaccaccacacccagctaatttttgtatttttagtagaga

SEQ ID NO: 82872 - DNA, 237 bp, Homo sapiens
cctgaaacaaattataacaactttattaactccagttcactcatctattaaaagatcataataatagcactctatctcacatggcaatgttaaggatttaatgagataatataagtaacatgccttgtgcagggcctgacacacaataagtacagggcatgtttttaataggtcactgtccaaacacatatcctgatcttgagggtcttctgctcttctcttttatgcttcttcatc

SEQ ID NO: 82873 - DNA, 435 bp, Homo sapiens
attcgcggccgcgtcgactttttttttatgcaaatcattgagtgttttattgaacaattaagaaatgtataaccatttcattactttacaatagtaaaactgatttgtaactttttctgtgaatatgcgaatttgtatttgaaagagtttagacttgtattgaatgagatgtatcttgactataaagtgttttctttttcagtacaaaatatacaaaccagtacatgttttaaacataaatataactgagaataggttatgcttctactcaaatgcacttgtggaaagtaccattcatccgcaaagacacttttaataagctttgacaggaagacaaactcgacagtgttgtcagattttctatttaaaattacatttatattaaccccaacctttcattttagcaaaatggtttatggtttcttctactttata

SEQ ID NO: 82874 - DNA, 179 bp, Homo sapiens
  misc_feature (1)..(1): n is a, c, g, or t
nccccctggaaatcatagtatcagcaggagaactagccagagacagcaagaggggactcagtgactcccgcggggacaggaggattttgtgggggctcgtgtcactgtgaggatattgtagtagtaccagctgctatagtgggaggggagaactactactacggtatggacgtctgggg

SEQ ID NO: 82875 - DNA, 165 bp, Homo sapiens
  misc_feature (1)..(1): n is a, c, g, or t
nccccctggaaatcatagtatcagcaggagaactagccagagacagcaagaggggactcagtgactcccgcggggacaggaggattttgtgggggctcgtgtcactgtgaggatattgtagtagtaccagctgctatcttgctactactactacggtatggacgt

SEQ ID NO: 82876 - DNA, 700 bp, Homo sapiens
ccgtgcccagccaatagaaatgtaaatttctgctagtgaaagatgtagtgaatgagaaatttggggtggagcctatcaatctgtggtttagcacgccacccagttgattctgatgaccgctgaagcctgagaatcactatagataaccatttcatcccacctctgctggagtctttcaaagcaaatgctgtcattttatttgtaaatacattagtacataaactgtcttttttaaaacataacacaaattggcgtaacatttagagagcagcctgctaatgggtccccatatttaaataggcttaccctctgatctcttaattccactcatactatctactttaaagaaataactggacagatgcttcatgatgtctatacaagggtgcttaaatgcctagatggggaaaacttagaaataccatgtctcatagtgagggattggctaaataagttatgttttatccagtcaatggaatgctatgaaatcattatacagaaggatgtccctgatgctgttgttacgtaggaaaagcagttttcaaaccacatattgggtggtcccattttcttttctctattcaggatgtgtgtatgtgtgtgcgcaccatgtgcatgagaggggatgtgtttttgttgtgtataataacttaagcacataggacaaaaggctgaaatgttacacaccaaaacacgaata

SEQ ID NO: 82877 - DNA, 452 bp, Homo sapiens
cactgggaccccagcctggcaacggctagtgcgtcgtcggtgctcagttagccccaacatctctttcctttcctccaacaggaaacacaccttccacctctaaaccttagctccaccaagctccaaggggagagaagagagggcatatgggaatgttttgctggaccccatactgcactcccaggccaggaagctctgcatcaggaagccagcaccattttcacctcctctggggtaggactgaggggaccatggccaagaggaaacagatgcccccttagctcctccctgggtagcctgagcgggccagggcctgagagcatgccagttttagcctgtcttcctgtccttcccagccagacccctctcatcctcctcccccagtggttttctcattacctgtcactgacggagagcccctcagaggtcaaggccaaagtgaggtgggctct

SEQ ID NO: 82878 - DNA, 2461 bp, Homo sapiens
tgttgcatacagatgagttggcagccggtctgagctggcccacagactcataaaatcaacagggcctcgggtaccctcacccagcatatccaaactcttgcatcaaaggtgcagggacttgctcacatcgagaatctggttgctttcttggagaccaagaaaatgagtttttgtttctacatttactccagcaatccatgagatcagggtgttgacagaaagtatgttcaaacatcttcggaaatgggtcgtcactcgcttttttgggcattctcggcaaagagcaaggctagtctccaaagatggaaggtgcaacatagaatttggcaatgtggaggcacagtcaaggtttatattctttgtggacatctggacaacggtacttgacctcaagtggagatacaaaatgaccattttcatcacagccttcttggggagttggtttttctttggtctcctgtggtatgcagtagcgtacattcacaaagacctcccggaattccatccttctgccaatcacactccctgtgtggagaatattaatggcttgacctcagcttttctgttttctctggagactcaagtgaccattggatatggattcaggtgtgtgacagaacagtgtgccactgccatttttctgcttatctttcagtctatacttggagttataatcaattctttcatgtgtggggccatcttagccaagatctccaggcccaaaaaacgtgccaagaccattacgttcagcaagaacgcagtgatcagcaaacggggagggaagctttgcctcctaatccgagtggctaatctcaggaagagccttcttattggcagtcacatttatggaaagcttctgaagaccacagtcactcctgaaggagagaccattattttggaccagatcaatatcaactttgtagttgacgctgggaatgaaaatttattcttcatctccccattgacaatttaccatgtcattgatcacaacagccctttcttccacatggcagcggagacccttctccagcaggactttgaattagtggtgtttttagatggcacagtggagtccaccagtgctacctgccaagtccggacatcctatgtcccagaggaggtgctttggggctaccgttttgctcccatagtatccaagacaaaggaagggaaataccgagtggatttccataactttagcaagacagtggaagtggagacccctcactgtgccatgtgcctttataatgagaaagatgttagagccaggatgaagagaggctatgacaaccccaacttcatcttgtcagaagtcaatgaaacagatgacaccaaaatgtaacagtggcttttcaacgggagtaaagcaaagtctctaaagctcctagtacctagaagcattatgaagcagtcaacaatttaggggtacgaaagtaggatgagagccttcaaagtctaccagcacaaagacccctgagccccgcaattgtgatcccacaagacatgcatctccacaaggctactgtattagaacgtgcaatgcatttatatgaaactggtgtatggaagacataggtgctctcttgaaatcttaaatatgattatttgagctcatataaggtggattggagcagataaaattatcaaaagtttcatgaacaggccaaacaaaatattttttaaagtttccttaaagaagttatgaactttagaaaggatcaggggacaataataatctcattttgattctactgataagaatgactccacttttaatgtggacttttactcatggaaaaattgtctcctaatttggggagatgaaccaaccaatcaatgacaagaaaacgcttacacaaagaacaatttgaggctctaagcttctcatgtggtacgtttagacagaggctaaatctgcacactagaatcttgatgataccttcctgcaagacagaatgctttagttaaaagtggtgatgatatttctttcaatctgtattggatggcttaaagggctataaatctgtttataaagagcatttcctgctcttcgaagacagcaatgaggagttggaaggtgcaaagtcagtagagaagggaatgtatcattaatgcacctgagaagaaacagtttcatgtgttcctccacctagagtttgtactggaatgctatttctaaagaagaagtgggaaagagagaggaatgggatggagccccacagtcagaatgttactatgtctttctttccctgacagcccatcttcctaaaagggaccagcttatggaaggctcgaccttgaggggaaagttttactgtgaaagtcttcttcagatccccacctgcatcattccgaatgtgtcctggaaaaaaactggtactcaaagctgcttaggaatcaaaatgttttcagtgtgttgattaatatagtaaatttctgaaactgtgaaaaaaaaaaagat

SEQ ID NO: 82879 - DNA, 2346 bp, Homo sapiens
gtctgcatagaaagaccaacaaccagcaccacttccttgctttttccagccatgaatgcttccagtcggaatgtgtttgacacgttgatcagggtgttgacagaaagtatgttcaaacatcttcggaaatgggtcgtcactcgcttttttgggcattctcggcaaagagcaaggctagtctccaaagatggaaggtgcaacatagaatttggcaatgtggaggcacagtcaaggtttatattctttgtggacatctggacaacggtacttgacctcaagtggagatacaaaatgaccattttcatcacagccttcttggggagttggtttttctttggtctcctgtggtatgcagtagcgtacattcacaaagacctcccggaattccatccttctgccaatcacactccctgtgtggagaatattaatggcttgacctcagcttttctgttttctctggagactcaagtgaccattggatatggattcaggtgtgtgacagaacagtgtgccactgccatttttctgcttatctttcagtctatacttggagttataatcaattctttcatgtgtggggccatcttagccaagatctccaggcccaaaaaacgtgccaagaccattacgttcagcaagaacgcagtgatcagcaaacggggagggaagctttgcctcctaatccgagtggctaatctcaggaagagccttcttattggcagtcacatttatggaaagcttctgaagaccacagtcactcctgaaggagagaccattattttggaccagatcaatatcaactttgtagttgacgctgggaatgaaaatttattcttcatctccccattgacaatttaccatgtcattgatcacaacagccctttcttccacatggcagcggagacccttctccagcaggactttgaattagtggtgtttttagatggcacagtggagtccaccagtgctacctgccaagtccggacatcctatgtcccagaggaggtgctttggggctaccgttttgctcccatagtatccaagacaaaggaagggaaataccgagtggatttccataactttagcaagacagtggaagtggagacccctcactgtgccatgtgcctttataatgagaaagatgttagagccaggatgaagagaggctatgacaaccccaacttcatcttgtcagaagtcaatgaaacagatgacaccaaaatgtaacagtggcttttcaacgggagtaaagcaaagtctctaaagctcctagtacctagaagcattatgaagcagtcaacaatttaggggtacgaaagtaggatgagagccttcaaagtctaccagcacaaagacccctgagccccgcaattgtgatcccacaagacatgcatctccacaaggctactgtattagaacgtgcaatgcatttatatgaaactggtgtatggaagacataggtgctctcttgaaatcttaaatatgattatttgagctcatataaggtggattggagcagataaaattatcaaaagtttcatgaacaggccaaacaaaatattttttaaagtttccttaaagaagttatgaactttagaaaggatcaggggacaataataatctcattttgattctactgataagaatgactccacttttaatgtggacttttactcatggaaaaattgtctcctaatttggggagatgaaccaaccaatcaatgacaagaaaacgcttacacaaagaacaatttgaggctctaagcttctcatgtggtacgtttagacagaggctaaatctgcacactagaatcttgatgataccttcctgcaagacagaatgctttagttaaaagtggtgatgatatttctttcaatctgtattggatggcttaaagggctataaatctgtttataaagagcatttcctgctcttcgaagacagcaatgaggagttggaaggtgcaaagtcagtagagaagggaatgtatcattaatgcacctgagaagaaacagtttcatgtgttcctccacctagagtttgtactggaatgctatttctaaagaagaagtgggaaagagagaggaatgggatggagccccacagtcagaatgttactatgtctttctttccctgacagcccatcttcctaaaagggaccagcttatggaaggctcgaccttgaggggaaagttttactgtgaaagtcttcttcagatccccacctgcatcattccgaatgtgtcctggaaaaaaactggtactcaaagctgcttaggaatcaaaatgttttcagtgtgttgattaatatagtaaatttctgaaactgtgaaaaaaaaaaagat

SEQ ID NO: 82880 - DNA, 2631 bp, Homo sapiens
tgttgcatacagatgagttggcagccggtctgagctggcccacagactcataaaatcaacagggcctcgggtaccctcacccagcatatccaaactcttgcatcaaaggtgcagggacttgctcacatcgagaatctggttgctttcttggagaccaagaaaatgagtttttgtttctacatttactccagcaatccatgaggtttcttctctactgtgccttcatccccatcctgggccctgacaaagacagtgtgacaagttctgagccccacaggtggaatcccaaaccaagcagctcttgctggtcaccccaagatctacttatacatgaagttttgaaaatcatctcctgaacctcttctgacagagatcagggtgttgacagaaagtatgttcaaacatcttcggaaatgggtcgtcactcgcttttttgggcattctcggcaaagagcaaggctagtctccaaagatggaaggtgcaacatagaatttggcaatgtggaggcacagtcaaggtttatattctttgtggacatctggacaacggtacttgacctcaagtggagatacaaaatgaccattttcatcacagccttcttggggagttggtttttctttggtctcctgtggtatgcagtagcgtacattcacaaagacctcccggaattccatccttctgccaatcacactccctgtgtggagaatattaatggcttgacctcagcttttctgttttctctggagactcaagtgaccattggatatggattcaggtgtgtgacagaacagtgtgccactgccatttttctgcttatctttcagtctatacttggagttataatcaattctttcatgtgtggggccatcttagccaagatctccaggcccaaaaaacgtgccaagaccattacgttcagcaagaacgcagtgatcagcaaacggggagggaagctttgcctcctaatccgagtggctaatctcaggaagagccttcttattggcagtcacatttatggaaagcttctgaagaccacagtcactcctgaaggagagaccattattttggaccagatcaatatcaactttgtagttgacgctgggaatgaaaatttattcttcatctccccattgacaatttaccatgtcattgatcacaacagccctttcttccacatggcagcggagacccttctccagcaggactttgaattagtggtgtttttagatggcacagtggagtccaccagtgctacctgccaagtccggacatcctatgtcccagaggaggtgctttggggctaccgttttgctcccatagtatccaagacaaaggaagggaaataccgagtggatttccataactttagcaagacagtggaagtggagacccctcactgtgccatgtgcctttataatgagaaagatgttagagccaggatgaagagaggctatgacaaccccaacttcatcttgtcagaagtcaatgaaacagatgacaccaaaatgtaacagtggcttttcaacgggagtaaagcaaagtctctaaagctcctagtacctagaagcattatgaagcagtcaacaatttaggggtacgaaagtaggatgagagccttcaaagtctaccagcacaaagacccctgagccccgcaattgtgatcccacaagacatgcatctccacaaggctactgtattagaacgtgcaatgcatttatatgaaactggtgtatggaagacataggtgctctcttgaaatcttaaatatgattatttgagctcatataaggtggattggagcagataaaattatcaaaagtttcatgaacaggccaaacaaaatattttttaaagtttccttaaagaagttatgaactttagaaaggatcaggggacaataataatctcattttgattctactgataagaatgactccacttttaatgtggacttttactcatggaaaaattgtctcctaatttggggagatgaaccaaccaatcaatgacaagaaaacgcttacacaaagaacaatttgaggctctaagcttctcatgtggtacgtttagacagaggctaaatctgcacactagaatcttgatgataccttcctgcaagacagaatgctttagttaaaagtggtgatgatatttctttcaatctgtattggatggcttaaagggctataaatctgtttataaagagcatttcctgctcttcgaagacagcaatgaggagttggaaggtgcaaagtcagtagagaagggaatgtatcattaatgcacctgagaagaaacagtttcatgtgttcctccacctagagtttgtactggaatgctatttctaaagaagaagtgggaaagagagaggaatgggatggagccccacagtcagaatgttactatgtctttctttccctgacagcccatcttcctaaaagggaccagcttatggaaggctcgaccttgaggggaaagttttactgtgaaagtcttcttcagatccccacctgcatcattccgaatgtgtcctggaaaaaaactggtactcaaagctgcttaggaatcaaaatgttttcagtgtgttgattaatatagtaaatttctgaaactgtgaaaaaaaaaaagat

SEQ ID NO: 82881 - DNA, 2594 bp, Homo sapiens
tgttgcatacagatgagttggcagccggtctgagctggcccacagactcataaaatcaacagggcctcgggtaccctcacccagcatatccaaactcttgcatcaaaggtgcagggacttgctcacatcgagaatctggttgctttcttggagaccaagaaaatgagtttttgtttctacatttactccagcaatccatgaggactttataggaattttgcaccattctgaatggatacatttggatttctcaacatttgttcagcttcctaatgactgttgtgacaattgctctataccagtgaatgccaactgtttatctctgctctgaacagatcagggtgttgacagaaagtatgttcaaacatcttcggaaatgggtcgtcactcgcttttttgggcattctcggcaaagagcaaggctagtctccaaagatggaaggtgcaacatagaatttggcaatgtggaggcacagtcaaggtttatattctttgtggacatctggacaacggtacttgacctcaagtggagatacaaaatgaccattttcatcacagccttcttggggagttggtttttctttggtctcctgtggtatgcagtagcgtacattcacaaagacctcccggaattccatccttctgccaatcacactccctgtgtggagaatattaatggcttgacctcagcttttctgttttctctggagactcaagtgaccattggatatggattcaggtgtgtgacagaacagtgtgccactgccatttttctgcttatctttcagtctatacttggagttataatcaattctttcatgtgtggggccatcttagccaagatctccaggcccaaaaaacgtgccaagaccattacgttcagcaagaacgcagtgatcagcaaacggggagggaagctttgcctcctaatccgagtggctaatctcaggaagagccttcttattggcagtcacatttatggaaagcttctgaagaccacagtcactcctgaaggagagaccattattttggaccagatcaatatcaactttgtagttgacgctgggaatgaaaatttattcttcatctccccattgacaatttaccatgtcattgatcacaacagccctttcttccacatggcagcggagacccttctccagcaggactttgaattagtggtgtttttagatggcacagtggagtccaccagtgctacctgccaagtccggacatcctatgtcccagaggaggtgctttggggctaccgttttgctcccatagtatccaagacaaaggaagggaaataccgagtggatttccataactttagcaagacagtggaagtggagacccctcactgtgccatgtgcctttataatgagaaagatgttagagccaggatgaagagaggctatgacaaccccaacttcatcttgtcagaagtcaatgaaacagatgacaccaaaatgtaacagtggcttttcaacgggagtaaagcaaagtctctaaagctcctagtacctagaagcattatgaagcagtcaacaatttaggggtacgaaagtaggatgagagccttcaaagtctaccagcacaaagacccctgagccccgcaattgtgatcccacaagacatgcatctccacaaggctactgtattagaacgtgcaatgcatttatatgaaactggtgtatggaagacataggtgctctcttgaaatcttaaatatgattatttgagctcatataaggtggattggagcagataaaattatcaaaagtttcatgaacaggccaaacaaaatattttttaaagtttccttaaagaagttatgaactttagaaaggatcaggggacaataataatctcattttgattctactgataagaatgactccacttttaatgtggacttttactcatggaaaaattgtctcctaatttggggagatgaaccaaccaatcaatgacaagaaaacgcttacacaaagaacaatttgaggctctaagcttctcatgtggtacgtttagacagaggctaaatctgcacactagaatcttgatgataccttcctgcaagacagaatgctttagttaaaagtggtgatgatatttctttcaatctgtattggatggcttaaagggctataaatctgtttataaagagcatttcctgctcttcgaagacagcaatgaggagttggaaggtgcaaagtcagtagagaagggaatgtatcattaatgcacctgagaagaaacagtttcatgtgttcctccacctagagtttgtactggaatgctatttctaaagaagaagtgggaaagagagaggaatgggatggagccccacagtcagaatgttactatgtctttctttccctgacagcccatcttcctaaaagggaccagcttatggaaggctcgaccttgaggggaaagttttactgtgaaagtcttcttcagatccccacctgcatcattccgaatgtgtcctggaaaaaaactggtactcaaagctgcttaggaatcaaaatgttttcagtgtgttgattaatatagtaaatttctgaaactgtgaaaaaaaaaaagat

SEQ ID NO: 82882 - DNA, 2764 bp, Homo sapiens
tgttgcatacagatgagttggcagccggtctgagctggcccacagactcataaaatcaacagggcctcgggtaccctcacccagcatatccaaactcttgcatcaaaggtgcagggacttgctcacatcgagaatctggttgctttcttggagaccaagaaaatgagtttttgtttctacatttactccagcaatccatgaggactttataggaattttgcaccattctgaatggatacatttggatttctcaacatttgttcagcttcctaatgactgttgtgacaattgctctataccagtgaatgccaactgtttatctctgctctgaacaggtttcttctctactgtgccttcatccccatcctgggccctgacaaagacagtgtgacaagttctgagccccacaggtggaatcccaaaccaagcagctcttgctggtcaccccaagatctacttatacatgaagttttgaaaatcatctcctgaacctcttctgacagagatcagggtgttgacagaaagtatgttcaaacatcttcggaaatgggtcgtcactcgcttttttgggcattctcggcaaagagcaaggctagtctccaaagatggaaggtgcaacatagaatttggcaatgtggaggcacagtcaaggtttatattctttgtggacatctggacaacggtacttgacctcaagtggagatacaaaatgaccattttcatcacagccttcttggggagttggtttttctttggtctcctgtggtatgcagtagcgtacattcacaaagacctcccggaattccatccttctgccaatcacactccctgtgtggagaatattaatggcttgacctcagcttttctgttttctctggagactcaagtgaccattggatatggattcaggtgtgtgacagaacagtgtgccactgccatttttctgcttatctttcagtctatacttggagttataatcaattctttcatgtgtggggccatcttagccaagatctccaggcccaaaaaacgtgccaagaccattacgttcagcaagaacgcagtgatcagcaaacggggagggaagctttgcctcctaatccgagtggctaatctcaggaagagccttcttattggcagtcacatttatggaaagcttctgaagaccacagtcactcctgaaggagagaccattattttggaccagatcaatatcaactttgtagttgacgctgggaatgaaaatttattcttcatctccccattgacaatttaccatgtcattgatcacaacagccctttcttccacatggcagcggagacccttctccagcaggactttgaattagtggtgtttttagatggcacagtggagtccaccagtgctacctgccaagtccggacatcctatgtcccagaggaggtgctttggggctaccgttttgctcccatagtatccaagacaaaggaagggaaataccgagtggatttccataactttagcaagacagtggaagtggagacccctcactgtgccatgtgcctttataatgagaaagatgttagagccaggatgaagagaggctatgacaaccccaacttcatcttgtcagaagtcaatgaaacagatgacaccaaaatgtaacagtggcttttcaacgggagtaaagcaaagtctctaaagctcctagtacctagaagcattatgaagcagtcaacaatttaggggtacgaaagtaggatgagagccttcaaagtctaccagcacaaagacccctgagccccgcaattgtgatcccacaagacatgcatctccacaaggctactgtattagaacgtgcaatgcatttatatgaaactggtgtatggaagacataggtgctctcttgaaatcttaaatatgattatttgagctcatataaggtggattggagcagataaaattatcaaaagtttcatgaacaggccaaacaaaatattttttaaagtttccttaaagaagttatgaactttagaaaggatcaggggacaataataatctcattttgattctactgataagaatgactccacttttaatgtggacttttactcatggaaaaattgtctcctaatttggggagatgaaccaaccaatcaatgacaagaaaacgcttacacaaagaacaatttgaggctctaagcttctcatgtggtacgtttagacagaggctaaatctgcacactagaatcttgatgataccttcctgcaagacagaatgctttagttaaaagtggtgatgatatttctttcaatctgtattggatggcttaaagggctataaatctgtttataaagagcatttcctgctcttcgaagacagcaatgaggagttggaaggtgcaaagtcagtagagaagggaatgtatcattaatgcacctgagaagaaacagtttcatgtgttcctccacctagagtttgtactggaatgctatttctaaagaagaagtgggaaagagagaggaatgggatggagccccacagtcagaatgttactatgtctttctttccctgacagcccatcttcctaaaagggaccagcttatggaaggctcgaccttgaggggaaagttttactgtgaaagtcttcttcagatccccacctgcatcattccgaatgtgtcctggaaaaaaactggtactcaaagctgcttaggaatcaaaatgttttcagtgtgttgattaatatagtaaatttctgaaactgtgaaaaaaaaaaagat

SEQ ID NO: 82883 - DNA, 656 bp, Homo sapiens
tccactttcttgaggttgtctatatttcttggctggtggcttcctttcttgctcaccaaaccagcaacatttcagctctctgacccctcttccctggtcacgtctcctctgactctcttttacctccaaggaccttagaactacacacagctgcatgattcaggatactcctttattttgaggtcagccaattagcgaccttaattccatctacacaggtaatttccctttgccatgtaacctaacatattcacagattctgaggactgggatatggatatctttggggggacctttgtcatgtctaccactgaagattcaaaggtctcctgatgagaagccttcctcctgtgtggggtgagatagaaagacatttttatggcgctaaagaaagagaagatgtttctcagttatttttttcaattatttatgttggtcgcaacataaaagccaaatggcctttccttttctgaaatctatgccaaattgtaaactccacattggatttaagatgcagctaaatcctaacacagaaaacagaaagacaaccacttcccactagcatttatggagaattctgcagttcaagtgcacctgcacaaacatttaactctcacaatagcccctggtggcagatcctttcctcatttgacaaa

SEQ ID NO: 82884 - DNA, 367 bp, Homo sapiens
ttctttaggcactgtcttatccatttctatgatttcaaagaaaacctgaggctgccattactgacctaaaccttcctctctggcttcaaagaaggatttccaaccaactctcaggcgtaccgcatgcaactagaactcagtatacccaaaactggaaactcaatgtctcccctttgtatcaaatctgtccatgcacctgaaatcctgaatccactggctaggatggaatagtcaatatgactatcctactgttcagcttcatctcctatctcttcacccacaattgcagctcatttcaatgtctccccctttccagaacaccccaggactttctagatctgcatgctttgcatattctgtgccctct

SEQ ID NO: 82885 - DNA, 704 bp, Homo sapiens
ctatgaaatgacttcttaaatatttagttgatagactgctacaggtaatagggacttagcaagctcttttatatgctaaaggagcatctatcagattaagttagaacatttgctgtctgccacatattgagatggcactaggtgcaatagcagggatagattttgttggtgagaggtctcatgccttgagatctgtggtggtctttaaaatggtggccagccagaccaaggatgtagtatctcatagtccccaactaaatgctggctttccactttaggtgatatttttctaattagaaaactattataactcacttattgtttgacaattatagattgaaatttcctaattctaaattttaagtggctcttcggtttcagtgctctatgttgtttgttgttggttttggatggcattacatattatatgttctagaaacatgtaatcctaaatttaccctcttgaatatgatccctggatgatatttttatcataaatgcagaataatcaaatacattttaagcaagtaagtgtcctccatcagttccgtattccagacttgggaggatgtacagttgctgttgtgtgatcaaacatgtctctgtgtagttccagcaaatcaagctgagcttcaaaaaagtttgagtctcagttttgtgaaagtgatttattcttaaaaaaaaaaaaaaaagaaagaaagaaa

SEQ ID NO: 82886 - DNA, 1692 bp, Homo sapiens
taggaacaattttaattagatatatgcaaattacccttaatttatatctcaataggctcctcaggaaaactgaggttcaaatcaacgggcctaaagaagaagtttagcagctgaaaatacctttgagaattttctcctgtaaatctacagctggttccaaattaaagtttgtcccaaggagagcaagagcagagtaactagcctttgttttcaaagattcccctagttgtgaacatgcataaagcactttgaactacaggaaaatcttatctcaaatttgaactattattttattttcagtgatctctctgtacactcctctcgggcccggatagcacattaggtatagaagtcaggagtttctacaatttctctagaagtgtttggcagcatgaagagaaatctttaatcacaaagaagtatagttaacttactaattctttgaattgtaataatgagagataggcaagaacaacaaggggtgagtagtgctaactttctccggtaaccttgacaactggctttaggaatccagacctgtatcaaatttggtcccatcacattgtcctgttccctctctttgtttttctctgttcacttaattgaaattgcaattattttaaagattgagccaagaatgtcaattatagcacaaaagaaaggttacaaaaacgttgtcaggctatctgttaatcgagttgagttgaaaacagtatgctttcaaatgaagtactacaatttccttttttaaaaaaatagtttctaatttgttttttccttcttttgtggtggaggggtatagatgggtgaagtactggcaatgcagtgccaatctccctctgttactgttccctctagtgcctggggttggggcaggtgcaggggtgtggggaaggagagagaagcaatggggaaacaggtgtttctctacttaagacttcatgaacacatacagtcttgaaatggctagaaaagcaacaactacaatgataaaaatcaacagatcaattgattttggcatttcggcagcaccccttccttttctttcctgggtatcttgcagtagatattaattagaaatacccaaagaatttaattaaactaatttattcccagccttattccaaaaaggatttgaggaggcaataaggatttgtagtacaaaatgcatggtcttcatctgcaatcaataaaaaaatctattctttggccccagacctgttagtttaggtaaatacggtttctttctcaaggaacaggtttttgttttaactgttctatcctcaaagtaaagagagaatttctctcttaaaagctcatgagtgctatttgaaatggaagataagattttttggaggaaaaattccttcatggtaggatggaaggcttttctttctaaggggaaaataatacagtaagggtgagcagttatttgactgtccatggacagtaacaaattaagaaataaaaatcctttactatcttgagaagaaagaaagggaaacaaataaatcaacaaaaaaaccttactaaaatacacattcctccagtttcagatttctaaaaagtaataattatgcttaaatcaaggtttatagatagcaaacaactgtttgaatgtgtgaaagtattatccctttgctctaccagtgtttcactttctttgaaggaattgcgtctatgcacacttat

SEQ ID NO: 82887 - DNA, 488 bp, Homo sapiens
gggcctgtaaaggtgttatcctcacaggagggaccatgaagtccatccccgctgggtggacggcagccctgggacccctcctcctcccctcccaacctgaccctggccagtctctgggcccaggcagtgcttgggaacagcgaggatgatcgtggcgggcacttacaagcacatcctcatgccacgcactggttccttagacagccaccaggcacctgccacgtgccccactctgggccacgcagggcggcgcgtgggcacaaggaaggcctcgctgctcccctgctggaagttactggaaagcgcagtgctcctcctctgcgtcttctcagatgacctacagcactttctggcttggccgcatgatgcagggaagggctcagagcccaaaacacaggccccaagagcccacgggggtgggcgggtcacactcacttgagcgtccccacttgttgaggaccaggacaggcaggaccactggcggcagg

SEQ ID NO: 82888 - DNA, 726 bp, Homo sapiens
cgatgatgagtggtggggatagggtgggattctagacccccactgccaagtcctgtgctcaaccactagccataaacattgctatggactgagcactcacaacgtgccacacacggcattggggaatgtatgtgccgtgcctcgccattgccccactggagccagtactattaaccccattttacagataggcaaatagggcacagagaagttatgcaacttgcccaagatcacacagccagtgaggggcaaagctgggattagaacccagggagaccaactcttatgcattgtgctataaatgaataaatgaaggaacctcagctgcaaaatctccaagaggaacagtgactctgtagagtgcctcaccactccccgacaccctctcagtaggacggggcaggaagacaggaggaactgaagccccctgaggtgcagaccccaaggggctgctgctgtgaaggccaaaggtggaagggagaaggggccgggaaacaagagtcttggagtgtgctgctgctcagtggctccagagccgagggggtcttggtgcagcttgatgtggcatctgggcccagtgccctcaagtgccaccatctcaggctgcgctgcagcatccgctgctgcaggccctggaagaaggagctagagaaggggcagggtctggctctgtgacccaggctggagtgcagtgggacaatcttagctcactgcaacctctgcctc

SEQ ID NO: 82889 - DNA, 396 bp, Homo sapiens
ctctaactgtttttagttgcatatggaaatatctaaaaaaatatttagcatttttactaagtgcgttgaggcctctccagtgtcctcctggctgtggctgctttgtcattctctttgactagccagccatctaccttgctcaggcctggaataaaagaagaacaagaagaagaaagaaatgaaatgaaaaacagaaagaaaaaggagaagaaacatttgtaaaagggtcatcttcccatctgcctcccctccttttcctttcatttttggtggcggcacaggaaagccccacttccagtctgatgaggaaagcgacaatctatcaggtacagaaccaggggctgtctgcgaagatggaggggaattatgcttcggattcctctgaaatattggcca

SEQ ID NO: 82890 - DNA, 420 bp, Homo sapiens
ggaagtgacttagtaagcgtttggaacctcttatttctagatgttatggaagcaatgtgaaatgtgacagggtcgccaacatgggtgagttgttcccaaggcaggaggcccaagggggtggtattaaaaatgtcttctaaagccctctttctggcgcctctgtccctgcaaagccagtacaccatctggcatttaggcactgtgccattttaacagatgggactgagtattgaaggctctcagactatgtactaccatcaactgtggtgttggaacagacatttcagtagaaatacccaaccaattctttttcacctcatcttttaattctgcagtaaaagaagatgatatttcttccttagagtgaggaaaagacaagaaagacctttctcttggtgtctggcgctatcagaatatgag

SEQ ID NO: 82891 - DNA, 730 bp, Homo sapiens
atccacttgttttgtttgtttgtttgttttttggtttttgcttgtttgctgatgggcagtggggaggtgcgagggtggagggccttctttgtgcatatatagcgatagtctgcactaggccaagcccgctactcctgggagaatgggaacacgcaaataatctaaacaaagttttctgctgtcatcttgtgaaggaccctctcccccaagacatctatgactggggtctatgggttaaggaggtgaaaaagtggccccatcccatatccataactgaatcacagaatccgtggggatttgaactgagtggctggcgcaagacctccgtttgcttccagtagctgctgggagcgagggaagaggatatcggtaactttgggggcgccaatgtggcttctgtgtctgccccttgaaagtttatacccggcgcttaacaaatcctttacaggagcacgtacgtccctgacctttcaggatactgttttatattaaaacatggacaggagggtagaaaagtaaaattcgcctgcaaaatggcttgtcatccttgggccggcagatctccaaaaccattttcttctaaagcaacaaaagagaaaaaaatacgttctaaaaggaaattacgaaaagagcctaactttcctaaaccaacatcacttcactcccctatcctaaactccacccaggtccggggtgcaaccgcaacactcccgtaggttcgagttctccc

SEQ ID NO: 82892 - DNA, 283 bp, Homo sapiens
gatcctcaggactgcgtcctgctgggcctgtgggagaagtgactgggggggacagttaaggcggcaagacctcatcactgtccaggcacctgcccagccaccaaatctgtggaccagggagcaaacacaggcaagggtactatgcctggctgcagtcagagagagtctcgggaggagcaggtctttgtgctctagggcaggacacagtgctctaggtgggaactggtgccccaggtgggaccgaattccccaggtgagacttagagagacccggtgctccagg

SEQ ID NO: 82893 - DNA, 933 bp, Homo sapiens
ggaggcagctgggctgcagctcagaaagcaacgctcatctgcaagttgggacagcagaggcccttcattcctccccagggctcccacaccttgggagggactgtgaagagtgactcttgtccagtggttttcaaactgggttcctctaagccctggggtattagtgccccagggacccctgaagtttgttactgctgctctgaagcttttcagcatttcttgaaataatgaattccagtaacactgatagctcttggccggcccaccatgaagcccttgatcccagcctggctgagaatagactgtttcacacatcactaactctgccccagcctctggctcagagctagtagcaggacatgaaggtttactgaacaccaaacagatggtgagtgccctgctaagaacttcacatacatctgccccctccatcctcctcactgtgaggaagtgtcatcgtccccaccagaaaaacaaggactgggaggtgtcctgacttgcccaggcagagactgggtcttgctctgtcacccaggctgggtgcaatggcgtgatctcggctcactgcaacctccacctcctgggctcaagtgattctcatgcctcagcctcccaagtagctgcggttatagatgtgcacctacacgcccggctaattttgtatttttcacagagacggtgtttcaccaggttgcccaggctggtctcgaactcccggcctcagtgatctgcccaccttggctcccaaagtgctgggattacggcgtgagcccactgtgatccaggtctaatttacacacattttaaccacgcgtgtaaagggacgggagaagagacgagaaaagcacgtgtgcatgaatcactgctacgagtccactccaattccctttggtgagcactcaccctttaaaggaatgtgacctgccgttcccc

SEQ ID NO: 82894 - DNA, 380 bp, Homo sapiens
agatgggactgcggcccaagactctgtggggcatgtagtgatttggaagccaagaaattggttttttaaagagtaactcaccaatcttccgcagcttctacatggttattttttttcttttggtgacgcaaagatagtcctaattcctgtagagccttggaacctcaaacactaagaaggtctccaattttgtggggctgctccacctccagatggttctggcccccataggactaggcagactgtagtgacatctgtctgaattccctgtcctcgtgttcctggccctcacatctgctgggcttggtaatgccgtctccaaagagcctgggggctgtgacagaccttcaggaaagtcagtgtgctggaagaatttgatt

SEQ ID NO: 82895 - DNA, 486 bp, Homo sapiens
gagacagggactcactatattgcccaggctgaactcaaacccttgggcacaagtgatccttccacctcagcctttccctcatttcttataggtctgtgtactaatccaaaagcatgttaaggaaataaaatcagttttgttgttaattcagatgattttagagtatatcagtcctagaatgactaattccccttagaatgtctataggtatcaagaatagacctttccataaattggcccctgaatttcactggaacttaaaaactcaagaatgaagggcatcctggagccagtctactgacaagctatgattcaacacacttcaaagctcattttggattttacctattttgaaccagtctccagatgttgagacagaatcaagattcacagcattggccaggcatggtggctcatgcctgtaatccgagcactttgggaggcggaagcgggaggatcacttgaggtcaggagcttgagaccagc

SEQ ID NO: 82896 - DNA, 868 bp, Homo sapiens
aattgattgttctacatcaaaataaatgttctctaactttcatgtgggcaggaaccatatggagaccatcttaaaaacacagatccccagagattgtaacacagtaggtctggggttgggcccagaaacctgaatttttattatttttttgagacagggtctctgtcgcccaggctggagtgcagtggtacaatctcagctcactgcaacctctgcctcccgggttcagtagattctcctggcctcagcctcccgagtagctgggactacaggtgtgcaccaccacacccggcaaaagtttgtactttttggtagatactggctttcactgtgttggccaggctggttttgaactcctggcctcaagtgatctgcccgccttggcctcccagagagctgggattacaggcgtgaaccaccacacctggccagaaacatgaatttttaacaagcatcatagtgaattcttctgtcattggttctatgttttgaataactgctagagaacggccagctgaggtcctagtaagtgagaaacaaatcagtcaaccaaccaatcagcaccacccccttccggaaaagtcccaagcatttgacaaagatttgtcacctacaactatctgccactgtgtgaagagggctactttaaatgaacccaagtcttggtaagttttcttgagaaaaacagaaacaggtacaaaatgaaaacaactggggattaagtaacagtcatgaaggcagtgatcatttaaataggactggaatgggtgggcttggagccaggttgcacaggtttgcaaaagccaattgttaaattttcagaaattttgtgagctggaggctaaacaaaaccattgttaaaaattaa

SEQ ID NO: 82897 - DNA, 393 bp, Homo sapiens
aattgattgttctacatcaaaataaatgttctctaactttcatgtgggcaggaaccatatggagaccatcttaaaaacacagatccccagagattgtaacacagtaggtctggggttgggcccagaaacctgaatttttattatttttttgagacagggtctctgtcgcccaggctggagtgcagtggtacaatctcagctcactgcaacctctgcctcccgggttcagtagattctcctggcctcagcctcccgagtagctgggactacaggtgtgcaccaccacacccggcaaaagtttgtactttttggtagatactggtaacacggtgaaaccccatctctactaaaaatacaaaaaattagccgggcgaggtggcaggcacctgtagt

SEQ ID NO: 82898 - DNA, 612 bp, Homo sapiens
tctgtttgcattaagttccattgccagggttcagacctgccattggggacccagtcctgttttgttctcaacaaacatttattgggtagttaaccatgtgccatgttaacctgtgttaaatgctaggaatggaaaaatgagtatgttccttctcaggagagctcttagacaacaagcaaagaatgtcaatgaaatttttaagtgctcagtgttccaggccagagtacagagggagggacactttgctgtctttcagtcctttctttttaattgtattgattcttttcctcggtaataaataagtccatcctagttttattaagaaaaagacaggtacaagccaaattgtattcatttaatcatattcgatttcaaacaaataggttctgtgtatgtgtttgcaaatcaggtgcagcctttcgggttgcttgacaagttgcttgggcagcccttagactataaagtttctacgtcattgatttaagggtgttttaaaatgcgataggctagcttccagaccatgattagtgtcactcctgagaagtagaggtttaatatttcataactgatttcattgcagatttatgtcttccatattctctttaaaaaaaa

SEQ ID NO: 82899 - DNA, 614 bp, Homo sapiens
agattgtttccaccttttggttattataagtatatccagctatgaacattcatgtacatgcctctgtgtggatgtttatttttgtaattcttgaacagatttctaagagaggatttgctgtgtcatgtggcaagtttctgtttaactttttttaaaattgtcaaactgttcttgatcgtggctgttttattttacgttccctccaataatgtacagtagtcctttcttatccacagtttcacttacctgaggtcaattgaggtctgaaaatattaaatggaaaattccagaaataaacagtccataagtttttaattgtgtgccgttctgagtagcatgatgaaatcccacactctcctgcttcgtcctgtccagaacgtgaatcatccctctgtccagcagatccacactgtatgcactgcccacctggtagtcacttaggagccatccaggttatcagattgaccatcccagtatcacagtgcttgtgttcaagtaatccttatttcacttaacaatggcaaagtagtaattctggcaattcatatatgccaaagagaaaccataaagtgcttcctttaagtgaaaaggtgacagttctcaacttaataaga

SEQ ID NO: 82900 - DNA, 434 bp, Homo sapiens
ccatgttagccaggatggtctccatctcctgaccttgtgatctgctcacctcggccttcccaaagtgctgggattataggcatgagccaccgcgcccggcctcttcctcagtgtttaaaaaagagtttgagaagaattgctgataattcttctttaaacatttgatagactttatcaatgaaaccatctggttcctggcttttctttgttagaagttttaaaattagtgtttcaatctctttacttgttttagatctatgcagatttttaaatttcttcttgagtcgattttggtagtttccatgtttctaagaatttgttcatttctctagagtttctaattcattgtcgtgcaactgttcaaagcattatcttataatcctttgtatgtctgtaagtttggtaataacacttccacattcattttttatgaa

SEQ ID NO: 82901 - DNA, 418 bp, Homo sapiens
ctggatcctgttattttgatcactactcttggtagctaggccatgatcagcctcaagaagttttctgaacatggcatttcagacagccattatccgtaagttggagttactgttctagatgaaatctttgtcaatcctatccagtaaacatattctgtgctttttagatttatggctgcttaccactgcttctttagttgtgtttggggtactgttatctttttctgctgccaagttacttgtgaggagcctaagaaaccacccgtgtcacaacacttcagattgctctggatttgcttccttatctgacagtttcattatatttatttatttatttaaacagaatctcactctgtcacccagccgagattgcgccactgcactccagcctgggcgacagagggagatgccgtttctt

SEQ ID NO: 82902 - DNA, 476 bp, Homo sapiens
cagacacaatattggtgtgtatattcagggctcaataggatttataaccataggattgatagccagcttaacctgtttcttccctctaaattttctggcacaacctctcggtaaaaattgttcaaaaatagattttatgttacagaaatcattcttccatcatctttcctaaaagagttattctggccaggtgtggtggctcatgcctgtaatcccagcactttgggaggccgaggcgggtggatcacaaggtcaggagatcgagaccatcctggctaacatggtgaaaccctgtctctactaaaaaatacaaaaaattagccaggtgtggtggcaggcgcctgtagtcccagctgcttgggaggctgaggcaggagaagggcgtgaactcgggaggcggagcttgcagtgagccgagattgcgccactgcactccagcctgggcgacagagtgagactccatctcaaaaaaaaaa

SEQ ID NO: 82903 - DNA, 128 bp, Homo sapiens
tgggaggttgaagctgctgtgggctgagacagagatcacatcattgcactccagcctgggtgacagaatgagaaaccctgtctcaaaaaaaaaaaaaaagtacagttttggtttttgctgtgactggg

SEQ ID NO: 82904 - DNA, 400 bp, Homo sapiens
cagtaagccatgattgtgcctctcacttaaacctgcacgacagagtgagactctcctcggggctgggcgggggaagtgggtcaggacatagaggtcaagaagcatgttcctttcgcctgctcagagtctgggaagtatagtatgattaaggacatgagatttgccattcagattgagctgtagctctgctacttggtagaggtatttgtcattggcaagttactttcagaggtttcatttacttagctgtaaaattgtttaaagaatcttatgtagagttttgtaattattgaagtcattgaatgcatgtaaagtgcctagctcaatgtctttcttatagttattgaataaaaatattaagtgttattgttaatgaagatactggtaaaatatcccatgt

SEQ ID NO: 82905 - DNA, 4622 bp, Homo sapiens
  misc_feature (2316)..(2316): n is a, c, g, or t
gaattccgggccgggagaaccgaacccctggcggccgcgaccccggctcccgccccggccccggcccgacccgccatgacggggctggaggaccaggagttcgacttcgagttcctcttcgagtttaaccagcgcgacgagggcgccgccgcggccgccccagaacactatggctatgcatcctccaacgtcagccccgccctgccgctccccacggcgcactccaccctgccggccccgtgccacaaccttcagacctccacaccgggcatcatcccgccggcggatcacccctcggggtacggagcagctttggacggtgggcccgcgggctacttcctctcctccggccacaccaggcctgatggggcccctgccctggagagtcctcgcatcgagataacctcgtgcttgggcctgtaccacaacaataaccagtttttccacgatgtggaggtggaagacgtcctccctagctccaaacggtccccctccacggccacgctgagtctgcccagcctggaggcctacagagacccctcgtgcctgagcccggccagcagcctgtcctcccggagctgcaactcagaggcctcctcctacgagtccaactactcgtacccgtacgcgtccccccagacgtcgccatggcagtctccctgcgtgtctcccaagaccacggaccccgaggagggctttccccgcgggctgggggcctgcacactgctgggttccccgcggcactccccctccacctcgccccgcgccagcgtcactgaggagagctggctgggtgcccgctcctccagacccgcgtccccttgcaacaagaggaagtacagcctcaacggccggcagccgccctactcaccccaccactcgcccacgccgtccccgcacggctccccgcgggtcagcgtgaccgacgactcgtggttgggcaacaccacccagtacaccagctcggccatcgtggccgccatcaacgcgctgaccaccgacagcagcctggacctgggagatggcgtccctgtcaagtcccgcaagaccaccctggagcagccgccctcagtggcgctcaaggtggagcccgtcggggaggacctgggcagccccccgcccccggccgacttcgcgcccgaagactactcctctttccagcacatcaggaagggcggcttctgcgaccagtacctggcggtgccgcagcacccctaccagtgggcgaagcccaagcccctgtcccctacgtcctacatgagcccgaccctgcccgccctggactggcagctgccgtcccactcaggcccgtatgagcttcggattgaggtgcagcccaagtcccaccaccgagcccactacgagacggagggcagccggggggccgtgaaggcgtcggccggaggacaccccatcgtgcagctgcatggctacttggagaatgagccgctgatgctgcagcttttcattgggacggcggacgaccgcctgctgcgcccgcacgccttctaccaggtgcaccgcatcacagggaagaccgtgtccaccaccagccacgaggccatcctctccaacaccaaagtcctggagatcccactcctgccggagaacagcatgcgagccgtcattgactgtgccggaatcctgaaactcagaaactccgacattgaacttcggaaaggagagacggacatcgggaggaagaacacacgggtacggctggtgttccgcgttcacgtcccgcaacccagcggccgcacgctgtccctgcaggtggcctccaaccccatcgaatgctcccagcgctcagctcaggagctgcctctggtggagaagcagagcacggacagctatccggtcgtgggcgggaagaagatggtcctgtctggccacaacttcctgcaggactccaaggtcattttcgtggagaaagccccagatggccaccatgtctgggagatggaagcgaaaactgaccgggacctgtgcaagccgaattctctggtggttgagatcccgccatttcggaatcagaggataaccagccccgttcacgtcagtttctacgtctgcaacgggaagagaaagcgaagccagtaccagcgtttcacctaccttcccgccaacgttccaattataaaaacagaacccactgatgattatgagcctgctccaacctgtggaccggtgagccaggggttaagtcctctcccaagaccatactacagccagcagctcgcgatgccacccgaccccagctcctgcctcgtggccggcttcccgccctgtccgcagagaagcaccctgatgccagcngcccctggcgtgagccccaagctccacgacctttctcccgctgcctacaccaagggcgttgccagcccgggccactgtcacctcggactcccgcagccggccggagaggcccccgccgtccaggacgtgcccaggccagtggccacgcaccccggctcgcccgggcagccacccccggccctgctgccacagcaggtgagtgcgcctccaagcagtagctgcccccctggtctcgaacactcgctctgccccagcagcccctctcctccactcccgcctgccacccaagagccgacctgcctgcagccctgcagcccagcgtgcccgcccgccacgggccgcccgcagcacctgccgtccacggtccgcagggacgagtctccgactgccgggccacggctgctgccagaggtgcatgaggacggtagtcctaatttggcccctattcctgtaacggtcaagcgagagcctgaagagttggaccagttgtacctggatgacgtaaatgaaataatacgaaatgacctctccagcacgagcacccactcctagttgccacattggagcactcagttcagcaggggtatgctgacttcagcagacaaagacttttgaataaataaactgaactcacacctggtaccactcagaacctccaactgactgaatgccaggagctgaacattaatatgtgcaaagattggctctccaacaagaaggaaagcagggaggaagggagaccactgtgtcacctggaggagaagtcatctcatgacaacagaagggaggtggccgggctgagcacgggagacccaccgtgcaggggcctttcatgggaacggcccacacgcagtttgaccccacgcccagcccttctggcacccctggggttcaatactggaagtgccttatttaaccagaccatcagggcatcatagaattgagcattgaatttgctactgtaggagtatttttaggagcagaaactgcaaacacatttcattgtgaggttttaccctctgtatgaatgaagagaacgctggaaggctgcgagaggactctagtatgagtctccaacatttggaacgtttcctgggctgtcacgtacactcctgctgccttacacagtgcattttagaatcttccagtctgtcatctcagctcttttgtaacatgcttcccttgtctgcgcggttgaaaccgtaggcttgttcatagtcgcatgctcgcatctttgtttttaatctggcttcgaacatagcacaagtaacttgaatagcacatcaataggttactggacaaaagcagaaaaacctgttacaggatagcctgcatttgcatgtgtgtacatatctaggcatctatttatgtataaataataacagagccgacgtgtcctcgcccaggagggcttccctgtcagcaataaccggcatccgttttggaacctgcgtctggggctccagtcgctgctcttgctggcgtccatcgccgcctcggacggccgtgcattttctcgtctcacgcagttcgaggaggaccctagaaagccaggagctgtgattgacagtagctgtaggttaccagacggcaacattagaaagtgattgtaaataacatgcaacctaagtgtaatatatttgttcagttataagatgattgtttcacagaagccttaccactctctgcttcatctaagaaaaccaataccaaaaacgccactttaatgctcagccctgcgttgtgtgttttcagatgagttactgttaacaggtaggtttgtgtaggccttgctgggcactctgtacaattagttgcttattacgtatgattactcgcagcgatctattgttccatataaccaaaaagcatggtttattcattgaaacacggttgacctgaactcgtgccttaggaattaatgcccccttatggaacctgcctgaattgcacctgcgggtggaggctccggctgtgaagtcactgaacagaacgtcgctgatggagaaagggctcccgcagaaggaacggcctgtaccgtgcgctccggcacaatcgcgtctcttgtgtctcactcacggaaagaaacaacctgaaggccatcccgtcggtctgcacgtaaccgtgaagacgtgtggccgcgtcccacctgcggctgggtaccctgcacccggcactgtaggagtcacgtgcagcctttctcaggggactgtcattgaaaaggaaacgtttgatgtctgtgtcagctgtctttgtagttaggaaatagatccaataaagccgtatttttttgctggaaaaaaaaa

SEQ ID NO: 82906 - DNA, 3645 bp, Homo sapiens
  misc_feature (1646)..(1646): n is a, c, g, or t
ggcgcggcacgaggcgggcgctcggcgactcgtccccggggccccgcgcgggcccgggcagcaggggcgtgatgtcacggcagggagggggcgcgggagccgccgggccggcggggaggcgggggaggtgttttccagctttaaaaaggcaggaggcagagcgcggccctgcgtcagagcgagactcagaggctccgaactcgccggcggagtcgccgcgccagatcccagcagcagggcgcgggcaccggggcgcgggcagggctcggagccaccgcgcaggtcctagggccgcggccgggccccgccacgcgcgcacacgcccctcgatgactttcctccggggcgcgcggcgctgagcccggggcgagggctgtcttcccggagacccgaccccggcagcgcggggcggccgcttctcctgtgcctccgcccgccgctccactccccgccgccgccgcgcggatgccaagcaccagctttccagtcccttccaagtttccacttggccctgcggctgcggtcttcgggagaggagaaactttggggcccgcgccgcgcgccggcggcaccatgaagtcagcggaggaagcccgaccctgcccgccctggactggcagctgccgtcccactcaggcccgtatgagcttcggattgaggtgcagcccaagtcccaccaccgagcccactacgagacggagggcagccggggggccgtgaaggcgtcggccggaggacaccccatcgtgcagctgcatggctacttggagaatgagccgctgatgctgcagcttttcattgggacggcggacgaccgcctgctgcgcccgcacgccttctaccaggtgcaccgcatcacagggaagaccgtgtccaccaccagccacgaggccatcctctccaacaccaaagtcctggagatcccactcctgccggagaacagcatgcgagccgtcattgactgtgccggaatcctgaaactcagaaactccgacattgaacttcggaaaggagagacggacatcgggaggaagaacacacgggtacggctggtgttccgcgttcacgtcccgcaacccagcggccgcacgctgtccctgcaggtggcctccaaccccatcgaatgctcccagcgctcagctcaggagctgcctctggtggagaagcagagcacggacagctatccggtcgtgggcgggaagaagatggtcctgtctggccacaacttcctgcaggactccaaggtcattttcgtggagaaagccccagatggccaccatgtctgggagatggaagcgaaaactgaccgggacctgtgcaagccgaattctctggtggttgagatcccgccatttcggaatcagaggataaccagccccgttcacgtcagtttctacgtctgcaacgggaagagaaagcgaagccagtaccagcgtttcacctaccttcccgccaacgttccaattataaaaacagaacccactgatgattatgagcctgctccaacctgtggaccggtgagccaggggttaagtcctctcccaagaccatactacagccagcagctcgcgatgccacccgaccccagctcctgcctcgtggccggcttcccgccctgtccgcagagaagcaccctgatgccagcngcccctggcgtgagccccaagctccacgacctttctcccgctgcctacaccaagggcgttgccagcccgggccactgtcacctcggactcccgcagccggccggagaggcccccgccgtccaggacgtgcccaggccagtggccacgcaccccggctcgcccgggcagccacccccggccctgctgccacagcagtaaatgaaataatacgaaatgacctctccagcacgagcacccactcctagttgccacattggagcactcagttcagcaggggtatgctgacttcagcagacaaagacttttgaataaataaactgaactcacacctggtaccactcagaacctccaactgactgaatgccaggagctgaacattaatatgtgcaaagattggctctccaacaagaaggaaagcagggaggaagggagaccactgtgtcacctggaggagaagtcatctcatgacaacagaagggaggtggccgggctgagcacgggagacccaccgtgcaggggcctttcatgggaacggcccacacgcagtttgaccccacgcccagcccttctggcacccctggggttcaatactggaagtgccttatttaaccagaccatcagggcatcatagaattgagcattgaatttgctactgtaggagtatttttaggagcagaaactgcaaacacatttcattgtgaggttttaccctctgtatgaatgaagagaacgctggaaggctgcgagaggactctagtatgagtctccaacatttggaacgtttcctgggctgtcacgtacactcctgctgccttacacagtgcattttagaatcttccagtctgtcatctcagctcttttgtaacatgcttcccttgtctgcgcggttgaaaccgtaggcttgttcatagtcgcatgctcgcatctttgtttttaatctggcttcgaacatagcacaagtaacttgaatagcacatcaataggttactggacaaaagcagaaaaacctgttacaggatagcctgcatttgcatgtgtgtacatatctaggcatctatttatgtataaataataacagagccgacgtgtcctcgcccaggagggcttccctgtcagcaataaccggcatccgttttggaacctgcgtctggggctccagtcgctgctcttgctggcgtccatcgccgcctcggacggccgtgcattttctcgtctcacgcagttcgaggaggaccctagaaagccaggagctgtgattgacagtagctgtaggttaccagacggcaacattagaaagtgattgtaaataacatgcaacctaagtgtaatatatttgttcagttataagatgattgtttcacagaagccttaccactctctgcttcatctaagaaaaccaataccaaaaacgccactttaatgctcagccctgcgttgtgtgttttcagatgagttactgttaacaggtaggtttgtgtaggccttgctgggcactctgtacaattagttgcttattacgtatgattactcgcagcgatctattgttccatataaccaaaaagcatggtttattcattgaaacacggttgacctgaactcgtgccttaggaattaatgcccccttatggaacctgcctgaattgcacctgcgggtggaggctccggctgtgaagtcactgaacagaacgtcgctgatggagaaagggctcccgcagaaggaacggcctgtaccgtgcgctccggcacaatcgcgtctcttgtgtctcactcacggaaagaaacaacctgaaggccatcccgtcggtctgcacgtaaccgtgaagacgtgtggccgcgtcccacctgcggctgggtaccctgcacccggcactgtaggagtcacgtgcagcctttctcaggggactgtcattgaaaaggaaacgtttgatgtctgtgtcagctgtctttgtagttaggaaatagatccaataaagccgtatttttttgctggaaaaaaaaa

SEQ ID NO: 82907 - DNA, 916 bp, Homo sapiens
ctggtatggcgcacacaccctacacatgcctaaatgaaataatacgaaatgacctctccagcacgagcacccactcctagttgccacattggagcactcagttcagcaggggtatgctgacttcagcagacaaagacttttgaataaataaactgaactcacacctggtaccactcagaacctccaactgactgaatgccaggagctgaacattaatatgtgcaaagattggctctccaacaagaaggaaagcagggaggaagggagaccactgtgtcacctggaggagaagtcatctcatgacaacagaagggaggtggccgggctgagcacgggagacccaccgtgcaggggcctttcatgggaacggcccacacgcagtttgaccccacgcccagcccttctggcacccctggggttcaatactggaagtgccttatttaaccagaccatcagggcatcatagaattgagcattgaatttgctactgtaggagtatttttaggagcagaaactgcaaacacatttcattgtgaggttttaccctctgtatgaatgaagagaacgctggaaggctgcgagaggactctagtatgagtctccaacatttggaacgtttcctgggctgtcacgtacactcctgctgccttacacagtgcattttagaatcttccagtctgtcatctcagctcttttgtaacatgcttcccttgtctgcgcggttgaaaccgtaggcttgttcatagtcgcatgctcgcatctttgtttttaatctggcttcgaacatagcacaagtaacttgaatagcacatcaataggttactggacaaaagcagaaaaacctgttacaggatagcctgcatttgcatgtgtgtacatatctaggcatctatttatgtataaataataacagagc

SEQ ID NO: 82908 - DNA, 4315 bp, Homo sapiens
  misc_feature (2316)..(2316): n is a, c, g, or t
gaattccgggccgggagaaccgaacccctggcggccgcgaccccggctcccgccccggccccggcccgacccgccatgacggggctggaggaccaggagttcgacttcgagttcctcttcgagtttaaccagcgcgacgagggcgccgccgcggccgccccagaacactatggctatgcatcctccaacgtcagccccgccctgccgctccccacggcgcactccaccctgccggccccgtgccacaaccttcagacctccacaccgggcatcatcccgccggcggatcacccctcggggtacggagcagctttggacggtgggcccgcgggctacttcctctcctccggccacaccaggcctgatggggcccctgccctggagagtcctcgcatcgagataacctcgtgcttgggcctgtaccacaacaataaccagtttttccacgatgtggaggtggaagacgtcctccctagctccaaacggtccccctccacggccacgctgagtctgcccagcctggaggcctacagagacccctcgtgcctgagcccggccagcagcctgtcctcccggagctgcaactcagaggcctcctcctacgagtccaactactcgtacccgtacgcgtccccccagacgtcgccatggcagtctccctgcgtgtctcccaagaccacggaccccgaggagggctttccccgcgggctgggggcctgcacactgctgggttccccgcggcactccccctccacctcgccccgcgccagcgtcactgaggagagctggctgggtgcccgctcctccagacccgcgtccccttgcaacaagaggaagtacagcctcaacggccggcagccgccctactcaccccaccactcgcccacgccgtccccgcacggctccccgcgggtcagcgtgaccgacgactcgtggttgggcaacaccacccagtacaccagctcggccatcgtggccgccatcaacgcgctgaccaccgacagcagcctggacctgggagatggcgtccctgtcaagtcccgcaagaccaccctggagcagccgccctcagtggcgctcaaggtggagcccgtcggggaggacctgggcagccccccgcccccggccgacttcgcgcccgaagactactcctctttccagcacatcaggaagggcggcttctgcgaccagtacctggcggtgccgcagcacccctaccagtgggcgaagcccaagcccctgtcccctacgtcctacatgagcccgaccctgcccgccctggactggcagctgccgtcccactcaggcccgtatgagcttcggattgaggtgcagcccaagtcccaccaccgagcccactacgagacggagggcagccggggggccgtgaaggcgtcggccggaggacaccccatcgtgcagctgcatggctacttggagaatgagccgctgatgctgcagcttttcattgggacggcggacgaccgcctgctgcgcccgcacgccttctaccaggtgcaccgcatcacagggaagaccgtgtccaccaccagccacgaggccatcctctccaacaccaaagtcctggagatcccactcctgccggagaacagcatgcgagccgtcattgactgtgccggaatcctgaaactcagaaactccgacattgaacttcggaaaggagagacggacatcgggaggaagaacacacgggtacggctggtgttccgcgttcacgtcccgcaacccagcggccgcacgctgtccctgcaggtggcctccaaccccatcgaatgctcccagcgctcagctcaggagctgcctctggtggagaagcagagcacggacagctatccggtcgtgggcgggaagaagatggtcctgtctggccacaacttcctgcaggactccaaggtcattttcgtggagaaagccccagatggccaccatgtctgggagatggaagcgaaaactgaccgggacctgtgcaagccgaattctctggtggttgagatcccgccatttcggaatcagaggataaccagccccgttcacgtcagtttctacgtctgcaacgggaagagaaagcgaagccagtaccagcgtttcacctaccttcccgccaacgttccaattataaaaacagaacccactgatgattatgagcctgctccaacctgtggaccggtgagccaggggttaagtcctctcccaagaccatactacagccagcagctcgcgatgccacccgaccccagctcctgcctcgtggccggcttcccgccctgtccgcagagaagcaccctgatgccagcngcccctggcgtgagccccaagctccacgacctttctcccgctgcctacaccaagggcgttgccagcccgggccactgtcacctcggactcccgcagccggccggagaggcccccgccgtccaggacgtgcccaggccagtggccacgcaccccggctcgcccgggcagccacccccggccctgctgccacagcagtaaatgaaataatacgaaatgacctctccagcacgagcacccactcctagttgccacattggagcactcagttcagcaggggtatgctgacttcagcagacaaagacttttgaataaataaactgaactcacacctggtaccactcagaacctccaactgactgaatgccaggagctgaacattaatatgtgcaaagattggctctccaacaagaaggaaagcagggaggaagggagaccactgtgtcacctggaggagaagtcatctcatgacaacagaagggaggtggccgggctgagcacgggagacccaccgtgcaggggcctttcatgggaacggcccacacgcagtttgaccccacgcccagcccttctggcacccctggggttcaatactggaagtgccttatttaaccagaccatcagggcatcatagaattgagcattgaatttgctactgtaggagtatttttaggagcagaaactgcaaacacatttcattgtgaggttttaccctctgtatgaatgaagagaacgctggaaggctgcgagaggactctagtatgagtctccaacatttggaacgtttcctgggctgtcacgtacactcctgctgccttacacagtgcattttagaatcttccagtctgtcatctcagctcttttgtaacatgcttcccttgtctgcgcggttgaaaccgtaggcttgttcatagtcgcatgctcgcatctttgtttttaatctggcttcgaacatagcacaagtaacttgaatagcacatcaataggttactggacaaaagcagaaaaacctgttacaggatagcctgcatttgcatgtgtgtacatatctaggcatctatttatgtataaataataacagagccgacgtgtcctcgcccaggagggcttccctgtcagcaataaccggcatccgttttggaacctgcgtctggggctccagtcgctgctcttgctggcgtccatcgccgcctcggacggccgtgcattttctcgtctcacgcagttcgaggaggaccctagaaagccaggagctgtgattgacagtagctgtaggttaccagacggcaacattagaaagtgattgtaaataacatgcaacctaagtgtaatatatttgttcagttataagatgattgtttcacagaagccttaccactctctgcttcatctaagaaaaccaataccaaaaacgccactttaatgctcagccctgcgttgtgtgttttcagatgagttactgttaacaggtaggtttgtgtaggccttgctgggcactctgtacaattagttgcttattacgtatgattactcgcagcgatctattgttccatataaccaaaaagcatggtttattcattgaaacacggttgacctgaactcgtgccttaggaattaatgcccccttatggaacctgcctgaattgcacctgcgggtggaggctccggctgtgaagtcactgaacagaacgtcgctgatggagaaagggctcccgcagaaggaacggcctgtaccgtgcgctccggcacaatcgcgtctcttgtgtctcactcacggaaagaaacaacctgaaggccatcccgtcggtctgcacgtaaccgtgaagacgtgtggccgcgtcccacctgcggctgggtaccctgcacccggcactgtaggagtcacgtgcagcctttctcaggggactgtcattgaaaaggaaacgtttgatgtctgtgtcagctgtctttgtagttaggaaatagatccaataaagccgtatttttttgctggaaaaaaaaa

SEQ ID NO: 82909 - DNA, 3397 bp, Homo sapiens
  misc_feature (2316)..(2316): n is a, c, g, or t
gaattccgggccgggagaaccgaacccctggcggccgcgaccccggctcccgccccggccccggcccgacccgccatgacggggctggaggaccaggagttcgacttcgagttcctcttcgagtttaaccagcgcgacgagggcgccgccgcggccgccccagaacactatggctatgcatcctccaacgtcagccccgccctgccgctccccacggcgcactccaccctgccggccccgtgccacaaccttcagacctccacaccgggcatcatcccgccggcggatcacccctcggggtacggagcagctttggacggtgggcccgcgggctacttcctctcctccggccacaccaggcctgatggggcccctgccctggagagtcctcgcatcgagataacctcgtgcttgggcctgtaccacaacaataaccagtttttccacgatgtggaggtggaagacgtcctccctagctccaaacggtccccctccacggccacgctgagtctgcccagcctggaggcctacagagacccctcgtgcctgagcccggccagcagcctgtcctcccggagctgcaactcagaggcctcctcctacgagtccaactactcgtacccgtacgcgtccccccagacgtcgccatggcagtctccctgcgtgtctcccaagaccacggaccccgaggagggctttccccgcgggctgggggcctgcacactgctgggttccccgcggcactccccctccacctcgccccgcgccagcgtcactgaggagagctggctgggtgcccgctcctccagacccgcgtccccttgcaacaagaggaagtacagcctcaacggccggcagccgccctactcaccccaccactcgcccacgccgtccccgcacggctccccgcgggtcagcgtgaccgacgactcgtggttgggcaacaccacccagtacaccagctcggccatcgtggccgccatcaacgcgctgaccaccgacagcagcctggacctgggagatggcgtccctgtcaagtcccgcaagaccaccctggagcagccgccctcagtggcgctcaaggtggagcccgtcggggaggacctgggcagccccccgcccccggccgacttcgcgcccgaagactactcctctttccagcacatcaggaagggcggcttctgcgaccagtacctggcggtgccgcagcacccctaccagtgggcgaagcccaagcccctgtcccctacgtcctacatgagcccgaccctgcccgccctggactggcagctgccgtcccactcaggcccgtatgagcttcggattgaggtgcagcccaagtcccaccaccgagcccactacgagacggagggcagccggggggccgtgaaggcgtcggccggaggacaccccatcgtgcagctgcatggctacttggagaatgagccgctgatgctgcagcttttcattgggacggcggacgaccgcctgctgcgcccgcacgccttctaccaggtgcaccgcatcacagggaagaccgtgtccaccaccagccacgaggccatcctctccaacaccaaagtcctggagatcccactcctgccggagaacagcatgcgagccgtcattgactgtgccggaatcctgaaactcagaaactccgacattgaacttcggaaaggagagacggacatcgggaggaagaacacacgggtacggctggtgttccgcgttcacgtcccgcaacccagcggccgcacgctgtccctgcaggtggcctccaaccccatcgaatgctcccagcgctcagctcaggagctgcctctggtggagaagcagagcacggacagctatccggtcgtgggcgggaagaagatggtcctgtctggccacaacttcctgcaggactccaaggtcattttcgtggagaaagccccagatggccaccatgtctgggagatggaagcgaaaactgaccgggacctgtgcaagccgaattctctggtggttgagatcccgccatttcggaatcagaggataaccagccccgttcacgtcagtttctacgtctgcaacgggaagagaaagcgaagccagtaccagcgtttcacctaccttcccgccaacgttccaattataaaaacagaacccactgatgattatgagcctgctccaacctgtggaccggtgagccaggggttaagtcctctcccaagaccatactacagccagcagctcgcgatgccacccgaccccagctcctgcctcgtggccggcttcccgccctgtccgcagagaagcaccctgatgccagcngcccctggcgtgagccccaagctccacgacctttctcccgctgcctacaccaagggcgttgccagcccgggccactgtcacctcggactcccgcagccggccggagaggcccccgccgtccaggacgtgcccaggccagtggccacgcaccccggctcgcccgggcagccacccccggccctgctgccacagcagtaaatgaaataatacgaaatgacctctccagcacgagcacccactcctagttgccacattggagcactcagttcagcaggggtatgctgacttcagcagacaaagacttttgaataaataaactgaactcacacctggtaccactcagaacctccaactgactgaatgccaggagctgaacattaatatgtgcaaagattggctctccaacaagaaggaaagcagggaggaagggagaccactgtgtcacctggaggagaagtcatctcatgacaacagaagggaggtggccgggctgagcacgggagacccaccgtgcaggggcctttcatgggaacggcccacacgcagtttgaccccacgcccagcccttctggcacccctggggttcaatactggaagtgccttatttaaccagaccatcagggcatcatagaattgagcattgaatttgctactgtaggagtatttttaggagcagaaactgcaaacacatttcattgtgaggttttaccctctgtatgaatgaagagaacgctggaaggctgcgagaggactctagtatgagtctccaacatttggaacgtttcctgggctgtcacgtacactcctgctgccttacacagtgcattttagaatcttccagtctgtcatctcagctcttttgtaacatgcttcccttgtctgcgcggttgaaaccgtaggcttgttcatagtcgcatgctcgcatctttgtttttaatctggcttcgaacatagcacaagtaacttgaatagcacatcaataggttactggacaaaagcagaaaaacctgttacaggatagcctgcatttgcatgtgtgtacatatctaggcatctatttatgtataaataataacagagc

SEQ ID NO: 82910 - DNA, 3449 bp, Homo sapiens
  misc_feature (2316)..(2316): n is a, c, g, or t
gaattccgggccgggagaaccgaacccctggcggccgcgaccccggctcccgccccggccccggcccgacccgccatgacggggctggaggaccaggagttcgacttcgagttcctcttcgagtttaaccagcgcgacgagggcgccgccgcggccgccccagaacactatggctatgcatcctccaacgtcagccccgccctgccgctccccacggcgcactccaccctgccggccccgtgccacaaccttcagacctccacaccgggcatcatcccgccggcggatcacccctcggggtacggagcagctttggacggtgggcccgcgggctacttcctctcctccggccacaccaggcctgatggggcccctgccctggagagtcctcgcatcgagataacctcgtgcttgggcctgtaccacaacaataaccagtttttccacgatgtggaggtggaagacgtcctccctagctccaaacggtccccctccacggccacgctgagtctgcccagcctggaggcctacagagacccctcgtgcctgagcccggccagcagcctgtcctcccggagctgcaactcagaggcctcctcctacgagtccaactactcgtacccgtacgcgtccccccagacgtcgccatggcagtctccctgcgtgtctcccaagaccacggaccccgaggagggctttccccgcgggctgggggcctgcacactgctgggttccccgcggcactccccctccacctcgccccgcgccagcgtcactgaggagagctggctgggtgcccgctcctccagacccgcgtccccttgcaacaagaggaagtacagcctcaacggccggcagccgccctactcaccccaccactcgcccacgccgtccccgcacggctccccgcgggtcagcgtgaccgacgactcgtggttgggcaacaccacccagtacaccagctcggccatcgtggccgccatcaacgcgctgaccaccgacagcagcctggacctgggagatggcgtccctgtcaagtcccgcaagaccaccctggagcagccgccctcagtggcgctcaaggtggagcccgtcggggaggacctgggcagccccccgcccccggccgacttcgcgcccgaagactactcctctttccagcacatcaggaagggcggcttctgcgaccagtacctggcggtgccgcagcacccctaccagtgggcgaagcccaagcccctgtcccctacgtcctacatgagcccgaccctgcccgccctggactggcagctgccgtcccactcaggcccgtatgagcttcggattgaggtgcagcccaagtcccaccaccgagcccactacgagacggagggcagccggggggccgtgaaggcgtcggccggaggacaccccatcgtgcagctgcatggctacttggagaatgagccgctgatgctgcagcttttcattgggacggcggacgaccgcctgctgcgcccgcacgccttctaccaggtgcaccgcatcacagggaagaccgtgtccaccaccagccacgaggccatcctctccaacaccaaagtcctggagatcccactcctgccggagaacagcatgcgagccgtcattgactgtgccggaatcctgaaactcagaaactccgacattgaacttcggaaaggagagacggacatcgggaggaagaacacacgggtacggctggtgttccgcgttcacgtcccgcaacccagcggccgcacgctgtccctgcaggtggcctccaaccccatcgaatgctcccagcgctcagctcaggagctgcctctggtggagaagcagagcacggacagctatccggtcgtgggcgggaagaagatggtcctgtctggccacaacttcctgcaggactccaaggtcattttcgtggagaaagccccagatggccaccatgtctgggagatggaagcgaaaactgaccgggacctgtgcaagccgaattctctggtggttgagatcccgccatttcggaatcagaggataaccagccccgttcacgtcagtttctacgtctgcaacgggaagagaaagcgaagccagtaccagcgtttcacctaccttcccgccaacgttccaattataaaaacagaacccactgatgattatgagcctgctccaacctgtggaccggtgagccaggggttaagtcctctcccaagaccatactacagccagcagctcgcgatgccacccgaccccagctcctgcctcgtggccggcttcccgccctgtccgcagagaagcaccctgatgccagcngcccctggcgtgagccccaagctccacgacctttctcccgctgcctacaccaagggcgttgccagcccgggccactgtcacctcggactcccgcagccggccggagaggcccccgccgtccaggacgtgcccaggccagtggccacgcaccccggctcgcccgggcagccacccccggccctgctgccacagcagtaaatgaaataatacgaaatgacctctccagcacgagcacccactcctagttgccacattggagcactcagttcagcaggggtatgctgacttcagcagacaaagacttttgaataaataaactgaactcacacctggtaccactcagaacctccaactgactgaatgccaggagctgaacattaatatgtgcaaagattggctctccaacaagaaggaaagcagggaggaagggagaccactgtgtcacctggaggagaagtcatctcatgacaacagaagggaggtggccgggctgagcacgggagacccaccgtgcaggggcctttcatgggaacggcccacacgcagtttgaccccacgcccagcccttctggcacccctggggttcaatactggaagtgccttatttaaccagaccatcagggcatcatagaattgagcattgaatttgctactgtaggagtatttttaggagcagaaactgcaaacacatttcattgtgaggttttaccctctgtatgaatgaagagaacgctggaaggctgcgagaggactctagtatgagtctccaacatttggaacgtttcctgggctgtcacgtacactcctgctgccttacacagtgcattttagaatcttccagtctgtcatctcagctcttttgtaccgtgcgctccggcacaatcgcgtctcttgtgtctcactcacggaaagaaacaacctgaaggccatcccgtcggtctgcacgtaaccgtgaagacgtgtggccgcgtcccacctgcggctgggtaccctgcacccggcactgtaggagtcacgtgcagcctttctcaggggactgtcattgaaaaggaaacgtttgatgtctgtgtcagctgtctttgtagttaggaaatagatccaataaagccgtatttttttgctggaaaaaaaaa

SEQ ID NO: 82911 - DNA, 4587 bp, Homo sapiens
  misc_feature (2588)..(2588): n is a, c, g, or t
ggcgcggcacgaggcgggcgctcggcgactcgtccccggggccccgcgcgggcccgggcagcaggggcgtgatgtcacggcagggagggggcgcgggagccgccgggccggcggggaggcgggggaggtgttttccagctttaaaaaggcaggaggcagagcgcggccctgcgtcagagcgagactcagaggctccgaactcgccggcggagtcgccgcgccagatcccagcagcagggcgcgggcaccggggcgcgggcagggctcggagccaccgcgcaggtcctagggccgcggccgggccccgccacgcgcgcacacgcccctcgatgactttcctccggggcgcgcggcgctgagcccggggcgagggctgtcttcccggagacccgaccccggcagcgcggggcggccgcttctcctgtgcctccgcccgccgctccactccccgccgccgccgcgcggatgccaagcaccagctttccagtcccttccaagtttccacttggccctgcggctgcggtcttcgggagaggagaaactttggggcccgcgccgcgcgccggcggcaccatgaagtcagcggaggaagaacactatggctatgcatcctccaacgtcagccccgccctgccgctccccacggcgcactccaccctgccggccccgtgccacaaccttcagacctccacaccgggcatcatcccgccggcggatcacccctcggggtggaagacgtcctccctagctccaaacggtccccctccacggccacgctgagtctgcccagcctggaggcctacagagacccctcgtgcctgagcccggccagcagcctgtcctcccggagctgcaactcagaggcctcctcctacgagtccaactactcgtacccgtacgcgtccccccagacgtcgccatggcagtctccctgcgtgtctcccaagaccacggaccccgaggagggctttccccgcgggctgggggcctgcacactgctgggttccccgcggcactccccctccacctcgccccgcgccagcgtcactgaggagagctggctgggtgcccgctcctccagacccgcgtccccttgcaacaagaggaagtacagcctcaacggccggcagccgccctactcaccccaccactcgcccacgccgtccccgcacggctccccgcgggtcagcgtgaccgacgactcgtggttgggcaacaccacccagtacaccagctcggccatcgtggccgccatcaacgcgctgaccaccgacagcagcctggacctgggagatggcgtccctgtcaagtcccgcaagaccaccctggagcagccgccctcagtggcgctcaaggtggagcccgtcggggaggacctgggcagccccccgcccccggccgacttcgcgcccgaagactactcctctttccagcacatcaggaagggcggcttctgcgaccagtacctggcggtgccgcagcacccctaccagtgggcgaagcccaagcccctgtcccctacgtcctacatgagcccgaccctgcccgccctggactggcagctgccgtcccactcaggcccgtatgagcttcggattgaggtgcagcccaagtcccaccaccgagcccactacgagacggagggcagccggggggccgtgaaggcgtcggccggaggacaccccatcgtgcagctgcatggctacttggagaatgagccgctgatgctgcagcttttcattgggacggcggacgaccgcctgctgcgcccgcacgccttctaccaggtgcaccgcatcacagggaagaccgtgtccaccaccagccacgaggccatcctctccaacaccaaagtcctggagatcccactcctgccggagaacagcatgcgagccgtcattgactgtgccggaatcctgaaactcagaaactccgacattgaacttcggaaaggagagacggacatcgggaggaagaacacacgggtacggctggtgttccgcgttcacgtcccgcaacccagcggccgcacgctgtccctgcaggtggcctccaaccccatcgaatgctcccagcgctcagctcaggagctgcctctggtggagaagcagagcacggacagctatccggtcgtgggcgggaagaagatggtcctgtctggccacaacttcctgcaggactccaaggtcattttcgtggagaaagccccagatggccaccatgtctgggagatggaagcgaaaactgaccgggacctgtgcaagccgaattctctggtggttgagatcccgccatttcggaatcagaggataaccagccccgttcacgtcagtttctacgtctgcaacgggaagagaaagcgaagccagtaccagcgtttcacctaccttcccgccaacgttccaattataaaaacagaacccactgatgattatgagcctgctccaacctgtggaccggtgagccaggggttaagtcctctcccaagaccatactacagccagcagctcgcgatgccacccgaccccagctcctgcctcgtggccggcttcccgccctgtccgcagagaagcaccctgatgccagcngcccctggcgtgagccccaagctccacgacctttctcccgctgcctacaccaagggcgttgccagcccgggccactgtcacctcggactcccgcagccggccggagaggcccccgccgtccaggacgtgcccaggccagtggccacgcaccccggctcgcccgggcagccacccccggccctgctgccacagcagtaaatgaaataatacgaaatgacctctccagcacgagcacccactcctagttgccacattggagcactcagttcagcaggggtatgctgacttcagcagacaaagacttttgaataaataaactgaactcacacctggtaccactcagaacctccaactgactgaatgccaggagctgaacattaatatgtgcaaagattggctctccaacaagaaggaaagcagggaggaagggagaccactgtgtcacctggaggagaagtcatctcatgacaacagaagggaggtggccgggctgagcacgggagacccaccgtgcaggggcctttcatgggaacggcccacacgcagtttgaccccacgcccagcccttctggcacccctggggttcaatactggaagtgccttatttaaccagaccatcagggcatcatagaattgagcattgaatttgctactgtaggagtatttttaggagcagaaactgcaaacacatttcattgtgaggttttaccctctgtatgaatgaagagaacgctggaaggctgcgagaggactctagtatgagtctccaacatttggaacgtttcctgggctgtcacgtacactcctgctgccttacacagtgcattttagaatcttccagtctgtcatctcagctcttttgtaacatgcttcccttgtctgcgcggttgaaaccgtaggcttgttcatagtcgcatgctcgcatctttgtttttaatctggcttcgaacatagcacaagtaacttgaatagcacatcaataggttactggacaaaagcagaaaaacctgttacaggatagcctgcatttgcatgtgtgtacatatctaggcatctatttatgtataaataataacagagccgacgtgtcctcgcccaggagggcttccctgtcagcaataaccggcatccgttttggaacctgcgtctggggctccagtcgctgctcttgctggcgtccatcgccgcctcggacggccgtgcattttctcgtctcacgcagttcgaggaggaccctagaaagccaggagctgtgattgacagtagctgtaggttaccagacggcaacattagaaagtgattgtaaataacatgcaacctaagtgtaatatatttgttcagttataagatgattgtttcacagaagccttaccactctctgcttcatctaagaaaaccaataccaaaaacgccactttaatgctcagccctgcgttgtgtgttttcagatgagttactgttaacaggtaggtttgtgtaggccttgctgggcactctgtacaattagttgcttattacgtatgattactcgcagcgatctattgttccatataaccaaaaagcatggtttattcattgaaacacggttgacctgaactcgtgccttaggaattaatgcccccttatggaacctgcctgaattgcacctgcgggtggaggctccggctgtgaagtcactgaacagaacgtcgctgatggagaaagggctcccgcagaaggaacggcctgtaccgtgcgctccggcacaatcgcgtctcttgtgtctcactcacggaaagaaacaacctgaaggccatcccgtcggtctgcacgtaaccgtgaagacgtgtggccgcgtcccacctgcggctgggtaccctgcacccggcactgtaggagtcacgtgcagcctttctcaggggactgtcattgaaaaggaaacgtttgatgtctgtgtcagctgtctttgtagttaggaaatagatccaataaagccgtatttttttgctggaaaaaaaaa

SEQ ID NO: 82912 - DNA, 3415 bp, Homo sapiens
  misc_feature (1416)..(1416): n is a, c, g, or t
ggaacggcaccacactctgtgtttacctctcaagacgctgatgagcaactcatcccacagaacagctggtcctgaacatgtgtgtgccctgccgtgaggcgcacaccttcccagaggcgtgagtggggcccggccactagtgtcctggcggaagcaccggggctgctccatttgtctggagtcctgtcccagtggtgtgggttttgagtctcacccacacggcgccggccgagaagccatgagcggctctgcagggtggtgcggactatagacacctccatgcatggttgccctaggcagtgtctgccgccagcgtctgcctctggacactagctgctcagccaccaggacggcgttgagcgctcccctgcctctgcaggaggagaggggcagggagccatcaggaagggtgctggggcctggggcccgtcgtgctgtgtgtgtgcaaacgcagtgtggcgtcccctgatcaggagtgggagctgcgcgctgcccggttccaggttaatggaacacaggaagctgcatggctacttggagaatgagccgctgatgctgcagcttttcattgggacggcggacgaccgcctgctgcgcccgcacgccttctaccaggtgcaccgcatcacagggaagaccgtgtccaccaccagccacgaggccatcctctccaacaccaaagtcctggagatcccactcctgccggagaacagcatgcgagccgtcattgactgtgccggaatcctgaaactcagaaactccgacattgaacttcggaaaggagagacggacatcgggaggaagaacacacgggtacggctggtgttccgcgttcacgtcccgcaacccagcggccgcacgctgtccctgcaggtggcctccaaccccatcgaatgctcccagcgctcagctcaggagctgcctctggtggagaagcagagcacggacagctatccggtcgtgggcgggaagaagatggtcctgtctggccacaacttcctgcaggactccaaggtcattttcgtggagaaagccccagatggccaccatgtctgggagatggaagcgaaaactgaccgggacctgtgcaagccgaattctctggtggttgagatcccgccatttcggaatcagaggataaccagccccgttcacgtcagtttctacgtctgcaacgggaagagaaagcgaagccagtaccagcgtttcacctaccttcccgccaacgttccaattataaaaacagaacccactgatgattatgagcctgctccaacctgtggaccggtgagccaggggttaagtcctctcccaagaccatactacagccagcagctcgcgatgccacccgaccccagctcctgcctcgtggccggcttcccgccctgtccgcagagaagcaccctgatgccagcngcccctggcgtgagccccaagctccacgacctttctcccgctgcctacaccaagggcgttgccagcccgggccactgtcacctcggactcccgcagccggccggagaggcccccgccgtccaggacgtgcccaggccagtggccacgcaccccggctcgcccgggcagccacccccggccctgctgccacagcagtaaatgaaataatacgaaatgacctctccagcacgagcacccactcctagttgccacattggagcactcagttcagcaggggtatgctgacttcagcagacaaagacttttgaataaataaactgaactcacacctggtaccactcagaacctccaactgactgaatgccaggagctgaacattaatatgtgcaaagattggctctccaacaagaaggaaagcagggaggaagggagaccactgtgtcacctggaggagaagtcatctcatgacaacagaagggaggtggccgggctgagcacgggagacccaccgtgcaggggcctttcatgggaacggcccacacgcagtttgaccccacgcccagcccttctggcacccctggggttcaatactggaagtgccttatttaaccagaccatcagggcatcatagaattgagcattgaatttgctactgtaggagtatttttaggagcagaaactgcaaacacatttcattgtgaggttttaccctctgtatgaatgaagagaacgctggaaggctgcgagaggactctagtatgagtctccaacatttggaacgtttcctgggctgtcacgtacactcctgctgccttacacagtgcattttagaatcttccagtctgtcatctcagctcttttgtaacatgcttcccttgtctgcgcggttgaaaccgtaggcttgttcatagtcgcatgctcgcatctttgtttttaatctggcttcgaacatagcacaagtaacttgaatagcacatcaataggttactggacaaaagcagaaaaacctgttacaggatagcctgcatttgcatgtgtgtacatatctaggcatctatttatgtataaataataacagagccgacgtgtcctcgcccaggagggcttccctgtcagcaataaccggcatccgttttggaacctgcgtctggggctccagtcgctgctcttgctggcgtccatcgccgcctcggacggccgtgcattttctcgtctcacgcagttcgaggaggaccctagaaagccaggagctgtgattgacagtagctgtaggttaccagacggcaacattagaaagtgattgtaaataacatgcaacctaagtgtaatatatttgttcagttataagatgattgtttcacagaagccttaccactctctgcttcatctaagaaaaccaataccaaaaacgccactttaatgctcagccctgcgttgtgtgttttcagatgagttactgttaacaggtaggtttgtgtaggccttgctgggcactctgtacaattagttgcttattacgtatgattactcgcagcgatctattgttccatataaccaaaaagcatggtttattcattgaaacacggttgacctgaactcgtgccttaggaattaatgcccccttatggaacctgcctgaattgcacctgcgggtggaggctccggctgtgaagtcactgaacagaacgtcgctgatggagaaagggctcccgcagaaggaacggcctgtaccgtgcgctccggcacaatcgcgtctcttgtgtctcactcacggaaagaaacaacctgaaggccatcccgtcggtctgcacgtaaccgtgaagacgtgtggccgcgtcccacctgcggctgggtaccctgcacccggcactgtaggagtcacgtgcagcctttctcaggggactgtcattgaaaaggaaacgtttgatgtctgtgtcagctgtctttgtagttaggaaatagatccaataaagccgtatttttttgctggaaaaaaaaa

SEQ ID NO: 82913 - DNA, 2046 bp, Homo sapiens
actggtgctgacaccacagaagtgctggtgtggacctgtgggtcgcttggttcgtggagagacagccacagcatcttcccagcatcgcggccggcacctggcacctgcactttggccgtcagagacgtgctggtaccgtgctacggacgagggcggtcactctggcgaccccagctctctgccgaggcagccaggcactggctcacgacactcatggaccagggcgggaccgaggaggaaattaaatgaaataatacgaaatgacctctccagcacgagcacccactcctagttgccacattggagcactcagttcagcaggggtatgctgacttcagcagacaaagacttttgaataaataaactgaactcacacctggtaccactcagaacctccaactgactgaatgccaggagctgaacattaatatgtgcaaagattggctctccaacaagaaggaaagcagggaggaagggagaccactgtgtcacctggaggagaagtcatctcatgacaacagaagggaggtggccgggctgagcacgggagacccaccgtgcaggggcctttcatgggaacggcccacacgcagtttgaccccacgcccagcccttctggcacccctggggttcaatactggaagtgccttatttaaccagaccatcagggcatcatagaattgagcattgaatttgctactgtaggagtatttttaggagcagaaactgcaaacacatttcattgtgaggttttaccctctgtatgaatgaagagaacgctggaaggctgcgagaggactctagtatgagtctccaacatttggaacgtttcctgggctgtcacgtacactcctgctgccttacacagtgcattttagaatcttccagtctgtcatctcagctcttttgtaacatgcttcccttgtctgcgcggttgaaaccgtaggcttgttcatagtcgcatgctcgcatctttgtttttaatctggcttcgaacatagcacaagtaacttgaatagcacatcaataggttactggacaaaagcagaaaaacctgttacaggatagcctgcatttgcatgtgtgtacatatctaggcatctatttatgtataaataataacagagccgacgtgtcctcgcccaggagggcttccctgtcagcaataaccggcatccgttttggaacctgcgtctggggctccagtcgctgctcttgctggcgtccatcgccgcctcggacggccgtgcattttctcgtctcacgcagttcgaggaggaccctagaaagccaggagctgtgattgacagtagctgtaggttaccagacggcaacattagaaagtgattgtaaataacatgcaacctaagtgtaatatatttgttcagttataagatgattgtttcacagaagccttaccactctctgcttcatctaagaaaaccaataccaaaaacgccactttaatgctcagccctgcgttgtgtgttttcagatgagttactgttaacaggtaggtttgtgtaggccttgctgggcactctgtacaattagttgcttattacgtatgattactcgcagcgatctattgttccatataaccaaaaagcatggtttattcattgaaacacggttgacctgaactcgtgccttaggaattaatgcccccttatggaacctgcctgaattgcacctgcgggtggaggctccggctgtgaagtcactgaacagaacgtcgctgatggagaaagggctcccgcagaaggaacggcctgtaccgtgcgctccggcacaatcgcgtctcttgtgtctcactcacggaaagaaacaacctgaaggccatcccgtcggtctgcacgtaaccgtgaagacgtgtggccgcgtcccacctgcggctgggtaccctgcacccggcactgtaggagtcacgtgcagcctttctcaggggactgtcattgaaaaggaaacgtttgatgtctgtgtcagctgtctttgtagttaggaaatagatccaataaagccgtatttttttgctggaaaaaaaaa

SEQ ID NO: 82914 - DNA, 3152 bp, Homo sapiens
ggcgcggcacgaggcgggcgctcggcgactcgtccccggggccccgcgcgggcccgggcagcaggggcgtgatgtcacggcagggagggggcgcgggagccgccgggccggcggggaggcgggggaggtgttttccagctttaaaaaggcaggaggcagagcgcggccctgcgtcagagcgagactcagaggctccgaactcgccggcggagtcgccgcgccagatcccagcagcagggcgcgggcaccggggcgcgggcagggctcggagccaccgcgcaggtcctagggccgcggccgggccccgccacgcgcgcacacgcccctcgatgactttcctccggggcgcgcggcgctgagcccggggcgagggctgtcttcccggagacccgaccccggcagcgcggggcggccgcttctcctgtgcctccgcccgccgctccactccccgccgccgccgcgcggatgccaagcaccagctttccagtcccttccaagtttccacttggccctgcggctgcggtcttcgggagaggagaaactttggggcccgcgccgcgcgccggcggcaccatgaagtcagcggaggaagaacactatggctatgcatcctccaacgtcagccccgccctgccgctccccacggcgcactccaccctgccggccccgtgccacaaccttcagacctccacaccgggcatcatcccgccggcggatcacccctcggggtacggagcagctttggacggtgggcccgcgggctacttcctctcctccggccacaccaggcctgatggggcccctgccctggagagtcctcgcatcgagataacctcgtgcttgggcctgtaccacaacaataaccagtttttccacgatgtggaggtggaagacgtcctccctagctccaaacggtccccctccacggccacgctgagtctgcccagcctggaggcctacagagacccctcgtgcctgagcccggccagcagcctgtcctcccggagctgcaactcagaggcctcctcctacgagtccaactactcgtacccgtacgcgtccccccagacgtcgccatggcagtctccctgcgtgtctcccaagaccacggaccccgaggagggctttccccgcgggctgggggcctgcacactgctgggttccccgcggcactccccctccacctcgccccgcgccagcgtcactgaggagagctggctgggtgcccgctcctccagacccgcgtccccttgcaacaagaggaagtacagcctcaacggccggcagccgccctactcaccccaccactcgcccacgccgtccccgcacggctccccgcgggtcagcgtgaccgacgactcgtggttgggcaacaccacccagtacaccagctcggccatcgtggccgccatcaacgcgctgaccaccgacagcagcctggacctgggagatggcgtccctgtcaagtcccgcaagaccaccctggagcagccgccctcagtggcgctcaaggtggagcccgtcggggaggacctgggcagccccccgcccccggccgacttcgcgcccgaagactactcctctttccagcacatcaggaagggcggcttctgcgaccagtacctggcggtgccgcagcacccctaccagtgggcgaagcccaagcccctgtcccctacgtcctacatgagcccgaccctgcccgccctggactggcagctgccgtcccactcaggcccgtatgagcttcggattgaggtgcagcccaagtcccaccaccgagcccactacgagacggagggcagccggggggccgtgaaggcgtcggccggaggacaccccatcgtgcagctgcatggctacttggagaatgagccgctgatgctgcagcttttcattgggacggcggacgaccgcctgctgcgcccgcacgccttctaccaggtgcaccgcatcacagggaagaccgtgtccaccaccagccacgaggccatcctctccaacaccaaagtcctggagatcccactcctgccggagaacagcatgcgagccgtcattgactgtgccggaatcctgaaactcagaaactccgacattgaacttcggaaaggagagacggacatcgggaggaagaacacacgggtacggctggtgttccgcgttcacgtcccgcaacccagcggccgcacgctgtccctgcaggtggcctccaaccccatcgaatgctcccagcgctcagctcaggagctgcctctggtggagaagcagagcacggacagctatccggtcgtgggcgggaagaagatggtcctgtctggccacaacttcctgcaggactccaaggtcattttcgtggagaaagccccagatggccaccatgtctgggagatggaagcgaaaactgaccgggacctgtgcaagccgaattctctggtggttgagatcccgccatttcggaatcagaggataaccagccccgttcacgtcagtttctacgtctgcaacgggaagagaaagcgaagccagtaccagcgtttcacctaccttcccgccaacggtaacgccatctttctaaccgtaagccgtgaacatgagcgcgtggggtgctttttctaaagacgcagaaacgacgtcgccgtaaagcagcgtggcgtgttgcacatttaactgtgtgatgtcccgttagtgagaccgagccatcgatgccctgaaaaggaaaggaaaagggaagcttcggatgcattttccttgatccctgttgggggtggggggcgggggttgcatactcagatagtcacggttattttgcttcttgcgaatgtataacagccaaggggaaaacatggctcttctgctccaaaaaactgagggggtcctggtgtgcatttgcaccctaaagctgcttacggtgaaaaggcaaataggtatagctattttgcaggcacctttaggaataaactttgcttttaagcctgtagtcctgatgtggtctttaaggatggtgaatgagctttgtgctgggcggacgtccccgagacacttctccaggggtaacttcatctcctgggaccacgggcatccaggctggggcaccttctcctcaacctgcctgcccctcacccgccgtgggaatggctccttttcactcatac

SEQ ID NO: 82915 - DNA, 547 bp, Homo sapiens
agcggccgcacgctgtccctgcaggtggcctccaaccccatcgaatgctgtaagtggacgtccacgcgcccacaggggaggaaaccgtcccgtcacatgcgcttcactgtctcaccctctctcagcttttcgttcgtgtagacttgggactgaacggttcccaccaaacccaccacagtgtgtggccacgaggggtctgagttgatcatggctgagttattgcctgtggcctcccgggggcccctggcgctggctcctctgatggctgagcatggccagggaaagcggtgtgggccggggcttcccctcacgctgcgctgacctttgcgtatttgtgcgatgactgtgatttgagtgaaattggctgagtcttaggaagatattttgatgacttcttcagaacgaggtggagaccatcaggatgaagtgtgcacggcttctcccctagaagtagtggcatccgcaggggtcggcccgcaggtcgtggcggtgcttgctctgggtgggtcggctcacgtgtgacctgctgggtgccacacgtgtgccc

SEQ ID NO: 82916 - DNA, 525 bp, Homo sapiens
cccgccatttcggaatcagaggataaccagccccgttcacgtcagtttctacgtctgcaacgggaagagaaagcgaagccagtaccagcgtttcacctaccttcccgccaacggtaacgccatctttctaaccgtaagccgtgaacatgagcgcgtggggtgctttttctaaagacgcagaaacgacgtcgccgtaaagcagcgtggcgtgttgcacatttaactgtgtgatgtcccgttagtgagaccgagccatcgatgccctgaaaaggaaaggaaaagggaagcttcggatgcattttccttgatccctgttgggggtggggggcgggggttgcatactcagatagtcacggttattttgcttcttgcgaatgtataacagccaaggggaaaacatggctcttctgctccaaaaaactgagggggtcctggtgtgcatttgcaccctaaagctgcttacggtgaaaaggcaaataggtatagctattttgcaggcacctttaggaataaactttgctttta

SEQ ID NO: 82917 - DNA, 4744 bp, Homo sapiens
  misc_feature (2745)..(2745): n is a, c, g, or t
ggcgcggcacgaggcgggcgctcggcgactcgtccccggggccccgcgcgggcccgggcagcaggggcgtgatgtcacggcagggagggggcgcgggagccgccgggccggcggggaggcgggggaggtgttttccagctttaaaaaggcaggaggcagagcgcggccctgcgtcagagcgagactcagaggctccgaactcgccggcggagtcgccgcgccagatcccagcagcagggcgcgggcaccggggcgcgggcagggctcggagccaccgcgcaggtcctagggccgcggccgggccccgccacgcgcgcacacgcccctcgatgactttcctccggggcgcgcggcgctgagcccggggcgagggctgtcttcccggagacccgaccccggcagcgcggggcggccgcttctcctgtgcctccgcccgccgctccactccccgccgccgccgcgcggatgccaagcaccagctttccagtcccttccaagtttccacttggccctgcggctgcggtcttcgggagaggagaaactttggggcccgcgccgcgcgccggcggcaccatgaagtcagcggaggaagaacactatggctatgcatcctccaacgtcagccccgccctgccgctccccacggcgcactccaccctgccggccccgtgccacaaccttcagacctccacaccgggcatcatcccgccggcggatcacccctcggggtacggagcagctttggacggtgggcccgcgggctacttcctctcctccggccacaccaggcctgatggggcccctgccctggagagtcctcgcatcgagataacctcgtgcttgggcctgtaccacaacaataaccagtttttccacgatgtggaggtggaagacgtcctccctagctccaaacggtccccctccacggccacgctgagtctgcccagcctggaggcctacagagacccctcgtgcctgagcccggccagcagcctgtcctcccggagctgcaactcagaggcctcctcctacgagtccaactactcgtacccgtacgcgtccccccagacgtcgccatggcagtctccctgcgtgtctcccaagaccacggaccccgaggagggctttccccgcgggctgggggcctgcacactgctgggttccccgcggcactccccctccacctcgccccgcgccagcgtcactgaggagagctggctgggtgcccgctcctccagacccgcgtccccttgcaacaagaggaagtacagcctcaacggccggcagccgccctactcaccccaccactcgcccacgccgtccccgcacggctccccgcgggtcagcgtgaccgacgactcgtggttgggcaacaccacccagtacaccagctcggccatcgtggccgccatcaacgcgctgaccaccgacagcagcctggacctgggagatggcgtccctgtcaagtcccgcaagaccaccctggagcagccgccctcagtggcgctcaaggtggagcccgtcggggaggacctgggcagccccccgcccccggccgacttcgcgcccgaagactactcctctttccagcacatcaggaagggcggcttctgcgaccagtacctggcggtgccgcagcacccctaccagtgggcgaagcccaagcccctgtcccctacgtcctacatgagcccgaccctgcccgccctggactggcagctgccgtcccactcaggcccgtatgagcttcggattgaggtgcagcccaagtcccaccaccgagcccactacgagacggagggcagccggggggccgtgaaggcgtcggccggaggacaccccatcgtgcagctgcatggctacttggagaatgagccgctgatgctgcagcttttcattgggacggcggacgaccgcctgctgcgcccgcacgccttctaccaggtgcaccgcatcacagggaagaccgtgtccaccaccagccacgaggccatcctctccaacaccaaagtcctggagatcccactcctgccggagaacagcatgcgagccgtcattgactgtgccggaatcctgaaactcagaaactccgacattgaacttcggaaaggagagacggacatcgggaggaagaacacacgggtacggctggtgttccgcgttcacgtcccgcaacccagcggccgcacgctgtccctgcaggtggcctccaaccccatcgaatgctcccagcgctcagctcaggagctgcctctggtggagaagcagagcacggacagctatccggtcgtgggcgggaagaagatggtcctgtctggccacaacttcctgcaggactccaaggtcattttcgtggagaaagccccagatggccaccatgtctgggagatggaagcgaaaactgaccgggacctgtgcaagccgaattctctggtggttgagatcccgccatttcggaatcagaggataaccagccccgttcacgtcagtttctacgtctgcaacgggaagagaaagcgaagccagtaccagcgtttcacctaccttcccgccaacgttccaattataaaaacagaacccactgatgattatgagcctgctccaacctgtggaccggtgagccaggggttaagtcctctcccaagaccatactacagccagcagctcgcgatgccacccgaccccagctcctgcctcgtggccggcttcccgccctgtccgcagagaagcaccctgatgccagcngcccctggcgtgagccccaagctccacgacctttctcccgctgcctacaccaagggcgttgccagcccgggccactgtcacctcggactcccgcagccggccggagaggcccccgccgtccaggacgtgcccaggccagtggccacgcaccccggctcgcccgggcagccacccccggccctgctgccacagcagtaaatgaaataatacgaaatgacctctccagcacgagcacccactcctagttgccacattggagcactcagttcagcaggggtatgctgacttcagcagacaaagacttttgaataaataaactgaactcacacctggtaccactcagaacctccaactgactgaatgccaggagctgaacattaatatgtgcaaagattggctctccaacaagaaggaaagcagggaggaagggagaccactgtgtcacctggaggagaagtcatctcatgacaacagaagggaggtggccgggctgagcacgggagacccaccgtgcaggggcctttcatgggaacggcccacacgcagtttgaccccacgcccagcccttctggcacccctggggttcaatactggaagtgccttatttaaccagaccatcagggcatcatagaattgagcattgaatttgctactgtaggagtatttttaggagcagaaactgcaaacacatttcattgtgaggttttaccctctgtatgaatgaagagaacgctggaaggctgcgagaggactctagtatgagtctccaacatttggaacgtttcctgggctgtcacgtacactcctgctgccttacacagtgcattttagaatcttccagtctgtcatctcagctcttttgtaacatgcttcccttgtctgcgcggttgaaaccgtaggcttgttcatagtcgcatgctcgcatctttgtttttaatctggcttcgaacatagcacaagtaacttgaatagcacatcaataggttactggacaaaagcagaaaaacctgttacaggatagcctgcatttgcatgtgtgtacatatctaggcatctatttatgtataaataataacagagccgacgtgtcctcgcccaggagggcttccctgtcagcaataaccggcatccgttttggaacctgcgtctggggctccagtcgctgctcttgctggcgtccatcgccgcctcggacggccgtgcattttctcgtctcacgcagttcgaggaggaccctagaaagccaggagctgtgattgacagtagctgtaggttaccagacggcaacattagaaagtgattgtaaataacatgcaacctaagtgtaatatatttgttcagttataagatgattgtttcacagaagccttaccactctctgcttcatctaagaaaaccaataccaaaaacgccactttaatgctcagccctgcgttgtgtgttttcagatgagttactgttaacaggtaggtttgtgtaggccttgctgggcactctgtacaattagttgcttattacgtatgattactcgcagcgatctattgttccatataaccaaaaagcatggtttattcattgaaacacggttgacctgaactcgtgccttaggaattaatgcccccttatggaacctgcctgaattgcacctgcgggtggaggctccggctgtgaagtcactgaacagaacgtcgctgatggagaaagggctcccgcagaaggaacggcctgtaccgtgcgctccggcacaatcgcgtctcttgtgtctcactcacggaaagaaacaacctgaaggccatcccgtcggtctgcacgtaaccgtgaagacgtgtggccgcgtcccacctgcggctgggtaccctgcacccggcactgtaggagtcacgtgcagcctttctcaggggactgtcattgaaaaggaaacgtttgatgtctgtgtcagctgtctttgtagttaggaaatagatccaataaagccgtatttttttgctggaaaaaaaaa

SEQ ID NO: 82918 - DNA, 2977 bp, Homo sapiens
ggcgcggcacgaggcgggcgctcggcgactcgtccccggggccccgcgcgggcccgggcagcaggggcgtgatgtcacggcagggagggggcgcgggagccgccgggccggcggggaggcgggggaggtgttttccagctttaaaaaggcaggaggcagagcgcggccctgcgtcagagcgagactcagaggctccgaactcgccggcggagtcgccgcgccagatcccagcagcagggcgcgggcaccggggcgcgggcagggctcggagccaccgcgcaggtcctagggccgcggccgggccccgccacgcgcgcacacgcccctcgatgactttcctccggggcgcgcggcgctgagcccggggcgagggctgtcttcccggagacccgaccccggcagcgcggggcggccgcttctcctgtgcctccgcccgccgctccactccccgccgccgccgcgcggatgccaagcaccagctttccagtcccttccaagtttccacttggccctgcggctgcggtcttcgggagaggagaaactttggggcccgcgccgcgcgccggcggcaccatgaagtcagcggaggaagaacactatggctatgcatcctccaacgtcagccccgccctgccgctccccacggcgcactccaccctgccggccccgtgccacaaccttcagacctccacaccgggcatcatcccgccggcggatcacccctcggggtacggagcagctttggacggtgggcccgcgggctacttcctctcctccggccacaccaggcctgatggggcccctgccctggagagtcctcgcatcgagataacctcgtgcttgggcctgtaccacaacaataaccagtttttccacgatgtggaggtggaagacgtcctccctagctccaaacggtccccctccacggccacgctgagtctgcccagcctggaggcctacagagacccctcgtgcctgagcccggccagcagcctgtcctcccggagctgcaactcagaggcctcctcctacgagtccaactactcgtacccgtacgcgtccccccagacgtcgccatggcagtctccctgcgtgtctcccaagaccacggaccccgaggagggctttccccgcgggctgggggcctgcacactgctgggttccccgcggcactccccctccacctcgccccgcgccagcgtcactgaggagagctggctgggtgcccgctcctccagacccgcgtccccttgcaacaagaggaagtacagcctcaacggccggcagccgccctactcaccccaccactcgcccacgccgtccccgcacggctccccgcgggtcagcgtgaccgacgactcgtggttgggcaacaccacccagtacaccagctcggccatcgtggccgccatcaacgcgctgaccaccgacagcagcctggacctgggagatggcgtccctgtcaagtcccgcaagaccaccctggagcagccgccctcagtggcgctcaaggtggagcccgtcggggaggacctgggcagccccccgcccccggccgacttcgcgcccgaagactactcctctttccagcacatcaggaagggcggcttctgcgaccagtacctggcggtgccgcagcacccctaccagtgggcgaagcccaagcccctgtcccctacgtcctacatgagcccgaccctgcccgccctggactggcagctgccgtcccactcaggcccgtatgagcttcggattgaggtgcagcccaagtcccaccaccgagcccactacgagacggagggcagccggggggccgtgaaggcgtcggccggaggacaccccatcgtgcagctgcatggctacttggagaatgagccgctgatgctgcagcttttcattgggacggcggacgaccgcctgctgcgcccgcacgccttctaccaggtgcaccgcatcacagggaagaccgtgtccaccaccagccacgaggccatcctctccaacaccaaagtcctggagatcccactcctgccggagaacagcatgcgagccgtcattgactgtgccggaatcctgaaactcagaaactccgacattgaacttcggaaaggagagacggacatcgggaggaagaacacacgggtacggctggtgttccgcgttcacgtcccgcaacccagcggccgcacgctgtccctgcaggtggcctccaaccccatcgaatgctcccagcgctcagctcaggagctgcctctggtggagaagcagagcacggacagctatccggtcgtgggcgggaagaagatggtcctgtctggccacaacttcctgcaggactccaaggtcattttcgtggagaaagccccagatggccaccatgtctgggagatggaagcgaaaactgaccgggacctgtgcaagccgaattctctggtggttgagatcccgccatttcggaatcagaggataaccagccccgttcacgtcagtttctacgtctgcaacgggaagagaaagcgaagccagtaccagcgtttcacctaccttcccgccaacggtaacgccatctttctaaccgtaagccgtgaacatgagcgcgtggggtgctttttctaaagacgcagaaacgacgtcgccgtaaagcagcgtggcgtgttgcacatttaactgtgtgatgtcccgttagtgagaccgagccatcgatgccctgaaaaggaaaggaaaagggaagcttcggatgcattttccttgatccctgttgggggtggggggcgggggttgcatactcagatagtcacggttattttgcttcttgcgaatgtataacagccaaggggaaaacatggctcttctgctccaaaaaactgagggggtcctggtgtgcatttgcaccctaaagctgcttacggtgaaaaggcaaataggtatagctattttgcaggcacctttaggaataaactttgcttttaagcctgta

SEQ ID NO: 82919 - DNA, 3103 bp, Homo sapiens
  misc_feature (1104)..(1104): n is a, c, g, or t
cctaaaactcagtgcccaggtccattgggataacaaggcattttctaatctgatttacaaagacaccagtatgacatggcagagaaataaaaagggggcagggcagggggacacaggcctcgaacccgccgcaggttttctctgcgttccggtgactcccggcggtctgtgctctgggtgctgagcaggtgttttctgttctctcgccagctgcatggctacttggagaatgagccgctgatgctgcagcttttcattgggacggcggacgaccgcctgctgcgcccgcacgccttctaccaggtgcaccgcatcacagggaagaccgtgtccaccaccagccacgaggccatcctctccaacaccaaagtcctggagatcccactcctgccggagaacagcatgcgagccgtcattgactgtgccggaatcctgaaactcagaaactccgacattgaacttcggaaaggagagacggacatcgggaggaagaacacacgggtacggctggtgttccgcgttcacgtcccgcaacccagcggccgcacgctgtccctgcaggtggcctccaaccccatcgaatgctcccagcgctcagctcaggagctgcctctggtggagaagcagagcacggacagctatccggtcgtgggcgggaagaagatggtcctgtctggccacaacttcctgcaggactccaaggtcattttcgtggagaaagccccagatggccaccatgtctgggagatggaagcgaaaactgaccgggacctgtgcaagccgaattctctggtggttgagatcccgccatttcggaatcagaggataaccagccccgttcacgtcagtttctacgtctgcaacgggaagagaaagcgaagccagtaccagcgtttcacctaccttcccgccaacgttccaattataaaaacagaacccactgatgattatgagcctgctccaacctgtggaccggtgagccaggggttaagtcctctcccaagaccatactacagccagcagctcgcgatgccacccgaccccagctcctgcctcgtggccggcttcccgccctgtccgcagagaagcaccctgatgccagcngcccctggcgtgagccccaagctccacgacctttctcccgctgcctacaccaagggcgttgccagcccgggccactgtcacctcggactcccgcagccggccggagaggcccccgccgtccaggacgtgcccaggccagtggccacgcaccccggctcgcccgggcagccacccccggccctgctgccacagcagtaaatgaaataatacgaaatgacctctccagcacgagcacccactcctagttgccacattggagcactcagttcagcaggggtatgctgacttcagcagacaaagacttttgaataaataaactgaactcacacctggtaccactcagaacctccaactgactgaatgccaggagctgaacattaatatgtgcaaagattggctctccaacaagaaggaaagcagggaggaagggagaccactgtgtcacctggaggagaagtcatctcatgacaacagaagggaggtggccgggctgagcacgggagacccaccgtgcaggggcctttcatgggaacggcccacacgcagtttgaccccacgcccagcccttctggcacccctggggttcaatactggaagtgccttatttaaccagaccatcagggcatcatagaattgagcattgaatttgctactgtaggagtatttttaggagcagaaactgcaaacacatttcattgtgaggttttaccctctgtatgaatgaagagaacgctggaaggctgcgagaggactctagtatgagtctccaacatttggaacgtttcctgggctgtcacgtacactcctgctgccttacacagtgcattttagaatcttccagtctgtcatctcagctcttttgtaacatgcttcccttgtctgcgcggttgaaaccgtaggcttgttcatagtcgcatgctcgcatctttgtttttaatctggcttcgaacatagcacaagtaacttgaatagcacatcaataggttactggacaaaagcagaaaaacctgttacaggatagcctgcatttgcatgtgtgtacatatctaggcatctatttatgtataaataataacagagccgacgtgtcctcgcccaggagggcttccctgtcagcaataaccggcatccgttttggaacctgcgtctggggctccagtcgctgctcttgctggcgtccatcgccgcctcggacggccgtgcattttctcgtctcacgcagttcgaggaggaccctagaaagccaggagctgtgattgacagtagctgtaggttaccagacggcaacattagaaagtgattgtaaataacatgcaacctaagtgtaatatatttgttcagttataagatgattgtttcacagaagccttaccactctctgcttcatctaagaaaaccaataccaaaaacgccactttaatgctcagccctgcgttgtgtgttttcagatgagttactgttaacaggtaggtttgtgtaggccttgctgggcactctgtacaattagttgcttattacgtatgattactcgcagcgatctattgttccatataaccaaaaagcatggtttattcattgaaacacggttgacctgaactcgtgccttaggaattaatgcccccttatggaacctgcctgaattgcacctgcgggtggaggctccggctgtgaagtcactgaacagaacgtcgctgatggagaaagggctcccgcagaaggaacggcctgtaccgtgcgctccggcacaatcgcgtctcttgtgtctcactcacggaaagaaacaacctgaaggccatcccgtcggtctgcacgtaaccgtgaagacgtgtggccgcgtcccacctgcggctgggtaccctgcacccggcactgtaggagtcacgtgcagcctttctcaggggactgtcattgaaaaggaaacgtttgatgtctgtgtcagctgtctttgtagttaggaaatagatccaataaagccgtatttttttgctggaaaaaaaaa

SEQ ID NO: 82920 - DNA, 2683 bp, Homo sapiens
ggcgcggcacgaggcgggcgctcggcgactcgtccccggggccccgcgcgggcccgggcagcaggggcgtgatgtcacggcagggagggggcgcgggagccgccgggccggcggggaggcgggggaggtgttttccagctttaaaaaggcaggaggcagagcgcggccctgcgtcagagcgagactcagaggctccgaactcgccggcggagtcgccgcgccagatcccagcagcagggcgcgggcaccggggcgcgggcagggctcggagccaccgcgcaggtcctagggccgcggccgggccccgccacgcgcgcacacgcccctcgatgactttcctccggggcgcgcggcgctgagcccggggcgagggctgtcttcccggagacccgaccccggcagcgcggggcggccgcttctcctgtgcctccgcccgccgctccactccccgccgccgccgcgcggatgccaagcaccagctttccagtcccttccaagtttccacttggccctgcggctgcggtcttcgggagaggagaaactttggggcccgcgccgcgcgccggcggcaccatgaagtcagcggaggaagaacactatggctatgcatcctccaacgtcagccccgccctgccgctccccacggcgcactccaccctgccggccccgtgccacaaccttcagacctccacaccgggcatcatcccgccggcggatcacccctcggggtacggagcagctttggacggtgggcccgcgggctacttcctctcctccggccacaccaggcctgatggggcccctgccctggagagtcctcgcatcgagataacctcgtgcttgggcctgtaccacaacaataaccagtttttccacgatgtggaggtggaagacgtcctccctagctccaaacggtccccctccacggccacgctgagtctgcccagcctggaggcctacagagacccctcgtgcctgagcccggccagcagcctgtcctcccggagctgcaactcagaggcctcctcctacgagtccaactactcgtacccgtacgcgtccccccagacgtcgccatggcagtctccctgcgtgtctcccaagaccacggaccccgaggagggctttccccgcgggctgggggcctgcacactgctgggttccccgcggcactccccctccacctcgccccgcgccagcgtcactgaggagagctggctgggtgcccgctcctccagacccgcgtccccttgcaacaagaggaagtacagcctcaacggccggcagccgccctactcaccccaccactcgcccacgccgtccccgcacggctccccgcgggtcagcgtgaccgacgactcgtggttgggcaacaccacccagtacaccagctcggccatcgtggccgccatcaacgcgctgaccaccgacagcagcctggacctgggagatggcgtccctgtcaagtcccgcaagaccaccctggagcagccgccctcagtggcgctcaaggtggagcccgtcggggaggacctgggcagccccccgcccccggccgacttcgcgcccgaagactactcctctttccagcacatcaggaagggcggcttctgcgaccagtacctggcggtgccgcagcacccctaccagtgggcgaagcccaagcccctgtcccctacgtcctacatgagcccgaccctgcccgccctggactggcagctgccgtcccactcaggcccgtatgagcttcggattgaggtgcagcccaagtcccaccaccgagcccactacgagacggagggcagccggggggccgtgaaggcgtcggccggaggacaccccatcgtgcagctgcatggctacttggagaatgagccgctgatgctgcagcttttcattgggacggcggacgaccgcctgctgcgcccgcacgccttctaccaggtgcaccgcatcacagggaagaccgtgtccaccaccagccacgaggccatcctctccaacaccaaagtcctggagatcccactcctgccggagaacagcatgcgagccgtcattgactgtgccggaatcctgaaactcagaaactccgacattgaacttcggaaaggagagacggacatcgggaggaagaacacacgggtacggctggtgttccgcgttcacgtcccgcaacccagcggccgcacgctgtccctgcaggtggcctccaaccccatcgaatgctcccagcgctcagctcaggagctgcctctggtggagaagcagagcacggacagctatccggtcgtgggcgggaagaagatggtcctgtctggccacaacttcctgcaggactccaaggtcattttcgtggagaaagccccaggtatgctcttcaccaggggccatctgcggcctgggcttcggcgctggtgggaaccggttcccagtcggtggagcaggacccacctgtgcacggtcaccgggacggggcttatggggtgtggcacggagcagaggctctgcgtggcccgtgtctgcatccggctgtgggtttttgtgtgagccgacagctgtgctgctgaagggaagaggtggatgtttatttctggggccgccggggccactgcactcacatcgctgctgatactcagggagcccacgggctggggacgcagaggagggcaagacgcatttgctg

SEQ ID NO: 82921 - DNA, 603 bp, Homo sapiens
cgtggagagacagccacagcatcttcccagcatcgcggccggcacctggcacctgcactttggccgtcagagacgtgctggtaccgtgctacggacgagggcggtcactctggcgaccccagctctctgccgaggcagccaggcactggctcacgacactcatggaccagggcgggaccgaggaggaaatgtgggttcctggggagatgccttgtcacaggcgtgagcgtcactgatggagaagcagggctgggggcgttgctttgatgtttatggtatttctctaatactttctcaatttttcttttcttacagttaaatgaaataatacgaaatgacctctccagcacgagcacccactcctagttgccacattggagcactcagttcagcaggggtatgctgacttcagcagacaaagacttttgaataaataaactgaactcacacctggtaccactcagaacctccaactgactgaatgccaggagctgaacattaatatgtgcaaagattggctctccaacaagaaggaaagcagggaggaagggagaccactgtgtcacctggaggagaagtcatctcatgacaacagaagggagg

SEQ ID NO: 82922 - DNA, 962 bp, Homo sapiens
caccaacataaagtccgggtatcctaagcatgtggtgtgtatggtgtctgaaattgaatatgctgtgaaactgcctgtgtcgaaatgcagtgtttcccaagacctggaggctctctccagctgctgattgtgatcacctctcccgatcaccgctgagccctgcaggtcaccttctcctgacctattacaccactgattgcttatgctgggcacaattttatacccttgctgttgttcagtctaatcatccctataaccctatcggatcattcccatatgacagaggagaaaacctggggacacaggggctgtgtcctggccaaggccttgcttgcagcaaaaggcagagctggggtctagccaggagccccagcacagtcctgttcttcccccactaaactgagctgtgaaatagatcatggcggtctggaaaacgagctaattccgtgccgatggaggtgttgatggatgtccaccactctccacttgggaggaggccttaacatccccctcaggtctagcttctctctgtgactgagtaccttgggaaagtgggctcagaggaggaaagggacttacttgcccaagggccacagctgccaagtggcaggtaagggaccgttattctcctgtccctttcacagaggacaggaggaaagtgaggacaggtggggtacatgagtttagcctcttttctgcagcaggcccagatcagctttgcacacggttggtgctgacctcaaatgcagccctagaggggcctatctctgccctgagtattgaggtgcaggcttcttcccctttgttctgtccatttccaaaaatgtgaacacacacctcctacatgtttatattattgtgtgcatagatactaccattgtaacattttttgcggattaaaaatgcactattgtattgaaaatttcaaaggaaatgtgtaataaaacatttaaaattaaaaa

SEQ ID NO: 82923 - DNA, 498 bp, Homo sapiens
tcctgggccccatctcagcctgcagaggcctgaacgtttcccaggattgtcttctagcttctctctgtgactgagtaccttgggaaagtgggctcagaggaggaaagggacttacttgcccaagggccacagctgccaagtggcaggtaagggaccgttattctcctgtccctttcacagaggacaggaggaaagtgaggacaggtggggtacatgagtttagcctcttttctgcagcaggcccagatcagctttgcacacggttggtgctgacctcaaatgcagccctagaggggcctatctctgccctgagtattgaggtgcaggcttcttcccctttgttctgtccatttccaaaaatgtgaacacacacctcctacatgtttatattattgtgtgcatagatactaccattgtaacattttttgcggattaaaaatgcactattgtattgaaaatttcaaaggaaatgtgtaataaaacatttaaaattaaaaa

SEQ ID NO: 82924 - DNA, 346 bp, Homo sapiens
ctgagaaacactaaggatccatggccaccaccagaagctcagaagaggcaaaggaggatcttctctacaggcttcagaaggagcatggccctgccaacacctagatttcagactttagcttcgtagaactgagagacaataaatttatgttatattaagcctctcagttttgggtatttttttatagtagcatgacaaaatttttacaaaaaacaaaacaaaatttgggttacactaaatattcccatactgttttacgataatttcacctttctatttcacttgctatattttgctacagaatgaatgcaagaattttatcaaattttcctccaactcatccagg

SEQ ID NO: 82925 - DNA, 368 bp, Homo sapiens
gaccaaccagagcaggcaaactctaagtacaaaggcacatgtgacaggcgtgtaaccggtgctcacccacagctgggaacacaagacagaaaagatagctgtggcccctgccctcaagaagtgtacactgtttcttccttatttctgtttcatcagcatctgacatatagtaggtgctcaataaaggtttggagaaattgatgaaaaagaggcaagatgagaatatagagagaagacgagaaaaaagaagattccatctgggtcacaggagctgcctggggagagaactgggccttcaatgataggtggggttgcttagggggggccttgggtgggggagccttgggtggggggatgcagtgcatccc

SEQ ID NO: 82926 - DNA, 884 bp, Homo sapiens
aattttttaactccacagaagatttcagtttgcttctactgagaaattgcttctactgagaaataggatttgtcatctacctgggaactttctagagtccaagctcaattggcaaaagggcaaatgctaatatgcacatttgcccttttgcatctccaagtgcatactacttactgttcaggtttcaatttaccctttttttgtgcagataagagacagatggtgagtgtggaaatgaaggttgggtgtcggtaggttctggtagattttccttacttttttgagctcagcaatgtgataacagttttctgctgggatttattgggcctttcagggatatacagtattaatatatatattactggaaaaagatgttcagtttttaagcttttccttttcattcattcgctcattcatttattcattcattttgagacaagatctcactctgtagcccaggctggagtacagtgacgtgatcacagctcactgcagccttgaccatctgggctcaagcgatcctcccacctgagccttctgagtagctgggactaaagggtgtgaggtggcaagatcataactctctgcagccttgaactcctgggctcaaatgatcctcctgtctcagcgtcctgagtagttgggactacaggtatgctccaccatgcctggctaacctattttagttttacatatacaaatctctgcacatttcattgtgacagcactaaaaattaaaaaaaaaattcttttgtgtttttctgtattaatgtttaattttacataacctgttgtgattctcagtttgtgcacctcttttggactatttgagtctcctgatgtacttgatttatcctgatggggttttgtgtataagtggaatt

SEQ ID NO: 82927 - DNA, 1859 bp, Homo sapiens
gaattccggcaggcacaaactcatccatccccagttgattggaagaaacaacgatgactcctgggaagacctcattggtgtcactgctactgctgctgagcctggaggccatagtgaaggcaggaatcacaatcccacgaaatccaggatgcccaaattctgaggacaagaacttcccccggactgtgatggtcaacctgaacatccataaccggaataccaataccaatcccaaaaggtcctcagattactacaaccgatccacctcaccttggaatctccaccgcaatgaggaccctgagagatatccctctgtgatctgggaggcaaagtgccgccacttgggctgcatcaacgctgatgggaacgtggactaccacatgaactctgtccccatccagcaagagatcctggtcctgcgcagggagcctccacactgccccaactccttccggctggagaagatactggtgtccgtgggctgcacctgtgtcaccccgattgtccaccatgtggcctaagagactccccaaagcagttagactatggagagccgacccagcccctcaggaaccctcatccttcaaagacagcctcatttcggactaaactcattagagttcttaaggcagtttgtccaattaaagcttcagaggtaacacttggccaagatatgagatctgaattacctttccctctttccaagaaggaaggtttgactgagtaccaatttgcttcttgtttacttttttaagggctttaagttatttatgtatttaatatgccctgagataactttggggtataagattccattttaatgaattacctactttattttgtttgtctttttaaagaagataagattctgggcttgggaattttattatttaaaaggtaaaacctgtatttatttgagctatttaaggatctatttatgtttaagtatttagaaaaaggtgaaaaagcactattatcagttctgcctaggtaaatgtaagatagaattaaatggcagtgcaaaatttctgagtctttacaacatacggatatagtatttcctcctctttgtttttaaaagttataacatggctgaaaagaaagattaaacctactttcatatgtattaatttaaattttgcaatttgttgaggttttacaagagatacagcaagtctaactctctgttccattaaacccttataataaaatccttctgtaataataaagtttcaaaagaaaatgtttatttgttctcattaaatgtattttagcaaactcagctcttccctattgggaagagttatgcaaattctcctataagcaaaacaaagcatgtctttgagtaacaatgacctggaaatacccaaaattccaagttctcgatttcacatgccttcaagactgaacaccgactaaggttttcatactattagccaatgctgtagacagaagcattttgataggaatagagcaaataagataatggccctgaggaatggcatgtcattattaaagatcatatggggaaaatgaaaccctccccaaaatacaagaagttctgggaggagacattgtcttcagactacaatgtccagtttctcccctagactcaggcttcctttggagattaaggcccctcagagatcaacagaccaacatttttctcttcctcaagcaacactcctagggcctggcttctgtctgatcaaggcaccacacaacccagaaaggagctgatggggcagaatgaactttaagtatgagaaaagttcagcccaagtaaaataaaaactcaatcacattcaattccagagtagtttcaagtttcacatcgtaaccattttcgcccggaattc

SEQ ID NO: 82928 - DNA, 1874 bp, Homo sapiens
gaattccggcaggcacaaactcatccatccccagttgattggaagaaacaacgatgactcctgggaagacctcattggtgtcactgctactgctgctgagcctggaggccatagtgaaggcaggaatcacaatcccacgaaatccaggatgcccaaattctgaggacaagaacttcccccggactgtgatggtcaacctgaacatccataaccggaataccaataccaatcccaaaaggtcctcagattactacaaccgatccacctcaccttggaatctccaccgcaatgaggaccctgagagatatccctctgtgatctgggaggcaaagtgccgccacttgggctgcatcaacgctgatgggaacgtggactaccacatgaactctgtccccatccagcaagagatcctggtcctgcgcagggagcctccacactgccccaactccttccggctggagaagatactggtgtccgtgggctgcacctgtgtcaccccgattgtccaccatgtggcctaagagctctggggagcccacactccccaaagcagttagactatggagagccgacccagcccctcaggaaccctcatccttcaaagacagcctcatttcggactaaactcattagagttcttaaggcagtttgtccaattaaagcttcagaggtaacacttggccaagatatgagatctgaattacctttccctctttccaagaaggaaggtttgactgagtaccaatttgcttcttgtttacttttttaagggctttaagttatttatgtatttaatatgccctgagataactttggggtataagattccattttaatgaattacctactttattttgtttgtctttttaaagaagataagattctgggcttgggaattttattatttaaaaggtaaaacctgtatttatttgagctatttaaggatctatttatgtttaagtatttagaaaaaggtgaaaaagcactattatcagttctgcctaggtaaatgtaagatagaattaaatggcagtgcaaaatttctgagtctttacaacatacggatatagtatttcctcctctttgtttttaaaagttataacatggctgaaaagaaagattaaacctactttcatatgtattaatttaaattttgcaatttgttgaggttttacaagagatacagcaagtctaactctctgttccattaaacccttataataaaatccttctgtaataataaagtttcaaaagaaaatgtttatttgttctcattaaatgtattttagcaaactcagctcttccctattgggaagagttatgcaaattctcctataagcaaaacaaagcatgtctttgagtaacaatgacctggaaatacccaaaattccaagttctcgatttcacatgccttcaagactgaacaccgactaaggttttcatactattagccaatgctgtagacagaagcattttgataggaatagagcaaataagataatggccctgaggaatggcatgtcattattaaagatcatatggggaaaatgaaaccctccccaaaatacaagaagttctgggaggagacattgtcttcagactacaatgtccagtttctcccctagactcaggcttcctttggagattaaggcccctcagagatcaacagaccaacatttttctcttcctcaagcaacactcctagggcctggcttctgtctgatcaaggcaccacacaacccagaaaggagctgatggggcagaatgaactttaagtatgagaaaagttcagcccaagtaaaataaaaactcaatcacattcaattccagagtagtttcaagtttcacatcgtaaccattttcgcccggaattc

SEQ ID NO: 82929 - DNA, 152 bp, Homo sapiens
ttctggaggccagaagtctgaaatcagaaccaccgggccgagtcaaggtgtcggcggggctgtactttttctggcggagattctgttccctgttttctcaagcttttcggggccactggaattccttggtttgtaaccacatcactccaatc

SEQ ID NO: 82930 - DNA, 403 bp, Homo sapiens
cccattgtttaagtgggacttctatctacttggcaggttgttttgtaaattagagataatatgtactaaaatgctcagcacaggaagtggtacaaaccagcattcttgtggtgatgtaatttaacgtcacccttaaattctgatcaggaagaagaaagaattagtaagcttgaagacaggctatttgaatacacagtcagaaaatacaaaaacagtaaaagaatgaagcatgcctgcaggatctagaaaatggcctcaaaggggcaaatctaagagttattggccttaaataactcttaggaagtagagaaagagacaggggtagaaagtttactcaaaaggccaataacagagaacttcccaagtctggagaaagtatcaatatccaagtacaagaaggccg

SEQ ID NO: 82931 - DNA, 213 bp, Homo sapiens
tctaatgaggccctgcgtgctgtgtcatcccatggcggaagaaggaagggcaagagtgggtgagattgtgagcacgagagaaggctgaacttcatattttaacaacccactttcatgattatgataatcttcgcatttatttttttcggtctcttcatttctctaacttttctctggggttttggtcttttgcttcttcatttttagaagctc

SEQ ID NO: 82932 - DNA, 311 bp, Homo sapiens
ctttctgaatactaactctgagctcggaagcattaaagaaatagtctgtagggctattgaaaaaattgatgcctaagtccctctccagttgagttcgttcagaatctctgggatagagcccaaccaagcaccatagttttaaaattcacatttgggcctcgctgatgaaacactgagctcagtgagagcagagaatgcatctttatcgtcttcgtgggcccagtgcctaccacaggcctggtacagagtgggtgctttgtaaaatgaaactttacttttgtattctgattgtgtaagtctaaaatatgtac

SEQ ID NO: 82933 - DNA, 560 bp, Homo sapiens
atttaaactgacttagcagataatacagtgctagtttgccaacgttagtttgccaactgtcagtgtaagaaagccgagatcagcaaacttttctgtagagccagattctaaataatttaggctttgccgccacatggtctctgtcacaactactcaactctatcattgtagccacaaaagcatccacagacaatacgcaaatgaatgaatgtggctatattccagtaaaactgtatttatggacactgaaatatgaattttacataaccacgtgtctcaagattttaaagtttttttcaaccatttaaaaatgtacaaacctaatcttagtttgtgggctacacaaaatcatacagtagacaatacatatcatacatatccaggcaagaggataaatctgccggtgaagacattaggcccaagtgactagaacatgagccgcaaattgaaataattctaatcacagcaaatttcactgatttctttctaggatgattccggatagcatcttctccacagctcattttgatacttgatcttttattgcctgagttagttgt

SEQ ID NO: 82934 - DNA, 391 bp, Homo sapiens
aaactgagatactttgcctagtaactggagttcatatgtaggaaaacttggtccacaatccatatgtgtggctgccatgctatcctgagtcttatataaccaaatacaagcataaatatatttcttagtgatatataaacatataaccactattttacctgtatatctttcaaagtggcattataaatttctagttaccaaaaacttcatattgcttttatttcctgaaatcatgtacagtgaacttacatccttctctgtgtataaaaaattcctagtttttaaaattctgtgcatgtataagcattaaatctaccaatatttggctttatatatatttaaccaaaactttgctctaagtaaataaagcttgtaggtgattcctcggttt

SEQ ID NO: 82935 - DNA, 414 bp, Homo sapiens
  misc_feature (5)..(5): n is a, c, g, or t
acttnggctgattccacaagctactcacaaaatcagatcattattttgtaatcacatttgtgggtttagatgcctgagagaccttctgaaccatcaccgttttgggtgcctgtgagaatatttgaaactaccggccgggcgtggtggctcacgcctggaatcccagcactttgggaggctgaggcaggcagattactggaggtcaggagttggagaccagcctggccaactgatgaaacaccatctctactaaaaatacaaaaattagcccagcatggtggtgggcacctgtaattccagctactggggaggctgaagcaggagaatcgcttgaaccgaagaggcggaggttgcagtgagccgaaatcatgccactgcactccagcttgggtaaaagaatgagactccatctca

SEQ ID NO: 82936 - DNA, 84 bp, Homo sapiens
tagtgtcttaaagaacctaaaagctgggaccagtaaaatccacagaaattcactcttgcctttaagaacttttgaaaactgttt

SEQ ID NO: 82937 - DNA, 723 bp, Homo sapiens
gagtgggggacctggagggaggtggtgaaatagaatggtcctgggggacgggactccaggggtttgacgattaggcgtcaagactgacttagacctgggaagaaaaccagaggcagtcgagcagagaggccaaacgccaggcagggcgaagtcagccggagatggagtggaaactggagcgcaccgcgcctcggagggtccgcacggaagaggagatgctgtgggtactcgattcagttaatgctacgtattctgactttaagagcaactttgcgaagaggctgtccgcagaggttcctgttgcgagtagccccattaccacaaggtggcagcaaagtcaaactagggctctgtcctctgattcctttggggaagagcagtcaaccacctacctcccagaagcttccggatcagtgctgaagacaccgcctgagaaagagaccttgactctaggatcccgcaaagaacaactgaagacccccagcaaaggaatttctgaaacaagtaactctgctctccatttttgcaaggcacctcatgcaatggacagagactggaaagaaagtgttgcctcaaaagggcagaaatgcctaaaacaactctttgtaacccagaacgtggttcagcaggctaatggaaaaatgcagctctgtgagcaatccgaatgtgtttggaaagatcactttagtggcagcatgaagaaacgatttgaacaggaggatg

SEQ ID NO: 82938 - DNA, 801 bp, Homo sapiens
aaaaatctctgaattattattttaatgtaggaacagcctatcagtgaagcaaaacatgccttacaggtccttatgggaaaattctgtttccacttccgtttcccattgcagagcaccttctctcagggctgttctcaggacttctccctgggcctcctgcaatgaggctggagctcctcctctctgtgagggtgggagcctctgccacctctgaccagtgtcaacctcagtggacctttccttaagcaggggaattttgtgtttgggataggactgcttcagtaaggcgcagaggtcagaatgatacccatccttgccgagtttttttttcttcgtgtgtgcctgtttcatccaggtaattacatttaagtatatttacatttaaatacactgacattcatccagttaattacatttatcaaacattttcctcttaacgctaaagagcttatggttataatagtagacagaagaccttgatatcactgagagaaaagcacttttaagaagtaaaatttggccggacgtggtggctcatgcctataatcccagcacgggaggccaagacaggtggatcacctgagatcaggagttcgagaccagcctggccaacatggtgaaaccctggctctactaaaaatagaaaaaattagctggccatggtggcgggtacctgtaatcacagctacttggtgaggcaggagaatcacttgaacctgggaggcaggggttgcagtgagccaatatcgcgccattgcactacagcctgggcaacaagagcgaaactctgtctttaaaaaa

SEQ ID NO: 82939 - DNA, 483 bp, Homo sapiens
acttccatgaaaagtttaatgttcaggttgagtctttacattgctactactaaggtaacataaccctgtttgaaaaaaccaaaatctcaatgtctcatctgtgacaggatcgtcttagctgtattactgtatttttcaatattactttcttttctttttaagacagagtctcacccagtctgttgctcaggctggagtagagtggtgccattggcttactacaacctctgcctcctgggttcaagccattctcctgcctcagcctccctagtagctgggactgcaggcgcccaccacgacgacgccctggctctactaaaaatagaaaaaattagctggccatggtggcgggtacctgtaatcacagctacttggtgaggcaggagaatcacttgaacctgggaggcaggggttgcagtgagccaatatcgcgccattgcactacagcctgggcaacaagagcgaaactctgtctttaaaaaa

SEQ ID NO: 82940 - DNA, 652 bp, Homo sapiens
tttcaggagaaatgataccagctttttttgtacctctggtagaattcaactgtgactccatctggtcctgggctttttttgattgggaagccatgtgacttcatcctccgtggctctggtggtctcttcgacatctgtgagatactcactaaaagctggttgcgctttgagatctgggcgcctgctggaacctggagccacaagtcttcattcatgctaaagaactcctgtcttggtggagtggctcggctggcccgtgtatgggaacccatgaggctgtccgcgcatcccgaagtgtgaccttccaggcccacagggtggctggcgctgggcttcttcgtggcccgcgacagtccggccaccttcatcggccagtggcgcacggatctgggcgactccgaagtgctccgcgagctggcaagggagacactgggactctgcacccgctcagctccccaagataaaggcctcggaggggaagttccgcgtgggagactccggcctgttggtctctgtgctggtgcgggggagccgcgtgacggcgcgcgtgggtgtggcgacccgctggagcgctacctggaccgtcaggacccgcgctgccgctcctccactacccactgcccgcccccgtcgagggtccgcaccctgtccc

SEQ ID NO: 82941 - DNA, 484 bp, Homo sapiens
gggggcgaaggggcagggagattctgctgactttgatgggacccttgtgaacatgccctgaaataccatggatatttacagaaactggagtctgggcttcttatggtcttcaaatgttttagcctgggcagttgtccccacacagtggtagctggtcctatgcactttgttagtggctaaggaaaggtttaattgtcattaaccagttccccagtcctacctcatcagaagtaatgggtagagtgctagtccccttgatgaaacccactgagcacttaggccatcacaggcactgtactgagcatgcctgatttcatttagttgtcaacagccctatcagtgaggcaccactatcagtcctatttaacaaagagaaaaatgagacttaagggaagttatataaactgtttgagattagatagctcgtaagtggcagagattggattcaagtctaagcttatctatgtccctattctaaatttct

SEQ ID NO: 82942 - DNA, 627 bp, Homo sapiens
attgacattccatgacttttatttcttagaggccttccaaagagcaaagaaaacatttcccttatttttcaaaatggaataaaattcatcctatctagcaagatttacatcatgggatcttaaacattttgctgttttatcattctgtgaattatttcctctatcacgtattcccaactatgttaaagactaatataattggaaaatggaagaatgttggaatcacctacaagggtggtacagtagtgaaataactagatgatattgcattgcccaagtatcatatcttctttcaaaaagctagaaaagaaagtagagacactaacttcatagttggcttttagttttccttcaacacagttgagaatgcaaaattgttcattctctgcccataccagcaaaggagaagaaagttgacacaggaaaatgtttcccaattatcagatagatcataagatgaatgcaaaaagcaccgctctagaccaatgataatgttgaaattgtataagcagaaaatctcaggctacaagtcttcagctgataatgtcctacatgaatttttcaaactgaagaatcaatacataatacatttctaaggattaaaaaggaaatatgccattctcattc

SEQ ID NO: 82943 - DNA, 481 bp, Homo sapiens
gctggccctgtcagaattcatcttgtctaaatgggaagaggttaggcaagtttctagaatgccagactgctttctagaaagtcaaagataattatactttctgccacgactgtgaaaatgcccatttcattgcacgctttctaacatttataccaatctgataaataaaagctggtacctagaagaaaaaaaggctgggtatggtggctcatgcctgtaatcccagtactttgggagaccaaggtgagtggatcacctgaggtcaggagttcgagacaagcctggccaacatgatgaaaccccatctctagtaaaaacacaaacattagccgggcatggtggcaggcccctgtaatcccaactactcgggaggctgaggcaagaggatcacttgaacctgggaggtggaggttttagtgagccaagatcatgccattgccctccagcctgggtgacaagctgagactttgtctcaaaaaaa

SEQ ID NO: 82944 - DNA, 1364 bp, Homo sapiens
ccctctccttcgtccgctccatgcccaagagctgcgctccggagctggggcgaggagagccatggaggaaccgggtgctcagtgcgctccaccgccgcccgcgggctccgagacctgggttcctcaagccaacttatcctctgctccctcccaaaactgcagcgccaaggactacatttaccaggactccatctccctaccctggaaagtactgctggttatgctattggcgctcatcaccttggccaccacgctctccaatgcctttgtgattgccacagtgtaccggacccggaaactgcacaccccggctaactacctgatcgcctctctggcggtcaccgacctgcttgtgtccatcctggtgatgcccatcagcaccatgtacactgtcaccggccgctggacactgggccaggtggtctgtgacttctggctgtcgtcggacatcacttgttgcactgcctccatcctgcacctctgtgtcatcgccctggaccgctactgggccatcacggacgccgtggagtactcagctaaaaggactcccaagagggcggcggtcatgatcgcgctggtgtgggtcttctccatctctatctcgctgccgcccttcttctggcgtcaggctaaggccgaagaggaggtgtcggaatgcgtggtgaacaccgaccacatcctctacacggtctactccacggtgggtgctttctacttccccaccctgctcctcatcgccctctatggccgcatctacgtagaagcccgctcccggattttgaaacagacgcccaacaggaccggcaagcgcttgacccgagcccagctgataaccgactcccccgggtccacgtcctcggtcacctctattaactcgcgggttcccgacgtgcccagcgaatccggatctcctgtgtatgtgaaccaagtcaaagtgcgagtctccgacgccctgctggaaaagaagaaactcatggccgctagggagcgcaaagccaccaagaccctagggatcattttgggagcctttattgtgtgttggctacccttcttcatcatctccctagtgatgcctatctgcaaagatgcctgctggttccacctagccatctttgacttcttcacatggctgggctatctcaactccctcatcaaccccataatctataccatgtccaatgaggactttaaacaagcattccataaactgatacgttttaagtgcacaagttgacttgccgtttgcagtggggtcgcctaagcgacctttggggaccaagttgtgtctggttccacaggtaggtcgaatcttctttcgcggtttctgggtcccagcgaggctctctctcctgggcaagggcaat

SEQ ID NO: 82945 - DNA, 779 bp, Homo sapiens
agtaggatttacttaaactggaggaagcagaaaatgcactccagtgttgttacccaatggagtctgctacaaaaggaattcacaggggtccactctgtttgtcagggtgctggtttcctgtcattagttttcattactctctttcatcctacatgtgtgggctcagcaactttgtgaattctggtttgtggaatttgacacagatgatttctctgccaacattgaatctcacaggtcacatcttccatcctaacctatatcctaacttttctacccatcttggcattgtctttgtattttgccttgtgtaatttggactgcactggatatagtctttggtcatatcccctcagcattaggtgtgggcagcaggcatggggcatcgtgcattagtaaccagctcagcccacagatgctgtccatgagcttcctgtcccctacccttccccaaagaagggcatcagccagttactcccaacagtagggtcactcttctcagagaactattgggattacttacatcgctcggttgttacgcacactacacaacagggaaacttgttcattcctccgtcccaaggtttgtcaatctagagtagactgagtgttcttctgagcttgcaattcacattattggctggattcttctggggacatggtcagaggagctcactatggaatctgtgcattaaccactcctgatcctataggctgtatttaccagcttgttctagcatcagcacaggttatggtgatagtcgtacagtgaccatatccaa

SEQ ID NO: 82946 - DNA, 382 bp, Homo sapiens
gtcttagcttaggtggtttatctgaaacaaacaaaccaaaatcacagtgacttaacacagtggaaatctaaaaggagtgttctcaattgtcaggcagctcttcagtggagatctgctgtcttctgcaggcaccatggaaggggagtggggagagacacccccatgcctgagcacatcacccagcacttcccacattgcttctgcccacagaccatggatgccactaggtgcctgttccccctaaatcctggggccggggtggctaagacatggagtggtggctgggctgatgttctccaacagcaattctaccctgggaagcgggtggacagccagacccaaaatgtccaagttgcacccacaggaactgcttctaacagat

SEQ ID NO: 82947 - DNA, 790 bp, Homo sapiens
ctcctcaagaagagtccggtattgcagtatctcaactaccttgctcagatcctcattgccatgtctcctcttagcaacaacagtttgttcctcgaatattccaagaaccctctgagggaattcctacacaagggactgcatgtttctctttccaccgatgaccccatgcagttccactacacgaaggagtctcgttctgcactccagcctgggcgacagagcaagactccatcaaaaaaaaaaaaaagatattttgagagaaagagaccacaagtcttcaggggctagaacacccatggagctgtcgtctcctgtggtaacagtgccttcttctagaatgcctcctagatgacctgcctgaggctgtttacagaatgtacaagaaaaactgtctccatggtaggaatttttgttctaatcagtccatggaaagaaaaagctattattgaacttcccaggaaatctcccaggctgagaagtctacacaatattcaggctctgccctgccctgcgcagagcaggaagagtgcagggaggattcgtgagatgccagttctgataactttcagatgtggaggcattaccctctgcattgctagggctgaaggtcatggctaattggcatggctgctcaaatcatctctgggagtcgcctcatggaaatcttgcaaagtggaggacccagtgggagaacagcaggattctgataatgggctgaagataatttcactggctcaccttgggccttgtttgctggtgataaaataaagggtaggagctcagcaaccaa

SEQ ID NO: 82948 - DNA, 818 bp, Homo sapiens
gtcgctggtccccggcaacacggctcaggcaaacgtaagcggcttgtcgcagaaaccaaggggtccacgaaacgcgctaggctagaaggcgggaaggagagattactgacagccgtgccagccaataaaatagaaatcaacagtgagagctcagaaattcccagactgttttgatgataaggtccaagaacttgccatgtgatccatcactactagactcccacaactgcattagatttgttcaggattttcatataattttcataactggctaagttctgaaataacccatcttgaagacataaacaatgtgcattgatggctagccagactctgtcctgccacagttctcctcctactcttcatttcttaccccaaggagtagtaaacatgaatcctgacccaccaatgcagtcccagaactgagaaaagattcactgcagctaaacagattatttttgcacctttggaaagcaactgaaaaaggaagcctggaaaaaatcctgcctaacaaagcagcagtactcaaatagctttaactataagaaagaactgattcaagatatgagaagagatttaagatataagattaaatataagtgtaaatgatatcctcatttttattgaaatgctgtgtattcctattatttcagtgaaatgttaaatggcaaaggatgcattttttagattatttttttcactgaattttaaacagtctttgaagcagatatttcatataacaatatccagaaacaataacacatatgtggataaagttgagtggttggataatgtattgtgcaaattatcaagaagaa

SEQ ID NO: 82949 - DNA, 363 bp, Homo sapiens
gtcgctggtccccggcaacacggctcaggcaaacgtaagcggcttgtcgcagaaaccaaggggtccacgaaacgcgctaggctagaaggcgggaaggagagattactgacagccgtgccagccaataaaatagaaatcaacagtgagagctcagaaattcccagactgttttgatgataaggtccaagaacttgccatgtgatccatcactactagactcccacaactgcattagatttgttcaggattttcatataattttcataactggctaagcattggaaatggatggggagaaggcctgatgaaaattactgaggaagcctcttagcctatgtgctctgagagtagtgacacctagca

SEQ ID NO: 82950 - DNA, 812 bp, Homo sapiens
ccagttggttttatctgatgaagcaaagcagagaaaatagacctacagtccatatgcttcaagtctattgtgtcttgatctaagaagagatgcagaacagatgctaagaagacttagacgcaatgagccccagaaacagctggagtgcagtggcgtgatcttggctcatcgcaacctccgcctcctgggtgcaagcgattcacctgcctcagactccggaagacctgagattacagggggtatccagtacaatgatgaatagaaatggataaagcagaaacacttgtgttattctcaattccagagatatcctttaccaaataaagaaaattctcttcaccaagaaatggatcatggtggtattctgatccgagacttctagattccaaaactgtgagaaaaaaaaatgtctgctgtttaagccaccttgtctttggtgacaacccaggctgattaagacagttatcatatattatttatttacatattactagattctatgtaacattttgttaagttttatgtttacaagttatttcatattttatgtcaagtttttttaagggttttataaagattttgctgccctcatgaaacaattaggtaacatttttctatgttgtgaaagtaaaattggtatcatatcttcttaaataattgatttaaattaaaatttaccagtaaaattactgatgtcttgaatttctttgtaggaagacttatgggagtagattcagtttattttacaggtgtttcctgtcacttttctggtgaattccagtgttctttcttagatgacctatttagagtgt

SEQ ID NO: 82951 - DNA, 485 bp, Homo sapiens
  misc_feature (417)..(417): n is a, c, g, or t
cacgtggctgtaaccccagctactggggaagctgaggcaagagaattgcttgaacccgcgaggcggaggttgtggtgagccaagattgtgccattgcactccagcctggccaagaagagcaaaaagtaaaaaagaaaaaaagaaaaaagaaaagaaaaagaaaaaaagaaaggggatgctctaatctccatgccttattattttatcttctcaattaattcaaaactaaggcaggaaagagcatcctatttaacaggccccctcaaattccaacctgtgttcttcttcttcttttttttttttttttttcccggggggtaacccttaagggaaaggcggggtcaggggtgtcacaattctcccaaagaccccctgtgaagaaaatagccctcacaggggttacctatagaggcgggncagcctggtggaagcaagcctggctgagggcacagttggtaggggcctagaagaggcgtgcacctcta

SEQ ID NO: 82952 - DNA, 563 bp, Homo sapiens
atctagacgatccctgttactggatttatactaattagtataagtctcaggtaacccagaaagaggtggtcatcctaacgagaagttcaagggcaataaggatggtaatcaggaaagtctcatgcctcaaaagtgcccaagataaatgtccaccacctaaagggcaaagccagtggtcaccttgtaatcaatccaccagcagccatcccaaagctgattttcccacctttaggcgacctattgcacagcccttgataatccctaggcagaatcaatggcttgtggagctttccaggttatgttgcagaagcagtgggactcgggatggtgagtgaatgtctgacaggctgaaaggtcatctgcaggggttctgagactgagctagtcttcaggatgacctcaaatctcatcctctctcaaaggtgagagttaagggtgagagtcttgtaaatggactatcagtaccttagaaggaatccttacatgcattcatgcagtcaacagcgaggggagaaggctgtttcctttcccccatctctttcctgtacaataaatacagtatt

SEQ ID NO: 82953 - DNA, 504 bp, Homo sapiens
ctttgcaagcacctgtcataccctgtgtatatggatatatgggatagaggccatacaggtcaagtgggcacaaaaatgcttagggacgaaatgacacctaatttttaaatcatgacaggatgtttaaggttataaagcatactaatatatttaaaattctaatttaagaagagtttttcttcatgtttgcaatgttacagtgttctctatttcatagacatgcttttttttttttttaagtttatcatgcattgtggttgaaaagcagcacacaatttatggcaaggaacacagtgaagtttataatgtgacaatgtgataatagccaagactgtcaaaatatgccagccattctctgtaattaggctcatttgtgttcttaaacttgagatgcatgtataaaaatatcattttcttcctgcttgctttctggcagtcttgtgtgtttttactgcactgtcacgttgtactgtagcaacgttatgctttctaatcaagatttgg

SEQ ID NO: 82954 - DNA, 421 bp, Homo sapiens
atttggtggctactttcaggggcccacctcagcaggccaaggcatagttggagggacaccagatgctctgagctggtatcagatccctgtttgccgctgggcaaaggcagacaaaagcaaaacacgaaggctggccagctgaatgttaggatatgggcaggaggagagggctggagttgaattgtgcccaagactggtatgggaactcctgagaacagagagagcaggggtgtagcagggggccagggaagaaataaatacttcttctctaagcctaagccagttttacccaggagaacaggagctattctccccaccctaggcccccatctgctttgaagctacacctgctcttaactgccaggaatcttgcctgtggggtggagtacggggtatgcgggtatgaagtaagaacctagag

SEQ ID NO: 82955 - DNA, 219 bp, Homo sapiens
cccaggctggagttcagtggcgcgatctcagctcactgcaacctccaccccccgggttcaagtgattcaaattgattacatcaagatttattattttaaactgcaagaataaatctataaatgtctgcttttttaacagtaaagagtctgtcttgaaataatgtttcttgtaactaaaacttatggtgaatttgttttaaccagatggttgtgtgtttg

SEQ ID NO: 82956 - DNA, 496 bp, Homo sapiens
aaaagaaaagggaaagaaataggaggcaccataaacaaaaatgttagcatttttccttgtaaaggagcagcctgaattttagtaccacagggatagcacggtttattagatatacttgtaaaggatataaaaatagtttgtttgcaggcttgcttgttgatcagaccgcatcctgcatccctttgtattaaatggaaagaattaggaagcatgatcctctctcagatgactgggttgaaattatgtgtggtcagagagcttaagtgaaccagttatgaagctgaagaaagggtaatttttcacttcctaaaccatggaaagattaacttaaaatgaggaattgctcaattgcataatatagcctgtcctgtgcaagtctagataaggcattcattacaattctaagttgccacctccccagagtagccatgcatcctggtttgcctgcagcagccttgccttcttctggttgccccatatagttattattagaagc

SEQ ID NO: 82957 - DNA, 333 bp, Homo sapiens
tcagtgggcatcatctgcagtgaggctggcagctcattatacagaacttttccaccctttgagctgctccaaaatggaatgagcttcttcatggaagtggaattttccatccctgaaggttttcaatcagaagctggctgatcatttattgatatgttctaaaaggacataaaagcattaatagctgttattaattgagcctaaattatttctggcacaatgatgggtttatttatttacctttaatttttacaacaaccttgcaagatatagatgtatcaccaatttatagatggggcggtcaagtgacttgtctgtggtcacacagctaat

SEQ ID NO: 82958 - DNA, 231 bp, Homo sapiens
tctataagcctttttttaaaaattattttttatctttaaaacttttttgttaaaaatgaagacaaaaacacacacattagcctagacctatacaggatcaagatcatcaatacatcactagacaataggaatttttcagtttcattagaatcttatgggaccacagttattccgtcattgattaaaatgtcgttatgtagtgtgggactgtagatatgtgctctctttgga

SEQ ID NO: 82959 - DNA, 953 bp, Homo sapiens
atatttcgtgtgtgtgttgtcccctgattattaggacactgtctcagccctgaacactgttcagatcagcttcaacttactggtcagctgtacttgctgtgcctgagtcaatgtcttgaaccacataaaacaattcatacagaaacaaggaggaagccacttggctttcgaagatagatctctgtggttagcgggatgtgcttttttttcttttttctttttctttttttgagaaggagtttcgctcttgttgcccaggctggtgttcagtggcgtgatctaggctcaccgcaacctctgcttcccgggttcaagcgactctcctacctcagcctctcgaatagctgggattacaggcatgcaccaccacgccaggctaattttttgtatttttagtagagacggggtttctccatgttggttgggctggtctcgaactcccaacctcaggtgatccacctaccttggcctcccaaagtgctgggattacaggagtaggccaccttgcctggccaatttttgtattttcagtaaagacgggtttttcaccatgtttgccaggctggtcttgaactcctgacctcaagtgatccgcccacctcggcagcctcaagtgctaagattacaggcatgaaccaccactcctggccaggccagttttactttgcacagtgtctctccatttgcttttgtctgatgtttctttataattagattcagattataacatctttggcaagaatatcaccaaagagacttttctgtgtgtccccactgcatttttcatgtgctgcacaatttcaatttgtcccagtattgatgacatttcaccttgatcacttgatttaaagtggtgtcagccaaccttcactgtcaagttactttcctctttgtaattagtgtttcataagttctttaaaacactgtaaatatcccattcttcatcaaccttt

SEQ ID NO: 82960 - DNA, 958 bp, Homo sapiens
cttagctgttgcaggagacgtggtgaactctgccctatataatgtggatgctgagcaaagagctgtcatctttgaccgattccatggagtacagaacactgtggtacgggaagggactcactttctcattccatgggtacacaaacctattatctttgactgctgttcttgaccatgtaatgtgccagtcatcactgatagcaaagatttacagaatgtcaacatcacggtgcacatgggggcctgtcgctagccagcttcctcgcatcttgaccagcattgaagaggattatgataagcgtgtgctgctgtccatcactactgagatcctcaagtcagtggtggctcactttgatgctggagaactaatcacctaaagagagctggtctccaggcagatgagcaacgaccttacagagcaagcagccacctttgggctcatcctggatgacgtgtccttgacacatctgaccttcgggaaggagttcacagaagcagtggaagccaaacaggtggctcagcgggaagcagagagcaccagatttgtggcagaaaaggctgagcagcagaaaaaggcagccatcatctctgctgagggcgattccaaggcagcagagctgatcgccaactcactggccaccgcagggaacagcctgatagagctgcgcaagctggaagctgtggaggacatcacattccagctcttatactctgggaacatcagctccctgccagcggggcagtccatgctcctccagctgcccctgaggggccaccctgcctgcacctccgcaggccaactgggccacagccctgatgattcttaacactgtcttccttctgccccaaccctagaaatcactatgaaatttcatgattggcttaaagtgaaggaaataaaggcaaaatcacttcagatccgccccctcccccaaaaaaagcttgaaatattatgaaa

SEQ ID NO: 82961 - DNA, 466 bp, Homo sapiens
ctgtgtttaccaggctggcctttcaagaatcttgaaggtaccagaaggtctgatacttgatcattgtactaacttgtgcttctcctgtagtgagagtcaggatcatggcttggtctacaaaaccagcctttctggggcacgtgtaggaatctgacaccacgtcagctccaggagacctgagggggaggtggggccattagaatcccgctccaggagcacacacacgggctctgacgggggtaccctgcacgggtacagggagtaccaacagccagtggtctggggtcgaggctgtgaaactggcattttaggttggtttgaatggctcagtgagaccgggcactgtgggtcactcctgcaatcccagcactttaggaggctgaggtgggtggatcgcttgaccccaggtgttcgagaccagcctcggcaacatggtgaaaccccatgtctatgaaaaatataaaaa

SEQ ID NO: 82962 - DNA, 508 bp, Homo sapiens
aattactgttttttaaaaaaaaaacactaaaacttgagatcatttattacatagcaatagataactggaaaaacctctatcctgctatatcctggccatactgttatatccatgggccccagccaatgttagctatagatagaaaagggattggagagttgcagtacagaatccctggatggaagtcagtagaatataatggcttaagaacatgaattctaaagagacaagcctcagttagtatgctggatctaccatttataagctgtgaacctggacaattacttagccttcttgtatgtatgattccaatgatatgacattccaactatgtaacatttttcttcaaaattaacagaatgagatggcagaaacttcattcttaagtagaactaagacaagaaaggaaagaatcactcaatttctctagctattctaccagaagcagtctatttctgatttggccattttcaaaaaatataatataaaaataggacagttgtgcctg

SEQ ID NO: 82963 - DNA, 279 bp, Homo sapiens
ccttaggactcctcctgactccttccaactcccaagtctgcagcccaggtaaagccagagcagacttaaggcaagttttcaggaaaccaggaggcttgatccagactcacaatctccctgcaaaagtgttcagaacacaccgcacaaacacacacacgcctcacaaaacttctgaatgttgctctgtctccaccttctccagtcaccgaaagacctcggcctgaattggagcccgcagccgtagctgtccctctccacctgtcgccctcgcggaggctt

SEQ ID NO: 82964 - DNA, 504 bp, Homo sapiens
tctctacaaaaacacaaaaattagctgggcgtggtggtgtgtacctgtagtgccacctccccactagctgggactacgggttggcttggcttccatggctgtgggggcttctggttcatgccctttcctcctttctctcttgttcagtgttttcctccatagaatggctaaggccgtgccagccacctgaaaggagctgagttctagcctctactgattttgcgtgtgagctccttgccactccaaaatttttcttagccagagggccttgctgtcacttcttttgacttgctcatccatgctccctcagaaggtcctggggctcttcctttgatagccccttggcaagactgcaagctctgagctcctctcagctgcacccaaggtcttaattatcagaaagtttactcttcctgacaaggcttccatcttgccaaatattcagtagggggtggactggcaaactactgtcccaattctcgatacacatcccttagatcaggg

SEQ ID NO: 82965 - DNA, 1273 bp, Homo sapiens
tgatataatagttaactgtatctttgtttcatactcattttgaccaagggcattagttgcatggtttaacaaatagtagaaaatagcctaaacttcacatctagaaaggcttagagagggaagtggttattcctgagatcacgttgctagtaagtggcagaaaaggacaagaacccatgtgtcctgactccagaaggttggccagctatcttcatttatatgggactttcctggtttttgcactgaaagtctagctttcaggaaacccctcagtcctagacaaactggaacaattggccaccttgctcctagaaggaacccagagaaagtctgtgtgtaggtatctgggatttaaagactcattctttctttaagataattatcaaatccataggcatgtactggcactaagtagagaattctcaagagtccctgctggcctgtagattttatttcattcagtttaattagtatgttttatatatcatgaggatgagtgaaactattattaaaaaagcaaattgcatagggcctgacacaagccacatgctcgataaatgtctacaagcttatgctcttaatgctgtttgattacatccctcatatacactcttttttgaaaaactagaaaaatgagtcaaaattttaaggactgatacttaggatatatagattaatgataactcctatgttttggtgagactgtaacctgatagaaaaattttggaagataatttggctttatcttgtaaaggtgagtattagcagtttcattcctcttttatatatattctagagaagtaaattcttgtagtcatgctcaaggagatggtgcaagtaagtttgtagctgtattactcatgatagcaaaaatgtggaaacagtatcaatacttattaactggagagtgaatcccatgaagtgtgatataatccatatagtggaattagtggaaaatgaatgaaccttagctacaaactttaaaacatggatcaatttttaaaacaatgttaagtaaaaataagtcttggaaatatacagtatgagtctattttatggaatcatgttccttagaaataaataaaataacccttatatatggtttgtaatacacattatataattatgtcaggggtccctaaagactagcccccaggtttgatgatttgctcagagaattcacaagactctgcacatagttgtgctcatggctgtgacttattatggcaaaaaaatactaatacaaagcaaaattgggaaagggaaaagatgt

SEQ ID NO: 82966 - DNA, 699 bp, Homo sapiens
catcaatgtcttctggtggttcaccataagccacagcagatgtcttaatctttccgagatctagtttttcagcaaagcaggatttaagaaatgtaactatcttatgtggttatgaagaacaatagaatcattgctgtataagtgctttttaacctgtaaattttgtgaagcttatcttttatgcatataaatatttgaacattttacattgtttatatttttaatcagttttactcaagtgtgattatatacaagaaaatgtaaccactgtaagggtagagttataagaattttgtcaaatgtattcacccatgtagtcacctccttatgaagagacagaacacgtacatcctcccagaaagttccacagtgctccttttccctgagtttcaccagtcctggcaaccaatgatctgcttcgtataattataactgttctagatatttgtagcaatgtaccctttccatatttattttgtgtgtgtaaggcttcttttagtcattataatatttttgagattcatctatgtttaatgttctatcagtagttgtacatcttacttgtctcagcatatcaccatatagatatactataatttgttaatctaatcactgatggatatgtaggatatttaagtttttgacattatgaataaagtggctataaatgaataaagcgactacaaatttgaatatcta

SEQ ID NO: 82967 - DNA, 385 bp, Homo sapiens
agctacagacaatgcacacataaagtgcccaagacagggtcagaatgcagtcacatgcatggctcagaaacggatgcttttctgtgtgtatgaagaaggcagtagaagctataatgtacaaccttctgcatattctattaggttgccttgatagcaggattaaagatgtactgcagagacatatgacaatatgcagttattttttcattgcagttcaccttgcaattatgcaagatgaataagttctagaaatctgttgtacaacataatgcctagagctaacaatactgtattgtacacttaaaaatttgttgagagagcagacctcatattaagtggtcttaccaaaaaacaactaccaccaccaccaccaaaaaaaaaaaaa

SEQ ID NO: 82968 - DNA, 357 bp, Homo sapiens
accactctccctgcccgccctcctcctctgtaccctctgcgctggtcacacggtgagcctgatagaggtgaacttgagcccaggggtcctctctcccagaccaagctagtccttgcttcatcactccaagtagccctcctcagtctgagtccacccctgacattgctgttctggccttcagctgatcacagctagaaactgtcggtaacattagcactaagcgctaataaccattaaaacagatgaccatttaccaagcccctactctaagccaggcgtggttataagtgattcatttctgtatcacttaaagtcatttaatcctcatcctaagaaatgggttatagtataatccct

SEQ ID NO: 82969 - DNA, 279 bp, Homo sapiens
tatcttttattaccattattctactggcctttttctcactgatttgtagtccttcccatatcctatacataatccctttgtcacagagttgcaaccatcttttcctactctttggcttgcctttcactctcttaaacatgatttttgataagcagaaattcttggttttaataaattccaatatatcattttttatggttaatgcttttttgtgtccatttaagaaaactcttcatactgtaaggtcacatagatattttcctatattatctcctataa

SEQ ID NO: 82970 - DNA, 236 bp, Homo sapiens
ctcccaaagtgctgggattacaggcataagccaccatgcctggtctgtatttttttagtagagaccaggctgatcttgaactcctgattttaggcgatcagcctgccttggcctcccaacgtgtcgggattacaggcatgagccaccgtgtccggccttaaacctgtttctgtctaagtcttctccatctcatcaataaactcagtcccgccatagtatctctggcccgggtaccc

SEQ ID NO: 82971 - DNA, 302 bp, Homo sapiens
gataagataccatccacataaattaagtgagcacattcataggtaacaaaaacatggaaaaaggaaagatacatatcagcttcataacagttgcctctggagaggaaaggaggaaactggggaagggcacacattaccaacctcaactatctgtaatgctctcttttacttaaaatctgaaataattatgacaaaatcttaacatgtattaattctggaaaattggcacatgggtatatttcaccctataaaattagtgagaaaaaattttttatttaaaaatgagagatggcggtgtgctg

SEQ ID NO: 82972 - DNA, 967 bp, Homo sapiens
aatttttttgtatttttaatagaatggggtttcaccatgttagccattatggtctcgatctcctgacctcgtgatccacccacctcgccctcccgagtagctgggattacggcctcccaaagtgctgggattacaggtgtgagccaccgcgcccggccgaggaccagcatatttcttatgattaatttggacatctgtattaactcaaagtaatatttaaaacatagatcctaatttttaagacttgaaatgtttgtaaaactttaaccaaggagaattttctgcatttagcagtagacattgattttggagtatttatattattcaaaactgctgaccttatgtcttttgtaaaacttgagcaatgaaagtcttaagagagaaggtttaaaggaaactctttgataaattaaaagttggggaaaaaaaggaaggaaaataagtagcctaaaacaatccacgtaagaacataagttcccaaggactctgtataattattatagagcccttctactgggtcttagaaatgtaggctaggagtttccagaaaattattctttaaatgtcactaggtacttgtcagtgattagtacattttaaatactgattctgattttcttaaaaataggattttcccagaggcagaggagtcaaccattcttgccactagtagactgatagtctagtggccttaaagtattattgtttgactttaaaagtcataatcctaatttaccgttagtcaagtatgactttgcgttgatgtgttttatcttttaaccagtaagcatttaccagtgatgggacaacaacatagggcattagaatccctggaaaccgtttttgtagttcatttggttgtcaaattccttttgtactttttgaggtgtacctggctagtaattttttatggaatggccctgtttttccttgttgctgtttttcctctggaatttggaatgaatat

SEQ ID NO: 82973 - DNA, 132 bp, Homo sapiens
ttgccactcactacctgggtaattttggacaacctctctgggccttgattcattcatctgcaaaacagacttgacaatagaatctatgctcattgtagagaggattaaatatgattttacatgtagatgacc

SEQ ID NO: 82974 - DNA, 506 bp, Homo sapiens
cacttttctttttaacagagtaggtaaaaagaataaatttggagcttagaagcaacaaatagaaaaccagcacgcttatccatatgaagaatgaaattagatgctttcatctaattttgaactattttactttaacatagaatggatatggttctttctaaagaccaaagctgtttaatgcattataaaagtcattactaatttcatgcatctaaagtgagggggagaaaaaacttacaagaaatgaaatggaatatctttttcacataggacaacggtggcgtttaattttaagaatgtattaatgaattgcatctgaagatacactcctactgattttaaaaatgaacatgtgaaagccatttgttatataacttcaagaactacatcaccttaattgttaccttcttagtctttgacagagttttatatttgaaaagattgatatattttgacacccttcaaacattttaaggcatttactaaatataatgtgtcaaagggta

SEQ ID NO: 82975 - DNA, 570 bp, Homo sapiens
cagttgctgtacatgcttgttcatacattgcatgtctcattgccgtcttaaatctctacccaggggtgtgttttttactattataatgagcaaagggtcattctgaggacaagcaaagtgaaaatgcacatgctctctacaggggaaagtccccagtgaaggtagttctgcttggatgagcttgattacaatgtgagtgctgaggtttgttgtgttgttggtgcggttgctatgtcccaatgaacatggttacagggctcattgtgctgttgacagtgtggttgccatgtcccaaggacgtggtcatctccttgactatctatcctgcctcagtaccatatagttcacttactaaagtatataattcgatgccctttagcatgttcacagtcatgaaactattaccacaatcaactttaaaaccttctcatcacctaaaaagaaacacaacctgaatcccctagcccttccatccctaaataatcattacaatcatgaatttgctttatgtctctgtgtgttttcccattcttgacagttcaaataaatggaatcatatactaaaaaact

SEQ ID NO: 82976 - DNA, 598 bp, Homo sapiens
catcagtgtatgtacgtgtgtgaaagagtatcaaattgtgtacagtttaaagctgctttaaaaaatgtgactcaaattgcaaaaaaatctattcctatgtaccttcttaggtattaaagccacaagagctacacaatggaaagaccataagagtggctctgtcactaactagctatgtgatcctgaacctattacttaacctctctgaaccccagagtccccacttaggaaacgaggatatcacaatctatctctgggacagtacagtgaaagtaccttccataacaagtccttactgaacatctacaaaatatgacttgtttactgtacaaagtaaagtatacctatataaagcattcattaaaacttgtgctttattactaagttacaatgtgagtaccaacaacaaacctaccttacatagtccaaaatgtacatatcactattatattttttcatctttctactttcaaactgtgtctttgtatttaaaatgctgctacacaatcccagcactttgggaggccaaagcaggcatatcacaaggtctggagtttgagatcagcctgcccaacataatgaaaccccgtctctacta

SEQ ID NO: 82977 - DNA, 581 bp, Homo sapiens
gcatagcatagtgattaagagcgtggactctggagccagactgcctggatttaaatcatgactctgccacttacaggctgtgaggccagcatgttacttttccacttagtacctcatttttctcatctgtaaatgaggataattaaatatacatgcaggcatgtgccacataacaacatgttggtcaaagagtggctatgtacacatacaacagtggccccataagattataaaggagctgaaaaattcctatcacctactgacgtcattgctaatgtcacatcatggagcaattcattattcacgtgcatgggggtgattctggtgtgaacaaacctatgtcactgccagttgtataaaaataaagcacatatagttatgtacagcacataatacttgataataaaaatctgtgttgctgttttatgtatttactatactatacgttttattattattttagagtgctttccttctgtttataaaagaaagttaataaaacagcctcaggttgctccgtcaagaggtatttcaaaagaaagcattgttattatgggagatgacagctccaggcttgttac

SEQ ID NO: 82978 - DNA, 921 bp, Homo sapiens
cctggaagagctagtcttacatgcccagttccttttcttagattcaataatcacttttcatgacgaggaatgaatttgcggtggagaaagatgtcaggaatgtgaattgtgacaaaatccttttacgtagaagcatgaagacagggatatgaagtagcagtgcatgtgagcaagtggctctgttttatctgttcactcagggccccgaggtcacctaggtttctgggatcttgctggcagtgaaaattatactgtgtctctaagtttctgcccagaggtgacacacatcacttctgcaaacattttgttgggcagagctatgtggcctaacttcaaagtgagtaggaatatctcacactaattaggatggcggctacgaaaaaaaacgaaacaccccccccaacccctactgacccaagaaaataacgagggttggcaaggatgtggagaaattgaaacccttgtgcagtgttggtgaggatatgaaatggtacagccactgtggaaaacagtatggggatttcttaaaagattaaaaatataatcaccatatgatccagcaattctgcttcttggtgtatatccaaaagaattgaaagcagggtttcaaagagatatttgtacacctgtgttcatagcaacgttattcacaatagccgaaaggtggaagcaaaccaaatgtccattgataggtgaatggataaacaaaatgtgctgtatatacatacagtggaatattatttatcctgaaaagcacagaagttctgacatatggtgtaacatgaccccttgaagatattatgccacgtgaaagaagccagtcacaaaaggacaggtactataaatcacttatgtgaggtatcaagagttatcaaactcttagcaacagaaagtagaatggtggttgccagaggctggggg

SEQ ID NO: 82979 - DNA, 214 bp, Homo sapiens
tgctccactgcgcctggcccgattcccagtttttatgatgccaattactcttggaaaatgagaagactaaacagaagaaaaaaaccccacaattaacacctaaagagctcttacttgtcaggttttattctaattaactgaaacccagggaaactctgtaacgtagagactattatcttgaggcacagagaggttaaataacttaccgagagtg

SEQ ID NO: 82980 - DNA, 404 bp, Homo sapiens
gtcattgtccaacaagaaaaaaattgcaaataggtcctaaatagaaaaagacaatggttaatatgcactaatttgtataactagaaggaaaatatttttctgtcacttcttaaaaagctcaatcttgcagcttttctctggtaactagtgatattttcagcataaggtcatgctagctgaatttaaaattttgtgtactgtatgtccttaaattttgaaagtgaaatgtttctggttttgactaaatttatcaaaaccatttcacgaaaattcagcaaacgttttctagttagctagtcccaaatcttttgctgttaaagttaaccctgaaaatttctgtaccagccaaatgaatgtgtgcatgtaaccttgtaaatgatttgaaaatgaatcatgcaataatc

SEQ ID NO: 82981 - DNA, 421 bp, Homo sapiens
catggctcccaagtgccgcaggggtccctgttttcacagtcccatcctcccacgtttctcttcagatggcttcatagagcccagagctcctctatacaaagtgtgatcattcccagtggatttcttcgctccatagctttatcattggagatctggttgatcctgacgtagcgctcaagaaagcactaaatctgaaacgtttaaaaaccaattcacgtctcctgagaacgatgttgtataacacaatttttttctttccttttgatcccaaaagaagaaaatcatgacaatattctttcataaatccattattacactattactatgacaggatattgtatgtgggaaataatgaagccatttgccgtctcttccccagtttcctttagagtttctgtgctgagcaaacctccctgcgaag

SEQ ID NO: 82982 - DNA, 435 bp, Homo sapiens
tgcctctgtcccctactaaagctctctaaaggtagagtattttatgcacatttttactaccagccccttgcatggggctggcacaaggtatatgttaataagtgttttaaatgggagtgaagtcagagaaactctttgtgaccttaatttaggcaaagatttcttgaatatgacaccaaaaaatccataaaagaaaaaaatggataaattggacttcatcaaaattaaaacttgctcctcaaaacacaccatattcagaaaatgaaaagataagttacagactgggagaaaatatttgcaagtcatttgataaagaacttgtatccaggataaacttccacaactcaataagatgaataacccgattttaaaatggtcaaaagatttaaacagacatttcaccaaagaatttatagaaatggttgttaagcacac

SEQ ID NO: 82983 - DNA, 308 bp, Homo sapiens
ggagttcaagaccagcctgagcaacatagcgacaccttgaacatcagtgatcattaaagaaatgcaaatcaaaaccacaatgagataccatctcatgccagtcagaataaaagtcaagaaacaacagatgctggtgaggctgcggagaaataagaacactagaaatagggagaggtggctgttttttcacatgccaaattttcaacaaaagatacaaagaaggcaggcatgatagcacacacctataatcccagcttacttgggaagctgaggtgggaggatcacctgagacaagggagcagaggttg

SEQ ID NO: 82984 - DNA, 344 bp, Homo sapiens
gtcgacgattagtagggtgtggtggtgcaggcctgtcgtcccagctactctggaggctgaggcagaaggattgcttcagtcaggaggtcaaggctgcagtgagctatgttcatgcatctgtagtcctaggtacttggaaagctcagataggaggatcacttgaagccaagagtttgagaccagcttgtgcaatacagccaggtcctatccctaaacaagaatttaaaaactagccagcagcctggtcaacatagcaagaccctgtctctatggaaactaaaaaaccttaaataggcatggtagcagggacctgtagtaccagctactcagaaggctgaggcaga

SEQ ID NO: 82985 - DNA, 1432 bp, Homo sapiens
tggcgaatccccaaggcggggcctccccaatccatacaccgccttcggggcctgagaccctgagagccacgcctggccctgggacttcgccctgaccccgctcctcctgtgccaagcgctctgtctcagtgtttccctgagtcttggcccaggagctgtctgagaaaccaggaagaaaccctcggcatgggccctgtccctctcccttcacttttcatccaggaatctccgtccctgaactggactccctgtccacctggactcttctagaagaaaagccacccacggagtttggtgacagagagtgagcttgctctgggaatggaggtgtagaaactgttttttgttttcctttttttttttttttttattgggaaaagttgtgcctgagtgcatgagacagaatagagaccagtttatttatttatttgtttattaaatacattggatagcagaaccttggtaacccctgaatgatcaggaatctaatcggtaaaaaatgtgactttggccccatgatgtataaatgtgcccaaaagcgttacaacaggactcacaaagcttctaagtttcacttttgcagtgtacctgtgactcccgcttgtcatattttaaatttgccatcattccatagctctgagtttctgtgtgagtccaggatatctcctcaatacaaagtagcacactgtgtactttgcaaccaggtacgttgcaaccaggagtcagtacaggctttattcacctcaaagttgcaactgttcaatgtagtcgcaatgcccctcactagtgctcatgcactgcctgtttttaggaagtatccactgctaagtgttgtgtatattttataggaacacttagtaatttttaaacctgattaacattaaaaaattagtttttaggcagacccacatgaggtattaaaggccaactgccaaggacaccctgctaggctctgtagatggatgtattaaaatccataaaacaatgtatttaaacctaagaattctgctgctttcgaattctttcctctgctccttttcttcacctcctgcttctccagcccttctctccgtccttttcatccttcaggccctcctgtccccttagtccccaccacactgtcacttgtgagttgtgacactagcactgtcccatgacctgttacgtgactgttcttttcacagtggtcctgctcctgggagtcggagtgtgtcatctctccacttaaaacactccagtgtctccacctcggtcttgagaaacttctggagtgtcaggcacgtgagcatatgaggggatatctggtttatcgtagggactaaattaatttttgtcgactgaatgaatgaaatatgagtgtattaaattgcattacagataattataaagtgcaaaacacggaaaaagttcagaaaatttttattttatgtaa

SEQ ID NO: 82986 - DNA, 820 bp, Homo sapiens
ctgtgctgagtttttcgaaggtcagagcagattgaacctttgtgctttcatttttcctgattttgatttttcttatggggatccacttttcctgcattcgaggtgacttgaagaagccttccaaaaagcgtgtgaaaagggagccctactctactaccatgttacaggtgacttcattgagcccaatcaatgaaattttgagaagatacagcctgtacaccaaccagcattggaggcatcatggcttctggagaaagaagatacagccacaagaagcctctgaggagcctccagctcacaaggacagaggaggtggagagaggccagtcaacgcgagggtggtgcgggtggcccctctgaggcctggttttgctctttgtgggtacgctgtacaagacatctctaaagaagacactgtatatgacatctgtaatgaggatgctgtagacatctctgatgaggacactgtagatatctctaatgaggcttctgtacatgacatctctaatgaggctgctgtatgtgacatctctaacgatgccgtaaacatctctaatgaggctgctgtacgtgacatctctaatgacgctgtagacatctgtaatgaggctgctgtacatgacatctctaatgaggacactatagaagacatttcttatgaggacactgtatacgacatcactaatgaggatgctgtacgatacctctgtaaaaaagatgctaccaaggagccatagaacactggagaactgattcgaaatgaggagagcatgactgatgacgaggataaggaagctcaaaggggagcaccaggagagag

SEQ ID NO: 82987 - DNA, 355 bp, Homo sapiens
attttggtttctacccatcatcctcctctcaaaggaaccaggggtccttggggatttggctgatgccaggggatggagagtgtcagttggatctgaaggggaggctcgcagcatgtgtgtggcaggtcagacagacccaagagccagcttggtggggcatccctggctaccctggggacacagtgagcgccgaactaaataacatcaggaatggatcaccacgcaatgagtaaggggaatctgagtctatagggatacagacccagaggtaaacggccatggccacccactttcctacaggagaatgtgactagtgagcgtggaacatggaacaaatggtagaggtggctgacat

SEQ ID NO: 82988 - DNA, 488 bp, Homo sapiens
cggacccgcagcttggggctggcactacttaaaacatcccgttcaagtattaccttaactgggcttgtcatcccaggtcaaatcctccgaaataagtaaaccactctaatttcttctctcctaagagactctatcagtgaaagctcacaaaaaaacagttaaaaaaaaaaaaagggggggtctcgccatgttgctcaggctggtctcaaactcctgggttcaagcgatcctcccgcctcagcctctcaaagtgctgggattacagacaggagccactgcgcccagccaaagacagttcttaaaatctacaggttctttaggatattctgagaataaatatcgtttaggatttccccaaaggatttacgttttgttctatgaagaacccagttcttccaaaaatttctacaactgacgatttggaaataaaaataacgctcatctcataaaactttgcacacagatagtatgaacctcgtaagctttga

SEQ ID NO: 82989 - DNA, 633 bp, Homo sapiens
gctaccttcccaacttctaatttgaagagcactgaaaatggagctgtgaacacttcatttttaaaacctgacaatatggtgctattgactacttaatacaaagatatattacaatatttttaggtaaatgtattaagtctggcctgggcataaatgtacatacagaaaatgtttgtagagaattcatcaaaatcatgcccatttgctgttgtagagctacagtattcttcaatggtggtgactgaccagtgagtttctacttcttacagatgggacacaacagtcatgggctgtctcagctgcccaaagcctgaggcagaccacatgagagctgtggcttcttcttggattcaggttggataacccaattcagtaattaaatatgtaaattttggggggggttggggggtgttttctaggaacttgaagagtacgtgacattataaaaaatgggtgttggaagactaattgtagaaatttgacctgagggccaatgttacttggtgtaagttcactcagacagacatgtcagaacatgcccaaagaagcctatatcttgctgctgggaaatgtaaagcagttggcatgtagaatacgataataaatcatttaagaaaccaccaaaaaaaaaaa

SEQ ID NO: 82990 - DNA, 627 bp, Homo sapiens
atcccactcatgatctctttgtcaaatgattgttcagccacactttcaggattctcttcagtacaagttttctaatttttgcattatggataggctgagaattttccaaatctccaggttctggttcctttttctttaacaatttcttctgcaattcaggtctcctcttttgcattttactataagcagtcaggaagaatgaagcttcctgtgtcctttaacactttaattacagatcttagtgatacatacccagttttatctctctcaagctctaccttccacaaaatgctagaatacagttttgctaagttcttcaccacttcatataaagggttgtcttttcttcatttcccaatagcatgttcctcattccccaatgacacctcaccagaatcacccttactattatttccagcttgcaaatcagaatttttccagcctctactcatttgtcagtttcaaagctgcttcacatttttagtttttttatttgtttgtttgtttttaattccagtgcctcacttctcagtgccaaaatctgccttaatcagctcaggcaaccataacagaataccacagaacaaatggcttacaaattcatttaattttaaataaatgaggtta

SEQ ID NO: 82991 - DNA, 980 bp, Homo sapiens
tgcccttcccccagcaggccaaggctggtgacagccttcatatatttaaagaggacaagagcccctcagactcagttgagctgaacggagtccacacaggcagacttgaccttgaccagatagtcttcaagatgccaaactggggcggaggcgcaaaatgtggagcctgtgaaaagaccgtctaccatgcagaagaaatccagtgcaatggaaggagtttccacaagacgtgtttccactgcatggcctgcaggaaggctcttgacagcacgacagtcgcggctcatgagtcggagatctactgcaaggtgtgctatgggcgcagatatggccccaaagggatcgggtatggacaaggcgctggctgtctcagcacagacacgggcgagcatctcggcctgcagttccaacagtccccaaagccggcacgctcagttaccaccagcaacccttccaaattcactgcgaagtttggagagtccgagaagtgccctcgatgtggcaagtcagtctatgctgctgagaaggttatgggaggtggcaagccttggcacaagacctgtttccgctgtgccatctgtgggaagagtctggagtccacaaatgtcactgacaaagatggggaactttattgcaaagtttgctatgccaaaaattttggccccacgggtattgggtttggaggccttacacaacaagtggaaaagaaagaatgaagaggtgcgccgtttctcagattttttgcgagcctaaaacacttgccaagtaatcctgcacagatcgatacctttccccaaatagcctctcctttgtagtcgtacattatgtgtttctcctcagaagtgatcaggtctttactgaatgttagaagaggcctttggaagaaaattatgtaaagtttaatctataacaaatgctttattatttataatgcttggaatgggagaggcaataaataaatgttttagtgctatcttgta

SEQ ID NO: 82992 - DNA, 811 bp, Homo sapiens
tgcccttcccccagcaggccaaggctggtgacagccttcatatatttaaagaggacaagagcccctcagactcagttgagctgaacggagtccacacaggcagacttgaccttgaccagatagtcttcaagatgccaaactggggcggaggcgcaaaatgtggagcctgtgaaaagaccgtctaccatgcagaagaaatccagtgcaatggaaggagtttccacaagacgtgtttccactgcagtccccaaagccggcacgctcagttaccaccagcaacccttccaaattcactgcgaagtttggagagtccgagaagtgccctcgatgtggcaagtcagtctatgctgctgagaaggttatgggaggtggcaagccttggcacaagacctgtttccgctgtgccatctgtgggaagagtctggagtccacaaatgtcactgacaaagatggggaactttattgcaaagtttgctatgccaaaaattttggccccacgggtattgggtttggaggccttacacaacaagtggaaaagaaagaatgaagaggtgcgccgtttctcagattttttgcgagcctaaaacacttgccaagtaatcctgcacagatcgatacctttccccaaatagcctctcctttgtagtcgtacattatgtgtttctcctcagaagtgatcaggtctttactgaatgttagaagaggcctttggaagaaaattatgtaaagtttaatctataacaaatgctttattatttataatgcttggaatgggagaggcaataaataaatgttttagtgctatcttgta

SEQ ID NO: 82993 - DNA, 541 bp, Homo sapiens
tgcccttcccccagcaggccaaggctggtgacagccttcatatatttaaagaggacaagagcccctcagactcagttgagctgaacggagtccacacaggcagacttgaccttgaccagatagtcttcaagatgccaaactggggcggaggcgcaaaatgtggagcctgtgaaaagaccgtctaccatgcagaagaaatccagtgcaatggaaggagtttccacaagacgtgtttccactgcatggcctgcaggaaggctcttgacagcacgacagtcgcggctcatgagtcggagatctactgcaaggtgtgctatgggcgcagatatggccccaaagggatcgggtatggacaaggcgctggctgtctcagcacagacacgggcgagcatctcggcctgcagttccaacagtccccaaagccggcacgctcagttaccaccagcaacccttccaaattcactgcgaagtccccaagtgccccatttggcagaacatttattttctagaggtatgggggggcagcttcgacaaaactttt

SEQ ID NO: 82994 - DNA, 460 bp, Homo sapiens
tgcccttcccccagcaggccaaggctggtgacagccttcatatatttaaagaggacaagagcccctcagactcagttgagctgaacggagtccacacaggcagacttgaccttgaccagatagtcttcaagatgccaaactggggcggaggcgcaaaatgtggagcctgtgaaaagaccgtctaccatgcagaagaaatccagtgcaatggaaggagtttccacaagacgtgtttccactgcatggcctgcaggaaggctcttgacagcacgacagtcgcggctcatgagtcggagatctactgcaaggtgtgctatgggcgcagatatggccccaaagggatcgggtatggacaaggcgctggctgtctcagcacagacacgggcgagcatctcggcctgcagttccaacacccaaagccggcacgctcagttacacagcacctcaatactcgagtttg

SEQ ID NO: 82995 - DNA, 1356 bp, Homo sapiens
tgcccttcccccagcaggccaaggctggtgacagccttcatatatttaaagaggacaagagcccctcagactcagttgagctgaacggagtccacacaggcagacttgaccttgaccagatagtcttcaagatgccaaactggggcggaggcgcaaaatgtggagcctgtgaaaagaccgtctaccatgcagaagaaatccagtgcaatggaaggagtttccacaagacgtgtttccactgcatggcctgcaggaaggctcttgacagcacgacagtcgcggctcatgagtcggagatctactgcaaggtgtgctatgggcgcagatatggccccaaagggatcgggtatggacaaggcgctggctgtctcagcacagacacgggcgagcatctcggcctgcagttccaacagtccccaaagccggcacgctcagttaccaccagcaacccttccaaattcactgcgaagtttggagagtccgagaagtgccctcgatgtggcaagtcagtctatgctgctgagaaggttatgggaggtggcaagccttggcacaagacctgtttccgctgtgccatctgtgggaagagtctggagtccacaaatgtcactgacaaagatggggaactttattgcaaagtttgctatgccaaaaattttggccccacgggtattgggtttggaggccttacacaacaagtggaaaagaaagaatgaagaggtgcgccgtttctcagattttttgcgagcctaaaacacttgccaagtaatcctgcacagatcgatacctttccccaaatagcctctcctttgtagtcgtacattatgtgtttctcctcagaagtgatcaggtctttactgaatgttagaagaggcctttggaagaaaattatgtaaagtttaatctataacaaatgctttattatttataatgcttggaatgggagaggcaataaataaatgttttagtgctatcttgtatggctctagatcttttctttgagatagaaattttcaaaaacataaagctagttcaaaaaacgagttgcagagcatataataaatttggatgtcaactgagaaaggagtgagaaggaagaaacaatgcgcaaaggaaagcagtctttcagaatctgtcagccaagtgtctttctagttactgctaatggagaagaaaacagggggtctgggagaaaatagagaacatgatagcaaaatctaaaaggaaaatcaaaactaataaaattgctgaagagttgatccctttgtcctatcgtggggctttgtaatgttacacatctcgtgaaaactcagaaatgacaataaagcgtggcatttgcctctgtattataaatga

SEQ ID NO: 82996 - DNA, 995 bp, Homo sapiens
tgcccttcccccagcaggccaaggctggtgacagccttcatatatttaaagaggacaagagcccctcagactcagttgagctgaacggagtccacacaggcagacttgaccttgaccagatagtcttcaagatgccaaactggggcggaggcgcaaaatgtggagcctgtgaaaagaccgtctaccatgcagaagaaatccagtgcaatggaaggagtttccacaagacgtgtttccactgcatggcctgcaggaaggctcttgacagcacgacagtcgcggctcatgagtcggagatctactgcaaggtgtgctatgggcgcagatatggccccaaagggatcgggtatggacaaggcgctggctgtctcagcacagacacgggcgagcatctcggcctgcagttccaacagtccccaaagccggcacgctcagttaccaccagcaacccttccaaattcactgcgaagtttggagagtccgagaagtgccctcgatgtggcaagtcagtctatgctgctgagaaggttatgggaggtggcaagccttggcacaagacctgtttccgctgtgccatctgtgggaagagtctggagtccacaaatgtcactgacaaagatggggaactttattgcaaagtttgctatgccaaaaattttggccccacgggtattgggtttggaggccttacacaacaagtggaaaagaaagaatgaagaggtgcgccgtttctcagattttttgcgagcctaaaacacttgccaagtaatcctgcacagatcgatacctttccccaaatagcctctcctttgtagtcgtacattatgtgtttctcctcagaagtgatcaggtctttactgaatgttagaagaggcctttggaagaaaattatgtaaagtttaatctataacaaatgctttattatttataatgcttggaatgggagaggctatggggggaaaggtatcgatcggtgcatgtggtgagcggggtac

SEQ ID NO: 82997 - DNA, 569 bp, Homo sapiens
aggggggaccccccaaaaaaaatccccccctcctttatttccccaaaaaaaaatttcaccttggagagtccgagaagtgccctcgatgtggcaagtcagtctatgctgctgagaaggttatgggaggtggcaagccttggcacaagacctgtttccgctgtgccatctgtgggaagagtctggagtccacaaatgtcactgacaaagatggggaactttattgcaaagtttgctatgccaaaaattttggccccacgggtattgggtttggaggccttacacaacaagtggaaaagaaagaatgaagaggtgcgccgtttctcagattttttgcgagcctaaaacacttgccaagtaatcctgcacagatcgatacctttccccaaatagcctctcctttgtagtcgtacattatgtgtttctcctcagaagtgatcaggtctttactgaatgttagaagaggcctttggaagaaaattatgtaaagtttaatctataacaaatgctttattatttataatgcttggaatgggagaggcaataaataaatgttttagtgctatcttgta

SEQ ID NO: 82998 - DNA, 1088 bp, Homo sapiens
cactttgctttgcaggaagggaacaactgtgctgtgaataccaggatccaggagggagggagggtatatctgtgtcccccagctagggacaaggcttccttaaccttaggtcctcatgcttatattagttcttctccaacaaagtttgactttgagaagaagctggcacatggctgaaatgcactcacgcggttgggggaagagtgttcttccagtcctcctccccacagggcctcctgcttctcctaagtacctgtcatcaaaggagatgaagatgaatcccccttcagcccccacacctcaatgagttgtcaagtactctccctcccacttgaataggaagcaggagcagcaggccaggttgcaggttgaggaagtcagaagttaacttgagctgagtttgcagctctggagagattgaggagcagacttttctcttgtcactttggaaggagaggattgtgaggctgcccctttaaatagcattcccgtaggaggcagatcacatccatccgtcacctactgccaaagcatcatttttggtttctatcaaactcaaagcttgttggaaaggattgtggggttaggggagtgaggaggcagagcctcctaggggtagggggcagtttagaagctgaaaaggagaggaatgagaaggagcctgggaaaggtgggggatgaggacaagaggaaaagacagggagagaatagttgtcttttgagcctcagagtggaacaagtatacccaattcttatctgtttagagacgcagcaaggtagaaatgggattgtattgcaacaagaggaatgaggttgagactaaacaccaggactggtgactaaagaaagtgaaaggagccacagagtgaaaaaggctgatagacttggctctggttttatcacttactctctgtgagaccctataatttttctgggttagtttagttctcatttatttttatttttactttttccatcaaactgtgttgtctatgaagttttcccatttattaaatgaagggaattagagtggatgaactctaatgtctctttcacgaataactttgtgtgtgtgtgcgtgtgtgtgt

SEQ ID NO: 82999 - DNA, 714 bp, Homo sapiens
ccccagtaggatccagtctgtggggcaagccaggcatttgagggagaatgagcacggggcttttggaggctgcagcctagggccaagggatggaggctcacctgagtgcaggttaggcagctgaagtgtctccccggaaaccaagctagagtgccccacctgctcggccctgccttctcggatcggatccagcacatccaggcttctcctcctcccgaggaaccagtggtgacagctgaggccatgtgagtaggatcctgaatgaggctttatctctggctgttcgtcccatcgtccaccgtggcaccagctccctcagccagccaggatgggaccagcgactgagagagccagaggcagagaggtgagggtgaccatatcctggactgtgagaggaatgggactctgggcctgtagctgccaagcaggtggcaggtgctccaggctgtgatctgcaccctctgacccctgacattgacctcctaccctgacccctgcctgaccaagccatgtctgaacaggaggctcaagccccaggggccgggggctgcccccggacatgctggcagagcaggtggagctgtggtggtcccagcagccgcggcgctcggcgctctgcttcgtcgtggccgtgggcctcgtggcaggctgtggccgcgggcggcgtggcactgctgtcaaccaccagcagccgctcaggtgaatggcggtagc

SEQ ID NO: 83000 - DNA, 374 bp, Homo sapiens
aaaaaattgattaacatgcagtattaaatctttaaaacaagagcagccctctccctctccctctccctctcccccctctccctctccccacggtctccctctccctctctttccaaggtctccctctgatgccgagccgaagctggactgtactgctgccatctcggctcgctgcagcctccctgcctgattctcctgcctcagcctgccgagtgcctgcgattgcaggcgcacgccgccacgcctggctgtttttcgtatttttttggtggagatggggtttcgctgtgttggccgggctggtctccagctcctaaccgcgagtgatccgccagcctcggcctcccgaggtgccgggattgcagatggagtct

SEQ ID NO: 83001 - DNA, 738 bp, Homo sapiens
cccacttgagatgggcatgtcaccatcactcctgcgtgagcttcagagagccaggtcacctctactcagttctaacatctgctccagggtttcaattccatcctgttgctcttcttgcccagggccagaggccaagatggattcctgactagctgacagctgtgcctaccccatagggctctcggagctaatcctacaaagtgcttgcactggataaagttggttgagtcacaccttgccctctccacatggagcctaggtttgcctaaatgggcagcaaggtataatgagaagaacagagggttcggaaccagaatgacacaggttcaaatcccagctctatcccttagaactgtcccaccaaggaagatccactgctgctgagctctagtgaacccctctgtaaaatgagatgaggactcctgctcaggatgttgtgaggacaaaaggagacagcacgcacgtaaagcacagtcccagtgcctataagcaccgattcctttctggtgaatcaggcgtgaggaaaggctctacccgagatgccctcgtcccaggcacctttcaggctgtacccacgctctcacccaatgagggtggtgatggctccccaacatcatttcaagctctaggctgtactaggcctctgcggatgcctggaggtggctcttgtcaattctcacctcccttcctgctgctgcccggctcgtcaggaggccgcttgaaggctgggctgtggtg

SEQ ID NO: 83002 - DNA, 451 bp, Homo sapiens
attttagggaaccacagtatctgatagcttaaaagtaatgaaaagccatttactgttatgtgttgctataaaatctactgtttgtccagatgcctaaactgagttgctttgtgtagtaaacacactgatggtcacaccttgagatcatgaggtaaagtctttgtagaaggtgctggcaacttagtttatcctacctcagaaaacggaatctgcctgctttggggactcgcagaacacaggaagcctgggtttgttgttggtctcatctctcacatgatttcagcctcgtcgttcatgctacctctttccacacaccttctctgcagaggagatggacgttgcggttcaggcttttcagtccgagtgggttagtgtgtgtgagagtttcttaaggaaaacaaccctagcatgtgagaaagggcaggattccaacaaagctctctgcctagcg

SEQ ID NO: 83003 - DNA, 179 bp, Homo sapiens
attttagggaaccacagtatctgatagcttaaaagtaatgaaaagccatttactgttatgtgttgctataaaatctactgtttgtccagatgcctaaactgagttgccagcaccttctacaaagactttacctcatgatctcaaggtgtgaccatcagtgtgtttactacacaaagcaa

SEQ ID NO: 83004 - DNA, 565 bp, Homo sapiens
gaggccttgctaatgagaactagtacggctttcaaagctctgacctcacatatctaatagggcaagcaaaatggaaagacagcgtatacttgggggcagtgagtgggcctcaaagaagtggcaaaggcagggccctcaggctggggtgttgaggaagtcctagatgacaatcgtataatacattcatataaagacagagcaatagcaacatgtcctcagccttacaaaaggaacttaaacgtgaaattttcttccaaattatgtggtggcaaggtcagtaaattgctttatttttaagatgtaaaattaaaataaccatttcccgatctcctacttcctcccctccccaaaaaacaacctattttaggtaaaggaaataattcaacaaaaatatacagaaactatttaaacgtgcagagaaaagataagaactgctgctacgaaagagagcaagagatggagaggagaacgtgtgatagggctggctactgagaataggcaagaaaaagaataatttagatgagaatatgtatgaggatatataaatggcaaaatggatacagta

SEQ ID NO: 83005 - DNA, 190 bp, Homo sapiens
tgatctagaggatctcgttactggcatttctatttggtgtacgcattggttttaactaaccgtttctagtgcatttaatactgcattttcagagcagacaacagtttcagtctcagtaaacatgattttgttagtgtcattttttatttatttttattttactttatttttttgagacagggtctttctg

SEQ ID NO: 83006 - DNA, 509 bp, Homo sapiens
ctaaaaatagaatgtaggaaaaaaaaatagaacgtaggcatcttgatattaaattccaaataagaaaccagcaaaactcatcttcccccttctcatgattgtgtatcttccacgggtatggaattgtgtggggtgttattgaggctgtgtggtgtgctggcgtctgaatgcagcttgacataacagaaagcagttgctccctgcgttcttatttctacaatatacagagacttttctgtcctgtagatacatgggggatgatcataagtgagcttttataagcgcagagtattacctatatcaccgtgaaagtgtatcgcatacaggacagttttggcttattaagttaaattaaaagtgaattccttttaaatgacctgcttaacggctttcctcctccaccagttactattaccttttcattctattacaggtggaaatgacatttttagggtcttccattatgtgtctaagccaccttctgacattcttagtagatggcttttttc

SEQ ID NO: 83007 - DNA, 755 bp, Homo sapiens
gccattctgaccttgttgatgcttacaattatttaaaatccctggcttctggcagttaaatgccacaactggcctctgtttttccagggttctatcaacttctttgttaccaatgagtcaggttctgtaatggcctctcctacagtgacctctggcctaaagaggagcatcactactctgcttgttagtgttgctagtgcttctttcaccagctcattcattacagccttggtaaactgtgtatcctttgggccttcccatggaacatattcctctcagtcttccagccttatttgtattttcattccagcatgcttattttcctcagcctttcccttcctcaaccttcttccatggcaatcccagcatttcaactttgcttattattaaccatctatcttagtgggcatataaccatctttgaagttcagctactctgactataaagtctagtcttggtcttcacctttctccagcctcctcctgcaggaaatgagagcttcttttttatgcagccaaagaggccctctgacaatctcacttggtttttaattgcttgttattcgctctgattttttcattatctttgtgtagagcatcaataccgcttagcaatagccatccaattcctttatctttatcgctactttattccccatacatctcaaatatatctgattcatctggccagttcacaaacagtgaaaatgttaataatttgattactaccttgtgataatagctgtttgtgctcc

SEQ ID NO: 83008 - DNA, 424 bp, Homo sapiens
actactttggtgctggataaagccccacataccctgctaaggtgagaagctagctgatacagggataagtgacaagcccagaaacgtggtcagtgaatgaagagttttagatagtgccagtgcaccagtgagtgaaacagtctgtgatccatcagaggataagtaatggtcagtgtgccaaggtgttgaggcaacttattgctgctgctgctgctactagacctagaaaactttacatctggctcacttagatactgctaagaatcaaagtaaaagtctttacattaaagtgccttgtctagtgaatttccattatgcagggtcctctttagttcagttaaacatccctcaggcagacagaaagaaatagaacactaaaaaattcatttttgtacttcttagcatatttaagcatcattgcatg

SEQ ID NO: 83009 - DNA, 378 bp, Homo sapiens
aaacaaaagcaactataataacaagcctccccattttaaagacaaagtttactactgtatttggttaaatgaatgatgggaatttttcttctttgttaaaaatgttttggcttataaatgtagtacttcacagagttgtagttctgcaagagaacttttaaaaagtgggcaaagacctttcagtacattaagtacaaatgtttgttagttcttgattgtaactactctggcataatcaaataacccacatttttaaatggaaaaactgtagtatgtttatttaatgccaataagcaaaagtgacagccttacatttgcttatcaagataaatttcttcaagtaaaattttttataataaaggtatctcctcagataaa

SEQ ID NO: 83010 - DNA, 369 bp, Homo sapiens
gttctagctataaggaattgagttatatgaaatgtgctgtgcaagattatataatttgtaacttttttctttttattctgacatgggaatttaaaaattatgttttgctttggctaataataaaatcagcctgcattcacatctgcttattctttgctaatatacaggctgatggcttgagcaggattctttgataaatggaaaaaggcaaacagtatgaaattaaaaattagccatcagtgtaaaccaggaagtggctaatctacacattttagatttgacttcatttggccagttcaactttaaaaggcactatgcctcaaacttattttctctgaacactgttttaatcttgtacagtctcttaag

SEQ ID NO: 83011 - DNA, 408 bp, Homo sapiens
ttgtcatgtttaaagatacagagtcactattttagaagtgaagggataggggtctcaaaacaaattgaaatatattttgtgaaatatatacatatgtattccacttaaatataaaatatatagtaccaatatatatccttgatgcttattaaatactgatctatatccttggactttttaaaaaaagtacagtcatgtatcgcttaacaacaggggtatgttctgagaaatgagtcatgggatttcatcattgtgcaaacattgtagagtgtacaacacaaacatagacggtgtgtagcctactacacacctaggctgtatggcataacctgttgctcctggaccacaaacttgtatagcatgttatggtaatgaatactgtaggcatttataacacgatggtatttg

SEQ ID NO: 83012 - DNA, 828 bp, Homo sapiens
gcccgtttcagccctgaactgaccaggatgacccgcctacgcggccgtttcagccctgaactgacgaggatgccccgcctacgcggcccatttcagccctgaactgaccaggatgacccacctacgcgggcggcccgtttcagccctgaactgacgaggatgccccgcctgccccgcatatttcaaccctgaactgaccaggatgccccgcctactcggcccgtttcagccctgaactgaccaggaggccccgcctgcctgaactgtttcagtcctgaactgcctggactgtttcagccctgaactgaccaggacgcaccgcctgcctggactgtttcagtcctgattgatgcctgtgcagctttgggaggcatgaccgcacctcctcctccctacacaccccagtgggggaagaggagagaaaatacgcctcttccctggctcttcactggagtcttagtgatttggtggagatttccaaggacaggcctccgggagctcagcgccgccctcctgttactgggcagttaggtgtgggaaggaacatactgacaacccatttttcttcaggaaaatcccattcaccacccttgaccttatattgctcagcccaggggtgtacatgggggaagtggtagtcacagggacagtaaggcaagcccagtctgtgtctaatgactatttcttcttcagatagttgagaatttaaatgtgaatgcaaatgttacgcaaatgaaattactcctaagacaatttacacagaccaactattaggatcagaacctcctgtttaacacagcctgcccaaaataactgagactattccga

SEQ ID NO: 83013 - DNA, 719 bp, Homo sapiens
aggtgcccaggtctcaggaagagggtggtagggcccaggctcccgtccggagagaagccgttaaaatccaccaccctccagcttcaatctagtgacttttaaatttctatattcaaatcaggcctctctctcggggcatgtgtgtggcggagagtgtgagggctgccttccgagtgataaaaaagagatttaataacattgttcaaatgtgggaaaatgacactgcgccgtccttgtgagaagacaggactgcccgagccaccgctcagctctgctcagaactcctgggcctgagataacattgatttgggcgcttgcatcacacatgtgccacatgacggattgctggacgttgacagcatggctccgctactaaaaacatatgactccatatggaacgccgtggtgtggggtggaaatcctggacggctccaggctgcagatggccatgtataattcacgggatttgtaagactctgcatctgctccgttgctcattcttcagttgtcagacagacataatcccgagcctcttattttataacacagatctgccaacgggagtggggaggggagccggggaggcagagccgctgccaggagaactcagaaataatttggggagaacattcggcatgtcagcgaggacagaagcgcgcaccgcaggaagcccaggcaaagttggaaacagggctgccggttccctggtccctccctgg

SEQ ID NO: 83014 - DNA, 388 bp, Homo sapiens
tatagatgtagttcttgagctttggcctctctgtcctaaggcatggcttctgcatagaattacaccagaactcccatcttttatcattgacttctggttcagcctcctgtagtaacttacctccccttataagcagcgggacattatcaggatggatggagggaggtgagcctggtaatatgatccctgctgccatttcagcgatgctggcctcagctgggtgatgtaatcttgtagttgttctgcatcttgtgacgtgtaaaatccataagagccctggaatcactgtagtcgtcttatcttagttccaaggatctcaactccagtgttcagcaaatctcaaggttgcagaaattgtaagagtacagtctaactatgtgccaccaac

SEQ ID NO: 83015 - DNA, 293 bp, Homo sapiens
agtgtggcttctgggggctaaaatcaagcaactcgtgggaaagcagagtatcatcgcaggacaaggcgtgtgtcctggtacacgggctgggagcatctttacagatgagccaaccaggaggatgttctcaggtaccagtggcacctgccaagaagtctgctctgtttctctctggtttggaacagacccatgctcctcacccctggcacattggtgttggtgccttgcagaatctgctttgccatcttgtgaggggcaaacggagcagatggccctgaccactgggatgccag

SEQ ID NO: 83016 - DNA, 956 bp, Homo sapiens
gttcaagcgattctcctgcctcagcttcctgagtagctgggattacaggcacgcaccaccacacccagctggtttttgtatttttagtagggacggggtttcaccatgttggccagcatggtcttggtctcctgacctcatgatccgcccaccttggcctcccaaagtgctgagattacaggcgtgagccaccacgcccagccgacaagtgagtttcaactgcccaaacgtcagggcacattattgcaagattaatgaaatgactcaagcaggcctccagggctggctggcttggggtaaattgtgctgcttcaacctgtccttgtcctggctgtggtttggcaccacctagtggcggttgggtgctctagcttaaatgtcaataaggaggattctggatcctgctcttgattggaactttcaggacagtggcagtgattccaggaattttcaggttagttggcgtctgtttcattggccaaatctggggtgattcagcctggagaataccttttctgcctccctgcttctcagcaccaggttgcttgctgtttcctacctggcctcagcctcctctcagcaaccccctttctccaaagatacaaactttagcctgtctccaagtggaaggttacctatcaagttacatctaaatgcctgtcatcacaaggagtttttacggagctgttcatgacacttaagtgagacatgaggcaagtaaaaggcccagtacctagaaagtgtttgaatgaaaattcccttttccggccagatatggtaactcacacctgtaatctcaacgctttgggaggccaaggcgggaggattgctgagaccaggagttcgaggctgcagtgagctatgattgtaccactgcactccagcctgggcaacagagcaagacgctgtctcaaaaaaaaaaaaaaaaaaggaaaaagaaagaaaggcctgtccca

SEQ ID NO: 83017 - DNA, 389 bp, Homo sapiens
agcaggtgaattatttcctaatatgaaaactttacatttggactcaggatttattttagtactatgatcttccttctcttttccttccaataaaagggatgctttcctcaagttgagcctcagtgaagagattataatgtatatatatttgatacatatatttaggggcagggtatcactttgtcacccaggctggagtacagtggcacaatcatagcttgctgcaccctcgaactccacttccagagtggctggactacaggtgtgtgccaccatgcctggctaatcttttcaattatttgtagagccaggatctcactatgtttcccaggctggtcttgaactcctggactcaagtgatcctactgcctctgccttccaaagttctg

SEQ ID NO: 83018 - DNA, 368 bp, Homo sapiens
gtttttaacaattgatatttacatatattaactttatctttcttcacccacctacagtattactaacttgccttacatcttttttatttatgttttgtcttaaaagtgacaaagattaaaagatattcttcataacctacagaaatgtacacaatcacattttattcaaatagaaaattctatgatatatgaatattctttatataatttccaaaatatctttgccattcttcatgacatcacataacatcacatgaagttactaaaaaaacaaacaggacatatttcattcatttcctcattaccacctccttcacaccacagtactcctcatttttaacagccaatgctaaacattcccaagagtg

SEQ ID NO: 83019 - DNA, 686 bp, Homo sapiens
tttccctaaaaagtttggtctcatctccctcaaaacgatttcagtcttcttcactctcctcaaacctctaaactctctggtagaaactgcattcttaatacattaaatgtcttgatatggaaacttcctcattttcccatcactaaatcttcaagtttatcttcatttgtattgtccattatttctgtgatcctgtctattcctggcttctgaagcacttgacccattcagttattcttcccttcctgagtcttcaacctctccttctatgccagatcctattcttcaacattcacagattctccagcatctcccatgtctcccattttatacaaagtacagcctttaattccatctcttcttgtagtaaatgccttagtatcctctagctaccaacaacccctttttttttttttttttgagatggagtttcactcttgttgcccacgctagagtgcaatagtgggatctcagctcactgcagcctctacctcctgggttcaaacgattctcctattcatcctcccgaatagttggaattacagacacccgctaccacgcctggctaatttttgtatttttagtagagacagggttttgccatgttggccaggctggtctcaaactcctgacttcaggcgatccgcctgccttggcctctcaaagtgctgggattataggcgtga

SEQ ID NO: 83020 - DNA, 434 bp, Homo sapiens
agagcacccaacactgtcctacagagcctagaaattaaactttctcagaagacaagggctgacgagagggtacatagtattaagaaattgaatatactctctgtatctcttgttagtacccaggtgaaacataggagacaaaacacatattacagaggtgtctcattttacacagtgggtatatttccaaaaagttgttgaagcaacctttttttaaatcaaattattttcccattgagtaaaactatgattcaggatatgaattttcttagttgctcgttagtcttcatttgccggaactcttaaatgggggtaaggtcctcagttcctgagggtctctaacaaagtgaatataaagtattgaaaacaaatactgaaaagatttctgtagatgatttttttggcaatgtgtctaacagtcttctctgattgta

SEQ ID NO: 83021 - DNA, 469 bp, Homo sapiens
cccagaacatgtctttctcggtaggaagaagtttagcagaggattatggagatggtctcagcaacaagactgcctggatttccatcctagttcctgccccaggtggcttaacctctctgcagttccgtttcttcacctgtaaaatagggataagaattctgttggaagaattaaataagctaagaagtatggagtacttggaacaaggtaccaggtggatacttgagtgctaagctggttgtccttgggcccttcatgccaggctcccagaggccctgcactctgaacatcaggcaatgcctctctatgatacatagctttaatcagcagcaaaataaaatggggctcattgaataaggcttacaaagatgatgagctcctgcctgggtttgcactgcctgctgtgcggacgagccgcatctgtggactcctccttagtcagaccaagctgccatctttaccttggctc

SEQ ID NO: 83022 - DNA, 1666 bp, Homo sapiens
gcctggccagcgcggagctcccggcccggagctgcttctgattaccgcgaggggcccggacgcgagagccgccgcggggcctgccctagaggcggagtgatgaactgtggcttcccccctgcggtgctgaactcgcccgtgtagctgtgattttagagctgccgacagctctaagcatgtcgcgccccgcccaccccgcggggattggctgcgaacgcggaagaaccaagcccacgccccgcgcccgcgcccaccaatggaagcgcccgctcgtcttgatagacgtgccaccttccgccaatggggacgaagggaagctccagcgtgtggccccggcgagtgcggataaaagccgccccgccgggctcgggcttcattctgagccgagcccggtgccaagcgcagctagctcagcaggcggcagcggcggcctgagcttcagggcagccagctccctcccggtctcgccttccctcgcggtcagcatgaaagccttcagtcccgtgaggtccgttaggaaaaacagcctgtcggaccacagcctgggcatctcccggagcaaaacccctgtggacgacccgatgagcctgctatacaacatgaacgactgctactccaagctcaaggagctggtgcccagcatcccccagaacaagaaggtgagcaagatggaaatcctgcagcacgtcatcgactacatcttggacctgcagatcgccctggactcgcatcccactattgtcagcctgcatcaccagagacccgggcagaaccaggcgtccaggacgccgctgaccaccctcaacacggatatcagcatcctgtccttgcaggcttctgaattcccttctgagttaatgtcaaatgacagcaaagcactgtgtggctgaataagcggtgttcatgatttcttttattctttgcacaacaacaacaacaacaaattcacggaatcttttaagtgctgaacttatttttcaaccatttcacaaggaggacaagttgaatggacctttttaaaaagaaaaaaaaaatggaaggaaaactaagaatgatcatcttcccagggtgttctcttacttggactgtgatattcgttatttatgaaaaagacttttaaatgccctttctgcagttggaaggttttctttatatactattcccaccatggggagcgaaaacgttaaaatcacaaggaattgcccaatctaagcagactttgccttttttcaaaggtggagcgtgaataccagaaggatccagtattcagtcacttaaatgaagtcttttggtcagaaattacctttttgacacaagcctactgaatgctgtgtatatatttatatataaatatatctatttgagtgaaaccttgtgaactctttaattagagttttcttgtatagtggcagagatgtctatttctgcattcaaaagtgtaatgatgtacttattcatgctaaactttttataaaagtttagttgtaaacttaacccttttatacaaaataaatcaagtgtgtttattgaatggtgattgcctgctttatttcagaggaccagtgctttgatttttattatgctatgttataactgaacccaaataaatacaagttcaaatttatgtagactgtataagattataataaaacatgtctgaagtcaa

SEQ ID NO: 83023 - DNA, 2230 bp, Homo sapiens
gcctggccagcgcggagctcccggcccggagctgcttctgattaccgcgaggggcccggacgcgagagccgccgcggggcctgccctagaggcggagtgatgaactgtggcttcccccctgcggtgctgaactcgcccgtgtagctgtgattttagagctgccgacagctctaagcatgtcgcgccccgcccaccccgcggggattggctgcgaacgcggaagaaccaagcccacgccccgcgcccgcgcccaccaatggaagcgcccgctcgtcttgatagacgtgccaccttccgccaatggggacgaagggaagctccagcgtgtggccccggcgagtgcggataaaagccgccccgccgggctcgggcttcattctgagccgagcccggtgccaagcgcagctagctcagcaggcggcagcggcggcctgagcttcagggcagccagctccctcccggtctcgccttccctcgcggtcagcatgaaagccttcagtcccgtgaggtccgttaggaaaaacagcctgtcggaccacagcctgggcatctcccggagcaaaacccctgtggacgacccgatgagcctgctatacaacatgaacgactgctactccaagctcaaggagctggtgcccagcatcccccagaacaagaaggtgagcaagatggaaatcctgcagcacgtcatcgactacatcttggacctgcagatcgccctggactcgcatcccactattgtcagcctgcatcaccagagacccgggcagaaccaggcgtccaggacgccgctgaccaccctcaacacggatatcagcatcctgtccttgcaggcttctgaattcccttctgagttaatgtcaaatgacagcaaagcactgtgtggctgaataagcggtgttcatgatttcttttattctttgcacaacaacaacaacaacaaattcacggaatcttttaagtgctgaacttatttttcaaccatttcacaaggaggacaagttgaatggacctttttaaaaagaaaaaaaaaatggaaggaaaactaagaatgatcatcttcccagggtgttctcttacttggactgtgatattcgttatttatgaaaaagacttttaaatgccctttctgcagttggaaggttttctttatatactattcccaccatggggagcgaaaacgttaaaatcacaaggaattgcccaatctaagcagactttgccttttttcaaaggtggagcgtgaataccagaaggatccagtattcagtcacttaaatgaagtcttttggtcagaaattacctttttgacacaagcctactgaatgctgtgtatatatttatatataaatatatctatttgagtgaaaccttgtgaactctttaattagagttttcttgtatagtggcagagatgtctatttctgcattcaaaagtgtaatgatgtacttattcatgctaaactttttataaaagtttagttgtaaacttaacccttttatacaaaataaatcaagtgtgtttattgaatggtgattgcctgctttatttcagaggaccagtgctttgatttttattatgctatgttataactgaacccaaataaatacaagttcaaatttatgtagactgtataagattataataaaacatgtctgaagtcaaaaaaaaaaaaaaaaaaaaaaaaaaaaaaaaaaaaaaaaaaaaaaaaaaaaaaaaaaaaaaagaaaaaacaaaaaaaaaaacaaagaaataaagaacaagaaaaaaacaaaaaaaaaaaagaacaggagggggcgcggcggccaactagatactaaatcctcgcccacgaggaggccacccataataaccgcccacgcacgtttttttgttagagaaaagagcggcgcaccaaaaaaacgaggaggtaattaaataattcaaccacgcggaggggcgccagatcaaaacaaaacacagccagggtgggaagaaacaacaacgactcgtcgagaccgagcacctcttgaagaaaaacaccacacccacatggcggggcgaggaacaaataacatgcggacacaaccacaccccgacaaaagtaaacacacacccaccagggaacccaacaaacacaaaatagacagcggcgtagaaggggagacacaccaaaaccgacgatctaaagagggcagggaaaaacagaatcgtagctacgacgaatgacctaaaacaaaaaaaaaaacg

SEQ ID NO: 83024 - DNA, 1530 bp, Homo sapiens
gcctggccagcgcggagctcccggcccggagctgcttctgattaccgcgaggggcccggacgcgagagccgccgcggggcctgccctagaggcggagtgatgaactgtggcttcccccctgcggtgctgaactcgcccgtgtagctgtgattttagagctgccgacagctctaagcatgtcgcgccccgcccaccccgcggggattggctgcgaacgcggaagaaccaagcccacgccccgcgcccgcgcccaccaatggaagcgcccgctcgtcttgatagacgtgccaccttccgccaatggggacgaagggaagctccagcgtgtggccccggcgagtgcggataaaagccgccccgccgggctcgggcttcattctgagccgagcccggtgccaagcgcagctagctcagcaggcggcagcggcggcctgagcttcagggcagccagctccctcccggtctcgccttccctcgcggtcagcatgaaagccttcagtcccgtgaggtccgttaggaaaaacagcctgtcggaccacagcctgggcatctcccggagcaaaacccctgtggacgacccgatgagcctgctatacaacatgaacgactgctactccaagctcaaggagctggtgcccagcatcccccagaacaagaaggtgagcaagatggaaatcctgcagcacgtcatcgactacatcttggacctgcagatcgccctggactcgcatcccactattgtcagcctgcatcaccagagacccgggcagaaccaggcgtccaggacgccgctgaccaccctcaacacggatatcagcatcctgtccttgcaggcttctgaattcccttctgagttaatgtcaaatgacagcaaagcactgtgtggctgaataagcggtgttcatgatttcttttattctttgcacaacaacaacaacaacaaattcacggaatcttttaagtgctgaacttatttttcaaccatttcacaaggaggacaagttgaatggacctttttaaaaagaaaaaaaaaatggaaggaaaactaagaatgatcatcttcccagggtgttctcttacttggactgtgatattcgttatttatgaaaaagacttttaaatgccctttctgcagttggaaggttttctttatatactattcccaccatggggagcgaaaacgttaaaatcacaaggaattgcccaatctaagcagactttgccttttttcaaaggtggagcgtgaataccagaaggatccagtattcagtcacttaaatgaagtcttttggtcagaaattacctttttgacacaagcctactgaatgctgtgtatatatttatatataaatatatctatttgagtgaaaccttgtgaactctttaattagagttttcttgtatagtggcagagatgtctatttctgcattcaaaagtgtaatgatgtacttattcatgctaaactttttataaaagtttagttgtaaacttaacccttttatacaaaataaatcaagtgtgtttattga

SEQ ID NO: 83025 - DNA, 2172 bp, Homo sapiens
gcctggccagcgcggagctcccggcccggagctgcttctgattaccgcgaggggcccggacgcgagagccgccgcggggcctgccctagaggcggagtgatgaactgtggcttcccccctgcggtgctgaactcgcccgtgtagctgtgattttagagctgccgacagctctaagcatgtcgcgccccgcccaccccgcggggattggctgcgaacgcggaagaaccaagcccacgccccgcgcccgcgcccaccaatggaagcgcccgctcgtcttgatagacgtgccaccttccgccaatggggacgaagggaagctccagcgtgtggccccggcgagtgcggataaaagccgccccgccgggctcgggcttcattctgagccgagcccggtgccaagcgcagctagctcagcaggcggcagcggcggcctgagcttcagggcagccagctccctcccggtctcgccttccctcgcggtcagcatgaaagccttcagtcccgtgaggtccgttaggaaaaacagcctgtcggaccacagcctgggcatctcccggagcaaaacccctgtggacgacccgatgagcctgctatacaacatgaacgactgctactccaagctcaaggagctggtgcccagcatcccccagaacaagaaggtgagcaagatggaaatcctgcagcacgtcatcgactacatcttggacctgcagatcgccctggactcgcatcccactattgtcagcctgcatcaccagagacccgggcagaaccaggcgtccaggacgccgctgaccaccctcaacacggatatcagcatcctgtccttgcaggcttctgaattcccttctgagttaatgtcaaatgacagcaaagcactgtgtggctgaataagcggtgttcatgatttcttttattctttgcacaacaacaacaacaacaaattcacggaatcttttaagtgctgaacttatttttcaaccatttcacaaggaggacaagttgaatggacctttttaaaaagaaaatgtgatattcgttatttatgaaaaagacttttaaatgccctttctgcagttggaaggttttctttatatactattcccaccatggggagcgaaaacgttaaaatcacaaggaattgcccaatctaagcagactttgccttttttcaaaggtggagcgtgaataccagaaggatccagtattcagtcacttaaatgaagtcttttggtcagaaattacctttttgacacaagcctactgaatgctgtgtatatatttatatataaatatatctatttgagtgaaaccttgtgaactctttaattagagttttcttgtatagtggcagagatgtctatttctgcattcaaaagtgtaatgatgtacttattcatgctaaactttttataaaagtttagttgtaaacttaacccttttatacaaaataaatcaagtgtgtttattgaatggtgattgcctgctttatttcagaggaccagtgctttgatttttattatgctatgttataactgaacccaaataaatacaagttcaaatttatgtagactgtataagattataataaaacatgtctgaagtcaaaaaaaaaaaaaaaaaaaaaaaaaaaaaaaaaaaaaaaaaaaaaaaaaaaaaaaaaaaaaaagaaaaaacaaaaaaaaaaacaaagaaataaagaacaagaaaaaaacaaaaaaaaaaaagaacaggagggggcgcggcggccaactagatactaaatcctcgcccacgaggaggccacccataataaccgcccacgcacgtttttttgttagagaaaagagcggcgcaccaaaaaaacgaggaggtaattaaataattcaaccacgcggaggggcgccagatcaaaacaaaacacagccagggtgggaagaaacaacaacgactcgtcgagaccgagcacctcttgaagaaaaacaccacacccacatggcggggcgaggaacaaataacatgcggacacaaccacaccccgacaaaagtaaacacacacccaccagggaacccaacaaacacaaaatagacagcggcgtagaaggggagacacaccaaaaccgacgatctaaagagggcagggaaaaacagaatcgtagctacgacgaatgacctaaaacaaaaaaaaaaacg

SEQ ID NO: 83026 - DNA, 1619 bp, Homo sapiens
gcctggccagcgcggagctcccggcccggagctgcttctgattaccgcgaggggcccggacgcgagagccgccgcggggcctgccctagaggcggagtgatgaactgtggcttcccccctgcggtgctgaactcgcccgtgtagctgtgattttagagctgccgacagctctaagcatgtcgcgccccgcccaccccgcggggattggctgcgaacgcggaagaaccaagcccacgccccgcgcccgcgcccaccaatggaagcgcccgctcgtcttgatagacgtgccaccttccgccaatggggacgaagggaagctccagcgtgtggccccggcgagtgcggataaaagccgccccgccgggctcgggcttcattctgagccgagcccggtgccaagcgcagctagctcagcaggcggcagcggcggcctgagcttcagggcagccagctccctcccggtccgttaggaaaaacagcctgtcggaccacagcctgggcatctcccggagcaaaacccctgtggacgacccgatgagcctgctatacaacatgaacgactgctactccaagctcaaggagctggtgcccagcatcccccagaacaagaaggtgagcaagatggaaatcctgcagcacgtcatcgactacatcttggacctgcagatcgccctggactcgcatcccactattgtcagcctgcatcaccagagacccgggcagaaccaggcgtccaggacgccgctgaccaccctcaacacggatatcagcatcctgtccttgcaggcttctgaattcccttctgagttaatgtcaaatgacagcaaagcactgtgtggctgaataagcggtgttcatgatttcttttattctttgcacaacaacaacaacaacaaattcacggaatcttttaagtgctgaacttatttttcaaccatttcacaaggaggacaagttgaatggacctttttaaaaagaaaaaaaaaatggaaggaaaactaagaatgatcatcttcccagggtgttctcttacttggactgtgatattcgttatttatgaaaaagacttttaaatgccctttctgcagttggaaggttttctttatatactattcccaccatggggagcgaaaacgttaaaatcacaaggaattgcccaatctaagcagactttgccttttttcaaaggtggagcgtgaataccagaaggatccagtattcagtcacttaaatgaagtcttttggtcagaaattacctttttgacacaagcctactgaatgctgtgtatatatttatatataaatatatctatttgagtgaaaccttgtgaactctttaattagagttttcttgtatagtggcagagatgtctatttctgcattcaaaagtgtaatgatgtacttattcatgctaaactttttataaaagtttagttgtaaacttaacccttttatacaaaataaatcaagtgtgtttattgaatggtgattgcctgctttatttcagaggaccagtgctttgatttttattatgctatgttataactgaacccaaataaatacaagttcaaatttatgtagactgtataagattataataaaacatgtctgaagtcaa

SEQ ID NO: 83027 - DNA, 1449 bp, Homo sapiens
atctttgagtgtttggttaaatgttcaaactgtggcttcctcccggcgccagtcgcccgcctctgcccttaggttacattctcttaaacatgcctttctcccccactctttcgcaggtgttcatgatttcttttattctttgcacaacaacaacaacaacaaattcacggaatcttttaagtgctgaacttatttttcaaccatttcacaaggaggacaagttgaatggacctttttaaaaagaaaaaaaaaatggaaggaaaactaagaatgatcatcttcccagggtgttctcttacttggactgtgatattcgttatttatgaaaaagacttttaaatgccctttctgcagttggaaggttttctttatatactattcccaccatggggagcgaaaacgttaaaatcacaaggaattgcccaatctaagcagactttgccttttttcaaaggtggagcgtgaataccagaaggatccagtattcagtcacttaaatgaagtcttttggtcagaaattacctttttgacacaagcctactgaatgctgtgtatatatttatatataaatatatctatttgagtgaaaccttgtgaactctttaattagagttttcttgtatagtggcagagatgtctatttctgcattcaaaagtgtaatgatgtacttattcatgctaaactttttataaaagtttagttgtaaacttaacccttttatacaaaataaatcaagtgtgtttattgaatggtgattgcctgctttatttcagaggaccagtgctttgatttttattatgctatgttataactgaacccaaataaatacaagttcaaatttatgtagactgtataagattataataaaacatgtctgaagtcaaaaaaaaaaaaaaaaaaaaaaaaaaaaaaaaaaaaaaaaaaaaaaaaaaaaaaaaaaaaaaagaaaaaacaaaaaaaaaaacaaagaaataaagaacaagaaaaaaacaaaaaaaaaaaagaacaggagggggcgcggcggccaactagatactaaatcctcgcccacgaggaggccacccataataaccgcccacgcacgtttttttgttagagaaaagagcggcgcaccaaaaaaacgaggaggtaattaaataattcaaccacgcggaggggcgccagatcaaaacaaaacacagccagggtgggaagaaacaacaacgactcgtcgagaccgagcacctcttgaagaaaaacaccacacccacatggcggggcgaggaacaaataacatgcggacacaaccacaccccgacaaaagtaaacacacacccaccagggaacccaacaaacacaaaatagacagcggcgtagaaggggagacacaccaaaaccgacgatctaaagagggcagggaaaaacagaatcgtagctacgacgaatgacctaaaacaaaaaaaaaaacg

SEQ ID NO: 83028 - DNA, 1545 bp, Homo sapiens
gcctggccagcgcggagctcccggcccggagctgcttctgattaccgcgaggggcccggacgcgagagccgccgcggggcctgccctagaggcggagtgatgaactgtggcttcccccctgcggtgctgaactcgcccgtgtagctgtgattttagagctgccgacagctctaagcatgtcgcgccccgcccaccccgcggggattggctgcgaacgcggaagaaccaagcccacgccccgcgcccgcgcccaccaatggaagcgcccgctcgtcttgatagacgtgccaccttccgccaatggggacgaagggaagctccagcgtgtggccccggcgagtgcggataaaagccgccccgccgggctcgggcttcattctgagccgagcccggtgccaagcgcagctagctcagcaggcggcagcggcggcctgagcttcagggcagccagctccctcccggtctcgccttccctcgcggtcagcatgaaagccttcagtcccgtgaggtccgttaggaaaaacagcctgtcggaccacagcctgggcatctcccggagcaaaacccctgtggacgacccgatgagcctgctatacaacatgaacgactgctactccaagctcaaggagctggtgcccagcatcccccagaacaagaaggtgagcaagatggaaatcctgcagcacgtcatcgactacatcttggacctgcagatcgccctggactcgcatcccactattgtcagcctgcatcaccagagacccgggcagaaccaggcgtccaggacgccgctgaccaccctcaacacggatatcagcatcctgtccttgcaggcttctgaattcccttctgagttaatgtcaaatgacagcaaagcactgtgtggctgaataagcggtgagtgtttgcttgtgccacccgtgggtaaactgcccctcggtgtgtgtgcgcgcgcgcgcatgtgtttttgcttgtgtatctataaaatgtctgatttggtaaatgcatgcttacttcgcggtgttacccgtactacattgtctcactagacatgaaggagcttgtagctttgggtgctcgagatcacagaacattttcctttaaaaggaaatgatgccaataacttactacgaaggcggccgaggaacgtgtgtattggctttgtagcaaatgtaatgccctggatcttcctacgagtcctctggtactatgaggtactaacctccactgtaattaatcttaccgccacaaattccatagtgatcctccttccctaaaactatagtcctctgggattctctgggctagttgaggattgctaccctgtgccttcaaccctgtgatgtgggatcccagacttccctatctgttaactaaagggctgttttcaatcaaataattgttacgagaagcagactggcgcctgtagcactgctgttggagatccaaataggagattgggttgggaagtttttcccttgagtctctgctattttaatgtttaatttgcgctgtcgaggcgagtgtgtgtgttgcatctggacg

SEQ ID NO: 83029 - DNA, 1333 bp, Homo sapiens
gcctggccagcgcggagctcccggcccggagctgcttctgattaccgcgaggggcccggacgcgagagccgccgcggggcctgccctagaggcggagtgatgaactgtggcttcccccctgcggtgctgaactcgcccgtgtagctgtgattttagagctgccgacagctctaagcatgtcgcgccccgcccaccccgcggggattggctgcgaacgcggaagaaccaagcccacgccccgcgcccgcgcccaccaatggaagcgcccgctcgtcttgatagacgtgccaccttccgccaatggggacgaagggaagctccagcgtgtggccccggcgagtgcggataaaagccgccccgccgggctcgggcttcattctgagccgagcccggtgccaagcgcagctagctcagcaggcggcagcggcggcctgagcttcagggcagccagctccctcccggtctcgccttccctcgcggtcagcatgaaagccttcagtcccgtgaggtccgttaggaaaaacagcctgtcggaccacagcctgggcatctcccggagcaaaacccctgtggacgacccgatgagcctgctatacaacatgaacgactgctactccaagctcaaggagctggtgcccagcatcccccagaacaagaaggtgagcaagatggaaatcctgcagcacgtcatcgactacatcttggacctgcagatcgccctggactcgcatcccactattgtcagcctgcatcaccagagacccgggcagaaccaggcgtccaggacgccgctgaccaccctcaacacggatatcagcatcctgtccttgcaggtaagacctgctccggggtccccgccccgccgccgcacactcccgcggtcgtctgggctgtcactaggagatccgtagcccagacggtgactttcgtatgagctatttaactttattttcttcagaatctggatctggtctccttgcaaacccacttgcttcatgtctgtctttacgccttttttccctttcttctatttccttttgtctttccagctcccgctgtctctgtcgttcctctctttggcgcttcactactttctcataatcattaggaaacattagggtcatattcgtcagctaagggaatcagaacttcccctgcagaaaacccactgggaacaggatccttcagcccagctgctacatgcggtggagtgtccacaatttgccggtcatctgaggaaccacctcgcttcaggtcaatgactggggcgaggactgtacatttgtttcgtcctttggctcaattgcctgagtgagagctccttcttcacctg

SEQ ID NO: 83030 - DNA, 284 bp, Homo sapiens
gtggcagagatgtctatttctgcattcaaaagtgtaatgatgtacttattcatgctaaactttttataaaagtttagttgtaaacttaacccttttatacaaaataaatcaagtgtgtttattgaatggtgattgcctgctttatttcagaggaccagtgctttgatttttattatgctatgttataactgaacccaaataaatacaagttcaaatttatgtagactgtataagattataataaaacatgtctgaagtcaagaagtcaatacctgaattccgag

SEQ ID NO: 83031 - DNA, 1658 bp, Homo sapiens
gcctggccagcgcggagctcccggcccggagctgcttctgattaccgcgaggggcccggacgcgagagccgccgcggggcctgccctagaggcggagtgatgaactgtggcttcccccctgcggtgctgaactcgcccgtgtagctgtgattttagagctgccgacagctctaagcatgtcgcgccccgcccaccccgcggggattggctgcgaacgcggaagaaccaagcccacgccccgcgcccgcgcccaccaatggaagcgcccgctcgtcttgatagacgtgccaccttccgccaatggggacgaagggaagctccagcgtgtggccccggcgagtgcggataaaagccgccccgccgggctcgggcttcattctgagccgagcccggtgccaagcgcagctagctcagcaggcggcagcggcggcctgagcttcagggcagccagctccctcccggtctcgccttccctcgcggtcagcatgaaagccttcagtcccgtgaggtccgttaggaaaaacagcctgtcggaccacagcctgggcatctcccggagcaaaacccctgtggacgacccgatgagcctgctatacaacatgaacgactgctactccaagctcaaggagctggtgcccagcatcccccagaacaagaaggtgagcaagatggaaatcctgcagcacgtcatcgactacatcttggacctgcagatcgccctggactcgcatcccactattgtcagcctgcatcaccagagacccgggcagaaccaggcgtccaggacgccgctgaccaccctcaacacggatatcagcatcctgtccttgcaggcttctgaattcccttctgagttaatgtcaaatgacagcaaagcactgtgtggctgaataagcggtgttcatgatttcttttattctttgcacaacaacaacaacaacaaattcacggaatcttttaagtgctgaacttatttttcaaccatttcacaaggaggacaagttgaatggacctttttaaaaagaaaaaaaaaatggaaggaaaactaagaatgatcatcttcccagggtgttctcttacttggactgtgatattcgttatttatgaaaaagacttttaaatgccctttctgcagttggaaggttttctttatatactattcccaccatggggagcgaaaacgttaaaatcacaaggaattgcccaatctaagcagactttgccttttttcaaaggtggagcgtgaataccagaaggatccagtattcagtcacttaaatgaagtcttttggtcagaaattacctttttgacacaagcctactgaatgctgtgtatatatttatatataaatatatctatttgagtgaaaccttgtgaactctttaattagagttttcttgtatagtggcagagatgtctatttctgcattcaaaagtgtaatgatgtacttattcatgctaaactttttataaaagtttagttgtaaacttaacccttttatacaaaataaatcaagtgtgtttattgaatggtgattgcctgctttatttcagaggaccagtgctttgatttttattatgctatgttataactgaacccaaataaatacaagttcattataagcgtgtagtataatctggagccagggggagcggt

SEQ ID NO: 83032 - DNA, 1613 bp, Homo sapiens
gcctggccagcgcggagctcccggcccggagctgcttctgattaccgcgaggggcccggacgcgagagccgccgcggggcctgccctagaggcggagtgatgaactgtggcttcccccctgcggtgctgaactcgcccgtgtagctgtgattttagagctgccgacagctctaagcatgtcgcgccccgcccaccccgcggggattggctgcgaacgcggaagaaccaagcccacgccccgcgcccgcgcccaccaatggaagcgcccgctcgtcttgatagacgtgccaccttccgccaatggggacgaagggaagctccagcgtgtggccccggcgagtgcggataaaagccgccccgccgggctcgggcttcattctgagccgagcccggtgccaagcgcagctagctcagcaggcggcagcggcggcctgagcttcagggcagccagctccctcccggtctcgccttccctcgcggtcagcatgaaagccttcagtcccgtgaggtccgttaggaaaaacagcctgtcggaccacagcctgggcatctcccggagcaaaacccctgtggacgacccgatgagcctgctatacaacatgaacgactgctactccaagctcaaggagctggtgcccagcatcccccagaacaagaaggtgagcaagatggaaatcctgcagcacgtcatcgactacatcttggacctgcagatcgccctggactcgcatcccactattgtcagcctgcatcaccagagacccgggcagaaccaggcgtccaggacgccgctgaccaccctcaacacggatatcagcatcctgtccttgcaggcttctgaattcccttctgagttaatgtcaaatgacagcaaagcactgtgtggctgaataagcggtgttcatgatttcttttattctttgcacaacaacaacaacaacaaattcacggaatcttttaagtgctgaacttatttttcaaccatttcacaaggaggacaagttgaatggacctttttaaaaagaaaaaaaaaatggaaggaaaactaagaatgatcatcttcccagggtgttctcttacttggactgtgatattcgttatttatgaaaaagacttttaaatgccctttctgcagttggaaggttttctttatatactattcccaccatggggagcgaaaacgtggagcgtgaataccagaaggatccagtattcagtcacttaaatgaagtcttttggtcagaaattacctttttgacacaagcctactgaatgctgtgtatatatttatatataaatatatctatttgagtgaaaccttgtgaactctttaattagagttttcttgtatagtggcagagatgtctatttctgcattcaaaagtgtaatgatgtacttattcatgctaaactttttataaaagtttagttgtaaacttaacccttttatacaaaataaatcaagtgtgtttattgaatggtgattgcctgctttatttcagaggaccagtgctttgatttttattatgctatgttataactgaacccaaataaatacaagttcaaatttatgtagactgtataagattataataaaacatgtctgaagtcaa

SEQ ID NO: 83033 - DNA, 2559 bp, Homo sapiens
gcctggccagcgcggagctcccggcccggagctgcttctgattaccgcgaggggcccggacgcgagagccgccgcggggcctgccctagaggcggagtgatgaactgtggcttcccccctgcggtgctgaactcgcccgtgtagctgtgattttagagctgccgacagctctaagcatgtcgcgccccgcccaccccgcggggattggctgcgaacgcggaagaaccaagcccacgccccgcgcccgcgcccaccaatggaagcgcccgctcgtcttgatagacgtgccaccttccgccaatggggacgaagggaagctccagcgtgtggccccggcgagtgcggataaaagccgccccgccgggctcgggcttcattctgagccgagcccggtgccaagcgcagctagctcagcaggcggcagcggcggcctgagcttcagggcagccagctccctcccggtctcgccttccctcgcggtcagcatgaaagccttcagtcccgtgaggtccgttaggaaaaacagcctgtcggaccacagcctgggcatctcccggagcaaaacccctgtggacgacccgatgagcctgctatacaacatgaacgactgctactccaagctcaaggagctggtgcccagcatcccccagaacaagaaggtgagcaagatggaaatcctgcagcacgtcatcgactacatcttggacctgcagatcgccctggactcgcatcccactattgtcagcctgcatcaccagagacccgggcagaaccaggcgtccaggacgccgctgaccaccctcaacacggatatcagcatcctgtccttgcaggtaagacctgctccggggtccccgccccgccgccgcacactcccgcggtcgtctgggctgtcactaggagatccgtagcccagacggtgactttcgtatgagctatttaactttattttcttcagaatctgctgtagattgagctgtgcgtgaaattgctagtaagttctgacatgttaatgcgtctgtctttaaatctgaattgttaccataaacgtgtttaatggaacttgctggtctgtggactacaaaaaaaaaaaaaaaaaaacaaaaaccctttctacttaacattgtcttaacctcgtactctttatcctctttctttccaggcttctgaattcccttctgagttaatgtcaaatgacagcaaagcactgtgtggctgaataagcggtgttcatgatttcttttattctttgcacaacaacaacaacaacaaattcacggaatcttttaagtgctgaacttatttttcaaccatttcacaaggaggacaagttgaatggacctttttaaaaagaaaaaaaaaatggaaggaaaactaagaatgatcatcttcccagggtgttctcttacttggactgtgatattcgttatttatgaaaaagacttttaaatgccctttctgcagttggaaggttttctttatatactattcccaccatggggagcgaaaacgttaaaatcacaaggaattgcccaatctaagcagactttgccttttttcaaaggtggagcgtgaataccagaaggatccagtattcagtcacttaaatgaagtcttttggtcagaaattacctttttgacacaagcctactgaatgctgtgtatatatttatatataaatatatctatttgagtgaaaccttgtgaactctttaattagagttttcttgtatagtggcagagatgtctatttctgcattcaaaagtgtaatgatgtacttattcatgctaaactttttataaaagtttagttgtaaacttaacccttttatacaaaataaatcaagtgtgtttattgaatggtgattgcctgctttatttcagaggaccagtgctttgatttttattatgctatgttataactgaacccaaataaatacaagttcaaatttatgtagactgtataagattataataaaacatgtctgaagtcaaaaaaaaaaaaaaaaaaaaaaaaaaaaaaaaaaaaaaaaaaaaaaaaaaaaaaaaaaaaaaagaaaaaacaaaaaaaaaaacaaagaaataaagaacaagaaaaaaacaaaaaaaaaaaagaacaggagggggcgcggcggccaactagatactaaatcctcgcccacgaggaggccacccataataaccgcccacgcacgtttttttgttagagaaaagagcggcgcaccaaaaaaacgaggaggtaattaaataattcaaccacgcggaggggcgccagatcaaaacaaaacacagccagggtgggaagaaacaacaacgactcgtcgagaccgagcacctcttgaagaaaaacaccacacccacatggcggggcgaggaacaaataacatgcggacacaaccacaccccgacaaaagtaaacacacacccaccagggaacccaacaaacacaaaatagacagcggcgtagaaggggagacacaccaaaaccgacgatctaaagagggcagggaaaaacagaatcgtagctacgacgaatgacctaaaacaaaaaaaaaaacg

SEQ ID NO: 83034 - DNA, 1612 bp, Homo sapiens
gcctggccagcgcggagctcccggcccggagctgcttctgattaccgcgaggggcccggacgcgagagccgccgcggggcctgccctagaggcggagtgatgaactgtggcttcccccctgcggtgctgaactcgcccgtgtagctgtgattttagagctgccgacagctctaagcatgtcgcgccccgcccaccccgcggggattggctgcgaacgcggaagaaccaagcccacgccccgcgcccgcgcccaccaatggaagcgcccgctcgtcttgatagacgtgccaccttccgccaatggggacgaagggaagctccagcgtgtggccccggcgagtgcggataaaagccgccccgccgggctcgggcttcattctgagccgagcccggtgccaagcgcagctagctcagcaggcggcagcggcggcctgagcttcagggcagccagctccctcccggtctcgccttccctcgcggtcagcatgaaagccttcagtcccgtgaggtccgttaggaaaaacagcctgtcggaccacagcctgggcatctcccggagctccaagctcaaggagctggtgcccagcatcccccagaacaagaaggtgagcaagatggaaatcctgcagcacgtcatcgactacatcttggacctgcagatcgccctggactcgcatcccactattgtcagcctgcatcaccagagacccgggcagaaccaggcgtccaggacgccgctgaccaccctcaacacggatatcagcatcctgtccttgcaggcttctgaattcccttctgagttaatgtcaaatgacagcaaagcactgtgtggctgaataagcggtgttcatgatttcttttattctttgcacaacaacaacaacaacaaattcacggaatcttttaagtgctgaacttatttttcaaccatttcacaaggaggacaagttgaatggacctttttaaaaagaaaaaaaaaatggaaggaaaactaagaatgatcatcttcccagggtgttctcttacttggactgtgatattcgttatttatgaaaaagacttttaaatgccctttctgcagttggaaggttttctttatatactattcccaccatggggagcgaaaacgttaaaatcacaaggaattgcccaatctaagcagactttgccttttttcaaaggtggagcgtgaataccagaaggatccagtattcagtcacttaaatgaagtcttttggtcagaaattacctttttgacacaagcctactgaatgctgtgtatatatttatatataaatatatctatttgagtgaaaccttgtgaactctttaattagagttttcttgtatagtggcagagatgtctatttctgcattcaaaagtgtaatgatgtacttattcatgctaaactttttataaaagtttagttgtaaacttaacccttttatacaaaataaatcaagtgtgtttattgaatggtgattgcctgctttatttcagaggaccagtgctttgatttttattatgctatgttataactgaacccaaataaatacaagttcaaatttatgtagactgtataagattataataaaacatgtctgaagtcaa

SEQ ID NO: 83035 - DNA, 1172 bp, Homo sapiens
gcctggccagcgcggagctcccggcccggagctgcttctgattaccgcgaggggcccggacgcgagagccgccgcggggcctgccctagaggcggagtgatgaactgtggcttcccccctgcggtgctgaactcgcccgtgtagctgtgattttagagctgccgacagctctaagcatgtcgcgccccgcccaccccgcggggattggctgcgaacgcggaagaaccaagcccacgccccgcgcccgcgcccaccaatggaagcgcccgctcgtcttgatagacgtgccaccttccgccaatggggacgaagggaagctccagcgtgtggccccggcgagtgcggataaaagccgccccgccgggctcgggcttcattctgagccgagcccggtgccaagcgcagctagctcagcaggcggcagcggcggcctgagcttcagggcagccagctccctcccggtctcgccttccctcgcggtcagcatgaaagccttcagtcccgtgaggtccgttaggaaaaacagcctgtcggaccacagcctgggcatctcccggagcaaaacccctgtggacgacccgatgagcctgctatacaacatgaacgactgctactccaagctcaaggagctggtgcccagcatcccccagaacaagaaggtgagcaagatggaaatcctgcagcacgtcatcgactacatcttggacctgcagatcgccctggactcgcatcccactattgtcagcctgcatcaccagagacccgggcagaaccaggcgtccaggacgccgctgaccaccctcaacacggatatcagcatcctgtccttgcaggcttctgaattcccttctgagttaatgtcaaatgacagcaaagcactgtgtggctgaataagcggtgttcatgatttcttttattctttgcacaacaacaacaacaacaaattcacggaatcttttaagtgctgaacttatttttcaaccatttcacaaggaggacaagttgaatggacctttttaaaaagaaaaaaaaaatggaaggaaaactaagaatgatcatcttcccagggtgttctcttacttggactgtgatattcgttatttatgaaaaagacttttaaattatttatgcccaaataatttaccctgcagtccatgagtgtagaaattgaa

SEQ ID NO: 83036 - DNA, 1024 bp, Homo sapiens
gcctggccagcgcggagctcccggcccggagctgcttctgattaccgcgaggggcccggacgcgagagccgccgcggggcctgccctagaggcggagtgatgaactgtggcttcccccctgcggtgctgaactcgcccgtgtagctgtgattttagagctgccgacagctctaagcatgtcgcgccccgcccaccccgcggggattggctgcgaacgcggaagaaccaagcccacgccccgcgcccgcgcccaccaatggaagcgcccgctcgtcttgatagacgtgccaccttccgccaatggggacgaagggaagctccagcgtgtggccccggcgagtgcggataaaagccgccccgccgggctcgggcttcattctgagccgagcccggtgccaagcgcagctagctcagcaggcggcagcggcggcctgagcttcagggcagccagctccctcccggtctcgccttccctcgcggtcagcatgaaagccttcagtcccgtgaggtccgttaggaaaaacagcctgtcggaccacagcctgggcatctcccggagcaaaacccctgtggacgacccgatgagcctgctatacaacatgaacgactgctactccaagctcaaggagctggtgcccagcatcccccagaacaagaaggtgagcaagatggaaatcctgcagcacgtcatcgactacatcttggacctgcagatcgccctggactcgcatcccactattgtcagcctgcatcaccagagacccgggcagaaccaggcgtccaggacgccgctgaccaccctcaacacggatatcagcatcctgtccttgcaggcttctgaattcccttctgagttaatgtcaaatgacagcaaagcactgtgtggctgaataagcggtgttcatgatttcttttattctttgcacaacaacaacaacaacaaattcacggaatcttttaagtgctgaacttatttttcaacttgtcctccttgtgaaatggttgaaaagtcgacgcggccgcg

SEQ ID NO: 83037 - DNA, 1874 bp, Homo sapiens
gcctggccagcgcggagctcccggcccggagctgcttctgattaccgcgaggggcccggacgcgagagccgccgcggggcctgccctagaggcggagtgatgaactgtggcttcccccctgcggtgctgaactcgcccgtgtagctgtgattttagagctgccgacagctctaagcatgtcgcgccccgcccaccccgcggggattggctgcgaacgcggaagaaccaagcccacgccccgcgcccgcgcccaccaatggaagcgcccgctcgtcttgatagacgtgccaccttccgccaatggggacgaagggaagctccagcgtgtggccccggcgagtgcggataaaagccgccccgccgggctcgggcttcattctgagccgagcccggtgccaagcgcagctagctcagcaggcggcagcggcggcctgagcttcagggcagccagctccctcccggtctcgccttccctcgcggtcagcatgaaagccttcagtcccgtgaggtccgttaggaaaaacagcctgtcggaccacagcctgggcatctcccggagcaaaacccctgtggacgacccgatgagcctgctatacaacatgaacgactgctactccaagctcaaggagctggtgcccagcatcccccagaacaagaaggtgagcaagatggaaatcctgcagcacgtcatcgactacatcttggacctgcagatcgccctggactcgcatcccactattgtcagcctgcatcaccagagacccgggcagaaccaggcgtccaggacgccgctgaccaccctcaacacggatatcagcatcctgtccttgcaggtaagacctgctccggggtccccgccccgccgccgcacactcccgcggtcgtctgggctgtcactaggagatccgtagcccagacggtgactttcgtatgagctatttaactttattttcttcagaatctgctgtagattgagctgtgcgtgaaattgctagtaagttctgacatgttaatgcgtctgtctttaaatctgaattgttaccataaacgtgtttaatggaacttgctggtctgtggactacaaaaaaaaaaaaaaaaaaacaaaaaccctttctacttaacattgtcttaacctcgtactctttatcctctttctttccaggcttctgaattcccttctgagttaatgtcaaatgacagcaaagcactgtgtggctgaataagcggtgagtgtttgcttgtgccacccgtgggtaaactgcccctcggtgtgtgtgcgcgcgcgcgcatgtgtttttgcttgtgtatctataaaatgtctgatttggtaaatgcatgcttacttcgcggtgttacccgtactacattgtctcactagacatgaaggagcttgtagctttgggtgctcgagatcacagaacattttcctttaaaaggaaatgatgccaataacttactacgaaggcggccgaggaacgtgtgtattggctttgtagcaaatgtaatgccctggatcttcctacgagtcctctggtactatgaggtactaacctccactgtaattaatcttaccgccacaaattccatagtgatcctccttccctaaaactatagtcctctgggattctctgggctagttgaggattgctaccctgtgccttcaaccctgtgatgtgggatcccagacttccctatctgttaactaaagggctgttttcaatcaaataattgttacgagaagcagactggcgcctgtagcactgctgttggagatccaaataggagattgggttgggaagtttttcccttgagtctctgctattttaatgtttaatttgcgctgtcgaggcgagtgtgtgtgttgcatctggacg

SEQ ID NO: 83038 - DNA, 1820 bp, Homo sapiens
gcctggccagcgcggagctcccggcccggagctgcttctgattaccgcgaggggcccggacgcgagagccgccgcggggcctgccctagaggcggagtgatgaactgtggcttcccccctgcggtgctgaactcgcccgtgtagctgtgattttagagctgccgacagctctaagcatgtcgcgccccgcccaccccgcggggattggctgcgaacgcggaagaaccaagcccacgccccgcgcccgcgcccaccaatggaagcgcccgctcgtcttgatagacgtgccaccttccgccaatggggacgaagggaagctccagcgtgtggccccggcgagtgcggataaaagccgccccgccgggctcgggcttcattctgagccgagcccggtgccaagcgcagctagctcagcaggcggcagcggcggcctgagcttcagggcagccagctccctcccggtctcgccttccctcgcggtcagcatgaaagccttcagtcccgtgaggtccgttaggaaaaacagcctgtcggaccacagcctgggcatctcccggagcaaaacccctgtggacgacccgatgagcctgctatacaacatgaacgactgctactccaagctcaaggagctggtgcccagcatcccccagaacaagaaggtgagcaagatggaaatcctgcagcacgtcatcgactacatcttggacctgcagatcgccctggactcgcatcccactattgtcagcctgcatcaccagagacccgggcagaaccaggcgtccaggacgccgctgaccaccctcaacacggatatcagcatcctgtccttgcaggtaagacctgctccggggtccccgccccgccgccgcacactcccgcggtcgtctgggctgtcactaggagatccgtagcccagacggtgactttcgtatgagctatttaactttattttcttcagaatctgctgtagattgagctgtgcgtgaaattgctagtaagttctgacatgttaatgcgtctgtctttaaatctgaattgttaccataaacgtgtttaatggaacttgctggtctgtggactacaaaaaaaaaaaaaaaaaaacaaaaaccctttctacttaacattgtcttaacctcgtactctttatcctctttctttccaggcttctgaattcccttctgagttaatgtcaaatgacagcaaagcactgtgtggctgaataagcggtgagtgtttgcttgtgccacccgtgggtaaactgcccctcggtgtgtgtgcgcgcgcgcgcatgtgtttttgcttgtgtatctataaaatgtctgatttggtaaatgcatgcttacttcgcggtgttacccgtactacattgtctcactagacatgaaggagcttgtagctttgggtgctcgagatcacagaacattttcctttaaaaggaaatgatgccaataacttactacgaaggcggccgaggaacgtgtgtattggctttgtagcaaatgtaatgccctggatcttcctacgagtcctctggtactatgaggtactaacctccactgtaattaatcttaccgccacaaattccatagtgatcctccttccctcttcaaccctgtgatgtgggatcccagacttccctatctgttaactaaagggctgttttcaatcaaataattgttacgagaagcagactggcgcctgtagcactgctgttggagatccaaataggagattgggttgggaagtttttcccttgagtctctgctattttaatgtttaatttgcgctgtcgaggcgagtgtgtgtgttgcatctggacg

SEQ ID NO: 83039 - DNA, 2105 bp, Homo sapiens
  misc_feature (1197)..(1197): n is a, c, g, or t
  misc_feature (1199)..(1200): n is a, c, g, or t
gcgagagttgcttttgcgcgcgaactgtaagtgccagggtctcagggtcaggtcgcggctggtcactgtgcaggcgcttgggtgacgcgacgatctcagcggatctggtcaccttcgtctccccgccatggagacctcagcactcaagcagcaggagcagcccgcggcgaccaagatcaggaacctgccctgggttgaaaaataccggccacagaccctgaatgatctcatttctcatcaggacattctgagtaccattcagaagtttatcaatgaagaccgactgccacacttgcttctctacggtcccccagggacaggcaagacatctaccatcctagcctgtgcgaaacagctatataaagacaaagaatttggctccatggtcttggagctgaatgcttcagatgaccgaggaatagacatcattcgaggaccgatcctgagctttgctagcacaaggacaatatttaagaaaggctttaagctagtgatcttggatgaagcagacgccatgactcaggacgcccagaatgccttgagaagagtaattgagaaattcacagaaaataccagattctgcctcatctgtaactatctgtcaaagatcatccctgccttgcagtcccgctgcacgaggtttcggttcggtcccctgactcctgaactcatggttccccgcctggaacatgtcgtggaagaagagaaagttgatataagtgaagatggaatgaaagcactagtcactctttccagtggagacatgcgtagggctctgaacattttgcagagcaccaatatggcctttgggaaggtgacagaggagactgtctacacctgcaccgggcacccgctcaagtcagacattgccaacatcctggactggatgttgaatcaagatttcaccacagcctacagaaatattacagagttgaaaactctgaaggggttggcactgcatgatatcctgacagagatacacttgtttgtgcatagagttgactttccatcttcagttcgaatacatttattgaccaaaatggcagacattgagtacaggctttctgttggcaccaacgagaagatccagctgagctccctcattgctgcatttcaagtcaccagagacctgattgttgcagaggcctagatgctctgagggccattcacaattctcagggctcagcagtgatgggngnncagaggacagttccaggataaactgctgcctggggctgtgggatgaatcagtcaccccgaatcttggaaaaacccccttccaggagaggatgggcaggcatttaaaaagtaccatttttgtggttgtttggagcagggatgtacaaaataattttaatgtattaactcatactgcctgtcttttataggggaaaaaaataaccttttttattttaaagttataaggtttttaccttttagttgcttggatgacagggaattagcctaccccattttggtctggaacagaagactttcaaatttaatatggtccaagtgtcttcctactcaaggtaaacattatctccaaaattacatttatgattctaatatttggcattgtgtctgtatctaatttaaacagatgttaatggacgtctggccgaaactattatacttttataagatgagctgaatcctcttactttaaaaactggtctttttatttaccctctgtggtagaagagtcaccagcaggttccaaattgatgtgtatgataggaaaaaaaccttaattttaaatataatatagagccttaaactatgccactgggtggcagaggctgtataaaacgcacttgttttcatgcaggagcggggcaagtaaggttgagcctgactgtaaacctagaactgcggaaggactgggacttttgtacaaatttcacatttattttacagcaatcatgctgcatttgtgttagtgttctttataataaaaaacaaagcagcctcctggctggctgtgttacaagtgactcttccttagacagctagaaagatgctgactttgtcaaacttgcatttatatgaaaaccttctgtctctaatatcacagaataaactttctttagatgctgttcttt

SEQ ID NO: 83040 - DNA, 711 bp, Homo sapiens
gcgagagttgcttttgcgcgcgaactgtaagtgccagggtctcagggtcaggtcgcggctggtcactgtgcaggcgcttgggtgacgcgacgatctcagcggatctggtcaccttcgtctccccgccatggagacctcagcactcaagcagcaggagcagcccgcggcgaccaagatcaggaacctgccctggtaggaggaggccgagcggcggcggtgggcagagggggccaggcggccgcgcggggaggaggtggctggggtggcaggtgaccggaccccaacccgacctcttcccgtcgtctccaggcctgcagccgggaccgacctgcagaggtttcccccgacaccccccagctacccagactcgtccgttctgtttagggcttttgccagttctcaccctttcacccccagctccatttgccgaagaagaaggcggctttcgcacctggtgacagcacaggggttcgatcccgcgtctcctgacgcctgcaatggcctccatgccaaaatgccctcttcccactcttcaaaacctgcgatgcgactattggtcacattttaaactagtaataacgctccctggtcaacttttattgaatggcatattattagattagcagacgccctgttagatgttcgatccttacaaagaccgtaggaggtaggcaccgcttcaaattttacacaggaggaaactgcatttta

SEQ ID NO: 83041 - DNA, 947 bp, Homo sapiens
  misc_feature (938)..(938): n is a, c, g, or t
gcgagagttgcttttgcgcgcgaactgtaagtgccagggtctcagggtcaggtcgcggctggtcactgtgcaggcgcttgggtgacgcgacgatctcagcggatctggtcaccttcgtctccccgccatggagacctcagcactcaagcagcaggagcagcccgcggcgaccaagatcaggaacctgccctgggttgaaaaataccggccacagaccctgaatgatctcatttctcatcaggacattctgagtaccattcagaagtttatcaatgaagaccgactgccacacttgcttctctacggtcccccagggacaggcaagacatctaccatcctagcctgtgcgaaacagctatataaagacaaagaatttggctccatggtcttggagctgaatgcttcagatgaccgaggaatagacatcattcgaggaccgatcctgagctttgctagcacaaggacaatatttaagaaaggctttaagctagtgatcttggatgaagcagacgccatgactcaggacgcccagaatgccttgagaagagtaattgagaaattcacagaaaataccagattctgcctcatctgtaactatctgtcaaagatcatccctgccttgcagtcccgctgcacgaggtttcggttcggtcccctgactcctgaactcatggttccccgcctggaacatgtcgtggaagaagagaaagttgatataagtgaagatggaatgaaagcactagtcactctttccagtggagacatgcgtagggctctgaacattttgcagagcaccaatatggcctttgggaaggtgacagaggagactgtctacacctgcaccgggcacccgctcaagtcagacattgccaacatcctggactggatgttgaatcaagatttcaccacagcagtcctgccaggatgacagagctagnctctgtcta

SEQ ID NO: 83042 - DNA, 1311 bp, Homo sapiens
  misc_feature (1302)..(1302): n is a, c, g, or t
gcgagagttgcttttgcgcgcgaactgtaagtgccagggtctcagggtcaggtcgcggctggtcactgtgcaggcgcttgggtgacgcgacgatctcagcggatctggtcaccttcgtctccccgccatggagacctcagcactcaagcagcaggagcagcccgcggcgaccaagatcaggaacctgccctgagacagggtctcgctctgtcgcccatgctggagcgcagtggtgtgatcacagctcagtgtaacctcaaacattggggttcaagccattctcctgcctcagcctccgaagaactgggacttttagaggcgagctaccaagcccatcctgtaaccattttaaaatgtacaattcagtggcattaagtacattcagaatgcagtgtactgttgtggagtcttcccgctatctagttccaaaatttcatcaccccaaatggaaatcctgtacccattgacagttactccccattctccccttcctctagcccctggcaaccactaatctgctttctatctatggatttgcctattctggacatttcatggttgaaaaataccggccacagaccctgaatgatctcatttctcatcaggacattctgagtaccattcagaagtttatcaatgaagaccgactgccacacttgcttctctacggtcccccagggacaggcaagacatctaccatcctagcctgtgcgaaacagctatataaagacaaagaatttggctccatggtcttggagctgaatgcttcagatgaccgaggaatagacatcattcgaggaccgatcctgagctttgctagcacaaggacaatatttaagaaaggctttaagctagtgatcttggatgaagcagacgccatgactcaggacgcccagaatgccttgagaagagtaattgagaaattcacagaaaataccagattctgcctcatctgtaactatctgtcaaagatcatccctgccttgcagtcccgctgcacgaggtttcggttcggtcccctgactcctgaactcatggttccccgcctggaacatgtcgtggaagaagagaaagttgatataagtgaagatggaatgaaagcactagtcactctttccagtggagacatgcgtagggctctgaacattttgcagagcaccaatatggcctttgggaaggtgacagaggagactgtctacacctgcaccgggcacccgctcaagtcagacattgccaacatcctggactggatgttgaatcaagatttcaccacagcagtcctgccaggatgacagagctagnctctgtcta

SEQ ID NO: 83043 - DNA, 2166 bp, Homo sapiens
  misc_feature (264)..(264): n is a, c, g, or t
  misc_feature (1258)..(1258): n is a, c, g, or t
  misc_feature (1260)..(1261): n is a, c, g, or t
gcgagagttgcttttgcgcgcgaactgtaagtgccagggtctcagggtcaggtcgcggctggtcactgtgcaggcgcttgggtgacgcgacgatctcagcggatctggtcaccttcgtctccccgccatggagacctcagcactcaagcagcaggagcagcccgcggcgaccaagatcaggaacctgccctgggttgaaaaataccggccacagaccctgaatgatctcatttctcatcaggacattctgagtaccactgaagntaccccaattcaaggaaagactttaatccaaattggaaaggaccccggacttgggcccaacaacctttggccttttccttccttaccggggttccccccccaaaggggggtaaccaggcaagacatctaccatcctagcctgtgcgaaacagctatataaagacaaagaatttggctccatggtcttggagctgaatgcttcagatgaccgaggaatagacatcattcgaggaccgatcctgagctttgctagcacaaggacaatatttaagaaaggctttaagctagtgatcttggatgaagcagacgccatgactcaggacgcccagaatgccttgagaagagtaattgagaaattcacagaaaataccagattctgcctcatctgtaactatctgtcaaagatcatccctgccttgcagtcccgctgcacgaggtttcggttcggtcccctgactcctgaactcatggttccccgcctggaacatgtcgtggaagaagagaaagttgatataagtgaagatggaatgaaagcactagtcactctttccagtggagacatgcgtagggctctgaacattttgcagagcaccaatatggcctttgggaaggtgacagaggagactgtctacacctgcaccgggcacccgctcaagtcagacattgccaacatcctggactggatgttgaatcaagatttcaccacagcctacagaaatattacagagttgaaaactctgaaggggttggcactgcatgatatcctgacagagatacacttgtttgtgcatagagttgactttccatcttcagttcgaatacatttattgaccaaaatggcagacattgagtacaggctttctgttggcaccaacgagaagatccagctgagctccctcattgctgcatttcaagtcaccagagacctgattgttgcagaggcctagatgctctgagggccattcacaattctcagggctcagcagtgatgggngnncagaggacagttccaggataaactgctgcctggggctgtgggatgaatcagtcaccccgaatcttggaaaaacccccttccaggagaggatgggcaggcatttaaaaagtaccatttttgtggttgtttggagcagggatgtacaaaataattttaatgtattaactcatactgcctgtcttttataggggaaaaaaataaccttttttattttaaagttataaggtttttaccttttagttgcttggatgacagggaattagcctaccccattttggtctggaacagaagactttcaaatttaatatggtccaagtgtcttcctactcaaggtaaacattatctccaaaattacatttatgattctaatatttggcattgtgtctgtatctaatttaaacagatgttaatggacgtctggccgaaactattatacttttataagatgagctgaatcctcttactttaaaaactggtctttttatttaccctctgtggtagaagagtcaccagcaggttccaaattgatgtgtatgataggaaaaaaaccttaattttaaatataatatagagccttaaactatgccactgggtggcagaggctgtataaaacgcacttgttttcatgcaggagcggggcaagtaaggttgagcctgactgtaaacctagaactgcggaaggactgggacttttgtacaaatttcacatttattttacagcaatcatgctgcatttgtgttagtgttctttataataaaaaacaaagcagcctcctggctggctgtgttacaagtgactcttccttagacagctagaaagatgctgactttgtcaaacttgcatttatatgaaaaccttctgtctctaatatcacagaataaactttctttagatgctgttcttt

SEQ ID NO: 83044 - DNA, 586 bp, Homo sapiens
gcagtgtactgttgtggagtcttcccgctatctagttccaaaatttcatcaccccaaatggaaatcctgtacccattgacagttactccccattctccccttcctctagcccctggcaaccactaatctgctttctatctatggatttgcctattctggacatttcatgtaagtggaatcctacactatgtggccttttgtgtctggtttctttcactcaggatcatgttttcaaggttcatgcatgttgctgcttgtatcagtagttaatttcttgttatggctgaatcatattccattgtatggacagaagagattttacctatccattcttctgttgaagtctatttgggtaggagttcagtttcaaatgcactttgcaatagtaggtgcccatcaggttgagattataggcaaacagctggaaagatgaagttagaacagagttttcaacctcagcactattgacattttgggccagatactctgggtgggtttaggggagctgtcctgtgcactgtagcatgtttaacagcattcctggagactacacactgagtgccataggaccctctgcccacctgtg

SEQ ID NO: 83045 - DNA, 1977 bp, Homo sapiens
  misc_feature (1197)..(1197): n is a, c, g, or t
  misc_feature (1199)..(1200): n is a, c, g, or t
gcgagagttgcttttgcgcgcgaactgtaagtgccagggtctcagggtcaggtcgcggctggtcactgtgcaggcgcttgggtgacgcgacgatctcagcggatctggtcaccttcgtctccccgccatggagacctcagcactcaagcagcaggagcagcccgcggcgaccaagatcaggaacctgccctgggttgaaaaataccggccacagaccctgaatgatctcatttctcatcaggacattctgagtaccattcagaagtttatcaatgaagaccgactgccacacttgcttctctacggtcccccagggacaggcaagacatctaccatcctagcctgtgcgaaacagctatataaagacaaagaatttggctccatggtcttggagctgaatgcttcagatgaccgaggaatagacatcattcgaggaccgatcctgagctttgctagcacaaggacaatatttaagaaaggctttaagctagtgatcttggatgaagcagacgccatgactcaggacgcccagaatgccttgagaagagtaattgagaaattcacagaaaataccagattctgcctcatctgtaactatctgtcaaagatcatccctgccttgcagtcccgctgcacgaggtttcggttcggtcccctgactcctgaactcatggttccccgcctggaacatgtcgtggaagaagagaaagttgatataagtgaagatggaatgaaagcactagtcactctttccagtggagacatgcgtagggctctgaacattttgcagagcaccaatatggcctttgggaaggtgacagaggagactgtctacacctgcaccgggcacccgctcaagtcagacattgccaacatcctggactggatgttgaatcaagatttcaccacagcctacagaaatattacagagttgaaaactctgaaggggttggcactgcatgatatcctgacagagatacacttgtttgtgcatagagttgactttccatcttcagttcgaatacatttattgaccaaaatggcagacattgagtacaggctttctgttggcaccaacgagaagatccagctgagctccctcattgctgcatttcaagtcaccagagacctgattgttgcagaggcctagatgctctgagggccattcacaattctcagggctcagcagtgatgggngnncagaggacagttccaggataaactgctgcctggggctgtgggatgaatcagtcaccccgaatcttggaaaaacccccttccaggagaggatgggcaggcatttaaaaagtaccatttttgtggttgtttggagcagggatgtacaaaataattttaatgtattaactcatactgcctgtcttttataggggaaaaaaataaccttttttattttaaagttataaggtttttaccttttagttgcttggatgacagggaattagcctaccccattttggtctggaacagaagactttcaaatttaatatggtccaagtgtcttcctactcaaggtaaacattatctccaaaattacatttatgattctaatatttggcattgtgtctgtatctaatttaaacagatgttaatggacgtctggccgaaactattatacttttataagatgagctgaatcctcttactttaaaaactggtctttttatttaccctctgtggtagaagagtcaccagcaggttccaaattgatgtgtatgataggaaaaaaaccttaattttaaatataatatagagccttaaactatgccactgggtggcagaggctgtataaaacgcacttgttttcatgcaggagcggggcaagtaaggttgagcctgactgtaaacctagaactgcggaaggactgggacttttgtacaaatttcacatttattttacagcaatcatgctgcatttgtgttagtgttctttataataaaaaacaaagcagcctcctg

SEQ ID NO: 83046 - DNA, 1073 bp, Homo sapiens
  misc_feature (1064)..(1064): n is a, c, g, or t
gcgagagttgcttttgcgcgcgaactgtaagtgccagggtctcagggtcaggtcgcggctggtcactgtgcaggcgcttgggtgacgcgacgatctcagcggatctggtcaccttcgtctccccgccatggagacctcagcactcaagcagcaggagcagcccgcggcgaccaagatcaggaacctgccctgagacagggtctcgctctgtcgcccatgctggagcgcagtggtgtgatcacagctcagtgtaacctcaaacattggggttcaagccattctcctgcctcagcctccgaagaactgggacttttagagggttgaaaaataccggccacagaccctgaatgatctcatttctcatcaggacattctgagtaccattcagaagtttatcaatgaagaccgactgccacacttgcttctctacggtcccccagggacaggcaagacatctaccatcctagcctgtgcgaaacagctatataaagacaaagaatttggctccatggtcttggagctgaatgcttcagatgaccgaggaatagacatcattcgaggaccgatcctgagctttgctagcacaaggacaatatttaagaaaggctttaagctagtgatcttggatgaagcagacgccatgactcaggacgcccagaatgccttgagaagagtaattgagaaattcacagaaaataccagattctgcctcatctgtaactatctgtcaaagatcatccctgccttgcagtcccgctgcacgaggtttcggttcggtcccctgactcctgaactcatggttccccgcctggaacatgtcgtggaagaagagaaagttgatataagtgaagatggaatgaaagcactagtcactctttccagtggagacatgcgtagggctctgaacattttgcagagcaccaatatggcctttgggaaggtgacagaggagactgtctacacctgcaccgggcacccgctcaagtcagacattgccaacatcctggactggatgttgaatcaagatttcaccacagcagtcctgccaggatgacagagctagnctctgtcta

SEQ ID NO: 83047 - DNA, 577 bp, Homo sapiens
tgctgaggtactctagagtgatccccgttcctccccgttggagaaggcaggcaagggctccccgagcccaggaaactgcatctagaggtggaggattgagaattgtggctggaggttcggtcgctgccgggaggaggactctgtcgctggagctgaggctggaaaagtaggttgggatcaggttgtgaactggcccggtaggaggcctaggatatgattagcgctcacttctgcagggttcatccgctcactacgtcactcctggccgtgaggcctgtgtggtgactgcttgtttagagatgggaagattgaggtgcctcctttttctcctcatccctgccccagggtcctagcctaggatttttggaaattgaatctttgcttgcctagtgagacagcagaacttcatccccttcctaagccagtagtgaggcaaagcaaggcttcatcgccacgacagggagcccactgtgggatattggggcaatagttgagccttgtggagttggaaaggtggaggaatttagttaataaacagttattggtggacattctcacaaactcctactgtggagga

SEQ ID NO: 83048 - DNA, 2731 bp, Homo sapiens
gcacgctaagctagccacacttccggcaagagcagctagaatcgttccggtgcatattgaataggcgcagaaagggagaaaaagattctacagccctggccacagtactttggtgacacttttcgtggggctctctggaggacttttcccaaggcagatggagaaaacttcgtgaaacccactccttgctattaaaggaaatgttgtggaatataattggacttaggttttgcagagcttgagcatggcctttttgtcctcccaccttctggttcttgaagacattgccggtgacctggccccagactaacacaaggcgggcgtataccgtcagcctgcctggcgtccccttgcctcagcacacacagagacctcttgcaagatgcttctctgccgccataggctggaggttccccgggaactttcccttccttcctagctgaggaagatccctcacttccgctcgccgcgccaccggtcccacctccccgccccccgctgggtcctagcgccggcccctgtttggcagggtccgggctccgtcggtgcgaggagccgacgccgacgccacggagtcagcacaagtctcatcagagaaaccccgttcaccaaggccatggaagtggaggctgcagaggcccggtccccagcccccggctacaagcgctcgggccgccgctacaagtgcctgtcctgtaccaagacatttccaaacgcgcccagggcagcgcgccacgctgccacacatgggccggcagactgctctgaagaggtggccgaggtgaagccaaagccagagacagaagctaaggcagaggaagccagtggggagaaggtgtcaggctccgcggccaagcctaggccctatgcgtgtccgctatgccccaaggcctacaagacggcacccgagctgcgcagccacgggcgcagccacacgggggagaagccctttccgtgccccgagtgcggccgccgcttcatgcagcccgtgtgcctgcgcgtgcacctggcctcgcacgctggcgaactgcccttccgctgtgcgcactgcccgaaggcctatggcgcgctctccaagctcaagatccaccagcgtggccacacaggcgagcggccttacgcctgcgccgactgcggcaagagctttgctgacccttcagtgttccgcaagcaccggcgtactcacgctggcctgcggccctacagctgtgagcgttgcggtaaagcctatgcggagctcaaggacctccgcaaccatgagcggtcccacaccggcgagcgccccttcctctgctccgagtgcgggaagagcttctcccgctcatcctcgctcacgtgccaccagcgcatccacgcggcacagaagccctaccgctgcccggcctgcggcaagggcttcacgcagctcagttcctaccagagccacgagcgcacgcactcgggggagaagcccttcctgtgcccgcgctgcggccgcatgttctccgacccctcgagcttccgtcgccaccagcgcgcccatgaaggggtgaagccataccactgcgagaagtgcggcaaggacttccggcagccggcggacctggccatgcaccggcgtgtgcacacaggcgaccggccgttcaagtgcctgcaatgtgacaagacgttcgtggcgtcctgggacctcaagcggcacgcgctggtgcactctggccagcggcccttccgctgtgaggagtgcgggcgagccttcgccgagcgtgccagcctcacgaagcatagccgggtgcactcgggggagcgccccttccactgtaacgcatgtgggaaatcctttgtggtgtcgtcgagcctgaggaagcacgagcggacccatcgaagcagtgaggccgcgggtgtgccccctgcacaggagctggtggtggggttggcgctgcctgtgggcgtggcaggtgagagttcagccgccccggcagcaggggcggggctgggggaccctccagcagggctgctagggctgcccccggagtcaggtggtgtgatggccacacagtggcaggtggtgggcatgacggtggagcatgtggaatgccaagatgctggtgtccgggaggctcctggtcccttggaaggggcaggcgaggcggggggtgaggaggctgacgagaagcccccccagtttgtgtgccgagagtgcaaggagaccttctccacaatgacgctgctgcgtcggcacgagcgctcacacccggagctccggcccttcccctgcacccagtgcggcaagagcttctctgaccgggctgggctgcgcaaacacagccgcactcacagctcagtgcgcccctacacctgcccccattgtcccaaggccttcttgagtgccagcgacttgcgcaagcatgaacgcacccaccctgtgcccatggggacccccacacccctggagcccctggtggctttgctaggaatgcctgaagaggggccggcctgaagcccatgaccccccagcaccacactccgggagcccagcccccatcgggggcttcctgtacctccttttgcctggctctgctctttagactccagatccctacccctcagcaactagctcccctgtcggccagctaagagagctgggacagtggaggctggcagaagctgagacgtgactgtctaggagtaacactcattaaagctttcattttggcaaaaaaaatgcaaggaggaacaaaagagaaaagttttg

SEQ ID NO: 83049 - DNA, 2386 bp, Homo sapiens
tcagaggatgttttggggtttaccttggctaaagcatgtcttcctcaaagagatatgcatcaacattccaattcctccaaccctgggtaagaaagcaacagtatctgtgcagtagggttcactaagagatgggttcagcctccccgccccccgctgggtcctagcgccggcccctgtttggcagggtccgggctccgtcggtgcgaggagccgacgccgacgccacggagtcagcacaagtctcatcagagaaaccccgttcaccaaggccatggaagtggaggctgcagaggcccggtccccagcccccggctacaagcgctcgggccgccgctacaagtgcctgtcctgtaccaagacatttccaaacgcgcccagggcagcgcgccacgctgccacacatgggccggcagactgctctgaagaggtggccgaggtgaagccaaagccagagacagaagctaaggcagaggaagccagtggggagaaggtgtcaggctccgcggccaagcctaggccctatgcgtgtccgctatgccccaaggcctacaagacggcacccgagctgcgcagccacgggcgcagccacacgggggagaagccctttccgtgccccgagtgcggccgccgcttcatgcagcccgtgtgcctgcgcgtgcacctggcctcgcacgctggcgaactgcccttccgctgtgcgcactgcccgaaggcctatggcgcgctctccaagctcaagatccaccagcgtggccacacaggcgagcggccttacgcctgcgccgactgcggcaagagctttgctgacccttcagtgttccgcaagcaccggcgtactcacgctggcctgcggccctacagctgtgagcgttgcggtaaagcctatgcggagctcaaggacctccgcaaccatgagcggtcccacaccggcgagcgccccttcctctgctccgagtgcgggaagagcttctcccgctcatcctcgctcacgtgccaccagcgcatccacgcggcacagaagccctaccgctgcccggcctgcggcaagggcttcacgcagctcagttcctaccagagccacgagcgcacgcactcgggggagaagcccttcctgtgcccgcgctgcggccgcatgttctccgacccctcgagcttccgtcgccaccagcgcgcccatgaaggggtgaagccataccactgcgagaagtgcggcaaggacttccggcagccggcggacctggccatgcaccggcgtgtgcacacaggcgaccggccgttcaagtgcctgcaatgtgacaagacgttcgtggcgtcctgggacctcaagcggcacgcgctggtgcactctggccagcggcccttccgctgtgaggagtgcgggcgagccttcgccgagcgtgccagcctcacgaagcatagccgggtgcactcgggggagcgccccttccactgtaacgcatgtgggaaatcctttgtggtgtcgtcgagcctgaggaagcacgagcggacccatcgaagcagtgaggccgcgggtgtgccccctgcacaggagctggtggtggggttggcgctgcctgtgggcgtggcaggtgagagttcagccgccccggcagcaggggcggggctgggggaccctccagcagggctgctagggctgcccccggagtcaggtggtgtgatggccacacagtggcaggtggtgggcatgacggtggagcatgtggaatgccaagatgctggtgtccgggaggctcctggtcccttggaaggggcaggcgaggcggggggtgaggaggctgacgagaagcccccccagtttgtgtgccgagagtgcaaggagaccttctccacaatgacgctgctgcgtcggcacgagcgctcacacccggagctccggcccttcccctgcacccagtgcggcaagagcttctctgaccgggctgggctgcgcaaacacagccgcactcacagctcagtgcgcccctacacctgcccccattgtcccaaggccttcttgagtgccagcgacttgcgcaagcatgaacgcacccaccctgtgcccatggggacccccacacccctggagcccctggtggctttgctaggaatgcctgaagaggggccggcctgaagcccatgaccccccagcaccacactccgggagcccagcccccatcgggggcttcctgtacctccttttgcctggctctgctctttagactccagatccctacccctcagcaactagctcccctgtcggccagctaagagagctgggacagtggaggctggcagaagctgagacgtgactgtctaggagtaacactcattaaagctttcattttggcaaaaaaaatgcaaggaggaacaaaagagaaaagttttg

SEQ ID NO: 83050 - DNA, 2338 bp, Homo sapiens
gaggaggaaagaaaacacaaatgctggggacctgtcacttccagacagtgccagctaccagatttagcccattggctcagcccttttctggtcccaggtctgtcttttctgggcgcttggagaccttcaggccaggcccacgtctgggtacactctttatcctggcatagttcttggacactgagctgaagaaggaagatgagaaaccccgttcaccaaggccatggaagtggaggctgcagaggcccggtccccagcccccggctacaagcgctcgggccgccgctacaagtgcctgtcctgtaccaagacatttccaaacgcgcccagggcagcgcgccacgctgccacacatgggccggcagactgctctgaagaggtggccgaggtgaagccaaagccagagacagaagctaaggcagaggaagccagtggggagaaggtgtcaggctccgcggccaagcctaggccctatgcgtgtccgctatgccccaaggcctacaagacggcacccgagctgcgcagccacgggcgcagccacacgggggagaagccctttccgtgccccgagtgcggccgccgcttcatgcagcccgtgtgcctgcgcgtgcacctggcctcgcacgctggcgaactgcccttccgctgtgcgcactgcccgaaggcctatggcgcgctctccaagctcaagatccaccagcgtggccacacaggcgagcggccttacgcctgcgccgactgcggcaagagctttgctgacccttcagtgttccgcaagcaccggcgtactcacgctggcctgcggccctacagctgtgagcgttgcggtaaagcctatgcggagctcaaggacctccgcaaccatgagcggtcccacaccggcgagcgccccttcctctgctccgagtgcgggaagagcttctcccgctcatcctcgctcacgtgccaccagcgcatccacgcggcacagaagccctaccgctgcccggcctgcggcaagggcttcacgcagctcagttcctaccagagccacgagcgcacgcactcgggggagaagcccttcctgtgcccgcgctgcggccgcatgttctccgacccctcgagcttccgtcgccaccagcgcgcccatgaaggggtgaagccataccactgcgagaagtgcggcaaggacttccggcagccggcggacctggccatgcaccggcgtgtgcacacaggcgaccggccgttcaagtgcctgcaatgtgacaagacgttcgtggcgtcctgggacctcaagcggcacgcgctggtgcactctggccagcggcccttccgctgtgaggagtgcgggcgagccttcgccgagcgtgccagcctcacgaagcatagccgggtgcactcgggggagcgccccttccactgtaacgcatgtgggaaatcctttgtggtgtcgtcgagcctgaggaagcacgagcggacccatcgaagcagtgaggccgcgggtgtgccccctgcacaggagctggtggtggggttggcgctgcctgtgggcgtggcaggtgagagttcagccgccccggcagcaggggcggggctgggggaccctccagcagggctgctagggctgcccccggagtcaggtggtgtgatggccacacagtggcaggtggtgggcatgacggtggagcatgtggaatgccaagatgctggtgtccgggaggctcctggtcccttggaaggggcaggcgaggcggggggtgaggaggctgacgagaagcccccccagtttgtgtgccgagagtgcaaggagaccttctccacaatgacgctgctgcgtcggcacgagcgctcacacccggagctccggcccttcccctgcacccagtgcggcaagagcttctctgaccgggctgggctgcgcaaacacagccgcactcacagctcagtgcgcccctacacctgcccccattgtcccaaggccttcttgagtgccagcgacttgcgcaagcatgaacgcacccaccctgtgcccatggggacccccacacccctggagcccctggtggctttgctaggaatgcctgaagaggggccggcctgaagcccatgaccccccagcaccacactccgggagcccagcccccatcgggggcttcctgtacctccttttgcctggctctgctctttagactccagatccctacccctcagcaactagctcccctgtcggccagctaagagagctgggacagtggaggctggcagaagctgagacgtgactgtctaggagtaacactcattaaagctttcattttggcaaaaaaaatgcaaggaggaacaaaagagaaaagttttg

SEQ ID NO: 83051 - DNA, 2348 bp, Homo sapiens
gaggaggaaagaaaacacaaatgctggggacctgtcacttccagacagtgccagctaccagatttagcccattggctcagcccttttctggtcccagtggctctgcggacacttggtccaactcctttcttcaatgagcagatcagggaggaaacgaacgcaggatgtcagagccaggaatgctgggcaggaaggatgtgtgggttccgagagaaaccccgttcaccaaggccatggaagtggaggctgcagaggcccggtccccagcccccggctacaagcgctcgggccgccgctacaagtgcctgtcctgtaccaagacatttccaaacgcgcccagggcagcgcgccacgctgccacacatgggccggcagactgctctgaagaggtggccgaggtgaagccaaagccagagacagaagctaaggcagaggaagccagtggggagaaggtgtcaggctccgcggccaagcctaggccctatgcgtgtccgctatgccccaaggcctacaagacggcacccgagctgcgcagccacgggcgcagccacacgggggagaagccctttccgtgccccgagtgcggccgccgcttcatgcagcccgtgtgcctgcgcgtgcacctggcctcgcacgctggcgaactgcccttccgctgtgcgcactgcccgaaggcctatggcgcgctctccaagctcaagatccaccagcgtggccacacaggcgagcggccttacgcctgcgccgactgcggcaagagctttgctgacccttcagtgttccgcaagcaccggcgtactcacgctggcctgcggccctacagctgtgagcgttgcggtaaagcctatgcggagctcaaggacctccgcaaccatgagcggtcccacaccggcgagcgccccttcctctgctccgagtgcgggaagagcttctcccgctcatcctcgctcacgtgccaccagcgcatccacgcggcacagaagccctaccgctgcccggcctgcggcaagggcttcacgcagctcagttcctaccagagccacgagcgcacgcactcgggggagaagcccttcctgtgcccgcgctgcggccgcatgttctccgacccctcgagcttccgtcgccaccagcgcgcccatgaaggggtgaagccataccactgcgagaagtgcggcaaggacttccggcagccggcggacctggccatgcaccggcgtgtgcacacaggcgaccggccgttcaagtgcctgcaatgtgacaagacgttcgtggcgtcctgggacctcaagcggcacgcgctggtgcactctggccagcggcccttccgctgtgaggagtgcgggcgagccttcgccgagcgtgccagcctcacgaagcatagccgggtgcactcgggggagcgccccttccactgtaacgcatgtgggaaatcctttgtggtgtcgtcgagcctgaggaagcacgagcggacccatcgaagcagtgaggccgcgggtgtgccccctgcacaggagctggtggtggggttggcgctgcctgtgggcgtggcaggtgagagttcagccgccccggcagcaggggcggggctgggggaccctccagcagggctgctagggctgcccccggagtcaggtggtgtgatggccacacagtggcaggtggtgggcatgacggtggagcatgtggaatgccaagatgctggtgtccgggaggctcctggtcccttggaaggggcaggcgaggcggggggtgaggaggctgacgagaagcccccccagtttgtgtgccgagagtgcaaggagaccttctccacaatgacgctgctgcgtcggcacgagcgctcacacccggagctccggcccttcccctgcacccagtgcggcaagagcttctctgaccgggctgggctgcgcaaacacagccgcactcacagctcagtgcgcccctacacctgcccccattgtcccaaggccttcttgagtgccagcgacttgcgcaagcatgaacgcacccaccctgtgcccatggggacccccacacccctggagcccctggtggctttgctaggaatgcctgaagaggggccggcctgaagcccatgaccccccagcaccacactccgggagcccagcccccatcgggggcttcctgtacctccttttgcctggctctgctctttagactccagatccctacccctcagcaactagctcccctgtcggccagctaagagagctgggacagtggaggctggcagaagctgagacgtgactgtctaggagtaacactcattaaagctttcattttggcaaaaaaaatgcaaggaggaacaaaagagaaaagttttg

SEQ ID NO: 83052 - DNA, 2219 bp, Homo sapiens
  misc_feature (60)..(60): n is a, c, g, or t
ctccgcccccgtggtctaggcggccctgtggcaggtcgggtcgtggtgcagagccacgcnacgcagagtcagccagtctatcagaaaccccgttcaccaaggccatggaagtggaggctgcagaggcccggtccccagcccccggctacaagcgctcgggccgccgctacaagtgcctgtcctgtaccaagacatttccaaacgcgcccagggcagcgcgccacgctgccacacatgggccggcagactgctctgaagaggtggccgaggtgaagccaaagccagagacagaagctaaggcagaggaagccagtggggagaaggtgtcaggctccgcggccaagcctaggccctatgcgtgtccgctatgccccaaggcctacaagacggcacccgagctgcgcagccacgggcgcagccacacgggggagaagccctttccgtgccccgagtgcggccgccgcttcatgcagcccgtgtgcctgcgcgtgcacctggcctcgcacgctggcgaactgcccttccgctgtgcgcactgcccgaaggcctatggcgcgctctccaagctcaagatccaccagcgtggccacacaggcgagcggccttacgcctgcgccgactgcggcaagagctttgctgacccttcagtgttccgcaagcaccggcgtactcacgctggcctgcggccctacagctgtgagcgttgcggtaaagcctatgcggagctcaaggacctccgcaaccatgagcggtcccacaccggcgagcgccccttcctctgctccgagtgcgggaagagcttctcccgctcatcctcgctcacgtgccaccagcgcatccacgcggcacagaagccctaccgctgcccggcctgcggcaagggcttcacgcagctcagttcctaccagagccacgagcgcacgcactcgggggagaagcccttcctgtgcccgcgctgcggccgcatgttctccgacccctcgagcttccgtcgccaccagcgcgcccatgaaggggtgaagccataccactgcgagaagtgcggcaaggacttccggcagccggcggacctggccatgcaccggcgtgtgcacacaggcgaccggccgttcaagtgcctgcaatgtgacaagacgttcgtggcgtcctgggacctcaagcggcacgcgctggtgcactctggccagcggcccttccgctgtgaggagtgcgggcgagccttcgccgagcgtgccagcctcacgaagcatagccgggtgcactcgggggagcgccccttccactgtaacgcatgtgggaaatcctttgtggtgtcgtcgagcctgaggaagcacgagcggacccatcgaagcagtgaggccgcgggtgtgccccctgcacaggagctggtggtggggttggcgctgcctgtgggcgtggcaggtgagagttcagccgccccggcagcaggggcggggctgggggaccctccagcagggctgctagggctgcccccggagtcaggtggtgtgatggccacacagtggcaggtggtgggcatgacggtggagcatgtggaatgccaagatgctggtgtccgggaggctcctggtcccttggaaggggcaggcgaggcggggggtgaggaggctgacgagaagcccccccagtttgtgtgccgagagtgcaaggagaccttctccacaatgacgctgctgcgtcggcacgagcgctcacacccggagctccggcccttcccctgcacccagtgcggcaagagcttctctgaccgggctgggctgcgcaaacacagccgcactcacagctcagtgcgcccctacacctgcccccattgtcccaaggccttcttgagtgccagcgacttgcgcaagcatgaacgcacccaccctgtgcccatggggacccccacacccctggagcccctggtggctttgctaggaatgcctgaagaggggccggcctgaagcccatgaccccccagcaccacactccgggagcccagcccccatcgggggcttcctgtacctccttttgcctggctctgctctttagactccagatccctacccctcagcaactagctcccctgtcggccagctaagagagctgggacagtggaggctggcagaagctgagacgtgactgtctaggagtaacactcattaaagctttcattttggcaaaaaaaatgcaaggaggaacaaaagagaaaagttttg

SEQ ID NO: 83053 - DNA, 2393 bp, Homo sapiens
gcacgctaagctagccacacttccggcaagagcagctagaatcgttccggtgcatattgaataggcgcagaaagggagaaaaagattctacagccctggccacagtactttggtgacacttttcgtggggctctctggaggacttttcccaaggcagatggagaaaacttcgtgaaacccactccttgctattaaaggaaatgttgtggaatataattggacttaggttttgcagagcttgagcatggcctttttgtcctcccaccttctggttcttgaagacattgccggtgacctggccccagactaacacaaggcgggcgtataccgtcagcctgcctggcgtccccttgcctcagcacacacagagacctcttgcaagatgcttctctgccgccataggctggaggttccccgggaactttcccttccttcctagctgaggaagatccctcacttccgctcgccgcgccaccggtcccacctccccgccccccgctgggtcctagcgccggcccctgtttggcagggtccgggctccgtcggtgcgaggagccgacgccgacgccacggagtcagcacaagtctcatcagagaaaccccgttcaccaaggccatggaagtggaggctgcagaggcccggtccccagcccccggctacaagcgctcgggccgccgctacaagtgcctgtcctgtaccaagacatttccaaacgcgcccagggcagcgcgccacgctgccacacatgggccggcagactgctctgaagaggtggccgaggtgaagccaaagccagagacagaagctaaggcagaggaagccagtggggagaaggtgtcaggctccgcggccaagcctaggccctatgcgtgtccgctatgccccaaggcctacaagacggcacccgagctgcgcagccacgggcgcagccacacgggggagaagccctttccgtgccccgagtgcggccgccgcttcatgcagcccgtgtgcctgcgcgtgcacctggcctcgcacgctggcgaactgcccttccgctgtgcgcactgcccgaaggcctatggcgcgctctccaagctcaagatccaccagcgtggccacacaggcgagcggccttacgcctgcgccgactgcggcaagagctttgctgacccttcagtgttccgcaagcaccggcgtactcacgctggcctgcggccctacagctgtgagcgttgcggtaaagcctatgcggagctcaaggacctccgcaaccatgagcggtcccacaccggcgagcgccccttcctctgctccgagtgcgggaagagcttctcccgctcatcctcgctcacgtgccaccagcgcatccacgcggcacagaagccctaccgctgcccggcctgcggcaagggcttcacgcagctcagttcctaccagagccacgagcgcacgcactcgggggagaagcccttcctgtgcccgcgctgcggccgcatgttctccgacccctcgagcttccgtcgccaccagcgcgcccatgaaggggtgaagccataccactgcgagaagtgcggcaaggacttccggcagccggcggacctggccatgcaccggcgtgtgcacacaggcgaccggccgttcaagtgcctgcaatgtgacaagacgttcgtggcgtcctgggacctcaagcggcacgcgctggtgcactctggccagcggcccttccgctgtgaggagtgcgggcgagccttcgccgagcgtgccagcctcacgaagcatagccgggtgcactcgggggagcgccccttccactgtaacgcatgtgggaaatcctttgtggtgtcgtcgagcctgaggaagcacgagcggacccatcgaagcagtgaggccgcgggtgtgccccctgcacaggagctggtggtggggttggcgctgcctgtgggcgtggcaggtgagagttcagccgccccggcagcaggggcggggctgggggaccctccagcagggctacacctgcccccattgtcccaaggccttcttgagtgccagcgacttgcgcaagcatgaacgcacccaccctgtgcccatggggacccccacacccctggagcccctggtggctttgctaggaatgcctgaagaggggccggcctgaagcccatgaccccccagcaccacactccgggagcccagcccccatcgggggcttcctgtacctccttttgcctggctctgctctttagactccagatccctacccctcagcaactagctcccctgtcggccagctaagagagctgggacagtggaggctggcagaagctgagacgtgactgtctaggagtaacactcattaaagctttcattttggcaaaaaaaatgcaaggaggaacaaaagagaaaagttttg

SEQ ID NO: 83054 - DNA, 2249 bp, Homo sapiens
gcacgctaagctagccacacttccggcaagagcagctagaatcgttccggtgcatattgaataggcgcagaaagggagaaaaagattctacagccctggccacagtactttggtgacacttttcgtggggctctctggaggacttttcccaaggcagatggagaaaacttcgtgaaacccactccttgctattaaaggaaatgttgtggaatataattggacttaggttttgcagagcttgagcatggcctttttgtcctcccaccttctggttcttgaagacattgccggtgacctggccccagactaacacaaggcgggcgtataccgtcagcctgcctggcgtccccttgcctcagcacacacagagacctcttgcaagatgcttctctgccgccataggctggaggttccccgggaactttcccttccttcctagctgaggaagatccctcacttccgctcgccgcgccaccggtcccacctccccgccccccgctgggtcctagcgccggcccctgtttggcagggtccgggctccgtcggtgcgaggagccgacgccgacgccacggagtcagcacaagtctcatcagagaaaccccgttcaccaaggccatggaagtggaggctgcagaggcccggtccccagcccccggctacaagcgctcgggccgccgctacaagtgcctgtcctgtaccaagacatttccaaacgcgcccagggcagcgcgccacgctgccacacatgggccggcagactgctctgaagaggtggccgaggtcccacaccggcgagcgccccttcctctgctccgagtgcgggaagagcttctcccgctcatcctcgctcacgtgccaccagcgcatccacgcggcacagaagccctaccgctgcccggcctgcggcaagggcttcacgcagctcagttcctaccagagccacgagcgcacgcactcgggggagaagcccttcctgtgcccgcgctgcggccgcatgttctccgacccctcgagcttccgtcgccaccagcgcgcccatgaaggggtgaagccataccactgcgagaagtgcggcaaggacttccggcagccggcggacctggccatgcaccggcgtgtgcacacaggcgaccggccgttcaagtgcctgcaatgtgacaagacgttcgtggcgtcctgggacctcaagcggcacgcgctggtgcactctggccagcggcccttccgctgtgaggagtgcgggcgagccttcgccgagcgtgccagcctcacgaagcatagccgggtgcactcgggggagcgccccttccactgtaacgcatgtgggaaatcctttgtggtgtcgtcgagcctgaggaagcacgagcggacccatcgaagcagtgaggccgcgggtgtgccccctgcacaggagctggtggtggggttggcgctgcctgtgggcgtggcaggtgagagttcagccgccccggcagcaggggcggggctgggggaccctccagcagggctgctagggctgcccccggagtcaggtggtgtgatggccacacagtggcaggtggtgggcatgacggtggagcatgtggaatgccaagatgctggtgtccgggaggctcctggtcccttggaaggggcaggcgaggcggggggtgaggaggctgacgagaagcccccccagtttgtgtgccgagagtgcaaggagaccttctccacaatgacgctgctgcgtcggcacgagcgctcacacccggagctccggcccttcccctgcacccagtgcggcaagagcttctctgaccgggctgggctgcgcaaacacagccgcactcacagctcagtgcgcccctacacctgcccccattgtcccaaggccttcttgagtgccagcgacttgcgcaagcatgaacgcacccaccctgtgcccatggggacccccacacccctggagcccctggtggctttgctaggaatgcctgaagaggggccggcctgaagcccatgaccccccagcaccacactccgggagcccagcccccatcgggggcttcctgtacctccttttgcctggctctgctctttagactccagatccctacccctcagcaactagctcccctgtcggccagctaagagagctgggacagtggaggctggcagaagctgagacgtgactgtctaggagtaacactcattaaagctttcattttggcaaaaaaaatgcaaggaggaacaaaagagaaaagttttg

SEQ ID NO: 83055 - DNA, 1685 bp, Homo sapiens
atatcttggtctttaatgtgcagagacaggtctttggaatagagacacccagccagcctgaaggcttcttcctctggggtgcagccatgtggctcttaggggattaagcctaggcccccacgaacgtttggggagcccctaaagtacagcccagacaggcagtggggtcacgttatgggtctgtcgccttcatgccaagtcctccacacccccgcaggtcccacaccggcgagcgccccttcctctgctccgagtgcgggaagagcttctcccgctcatcctcgctcacgtgccaccagcgcatccacgcggcacagaagccctaccgctgcccggcctgcggcaagggcttcacgcagctcagttcctaccagagccacgagcgcacgcactcgggggagaagcccttcctgtgcccgcgctgcggccgcatgttctccgacccctcgagcttccgtcgccaccagcgcgcccatgaaggggtgaagccataccactgcgagaagtgcggcaaggacttccggcagccggcggacctggccatgcaccggcgtgtgcacacaggcgaccggccgttcaagtgcctgcaatgtgacaagacgttcgtggcgtcctgggacctcaagcggcacgcgctggtgcactctggccagcggcccttccgctgtgaggagtgcgggcgagccttcgccgagcgtgccagcctcacgaagcatagccgggtgcactcgggggagcgccccttccactgtaacgcatgtgggaaatcctttgtggtgtcgtcgagcctgaggaagcacgagcggacccatcgaagcagtgaggccgcgggtgtgccccctgcacaggagctggtggtggggttggcgctgcctgtgggcgtggcaggtgagagttcagccgccccggcagcaggggcggggctgggggaccctccagcagggctgctagggctgcccccggagtcaggtggtgtgatggccacacagtggcaggtggtgggcatgacggtggagcatgtggaatgccaagatgctggtgtccgggaggctcctggtcccttggaaggggcaggcgaggcggggggtgaggaggctgacgagaagcccccccagtttgtgtgccgagagtgcaaggagaccttctccacaatgacgctgctgcgtcggcacgagcgctcacacccggagctccggcccttcccctgcacccagtgcggcaagagcttctctgaccgggctgggctgcgcaaacacagccgcactcacagctcagtgcgcccctacacctgcccccattgtcccaaggccttcttgagtgccagcgacttgcgcaagcatgaacgcacccaccctgtgcccatggggacccccacacccctggagcccctggtggctttgctaggaatgcctgaagaggggccggcctgaagcccatgaccccccagcaccacactccgggagcccagcccccatcgggggcttcctgtacctccttttgcctggctctgctctttagactccagatccctacccctcagcaactagctcccctgtcggccagctaagagagctgggacagtggaggctggcagaagctgagacgtgactgtctaggagtaacactcattaaagctttcattttggcaaaaaaaatgcaaggaggaacaaaagagaaaagttttg

SEQ ID NO: 83056 - DNA, 2303 bp, Homo sapiens
tgctgaggtactctagagtgatccccgttcctccccgttggagaaggcaggcaagggctccccgagcccaggaaactgcatctagaggtggaggattgagaattgtggctggaggttcggtcgctgccgggaggaggactctgtcgctggagctgaggctggaaaaagaaaccccgttcaccaaggccatggaagtggaggctgcagaggcccggtccccagcccccggctacaagcgctcgggccgccgctacaagtgcctgtcctgtaccaagacatttccaaacgcgcccagggcagcgcgccacgctgccacacatgggccggcagactgctctgaagaggtggccgaggtgaagccaaagccagagacagaagctaaggcagaggaagccagtggggagaaggtgtcaggctccgcggccaagcctaggccctatgcgtgtccgctatgccccaaggcctacaagacggcacccgagctgcgcagccacgggcgcagccacacgggggagaagccctttccgtgccccgagtgcggccgccgcttcatgcagcccgtgtgcctgcgcgtgcacctggcctcgcacgctggcgaactgcccttccgctgtgcgcactgcccgaaggcctatggcgcgctctccaagctcaagatccaccagcgtggccacacaggcgagcggccttacgcctgcgccgactgcggcaagagctttgctgacccttcagtgttccgcaagcaccggcgtactcacgctggcctgcggccctacagctgtgagcgttgcggtaaagcctatgcggagctcaaggacctccgcaaccatgagcggtcccacaccggcgagcgccccttcctctgctccgagtgcgggaagagcttctcccgctcatcctcgctcacgtgccaccagcgcatccacgcggcacagaagccctaccgctgcccggcctgcggcaagggcttcacgcagctcagttcctaccagagccacgagcgcacgcactcgggggagaagcccttcctgtgcccgcgctgcggccgcatgttctccgacccctcgagcttccgtcgccaccagcgcgcccatgaaggggtgaagccataccactgcgagaagtgcggcaaggacttccggcagccggcggacctggccatgcaccggcgtgtgcacacaggcgaccggccgttcaagtgcctgcaatgtgacaagacgttcgtggcgtcctgggacctcaagcggcacgcgctggtgcactctggccagcggcccttccgctgtgaggagtgcgggcgagccttcgccgagcgtgccagcctcacgaagcatagccgggtgcactcgggggagcgccccttccactgtaacgcatgtgggaaatcctttgtggtgtcgtcgagcctgaggaagcacgagcggacccatcgaagcagtgaggccgcgggtgtgccccctgcacaggagctggtggtggggttggcgctgcctgtgggcgtggcaggtgagagttcagccgccccggcagcaggggcggggctgggggaccctccagcagggctgctagggctgcccccggagtcaggtggtgtgatggccacacagtggcaggtggtgggcatgacggtggagcatgtggaatgccaagatgctggtgtccgggaggctcctggtcccttggaaggggcaggcgaggcggggggtgaggaggctgacgagaagcccccccagtttgtgtgccgagagtgcaaggagaccttctccacaatgacgctgctgcgtcggcacgagcgctcacacccggagctccggcccttcccctgcacccagtgcggcaagagcttctctgaccgggctgggctgcgcaaacacagccgcactcacagctcagtgcgcccctacacctgcccccattgtcccaaggccttcttgagtgccagcgacttgcgcaagcatgaacgcacccaccctgtgcccatggggacccccacacccctggagcccctggtggctttgctaggaatgcctgaagaggggccggcctgaagcccatgaccccccagcaccacactccgggagcccagcccccatcgggggcttcctgtacctccttttgcctggctctgctctttagactccagatccctacccctcagcaactagctcccctgtcggccagctaagagagctgggacagtggaggctggcagaagctgagacgtgactgtctaggagtaacactcattaaagctttcattttggcaaaaaaaatgcaaggaggaacaaaagagaaaagttttg

SEQ ID NO: 83057 - DNA, 2090 bp, Homo sapiens
acggagtcagcacaagtctcatcagagaaaccccgttcaccaagtgcctgtcctgtaccaagacatttccaaacgcgcccagggcagcgcgccacgctgccacacatgggccggcagactgctctgaagaggtggccgaggtgaagccaaagccagagacagaagctaaggcagaggaagccagtggggagaaggtgtcaggctccgcggccaagcctaggccctatgcgtgtccgctatgccccaaggcctacaagacggcacccgagctgcgcagccacgggcgcagccacacgggggagaagccctttccgtgccccgagtgcggccgccgcttcatgcagcccgtgtgcctgcgcgtgcacctggcctcgcacgctggcgaactgcccttccgctgtgcgcactgcccgaaggcctatggcgcgctctccaagctcaagatccaccagcgtggccacacaggcgagcggccttacgcctgcgccgactgcggcaagagctttgctgacccttcagtgttccgcaagcaccggcgtactcacgctggcctgcggccctacagctgtgagcgttgcggtaaagcctatgcggagctcaaggacctccgcaaccatgagcggtcccacaccggcgagcgccccttcctctgctccgagtgcgggaagagcttctcccgctcatcctcgctcacgtgccaccagcgcatccacgcggcacagaagccctaccgctgcccggcctgcggcaagggcttcacgcagctcagttcctaccagagccacgagcgcacgcactcgggggagaagcccttcctgtgcccgcgctgcggccgcatgttctccgacccctcgagcttccgtcgccaccagcgcgcccatgaaggggtgaagccataccactgcgagaagtgcggcaaggacttccggcagccggcggacctggccatgcaccggcgtgtgcacacaggcgaccggccgttcaagtgcctgcaatgtgacaagacgttcgtggcgtcctgggacctcaagcggcacgcgctggtgcactctggccagcggcccttccgctgtgaggagtgcgggcgagccttcgccgagcgtgccagcctcacgaagcatagccgggtgcactcgggggagcgccccttccactgtaacgcatgtgggaaatcctttgtggtgtcgtcgagcctgaggaagcacgagcggacccatcgaagcagtgaggccgcgggtgtgccccctgcacaggagctggtggtggggttggcgctgcctgtgggcgtggcaggtgagagttcagccgccccggcagcaggggcggggctgggggaccctccagcagggctgctagggctgcccccggagtcaggtggtgtgatggccacacagtggcaggtggtgggcatgacggtggagcatgtggaatgccaagatgctggtgtccgggaggctcctggtcccttggaaggggcaggcgaggcggggggtgaggaggctgacgagaagcccccccagtttgtgtgccgagagtgcaaggagaccttctccacaatgacgctgctgcgtcggcacgagcgctcacacccggagctccggcccttcccctgcacccagtgcggcaagagcttctctgaccgggctgggctgcgcaaacacagccgcactcacagctcagtgcgcccctacacctgcccccattgtcccaaggccttcttgagtgccagcgacttgcgcaagcatgaacgcacccaccctgtgcccatggggacccccacacccctggagcccctggtggctttgctaggaatgcctgaagaggggccggcctgaagcccatgaccccccagcaccacactccgggagcccagcccccatcgggggcttcctgtacctccttttgcctggctctgctctttagactccagatccctacccctcagcaactagctcccctgtcggccagctaagagagctgggacagtggaggctggcagaagctgagacgtgactgtctaggagtaacactcattaaagctttcattttggcaaaaaaaatgcaaggaggaacaaaagagaaaagttttg

SEQ ID NO: 83058 - DNA, 2368 bp, Homo sapiens
gcacgctaagctagccacacttccggcaagagcagctagaatcgttccggtgcatattgaataggcgcagaaagggagaaaaagattctacagccctggccacagtactttggtgacacttttcgtggggctctctggaggacttttcccaaggcagatggagaaaacttcgtgaaacccactccttgctattaaaggaaatgttgtggaatataattggacttaggttttgcagagcttgagcatggcctttttgtcctcccaccttctggttcttgaagacattgccggtgacctggccccagactaacacaaggcgggcgtataccgtcagcctgcctggcgtccccttgcctcagcacacacagagacctcttgcaagatgcttctctgccgccataggctggaggttccccgggaactttcccttccttcctagctgaggaagatccctcacttccgctcgccgcgccaccggtcccacctccccgccccccgctgggtcctagcgccggcccctgtttggcagggtccgggctccgtcggtgcgaggagccgacgccgacgccacggagtcagcacaagtctcatcagagaaaccccgttcaccaaggccatggaagtggaggctgcagaggcccggtccccagcccccggctacaagcgctcgggccgccgctacaagtgcctgtcctgtaccaagacatttccaaacgcgcccagggcagcgcgccacgctgccacacatgggccggcagactgctctgaagaggtggccgaggtgaagccaaagccagagacagaagctaaggcagaggaagccagtggggagaaggtgtcaggctccgcggccaagcctaggccctatgcgtgtccgctatgccccaaggcctacaagacggcacccgagctgcgcagccacgggcgcagccacacgggggagaagccctttccgtgccccgagtgcggccgccgcttcatgcagcccgtgtgcctgcgcgtgcacctggcctcgcacgctggcgaactgcccttccgctgtgcgcactgcccgaaggcctatggcgcgctctccaagctcaagatccaccagcgtggccacacaggcgagcggccttacgcctgcgccgactgcggcaagagctttgctgacccttcagtgttccgcaagcaccggcgtactcacgctggcctgcggccctacagctgtgagcgttgcggtaaagcctatgcggagctcaaggacctccgcaaccatgagcggtcccacaccggcgagcgccccttcctctgctccgagtgcgggaagagcttctcccgctcatcctcgctcacgtgccaccagcgcatccacgcggcacagaagccctaccgctgcccggcctgcggcaagggcttcacgcagctcagttcctaccagagccacgagcgcacgcactcgggggagaagcccttcctgtgcccgcgctgcggccgcatgttctccgacccctcgagcttccgtcgccaccagcgcgcccatgaaggggtgaagccataccactgcgagaagtgcggcaaggacttccggcagccggcggacctggccatgcaccggcgtgtgcacacaggcgaccggccgttcaagtgcctgcaatgtgacaagacgttcgtggcgtcctgggacctcaagcggcacgcgctggtgcactctggccagcggcccttccgctgtgaggagtgcgggcgagccttcgccgagcgtgccagcctcacgaagcatagccgggtgcactcgggggagcgccccttccactgtaacgcatgtgggaaatcctttgtggtgtcgtcgagcctgaggaagcacgagcggacccatcgaagcagtgaggccgcgggtgtgccccctgcacaggagctggtggtggggttggcgctgcctgtgggcgtggcaggtgagagttcagccgccccggcagcaggggcggggctgggggaccctccagcagggctgctagggctgcccccggagtcaggtggtgtgatggccacacagtggcaggtggtgggcatgacggtggagcatgtggaatgccaagatgctggtgtccgggaggctcctggtcccttggaaggggcaggcgaggcggggggtgaggaggctgacgagaacccccatcgggggcttcctgtacctccttttgcctggctctgctctttagactccagatccctacccctcagcaactagctcccctgtcggccagctaagagagctgggacagtggaggctggcagaagctgagacgtgactgtctaggagtaacactcattaaagctttcattttggcaaaaaaaatgcaaggaggaacaaaagagaaaagttttg

SEQ ID NO: 83059 - DNA, 1972 bp, Homo sapiens
gcacgctaagctagccacacttccggcaagagcagctagaatcgttccggtgcatattgaataggcgcagaaagggagaaaaagattctacagccctggccacagtactttggtgacacttttcgtggggctctctggaggacttttcccaaggcagatggagaaaacttcgtgaaacccactccttgctattaaaggaaatgttgtggaatataattggacttaggttttgcagagcttgagcatggcctttttgtcctcccaccttctggttcttgaagacattgccggtgacctggccccagactaacacaaggcgggcgtataccgtcagcctgcctggcgtccccttgcctcagcacacacagagacctcttgcaagatctttgctgacccttcagtgttccgcaagcaccggcgtactcacgctggcctgcggccctacagctgtgagcgttgcggtaaagcctatgcggagctcaaggacctccgcaaccatgagcggtcccacaccggcgagcgccccttcctctgctccgagtgcgggaagagcttctcccgctcatcctcgctcacgtgccaccagcgcatccacgcggcacagaagccctaccgctgcccggcctgcggcaagggcttcacgcagctcagttcctaccagagccacgagcgcacgcactcgggggagaagcccttcctgtgcccgcgctgcggccgcatgttctccgacccctcgagcttccgtcgccaccagcgcgcccatgaaggggtgaagccataccactgcgagaagtgcggcaaggacttccggcagccggcggacctggccatgcaccggcgtgtgcacacaggcgaccggccgttcaagtgcctgcaatgtgacaagacgttcgtggcgtcctgggacctcaagcggcacgcgctggtgcactctggccagcggcccttccgctgtgaggagtgcgggcgagccttcgccgagcgtgccagcctcacgaagcatagccgggtgcactcgggggagcgccccttccactgtaacgcatgtgggaaatcctttgtggtgtcgtcgagcctgaggaagcacgagcggacccatcgaagcagtgaggccgcgggtgtgccccctgcacaggagctggtggtggggttggcgctgcctgtgggcgtggcaggtgagagttcagccgccccggcagcaggggcggggctgggggaccctccagcagggctgctagggctgcccccggagtcaggtggtgtgatggccacacagtggcaggtggtgggcatgacggtggagcatgtggaatgccaagatgctggtgtccgggaggctcctggtcccttggaaggggcaggcgaggcggggggtgaggaggctgacgagaagcccccccagtttgtgtgccgagagtgcaaggagaccttctccacaatgacgctgctgcgtcggcacgagcgctcacacccggagctccggcccttcccctgcacccagtgcggcaagagcttctctgaccgggctgggctgcgcaaacacagccgcactcacagctcagtgcgcccctacacctgcccccattgtcccaaggccttcttgagtgccagcgacttgcgcaagcatgaacgcacccaccctgtgcccatggggacccccacacccctggagcccctggtggctttgctaggaatgcctgaagaggggccggcctgaagcccatgaccccccagcaccacactccgggagcccagcccccatcgggggcttcctgtacctccttttgcctggctctgctctttagactccagatccctacccctcagcaactagctcccctgtcggccagctaagagagctgggacagtggaggctggcagaagctgagacgtgactgtctaggagtaacactcattaaagctttcattttggcaaaaaaaatgcaaggaggaacaaaagagaaaagttttg

SEQ ID NO: 83060 - DNA, 374 bp, Homo sapiens
ggccccttagtctcctttttgaaagatcgttgattaattcaagaaactacgtcattagttctatagactgtctcatctggatttagatgattgcttccttgaggtggcatttattttgttttctcatcctcgtgtttcctatttactgacatttagagctagaggcttgattagattcaattttgattattttttaagagaaagactcattttaggcagtgctgtttactttctattgtattttatcatgtctaattttatcttttttttaattgatgctgggattgatttgtcatttcagggtgtttgtcgggctgatctctccattgtagcttttcccaccaacctttcttctgttggttttagcagccatt

SEQ ID NO: 83061 - DNA, 166 bp, Homo sapiens
aagctggaaacgcccatcccttggactagtcattctcccatttctgagatacatcctggaaatcatgtcaatagagcatcagctgtaatgaaaagtcagtaggccgggtgcggtggctcatgcctgtaatcccagcactttgggaggctgagcggggtggatcacg

SEQ ID NO: 83062 - DNA, 472 bp, Homo sapiens
tgcgagtcctgtgagcatcatctcagcctggcctcaggccctggagggtctggaaactgagtggtccctctcaggaggcaaccaaaagacgttctcactggctgacgatgggacacttggagcatcactgtgggcaataacttggagtgatttaaatacgtgagataaggccgggtgcggtggctcacgcctgtgatcccagcactgtgagaggccgatgcgggcagatcacctgaggtcaggagttcgacaccagcctggccaacatggcaaaaccccatctatactaaaaatacaaaaattagctgggcgtggtggtggcacctatgatcccagctactcaggaggctgaggcaggagaatcgcgttaacccagaagcagaggctgcagtgagccgagatcgcgtcactacactccagcctgggcgacagaacgagactccatctcaaaaaaaaaaaaagaaaagaagaa

SEQ ID NO: 83063 - DNA, 183 bp, Homo sapiens
tttttatcacataccaagatctgacaattctattccatgaaaaaaatcttttgagtctgacctcttctccaatcccattgcagctgtctcctaagttttggaatagtttcctaaatggtctcttggcctctgtattcgtctgttttcacactgctgtgaagaaatacctaagactgggtaatt

SEQ ID NO: 83064 - DNA, 833 bp, Homo sapiens
aatgtagttctttcagtttctcttctcatattgatatataaagccttgggaatagcagcaaactgttactgctcattattcttcactgccttcttttggcaaattggtactggagtaactgacagggttctcctaataggatctttcttgtggcaccctgtaccttttcatatattagcgtttttactgtctgagaaaggagatgcaaggaagtttacctgttggtactaatttttaagttgcttccttttccattgctaagaaagaagagggctttcttagttactggccaactctcttgaacactgtatggaagccatatggattggaaacattagcctctgctatatttttatagcagatgggtacacacatttgcattaggaattcaatagttctatgcttttgttagctttgtactccactcctggacaagaaataacccttcacatggaacctatttttctctccttccaaatgccagtctgctgttcaaaggccactcttttttttttaaatgaagtaattaatagggcagttggactccaaataagtcacttgagagcagtaagatgtagttgtaaataagctttttgaataggacccagcagtagctcatttaatatcacctgagatattttacaaactaaggattgttgtgatgtcaaactatttgattctacatgttgtttcgatacgtggatatcaagatataaagtagcagttggctacctaaaatgaaaagagcaatgttccatggcacctgaaatgttaaaaatattagaaactctccccaccccatattcctcccaccccaattgagtctctcgcaa

SEQ ID NO: 83065 - DNA, 311 bp, Homo sapiens
ccagtatgaatgtgaacaattccaaatatatatactaaatattcactttcttttattttttctttgactgacactaaatattgaaacaaaaatggcttagcaactataatgcctaaaagggaactatgatgtagtatgtatatgtgcatgtgtatacatatcctaaatatacatatatacaatactcttcgtttatctgcagtttcactttctgcaattacagttacccactatcgaatattgtctgaacatagataagtatagtacaatacaatattttgagagcgagagaccgcattcatataactttt

SEQ ID NO: 83066 - DNA, 547 bp, Homo sapiens
tattgactaagtttacctcttacatgggtgcagttcatggtgtcccaaaacaatgacaatagtaacatccaagatcactgatcacaaatcaccataacagatatgataatgaaaatgtttgaaacattgtgagaattaccaaaatgtgacacagagacataaagtgagcacatgctgttggaaaaatggcattgatagacttgacagggttgccacaaaccttccatttgtacaaaggcaatattcgtgaagcgtaataaagcgaagcatgataaagtgagatatgcctgcaactgaaaaacattccttctcctttcgagtctatagctcatggtaaggagagggtatgggagccaagggtgagtttcatcttagctcagtgttaggctctggtctgaatcgcagcttcatcactgtgatgctactcaccctatggctctgagaagctaaggttcctgagtactaaaagtaaaataaaaataacaataaaaattaaccaattataaggccttgttttctttaatttttaaataactttttcttttag

SEQ ID NO: 83067 - DNA, 2313 bp, Homo sapiens
  misc_feature (1299)..(1299): n is a, c, g, or t
  misc_feature (1320)..(1320): n is a, c, g, or t
catagtgtgtggtgcacagtaggcatggaataatgataataaatggattaaatggatgcatgaaggtatacaggagactttaagctatcatagacggttccaggcaggagaatatgaagatgtaatttcaagtacagttgttattgtcagttttgctttccatggtttcagctacccatagtcaatcacaatataaaaatattaaatggaacattccagaaataatacataagttttaagttgctgaataatgtgatgaaatcttaggctgtcccacttcgtctcgcctgggatgtgaattgtccttttgtcctgcttatgcacgctgtatatgttacccaccgtttagtcacttagcagccatctggattctcagattgaaaacagtgtgtatagggttctgttctatcaaatgtttcaggcatcctctggggggtcttggaatgtatcccccatggataagactacttgtataatctggtaaaatggatgaattattcataaataatgtcagaaccagctatttcaaacaagattagattctctagcctcatatcatatgcaaagataaattatatatggattaaggatttaaatgtaaaaaaagaaattataagagttccataccgaaatgcaggtttatatttagtaaaatagtcaagaaaggtttttttttttttttttaaaaagcataacatcaaagcctaaaattacaaaggaaaagagtggaaaattcatccccataaatattaaaaactagtgtgttgcaaataaattcaaaagataagggaaatactggggaaaatatctgaaacatgacagagtgtcattaatatatcatgggcttttacattttagaaaaaaatgacggatatctcactagtgaaaagactataggaaatgaagaagtaattcacagaaaaagggtcaactccatttatcagagaaatgcaaatgaaatcaggattgcattcttcacctgtcaaattggcagatgcaacaatagctggtacttactgagccctttctgtgttagctactagtctaagagttaccaccactcatacatatgtaaaggctaatggagttgtaaatgtaacttttgaggactttattgtatgtatgcgtattagtctgttctcacgctgctaataaagacatacccgagactgggtaatttataaaggaaaggaggtttaatggactcacagttccacatggctgaggagacctcacaatcatggtagagggtaaaggggtagaaagtcatgtcttacatggcagcaggcaagagagctngtgtaggggagctcccctttntaaaaccatcagacctggtgagacttattcacatgagaacagcataggaaagacccgccccgatgattcagttacctcccaccaggtccctcctacaacacgtgagaattatgggagctacaattcaagatgagatttgggtggggacacagccaaaacatatcagtatgttatggccttatataaaagttgttttgtttgtaagcagtttgccctacagtgtgtggaaagtgcatcactgttgtgctttggttgtccaactctttgcttaccctgatgcttaggtgtgagttgatggcagtttggcatttggagagcagttgcactcctaaaatgagtgaaatgttctcttcaaacttgtggcgtaccgtctttctatggctctgtgacagttacagatccgaaaattaggtgtaatggcttttgaagcaaaaatctcattctgaataaatctcccatctgttccaataacattttaattgcgcatcaaatatggtacttatttttaaaaactgcctagcaggatagtttgtgttactctgcctgtatccatgaccgtgataagaaatgtaagaaaaggccaggcatggtggctcacacctgtaatcccagcactttgggaggccaaggtgggtggatcacctgaggtcaggaatccagacaagcctggccagcatggagaaaccctgtctctattaaaaatataaaaatgagccagatgcggtggtgcatatctgtaatcccagctacttgggaggctgaggcaggagaatcgcttgaacccaggaggtggaggttggagtgagcgaagatcatgccactgcactccagcctgggtgacagagagacagactgtctcaaaaaaaaaaaaaaaaaaaaaaatgtaagaaaagaggttgagtcttattttcatttgtatttctctcactgcctagcatagtgcctttcactcagttggaatatataataaatgttcattaaactgactattgt

SEQ ID NO: 83068 - DNA, 297 bp, Homo sapiens
tgagatttttgcaaagccacgaattaaagcaatgtggaaattaaacctaacaatccactgtggttaactcagtgacaggattatccatatagtggcggcacagtgtggcaaggcagggagagtggaagcttgctggtagaagcctgtgttatctgctggctacagtgagggcacactcaagggccaccagggctcctgaggccacttgccgccgagagccaaatcaaccacttccttcctttcccactaaaggctaggcagcccctggtggctctggggaaagcccagccacacagc

SEQ ID NO: 83069 - DNA, 476 bp, Homo sapiens
caagcacgcaccagtggggtgagggaggacaaccccaactggggcccaacactccactacttaacgtttcaaaaaataaaatcaactgtgtataaaatcatatttatacctagaaggtctagtgcgacgacacaaagaaagcaattataagaaaggaactaggctaggcaaggtggctcacgcctgtaatcccagcactttgggaggacaaggcaggcaaatcgcttgagccctggggttggagaccagcctgggcaacatggcaaaacctggtctctataaaaaagtataaaaaaaaaaattagctgggtgcggtggcatgcacctgtaatcccagctattcaggaggttgaggtgggaggatcgcttgagcccaagaggttgagactacagtgagccatgatcattcaactgcactccagccttggtgacagagcaaaaccctatctcaaaaaaaaaaaaaaaaaaaaaaaggg

SEQ ID NO: 83070 - DNA, 629 bp, Homo sapiens
tctttgttcctggcagacatgtgtttagctagaatgcaagggttcttttactgaaaaagaggagaatggacactggaagagaactatcagaatctgctacacaattattttcccagcacatcttgaattctttgaaggataagaggtctctcaacacgtagaattaaaaggaagagcccctaaggggaaagcaaaaagataatttgaaatgatatccctctgagggcttcacccctggaacagcccacttcctattgggaacatttccttttgatatgtagacctatgaactaaagaaacaaaactctcttgcacattcccaacatgcagtaatggaacaggtagaaaatactgctatgaacattgctttttaaaaaggaagaaaattgatacacacaggattcactggtccacagcaattttgaaatctagctggacatatgttgccagttccttgattaaaggatcaattctactgcctgggaacaattcactttggctcttggctctaccctcttggccatcttcattttccatggaaaatagcccatgtttatggctgagtaatttttgcagcctgtttctgcccacagaaatttggatttcattttgtattttctatatctttc

SEQ ID NO: 83071 - DNA, 310 bp, Homo sapiens
ttttttttttacacagtttccagtcctggaaacctttagctaatctttagcattccttcaatggtgggaatgggcaacagatcaccatagtattaatactctgtgtaattttatcactagaatggttaatttccatatcatagtagagctgttgcagatattttgaaatcccattatactcactgccacttcaagattactgtagttgttagaacagctactagatcttattacttaataaattaataaagtgtgaatataactatataaccattttaaaatgttttttgataactttcaatataattgg

SEQ ID NO: 83072 - DNA, 446 bp, Homo sapiens
agttcctgattattttcagtccatcagaggttaaggggcttatctcttgactaacctctcctccaagctgtattagtcaaacagttcaaacacagttggatcaacaagtcttctggtgaaataagattcgtgaagaatgccctgaatcctaggttgaaaggcctgagttgggcagaacagtgacgtatgaacttcagatgagggcctacacttctgacggcttagaccccactgtaggggagagcgctggctgcttgcacttgtagccccaccttattctgagtaatttttttttttttttttttttttttttttttaaccaaaaacaaaaaaaaagggggtggcaaaaatcctttattttaaaaagggtccccccccaccccactttggaaaaacccaaaggccaggaaacggggaaccgagctcaaatccgaaaccggggccaa

SEQ ID NO: 83073 - DNA, 768 bp, Homo sapiens
gggcaacatggtgagacctcgtctctacaaaaataaaaaaataaaaaaattagccaggtgtggtggcgcatgcctgtggtcccatctttaaaaaaaaaaaaattaacaaaatgatcctgtttcttagagaagcaactaatagagtggagtttgttgccagtgatgaaattcaaacttttggacaaaaattagaattttggaaacgtgtgtctacctgcatgagcttgacagctttctgttgtttaaagacttttctggtgagattggtggtgatatgaaaaatgtgaatttagcagaggacaaaaagttcattgatttggtttcaaattctaccttgtagctatcctttaaaaaactatacttctcaagatgtggtagagtatcaaagaataatatccacaattttctgaaaaggctactaacatattgttccttttccaactacatgtccgtgtgaggccgaggcaggcggattacgaggtcaggagatcgagaccatcctggccaacatggtgaaaccccatctctactaaaaatacaaaaaattagctgggtgtggtggcgtgtgcctgtaatgccagctactcgggaggctgaggcaggagaatcgcttgaacccaggaggtggaggttgcagtgagctgagatcacaccactgcactccaccctggtgacagagtgagactctgtctcaaaaaagcaaaaaatggacagcctcccaaaccagagtaggttcagagagactcttgtattaccatttaatgggta

SEQ ID NO: 83074 - DNA, 474 bp, Homo sapiens
taatgggtaaaggccagggatgctgccaagcatccttcaatgaacaaggcactcctcacaataaagaattatccaacccaaaatgtcagtagtgccaagattgagaattcctgtagtacagctgtctggagctgtagttgccagcatctgcagcaacctgtgcctgatgcctgcctctcatttactctgtagtctcttactggactcaataatcatttttctcttaacttttatcccagtactcccaatcactatatttgcaggtagcctcttctcaggcattcttgacttctttgtagtataacatattatcaacccctttaaatattaaaagttaaaattaaatattatataatttatggttcttgtagaaaaactgatatacaaagaagaaaaatttaaatgtttcataacctttcccatctagaaataaacactgttacaaagttggtatattcacttttattattaccc

SEQ ID NO: 83075 - DNA, 274 bp, Homo sapiens
ttaaagtactaattattgttttttaattgtaatatggatatgaactcaatgcagaaaacttggaaaacacaaaagagcacaaaggaaaatttaaaattggccataacctacccactgaaaggtcatcattaacatctaggctgatgtctttaccattttttcaatgcacataaatgaatgtgtgtaaataaatacatgctcttgctatcgaaatggcttcttagcaatgcagggggaatgttttcccaggtcagcaaatgttctccgtgactcc

SEQ ID NO: 83076 - DNA, 357 bp, Homo sapiens
ggaggtcaaggctgcagtgagacgtgatggcaccactgcactccagcctgggtgacagagtgaaaacctgtctcaaaaaaaaaaaagtttctttaattttgactccccagttctttttcacgtgaattgccacgatgtttcccccatggttaaaaatctgaatccaaacttgacatttctctgggctggcttttgacttattggtctgagcccatcattccaggcctgtcaagcttctaaattgaattgggtcattgacatactagctttccctataagttttttattatttacagatttggcagcaagattaatatttctgaacattgacattcaagaatagactaactacttcat

SEQ ID NO: 83077 - DNA, 412 bp, Homo sapiens
ttggagagacaggtttgcatagttgtttacagaggcaggctctgagaggggtgagcctgggtttcagtcttagttctcttgatcttgggaaagtcacttaacctcccaactagtctcctcatgtataaagcggagactgtaatattacttatgtcctaggatggctgtgagaattacaggagatagataaagagcacttagcccactgcctggcaaaagcaagcattcaataattatcagatatcactagtaattaataatcaggtagtgctattgttaacgttatcattacatcacagcactgcagaagatgaaagggcacctagaggttttttgaaaacacctgcgtcagaaattaacaaaagtccagacccccacccccacccaaaaaaaatgttagcaagattggaaa

SEQ ID NO: 83078 - DNA, 389 bp, Homo sapiens
agactgccaaacaagggaagcttgggcaaccaagaaactgtgtgaaagcaatgttgagatgggggtggcatggtttcatgtaggaaatctaaccatcaggatagagatttatagggaatttccacacagttgtttttttaaaacctcaagatttaatttgattaacagggacatgtaggagaaggcctagattgcaactaaaatatttagaggagacaaaataagtttaaatataatgaatctgaatttaagtttcacagtagttaaagtcggggtgaaactgccctgtgaacttgcttttgtgttcaatagtctctcctgtgagacaggtagcacaaagcttctttattctagctccatggcggtcaccttaacacttagcggctgac

SEQ ID NO: 83079 - DNA, 741 bp, Homo sapiens
gtcaggagggaagaagggagggtggggtggggttgggggagaggggaggacttgggagcctgtttgccctggaaagctcaatataagaaaacaaagaggatagtagtgtgggctttggaataagactcaggttcaaattcttactctaccaactagccagctgaattgccacagccatctctttgcagaatagcttggatgctcaattttcctgaacgatctccagcgagagatagaacaactatcaccacatttcatttaaaaatctcttcaagacccttcctcagttcttaaactggcaacctgcccagcatcagcctcacttgagaaattcgagaactacctgattggagaagagaactagatttatatttgttttgagtcacagaaaagtgacagtttaaattctgaaagaagatcacatttgtagtgcctctttggagacaaaaccttaggtcttggatttgtcacatgttagagctcaatgggagtttatcagtgctctccaagtccagcactcctatttaccagaggtgaaaaatgagtgtgagtgaggaaattattatttccagggccacacaatctaaaaaagtcagtgtcagtactagaaccagatgccctgatagcagttctctccctggcatctccttgcatttactttgcatttcactttggcaggagaagtaccagacacccttgagacacaagacaggatacaatggacatgggagtagatagatg

SEQ ID NO: 83080 - DNA, 661 bp, Homo sapiens
cttataacctctcaaattcattttgtttatttgaaacgtctcctgatttgatttatcagcctaagccatgcataacaacacaaatctacttctttccaagcataaaaaggaaagagatgggagagaaaatgaagtgaaataatatttaggtcatgtcttatatgggaaaccaaagctagcatttgtatttcattgcttaaataagtaaggaacatgtaattagtacttaaacatatatacaaattgtcttttaacagtagaaaaactagattcttagttaaaaaaaaaaagatgtgtagaacaaacattactgagttagtaatcagaagatctgaaatctagatctacttttaagaaatccaaccattccaagactgaagattttcttggcttatgagactgtaactgctaaaaccaggagagagctggggaaatcgagatgattgctcaccctagtgtgcacactggaaacagtcggctgatacctccatcctcatcttcgtcatgtcattgaggggttaaagaaaatcattgctgtggttcctttcagatctaatgttttgggagtctaaaaagtagagctgggcattttccccagtagcatcctatttcactgtgagaatagtgtgtcatatttccaaaatacaaatgcatgttagaa

SEQ ID NO: 83081 - DNA, 548 bp, Homo sapiens
tacacacagtcatatacttggttccagccactggaactatgccattccctgaactggccccacttgctcgtctccaggccatcacagatagttctgtgtccttagaatgcttgtccccttgcctttcaagagttctccaggactaccttagatccttatttcctctaggaagacagggttgggtgctcccgcctgggtatccaagcatgagtggcattttcacactaaatgctgaaagtctgttgactgggggatgccccacagcagataaaggcttgttctcacaatgcagctcccatgtgtagcccaaagcctggtagatgctcaaaaaatatttgtcaaatgaagaagaggaagaagaggagaggtcacatactaaacaaattggttggacctcattcctaaacaaattggttggaccagtctctgaaacctaacaaacaagacttgcatacacctggccgggcgcggtggctcacacctataatcccagcaccttgggaggctgaggcgggcggatcacgaggtcaggagatcgagaccatact

SEQ ID NO: 83082 - DNA, 272 bp, Homo sapiens
taaagcttaatgaacaaatgattataagcataaaatgtaggttatgtgctggcatttgggtatttaagaattggctaacttttatggcaagattttcagactcttaatcagaggaatactgtggttctagtaagtgcatctgcattgcagctaggtagttaacaaagtatcttgaaaccttttagttaagatgaggaaatagccaggcgtggtggctcacacctataatcttagcactttgggaggctgaggcgggcggatcgcttgaggtc

SEQ ID NO: 83083 - DNA, 948 bp, Homo sapiens
tcccagcactctgggaggccaaggcaggcagaccacctgaagtcgggagttcaagaccagcctgaccaacatggagaaacctcatctctactaaaaatacaaaattagctgggcgtggtggcgcatgactataatcccagctactcaggaggctgaggcagaagaatcgcttgaacccaggaggcggaggtggtggtgaaccaagatcacgccattgcactccagcctggacaacaagagcgaaactccatttcaaaaaaaaaaaaaaaaatctgttaaaatttgatatagtaggcactgacaaaagaggtcaaatgcaggactgatttctaagcttgcaatctatctaaatgcagatgctaatttagagtgcataattattacacaagtacagacctaggttagggcttaaatttcattatgtgcaataaaaaggttaagtgatggttaagcaaggtgtagattatccttacctctcctaatgacatgggctcacattggcattcctttcatacttttacgtataaagtgggcagttgtttctgaatgactgttgctggagcctcaggcctgctttgtgcttggtgctttccagactttctcctttattcctatcaccatatacgtactcacaaaagagcagtgtaaaccaggtattacatttccacaagggaaagtagaaccaggaatagccacatgatacttaccgaaagcttcactttccctatagagaaagcaagcaacatgaatcttctgatttggggcccagcctgctgctgtatacagaggttggcattattggtgatagaaatgtctgataggagtcttttaattatactctggagtgtggaggtggagtgcaaggctgcttcctttattactgcaagtgttattttctattatctcaggtttcgttttgtgtaataaactgcttcttgttaaaaaatg

SEQ ID NO: 83084 - DNA, 895 bp, Homo sapiens
tcccagcactctgggaggccaaggcaggcagaccacctgaagtcgggagttcaagaccagcctgaccaacatggagaaacctcatctctactaaaaatacaaaattagctgggcgtggtggcgcatgactataatcccagctactcaggaggctgaggcagaagaatcgcttgaacccaggaggcggaggtggtggtgaaccaagatcacgccattgcactccagcctggacaacaagagcgaaactccatttcaaaaaaaaaaaaaaaaatctgttaaaatttgatatagtaggcactgacaaaagaggtcaaatgcaggactgatttctaagcttgcaatctatctaaatgcagatgctaatttagagtgcataattattacacaagtacagacctaggttagggcttaaatttcattatgtgcaataaaaaggttaagtgatggttaagcaaggtgtagattatccttacctctcctaatgacatgggctcacattggcattcctttcatacttttacgtataaagtgggcagttgtttctgaatgactgttgctggagcctcaggcctgctttgtgcttggtgctttccagactttctcctttattcctatcaccatatacgtactcacgaatagccacatgatacttaccgaaagcttcactttccctatagagaaagcaagcaacatgaatcttctgatttggggcccagcctgctgctgtatacagaggttggcattattggtgatagaaatgtctgataggagtcttttaattatactctggagtgtggaggtggagtgcaaggctgcttcctttattactgcaagtgttattttctattatctcaggtttcgttttgtgtaataaactgcttcttgttaaaaaatg

SEQ ID NO: 83085 - DNA, 851 bp, Homo sapiens
cggggatctataggcacacgatcacggggagagaagcagaaccactcggagagcacattgcaggggttcaacctcacgcagtgatgggagcgggctggacactgtgtgtgaagactttctttctgtgtctggtgctgggctctgaaatccatggagcacacagccaggaaggggaaaatgaaaatgaagtgaggaaaacaggcacaaccatgacacggaggctgagctggacccgccagggcagcccggaactgcatcctctttctcccctggcaaggcccatgcttccttaccgggcttcctgcaggagaagcggattccctccgtcatccagctaaacacacggacactgaaggcggctccatctggcaggagtggaggctgctgagggcccagtggctgccccacccacccggtcagccaacagcaggcacccatgtgggagccacagggaagcctttgccctcgctcttaccttctgagtctagaatcatgacaagccgccaaaacaccacacctgctaaatatcacacaaaatgtctctgggcctcacagcccaggaccaagcagggaagggaattcaggtaaacacagctccagtgtacttgtgttgacacagcctacgtccttcaaaaccagcgccgagctcaaggcacagagatgctgtttctggcctctgaaaactgagtctgctggggaagacaaggtgtacggggcttttcagactacactgagtgtcagagcaatgatcatgagagctcaggcccacaggacggaaaagggctcccatttgactctgtgaagtgtttggggagcacagagcagggtgataagggtttcgtggctggagg

SEQ ID NO: 83086 - DNA, 813 bp, Homo sapiens
ggcttgccactgttcccacacggctaagtgtccgggttcgtcctaatcaagctgaacactagtcactgggttccacggttctcttccatgacccacggcttctaatagagctataacactcactgcatggcccaagattccattccttggaatccgtgaggccaagaaccccaggtcagagaacacgaggcttgccaccatcttggaagcagcccgccgccattttggaagtggcccaccaccatcttgggagctctgggagcaaggaccacctggtaacaataggccaaatactgtgctgataagcttgaaagcctgccctgaatcctcatctattgatggagatggtgtcatcttgccttgattgtatccagaagcttcatccccaagataaaggatggacatctctccgatgaccagcttcttttgctcgactctagagaaggttgctttctgcattctggcaactgccctctgtctacatgattagactcgttggttgcagtgctttctggagtaatgaagggatccagtgcacagggtttaacttactgggcacaatctctaagccaactctgcctgaatgggtcccctgttttttctcttctgctcttgttgaaccatatctctgttccttgtgctcctgggaatttcttgctctggtcatgaaaaaaatggaaactctctcaaggaataacaatcagagctgtctggttgacaagggacattatggttgcaagaagaccctgaagcaaggattctacatcaaagattcaggggcaatctgagtttgcatttaagatccttctgcct

SEQ ID NO: 83087 - DNA, 306 bp, Homo sapiens
ctcccttcaggaaaatttcaaaatcatatgtgactcagtgaacttattgactaatatgaaaatgctatgtgtaccatagaatatatgctgggagcaaggttgcattggtgttaaatctacttaaactgtctagttgatttgttgatgattagttgtggcatatactttttttaaaaaagttaaataatcgtgtgtccgtggttttgagggaatgttgccaaccctttaggtataatcagagagactctttggcatattggccattgctgctgaaggttatcagtttttgtgtatgtagagggccta

SEQ ID NO: 83088 - DNA, 676 bp, Homo sapiens
ttacaggcacccgccaccacacccagctaatttttgtatttttagtagagacaggtttcatcatgttggccaggctggtctcaaactcctgacttcaagtgatccgcctgcttcagcctcccaaagtgctgggattataggcgtgaggcaccgcacctagccatctaactttaaatgttatttgttaaagtggaatctttgtaaatgtattcaaggactctatccagcatatttccttaagttttgccagatttacaacatttaggataaagttggttactatctagaatagaggttttttttgttttttttccctaccctagggtgtttgtacaattgatatttttagctttataaaataagaactacactaacataactctgaagttttaatagttaaagcaagtatcagaataattttgaaaaattttttacaataagtattttttgtctttctttctcccacatctcattagttctggtttccacagttgtagccataggggaatgccacctttaaagatgttctcatccttgtcttagttgagacacatgaagaacttactggacattttgtcagagcctgttcttatagcatgcccagatctgaagcatttctccaccagggtctatgaatggtcttcaggggatcttgaaataataggtgtatgaacca

SEQ ID NO: 83089 - DNA, 425 bp, Homo sapiens
ttagtgttgtggtgggaagtaaaggcttggctctgggaaacctgactgtcagcagccccccagtagcatctctatcaccaacttctggaagcattggtggtggaactacactggtgatcacaggaaatggcttctatccaggcaacactacagtcactattggggatgaaccttgtcaaattatttccatcaaccccaatgaagtctactgccgcactcccgctgggaccactggaatggtcgatgttaaaatctttgttaatacaattgcttatccacctttgctttttacatatgccctggaggatactccatttctcagaggaattatcccaagcagaggtccaccaggaactgaaattgagatcactggatccaactttggctttgagatcttggaaatctccgtgatgataaataacatt

SEQ ID NO: 83090 - DNA, 438 bp, Homo sapiens
ataaatgaaagtttcaagatggtaccagcatggtcaggttctggtgaaggctgtcttccaggttttagactgctcactccttgtgacatcctctcatggtgggaagggatgagcagctctgtgggacctcttttataaaggcgcttagtccatccatgagggctcagacatcatgacctaatcacgcaccaaaagccccacctgttaacacatgtcatcacctcagaggtgaggatttcaacatctggatttcaggaggacacagacattcagaccatagcagacaggcacctacagaaaaattgagtgctgttactggaaggtatgtggaggctgggcagcccaaacccagcacatgtcccccacagaaatggcactcacaggtcagctgcttgcctgttgacagctgtttgtgggaagggcaggggaggcctacag

SEQ ID NO: 83091 - DNA, 421 bp, Homo sapiens
ctctatgttctattacctaggatttcacataaagtaacacattctaaagaatgaagcttttcaaacctgaaatggaacatcttaacttcgcctgaatttgctactccttattccaggacaagacaaaaacaggaccataacttatgagtggagacaatgaatatgttatcaatagaaatgtacatttcaagataatgcaaatcctgcttcccagggtccagcatatgcctccctctctcaccccgtgggccaaggaagggctggcgccatcttggaccataaatcattgcagaacagttcctggagggcacaaacccccagggcagaaccttccacacagctaaagaatttcctgccaaaacagataagaatttcctgttttgcttttcattattactttaaataatcccattcagagtct

SEQ ID NO: 83092 - DNA, 465 bp, Homo sapiens
actatttctcttacggagcatatatgcatgcaaaattgactaaagaggactcatttaaaacatttctaaggggaaatttgagttaacacaagggtgaatatattttaagccagtttatattttaaaccactcaataatgtggttttgaaaagtgactttttagaatatgtatgtatatgtctacacacacacacatacgcacacatgcaaatgatgtgtttaccctgctaagcagttagattggtaactatgaggtagcagcttctgtatcttgttaccttgttaggtcagtaaagcaagtgagggggcactttattagtttgtggaccattcttgaagctggtgacgctgcaaagggtccaaggcttgccctctctgctagtctagatcactgtttctgagactgtaatgtatgtgtaaatcacctggaggtcttgttaaaagtgtagaccttgttttagagat

SEQ ID NO: 83093 - DNA, 502 bp, Homo sapiens
ccaggcaccaggcagcgggagacactgctgcagctcgaagcctgccggggcgccggcccctctgcggctgcttgcgccatcctgccccctccttcccaggggaggccccagtgaaggccctggccagggcttcccagccccttctgcctccggaccggcctgggtgcttcccgtgtggcccggcctggggcgacgtggccctcctctcaggaagcgtggtaatctctcaatggctggcctccggagttgtcactcaggctcccttgtaagttaaggccgggcccaggacactctagggcacgcagctgctgtgggactgctgggttaggtgtcccctggagcagaggcggcttcggatttctaaagtggctgagtcctttcaccttgcaccagaaatgctggatcaggcgcagcacacacagcacctggggatgcaagcccggccagccccatggaccaagccccgccgaccgtgtggcccgccgagcccaggtgcggccgc

SEQ ID NO: 83094 - DNA, 272 bp, Homo sapiens
agtgtttatcaccttcttaaatactgcatgattaagtcatttattatggtttttgttaactttctatctccccttgctacaatgtgaactacacaaggacaacatgtttgtggtttggatggctggggggtccaccagtgcatctcaagtgcctatatatatatatgaaacatatatatggaacactttttattttaatgagctattcagtatttcagtaagctattaaatggtgcttggcatacagtatgtaatcagtatatattagttga

SEQ ID NO: 83095 - DNA, 339 bp, Homo sapiens
atttgatatgatttctgtccacttaaacttaagattagttttgtggactaacatatatcctggagaatgttccatgggcatttgagaacaaaatgtattttgctgcttctggatggaatgtttcatatatgcctgttaagtccgtttggtctaaagtgtaattgaaatccattgtttctttattgattttctgtctaggtgatcaatctgcccatggtgaaaagtagagtattgaggtcccgtattatagtattgcagcctatctccctcttcacatcatttaaaaattgctttatgtatttaggtgggtcaatgttgggtgcatatacttttacaatt

SEQ ID NO: 83096 - DNA, 123 bp, Homo sapiens
gtgtggagctaggagcatcttaatagaggaagtgatcattggagtttttgttttaaaggattcaccaaatggacaaaatggagtcgggggagaattttccagcaaagagcagagtatccaaaa

SEQ ID NO: 83097 - DNA, 345 bp, Homo sapiens
gtgactttcagtaaaaggtaatgtattccctgagaacaagtaaatacttgggcagggagggatggtttgagtagaggtgaaaacagagaaatgatgggaagctgaccatatgtagaagaagctgaaaggtcatggtttcaaggccactgtgtttcctttcatttagagcatccacttttaaagatttatcattttcagtgacctgaaggcgtacaagataatctgtgtagatacctgaaactgcctttcaacaaggccagtcctaggtattgacagcatcctaggttgtcccaccctaaacattacctcaagtcccattgggtaggagtctagtggacttccaaa

SEQ ID NO: 83098 - DNA, 185 bp, Homo sapiens
aaacaacccagtcttaattcctaagtttatatttccatgacaaaaaaaaaaaagggggaccggaatgcattatggctttttggtaaaatgaacagttattactatctttggcaagaagaaacgtatttttttgacagcaaaaaatttttttgattgagcaaggtattttcagcttttcaaatact

SEQ ID NO: 83099 - DNA, 587 bp, Homo sapiens
cctcccgggggtctccctctgtgctggacagcgcacccctctcaatgtctcatcctttgcaaggaggcaccatttgcgtcatacagtcacatgtgtatagtttccatcatgctataaatagccttttgtgctccttttttaaattaaaaatacattgtaaacattgttccacatgctatgcctaatcctcaaaacacaactacccttttaagcacttcagggtattctgtgtggaacctcatggatggcttccccatcttccactgacgcatgcatacctcgcttttcaaatgttttcacggcatctttgttgatttggcgttttcctcctgttgaataatctcctcaggagaaattcacattagtgagatgcctggatcatttatcttgatttgacttttggtacatattattagatcgccttgcaaaatgtctgctacaggataagttttacctccccagcggagtgtatcacttcagctagaaactcattttaatatacatatttttttattttgtgggaataaagccatctcgaggttgttttaatttgatatcttgcaccgaggattaaagaaaagtaaagc

SEQ ID NO: 83100 - DNA, 328 bp, Homo sapiens
gatagtctttagaaaataaaatctgtgacactttaatcatttcattaagactgaagaaattaggagagactgaggataagtggttttccattttttttccctgggtcagccttggatacaggtgaattgactgaatggtgctagtaaaatggaagtaaaatcacatttttgtttttttattttgacatggagtttctctcttgttgcccaggctggagtgcagtgccgtaatcttggctcactgcaacctccacctctcgggttcaagtgattctcctgcctcagcctcccaagtagctgagactacaggtgcccaccaccacgcccg

SEQ ID NO: 83101 - DNA, 745 bp, Homo sapiens
cactcatgcttttgtggtcagctggcaagccagctggggactgccgggtcctggatgacccctcttatattgctggcagttagctggagtgatgggggcaactaagccacatgtctctcttcatccagcagaccagtcggggcttcttcccacgattgtagggttccgaaagcagcaacagaacacaaggtcccatatgcatgctctctttaaagctgcttcttctgttgtttgccaatgtcccagtggcatgagcaagtcacagggccaagcttatagactctgtttcttgataggaggagctgcacagaacttgtagctatttttttttcaatctaccataaccttaaacctaaatatgtgaagaatgtgatgtgatgtgtctgtgtgtgtgtgtgcacgtgtgtgtgtgtgtgtgtgtgtaaccataaactatattcatatctgtctcatggggaggattttcttctgtgtaatgtaaagaaattcaaagttatcaaagttccttaagtgtgtgagtttagattctttatgtgcctttcatgaacagatatgttctcattaatttcactggtggcacctgtaatatccacattgtgaacgctgtgtatgaaattcaactatactatgaatacactctgactcatgagaacttctgggttaaaaagccacaaagaagcacattttggtgaccatcattagtgacatcctgaactttattctgtgtacttgtgtcaataaatcc

SEQ ID NO: 83102 - DNA, 454 bp, Homo sapiens
aaatcattcacagagacgtgcaccgcggtgagtgtggactcctggaagcgcaccgtagctccgctgtgtcctgctgctcctccctagctgtcagggaggctgtagtccattgctttgccagctcttttgtttccgagtgaacaccttatccgtacacatgcggctgtctctgaccctacagaccagctgggatgccactgggggagcgctcccttccccccgcacttcccacactctgcagttattctgagatccttgagggcagggaacaggtttgtcttctttgtgttctcagaaattaatgctcggcctctggtcagcaagcaacaaccttttgttgagtgataatgaataaataaatgtttcccacatgagtattcagtaacctcagtgtcaggttcagccatctgttttggtggatatttaaaagaaaattccgcttttcctacagaaa

SEQ ID NO: 83103 - DNA, 765 bp, Homo sapiens
gctgtggtattttaagtggtgtttggctagagtggagcggttattgcccaaagcttttctgtcttgctgggctgccactgtccagctccttaggctggagagagcaggcttttgttggggccttcttggtctcatttggaatttctgagttcagtttcttcaactatatatctgggatatacaagacagaaagaaaccagggcactctccaccatgttgttcctccagtctcaagatctctagacagtctgtcttctctccatctttcagagtcttcttgtgcatgttttttatataacatctacactttttagtggcgcttagcagaagcaatgggacaagtatgtctactgcagctttctggaagagaagctcctcatttctttttttggatacatttcaaaagaagttgcaaatatatgaccctacacatttcagtatgcatatcattaactacagctcaacattagtttatatttttctttttcttgtgtgagatgaaaactatacatacattgccgtcaggctttgcccaggcatcagaactcactagacagcagaatatacatctttgagaggaaccacagaaatgtaatgtgcatgctaaggcttttacctgaacatcaaaatggaaacatcagagtattcatattagagagcaaccttacaattgtaatggatgtggtaaggctttttaaaaaatcaaatgttcaaagacatagaatcaaccaaaatggccatcagtgatagactggataaagaaaa

SEQ ID NO: 83104 - DNA, 398 bp, Homo sapiens
ggagggaacatctttgagggtaattgttatggaaaagacatcctcagtgtgcacaaggaagcctctattggacaggaactttccaaatttaatccatgtggaaaagtcttcaccttaactccagatcttgctgcacatcttggaattctcaatgcaagacaaccatacaaatgtaaggaatgtagaaaaggctttaagtattttgcaagccttgataatcacatgggaatccacattggagagaaattctgtgaatttcaggaatgtaggagagccatcactcattcctcacacctaaagcagtgtgtaacagttcatactggaaagaaatctaaaaagactaagaaacatgggaaatccttcactaatttttctcaactttctgcacatgtgaaaat

SEQ ID NO: 83105 - DNA, 378 bp, Homo sapiens
ttcatttcagcccggtgatattgactttggactttggactgaggaaggataaatttctctttttttcaagccaaaaagtttgtggtagtttgctataatagctgcaggaaacttacacaatacccagctgaatttgaatctctcaaatggctttgcctctctgttcatcacaactcatttggtgttctactgttaggagattctttttttttttttcattagatgttcatctcaaagtaattgtttattgcagcagggcacagtggtacatacctgtaatcccagctacttgggaagctgtaaggtgggaggattgcttgagcccagaagtttgataccaacctgggcaacatagagaggccctatctcaaaaaaaaa

SEQ ID NO: 83106 - DNA, 1610 bp, Homo sapiens
acttgtttcaggtcaaggagctggaaagagacaggtcaagactctgtaggaggggaggaggcacaggacaggggtgccagctgctgaggccactagtcctgtccccaggccccaggggtcacttatgcccatgtgtccccatgcttcctggcaggactggtctggtgccatgccaagaggcagagcttgggaacttcagatccttgtgcctgcctggactgggccaggctggtctggggcagctgagggcacctgtgagagtgcaggggtacaccaagcagcgggcatcgtgattggcacgagccaggggagcggctggcagccttgttcctggtaaacacgaggagaggttacttcacaaggaaacagtaattaactttaattagcaccttgcatctcagaatattattaacatctcaatttctctaatcaagacagcaggagaggggcggcatctgctttgctgactccttcctggccatgctccctggcttggcttgggttcctgcccggcccccaccccttggaaggctcccaggagtacctcctcagaggcgagttgccaaggggagccggggctgaagggcagagagcaggtacgggccagggacacgccagccagccccagcagatgcagggcagcagggcaggggcaggactctttacctgccaccttatctttccaaatagactctaagcaccgaggacagcaaggcttctgttcccgatcccatgaatacacataatatagccttcttctctttctcccttacccctttcctccctcccttctttacttcctttgttccttctcttccctccttcccccttccctcctctctctctcccttcttcgagctaacctccttttctttttcccagtctctccctcatgctccctgtcctccccactggaattctccattttaacaagcatttattaagcagaccttacaggacaggggccctgctcccacaactggggatacagtaatgggcacaggataaatcctgcccttgggtagtttagaatctcacaggggagataaggctcgagtataaagaactctcatctgggcttcatactgataggcatcataatggctgggcagataaggggctgaggggttgtaggagggagggggacatgggagggaccagggccctagttgtggggcaccaaggcacgcggagggcagcaggatccagaggcagcgagggcacttggtgctgttcagccctctttagaaggccatcacaagggaagtccctgagggtgcagaaagtgactctcttcattgtacccaccctcagtggctgttaaccctgccacgtgtctgatattaataactgactgtcctccttggtctaattacagcggcctgctgcttgcacaatttgttatttatttggcagtgtcctcggggctatctctctagtccatccaatttgtatttactgagcacctactatgcctggagggctgggtctaccctggagtaggctcccagtgctggagctcctctctatagagactggagggatcaggagaaagctgcctacaggcctgggcatttcaggaaaaaaaaaaaaaaaacacaacacacaca

SEQ ID NO: 83107 - DNA, 857 bp, Homo sapiens
caggagcctcactcgtagaaagtgaacaggtacaactccaccctattgataggaagccaggcagcatcacaaatatgattttgcaccatgagaccattccattgctacaaataaaggcacttggaggaaaatggaaaacacaatatttatgctcccacagcactttgtacttctgcctgtcaatcagtttgctctgccctgtgtgatatgtgtgtgcgtgtccatgtattctctaagctccttgcagttgtgaatcgaatgtgttcattttcttatctcctcccgggaccttgcatacatgtgctaaagttagtgtgctcttttttctttttgcctttattagctaaaattgatactttgttgatgcatttttttttttttgaaaaaaaaaaaaaggagagactaggacagaaaaggagagactaggacagaaaactctgtagcccatgctggctgtaaatcacgcacattccagaggcgctgcatgccagggactgattctcattaagtttgccctctcatatgggatacatttggctgagcaaggatttcctcagagtccgctgtccgtctttcaattgaaggcagcttgaaaggtgcttagtcagcgaccaaatgctgaagccaaggcactgtgtgctgttttaaaggcctagtgaagccagagtcctctggaaggatccatgcgatttgaagttattagccacggtgctgcaaacagaagaattaacactgagttgttgacataattaaatataaggttactgcctcttcttcctcctttacaaaggaggaagacaataaattacaaagacaataatagaggggcactgtagaaaaaaattttttattttttt

SEQ ID NO: 83108 - DNA, 412 bp, Homo sapiens
caccagggagaaccaatacaacagaaaaaaagcagagaacagctatgtgtcctgccaggtctaccaaagatagtcatccaaacatgaacagatgagaaggctgtttttcaagaaggtgaaagtgacagaatattcaatgaatctgaacacatgaagatactgagacaccagtagttcagcaataagtggagagaaaactaagcaaatgagaaacttaggaacaattatgcagcaaagaacaactggataagctgaaaagtgtttaaagatgctgccgtaaacactaagtatcacaatcaaattctgatttgtaaaaatagaggtatgggaagggtacaagtatgttgtgggcaaaatggtgaggagagctaaaccctcttcttccttaatgagaaataaataatccaattaa

SEQ ID NO: 83109 - DNA, 531 bp, Homo sapiens
gcaagatgggtgtaaatctttctagagcacagctgaaaagttaaatggcttgtcctagagtacacagctcagcagagccaagagtaaaatggaaatccagtgcttttccatctatgctgcagtgaacctccactagagttttatgcaagtccaacctcccagcaatagggagaaaaagcaattatagcctttcttgatatttaacctagctaaaaacttcagcccagagaaaatcttccaaaagtccaagacagacaggcacttctaccgctcaccaccctccaaaagggactgagccctaagcttgtgcagtgattaatgctttccatgtcttttccatccgcctgcagttatgctacaagatctctgggtaaaggactagccaggtctgtctaacacatactttttggtgtgacttaacagactggtttctaccactttcagcctgaagtgacagtgcttttaaatgttggttgcaggcaggggactattgccccctcccaagcacttcaacttccttggcttctgtct

SEQ ID NO: 83110 - DNA, 314 bp, Homo sapiens
ttagtacctgaaattttcgcttactaaagtaacaaaaggcatgagacttggctattgatttttaaagtggaataacttttctcccctcaaaaatgtctttcttactcatataaataatgccttttacttgtatatctttttactgttcaaagcacttttgcagttatgctattgtttccctcacaacaatactgtgagggaggtaaagtattattattcccattttagagatgggtccttttgtaactgcctatgcttacacagttcattaatggaagggcttgaacttaaactcttttatggagtcctggagt

SEQ ID NO: 83111 - DNA, 892 bp, Homo sapiens
ccacacctgaggatggccacttcttgctcctgccgggcagggctcctggtgcaggttccactgacatcacagcaggggcagcctcatgaccggcctgtgtggatgagacccctgaattcctgcttggccttctgtgacaccgtccctcattacagccttgcgagggtagagaactcaggctcgccactcggcttttgctggtgcgggtgggggtggagccaccgttttttctgtgatgtgtggctgcagtagggttgttattatacaaaagttttctgtcttgctaggctgccgtttcccggtcctttgccaagagagcaggcttctgttgggactgttttgtctgtgctgttggtgttcaggttgctgggttcttcaactccagatctggggtacaggcagcaagaagctcaccccgtgttgctctgcaggccccgaggtcccagctggtctctacctttcagagtcttcttacatttcttgcctatatagtttcagggttctcagttgtagtgggcaggaggaaggggaaagtgtgtccactccatcttcccagaagcagaagttccctagatgagtatttttagttcctctataatagtttgtggttgtcctctctctcatttcaggtcaagctgttttgctcatctttgtcctccctactgtgcatggacagccccatgatcttagtggatgcttaggaaatctgtgttgagttcattacatacaactctatctaggagtttgtcatgccaatagcacatgggcacctgctcactcttaagagccagtcctttgaagggtagtgagtgcttctaggacattggaattgaacagatgcttggtgctatggagtctggttcattagagggttagctcatttcctgggaag

SEQ ID NO: 83112 - DNA, 407 bp, Homo sapiens
ggccccagggaagtccatggaggcctcggtggatgtgtctgcacccaaggtggaagccgatgtgagtctcccctccatgcagggggacctgaagaccactgacctcagcattcagcccccttctgccgacctgaaggtccaggctggccagatggatgtgaagctcccggagggccaggtgcccgagggagccggcctcaaagagcacctgcccaaggtggagatgcccagtttgaagatgcccaaagtggacctcaagggcccccaggtggacatcaagggccccaagctggacctaaaagtctccaaggcggaagtcacagcccctgatgtggaggtgtctctgcccagcgtggaggtggacgtccaggccccaagagccaaactggatagtgcacagctggagg

SEQ ID NO: 83113 - DNA, 461 bp, Homo sapiens
acaaaaacaatttaaaactgcgtaatggtccaaaccaccatggatggtgttctgacgatgatacacggggtgaggtctgactcatgagccgctgtccgtgatgacttgacattctcaaaaggaaatcccgaatgttctcactgcatgctgctgcaggccctcatggcagggcatccacaccactggctcaggtgctggttgctccagaatctctcttcagctggcctttttctactgaactgtctgtgagaacatcactgcaggcacggttttctccaaccataattgctgctgccaaagccacctcggacttgggaaagggaaacaacactccactagagagcgtagaatcttagaattcatctacttcattctcctcctggtactctactttcttctacaacgtcccagccgagctgaggtctgagctgtgctgctcaaggctgtcccatgtgaataca

SEQ ID NO: 83114 - DNA, 367 bp, Homo sapiens
atttttaaaagcttatgcaataaggaaataaagaaaggaaatattgtggtgcagctgtacagtgtgtttgtgttgtaaactgagtgcttttacagaagaatcaaacaaaaaataaagtttattgggaggctgaggcaggcggatcacgagctcaggagatcgagaccatcctggttaacatggtgaaaccctgtctctactaaaaatacaaaaaaatgagccaggcatggtggtgggcgcctgtagtcccagctactcgggaggctgagacaggagaatggtgtgaacccaggaggcgaggcttgcagtgagccgagactgcgccactccactccagtctgagcaacagagcgagactctgtctcaa

SEQ ID NO: 83115 - DNA, 1791 bp, Homo sapiens
gtaattattaactcttaggctcttcatttgccctcctaaagcagtgtttagagtcaggcagaggttaagtgtgttgcacctcacctagatacttccagaaccttctctgggtctgcagaatgtggcacaacctgcttgcccccgcagagagaaagctgcagtgcacatcctgcagactgcaggtgctgggctgcctctggagtcccagaaggcaagcttggctgcaggacagaaagggagaacagcttctctcacccctgagccttcacaagcccttgtctatttgccgttgccttcaaaatatacctcccccgaaaccagtagctttctgagtcctggtgtcccctccgccctttctggacaggtttgggaagaagaaagcagtcagtgctgggccttattggggtgtgaagcgccttgctctgccccttctgctcactgtgaaggccgctggatgcttctcttaggcatggtttaagcctccgattactaaaccccttgccccacaaacgtccacattgacgagcctctttttagtaactgcttccccgtaattccttcagaggttgctgtacccttcgctgatgtgctgccctcctgtaaaacctccagatgccttcccacgtaatgcccctttcagatgctttaagctgagagcttaaaccacaggtaccatggctgacgcctgccaggtttctgctgcagataatctatgatgggaggggcatattttttacttcattacttatgtaaactcttgttccagaaagctttaatgtgtgtgggagtgttctgggtctattaggtctgtgcgcatgggtgtgggcatttgcctgtgtccaccgggtgggtctcattatgaaatgtatgtttatgtagggctttaatggctgaaaatggcaaagagatgaatagaccacttggccccatgtgtaattgccaggccccttctgtgctcaaatgaggtgtccgagtgaaggtcagcccttcccttctgtatttggggcctatttatgccaccagtaattttataagaaatctgaatagttctcccctttgagtgcatttaactctttagtatcttctctcttacctatttgagcccctctagctacagtctggcttaaatgaaaggggaattatatgcttaagaaaaagtaggacacggttgaggcagtttgctgactgaatacgcgaagaaggacctgatgggctcatatgcaccactgccatcacagtccccatcgtgatgcaagcttatatgattcttgagaaacagcccagatctcctcttaagcggaaaagagattgaccttctagcagaggcaaagaatggagtcttctgggggcagctgcaaagcgttctccctaggacagatggagcctccctttcctcatctactctgtgggtggtttcagggcccacgagtcaacatgaggagttgtgctggtggtatgtgtgttggaggctgggctggctgattcacagtgacgaggatgtcaataataacaagaatgagaatgatgatacctaataaagactttttttcccaagacccatctacaattctttcattgggtgttttgccaagtctttctcaatctcatctcagctttttttttttttttaaagaaaatgtattcaatacttaattgcatcacaaatgtagacatagaagaaaggacttcaaacggaatttatgggaggcaatgtgtgcggctttttgccttatagagctgtgtagaaggtctggaatgatcttccagcaccaaatttagatggcctcaaaa

SEQ ID NO: 83116 - DNA, 1896 bp, Homo sapiens
gtaattattaactcttaggctcttcatttgccctcctaaagcagtgtttagagtcaggcagaggttaagtgtgttgcacctcacctagatacttccagaaccttctctgggtctgcagaatgtggcacaacctgcttgcccccgcagagagaaagctgcagtgcacatcctgcagactgcaggtgctgggctgcctctggagtcccagaaggcaagcttggctgcaggacagaaagggagaacagcttctctcacccctgagccttcacaagcccttgtctatttgccgttgccttcaaaatatacctcccccgaaaccagtagctttctgagtcctggtgtcccctccgccctttctggacaggtttgggaagaagaaagcagtcagtgctgggccttattggggtgtgaagcgccttgctctgccccttctgctcactgtgaaggccgctggatgcttctcttaggcatggtttaagcctccgattactaaaccccttgccccacaaacgtccacattgacgagcctctttttagtaactgcttccccgtaattccttcagaggttgctgtacccttcgctgatgtgctgccctcctgtaaaacctccagatgccttcccacgtaatgcccctttcagatgctttaagctgagagcttaaaccacaggtaccatggctgacgcctgccaggtttctgctgcagataatctatgatgggaggggcatattttttacttcattacttatgtaaactcttgttccagaaagctttaatgtgtgtgggagtgttctgggtctattaggtctgtgcgcatgggtgtgggcatttgcctgtgtccaccgggtgggtctcattatgaaatgtatgtttatgtagggctttaatggctgaaaatggcaaagagatgaatagaccacttggccccatgtgtaattgccaggccccttctgtgctcaaatgaggtgtccgagtgaaggtcagcccttcccttctgtatttggggcctatttatgccaccagtaattttataagaaatctgaatagttctcccctttgagtgcatttaactctttagtatcttctctcttacctatttgagcccctctagctacagtctggcttaaatgaaaggggaattatatgcttaagaaaaagtaggacacggttgaggcagtttgctgactgaatacgcgaagaaggacctgatgggctcatatgcaccactgccatcacagtccccatcgtgatgcaagcttatatgattcttgaggtaactctaccagatacttccagatttagaaatgtgtcaaaggaaaaattggtgatactcttctttcccctgccagaaacagcccagatctcctcttaagcggaaaagagattgaccttctagcagaggcaaaggtaaactcctgtaagttacttctgttaccaaagggaggggggcggcttttgtgaatgtatgaggagcttttgccagagagatattcggaggaggggtgtgcccatatgcacacatatattttcccgcataaccgtatccaatgctagcatttagaggaaggcatttagccaccaaaagtccatccatctatgctgcttccacagagaaaacattttctctttcctcctcttgaacttacataatatcctcctcccattccaaccttagaatggagtcttctgggggcagctgcaaagcgttctccctaggacagatggagcctccctttcctcatctactctgtgggtggtttcagggcccacgagtcaacatgaggagttgtgctggtggtatgtgtgttggaggctgggctggctgattcacagtgacgaggatgtcaataataacaagaatgagaatgatgatacctaataaagactttttttccc

SEQ ID NO: 83117 - DNA, 1552 bp, Homo sapiens
gtaattattaactcttaggctcttcatttgccctcctaaagcagtgtttagagtcaggcagaggttaagtgtgttgcacctcacctagatacttccagaaccttctctgggtctgcagaatgtggcacaacctgcttgcccccgcagagagaaagctgcagtgcacatcctgcagactgcaggtgctgggctgcctctggagtcccagaaggcaagcttggctgcaggacagaaagggagaacagcttctctcacccctgagccttcacaagcccttgtctatttgccgttgccttcaaaatatacctcccccgaaaccagtagctttctgagtcctggtgtcccctccgccctttctggacaggtttgggaagaagaaagcagtcagtgctgggccttattggggtgtgaagcgccttgctctgccccttctgctcactgtgaaggccgctggatgcttctcttaggcatggtttaagcctccgattactaaaccccttgccccacaaacgtccacattgacgagcctctttttagtaactgcttccccgtaattccttcagaggttgctgtacccttcgctgatgtgctgccctcctgtaaaacctccagatgccttcccacgtaatgcccctttcagatgctttaagctgagagcttaaaccacaggtaccatggctgacgcctgccaggtttctgctgcagataatctatgatgggaggggcatattttttacttcattacttatgtaaactcttgttccagaaagctttaatgtgtgtgggagtgttctgggtctattaggtctgtgcgcatgggtgtgggcatttgcctgtgtccaccgggtgggtctcattatgaaatgtatgtttatgtagggctttaatggctgaaaatggcaaagagatgaatagaccacttggccccatgtgtaattgccaggccccttctgtgctcaaatgaggtgtccgagtgaaggtcagcccttcccttctgtatttggggcctatttatgccaccagtaattttataagaaatctgaatagttctcccctttgagtgcatttaactctttagtatcttctctcttacctatttgagcccctctagctacagtctggcttaaatgaaaggggaattatatgcttaagaaaaagtaggacacggttgaggcagtttgctgactgaatacgcgaagaaggacctgatgggctcatatgcaccactgccatcacagtccccatcgtgatgcaagcttatatgattcttgagaaacagcccagatctcctcttaagcggaaaagagattgaccttctagcagaggcaaagaatggagtcttctgggggcagctgcaaagcgttctccctaggacagatggagcctccctttcctcatctactctgtgggtggtttcagggcccacgagtcaacatgaggagttgtgctggtggtatgtgtgttggaggctgggctggctgattcacagtgacgaggatgtcaataataacaagaatgagaatgatgatacctaataaagactttttttccc

SEQ ID NO: 83118 - DNA, 2135 bp, Homo sapiens
gtaattattaactcttaggctcttcatttgccctcctaaagcagtgtttagagtcaggcagaggttaagtgtgttgcacctcacctagatacttccagaaccttctctgggtctgcagaatgtggcacaacctgcttgcccccgcagagagaaagctgcagtgcacatcctgcagactgcaggtgctgggctgcctctggagtcccagaaggcaagcttggctgcaggacagaaagggagaacagcttctctcacccctgagccttcacaagcccttgtctatttgccgttgccttcaaaatatacctcccccgaaaccagtagctttctgagtcctggtgtcccctccgccctttctggacaggtttgggaagaagaaagcagtcagtgctgggccttattggggtgtgaagcgccttgctctgccccttctgctcactgtgaaggccgctggatgcttctcttaggcatggtttaagcctccgattactaaaccccttgccccacaaacgtccacattgacgagcctctttttagtaactgcttccccgtaattccttcagaggttgctgtacccttcgctgatgtgctgccctcctgtaaaacctccagatgccttcccacgtaatgcccctttcagatgctttaagctgagagcttaaaccacaggtaccatggctgacgcctgccaggtttctgctgcagataatctatgatgggaggggcatattttttacttcattacttatgtaaactcttgttccagaaagctttaatgtgtgtgggagtgttctgggtctattaggtctgtgcgcatgggtgtgggcatttgcctgtgtccaccgggtgggtctcattatgaaatgtatgtttatgtagggctttaatggctgaaaatggcaaagagatgaatagaccacttggccccatgtgtaattgccaggccccttctgtgctcaaatgaggtgtccgagtgaaggtcagcccttcccttctgtatttggggcctatttatgccaccagtaattttataagaaatctgaatagttctcccctttgagtgcatttaactctttagtatcttctctcttacctatttgagcccctctagctacagtctggcttaaatgaaaggggaattatatgcttaagaaaaagtaggacacggttgaggcagtttgctgactgaatacgcgaagaaggacctgatgggctcatatgcaccactgccatcacagtccccatcgtgatgcaagcttatatgattcttgaggtaactctaccagatacttccagatttagaaatgtgtcaaaggaaaaattggtgatactcttctttcccctgccagaaacagcccagatctcctcttaagcggaaaagagattgaccttctagcagaggcaaaggtaaactcctgtaagttacttctgttaccaaagggaggggggcggcttttgtgaatgtatgaggagcttttgccagagagatattcggaggaggggtgtgcccatatgcacacatatattttcccgcataaccgtatccaatgctagcatttagaggaaggcatttagccaccaaaagtccatccatctatgctgcttccacagagaaaacattttctctttcctcctcttgaacttacataatatcctcctcccattccaaccttagaatggagtcttctgggggcagctgcaaagcgttctccctaggacagatggagcctccctttcctcatctactctgtgggtggtttcagggcccacgagtcaacatgaggagttgtgctggtggtatgtgtgttggaggctgggctggctgattcacagtgacgaggatgtcaataataacaagaatgagaatgatgatacctaataaagactttttttcccaagacccatctacaattctttcattgggtgttttgccaagtctttctcaatctcatctcagctttttttttttttttaaagaaaatgtattcaatacttaattgcatcacaaatgtagacatagaagaaaggacttcaaacggaatttatgggaggcaatgtgtgcggctttttgccttatagagctgtgtagaaggtctggaatgatcttccagcaccaaatttagatggcctcaaaa

SEQ ID NO: 83119 - DNA, 630 bp, Homo sapiens
taccgttctaatgaaaaccatatagctctattagttcacatttcattccaatgttaaaattttattctttagtatcttggacctgatagagcctaccaagcaccctttccttccttcttccttgccaacaaagccccagttttgttcagctgttccccctgcctagacccagggaatgaattctgtctcattatgcctgatctaagctggcttggtagccttattctccttatcagtgactggctttggttaggacatggaactcagtcccgacccataggacccaaggagacatctgctgaaggacttctgagaaagattcacttactgataaaaagcagcacatagggccgggtgcggtggttcacacctgtaatcccagcactttgagaggctgaggagggtggatcacctgaggtcaggagttcaaaaccagcctggtcaacatgatgaaaccctggctttactaaaaatacaaaatttagccgggtgtggtggtggacacctgtaatcccagctactcaggaggctgaggccggagaatcacttgaacccgggaggtggaggttgcagtaagaggagatcccaccactgcctccagcctgggtgacagagcaagactctgtctca

SEQ ID NO: 83120 - DNA, 247 bp, Homo sapiens
tttagtagagatggggtttcaccacgttggatgttggtcaggctggtcttgaactcctgacctcaaatgatcggcatacctcagcctcccaaagtgctaggattacaggcatgagccaccacacccagcctcaaaactatttaaaaaataaaattcttcaaaaaatagaacaaaacattgtatacatatataatgtttctattcatatatgtgtatgtgtgtgtgtatatatatattatatatatat

SEQ ID NO: 83121 - DNA, 347 bp, Homo sapiens
cagatgcccagtcaccaagttcctccactagatctgctgcacttagtcttccctgtggggctccgtgcctctccagcagaggagtaacccactggagttctctcttctaagatgtctccaacccaagggtaataaacaactcgagggtaataaacaacttgggttggcagcacagattaggagagggggtgtcagatcactaagctctgatcttgatcctctgctgcgaatgcgaagggcaccatttccaaatacagagtcctactgcatccccattggatttcagagcaaaagtgacagtggaatgtgggactgtaaaaactcccacaccagtaagtagacctcct

SEQ ID NO: 83122 - DNA, 738 bp, Homo sapiens
ccaggagccctctgaaagagaagagtcaactgtggagggggcacctgtgaatgaatcctgcggagctgctaacagagcagacttacacacacaacatggagactttcctgggcctgactcccggacctgtccccagcgcctcgcggcctctcgagccccttcagtgaccaagatgcagagatcaggacgccattgcaccaccccagggtctggcgctgtcgcccaggttggaatacagcggtgcaatctcaactcactgcaaactccgcctcccaggttcaagcaattctcctgcctcagtctcctgagtagctgagattacagatgcctgccaccacacgcagctaattggttgggtgtggtggggctttccaatgattacttattaatgattacttatgaaaaacaacaacaaaaaagccatcttgaagctgcttttaatgagagaacaaatgtgctcccaagcaacagagcagcgaaattctttattactggattctaactttcctctctaactgtaactgtctcagctccacctcatgtgacttggagggtatgttgcaacctgcgtcttcaccacccattcatgaagatctataaaactaatgtaaactgctggggcaatttcaacatgagtcaactggagattgttacttggtgagaatgcgcaagtggcaaagatctaaatttgttcagctaatttgtaattaaccttcgcttctcacatgtcagtatgtg

SEQ ID NO: 83123 - DNA, 448 bp, Homo sapiens
tcctcattggcaagacgggtataagatctactttgtagagttgttttgatgcatgtgtgaggcaacatatttaaacttcctagcatagtgcgtgcctcttagtaggattaatggttaagttgcctgcctgtgccctgttgaatagactatgtttctctgtctaaaggattttatctatgatcataaccttaacaagcctattatgcttttaactcccaaatgtctatctctcatgcaatctactctgaatcttcaagcctgaaatttctgaaacatcttggatatcttctcatttttatcttggtttttgccaattcgctgtaagtacagcctggattcatcttgcactcgaaacctcttctttgttttgttagttcatataactgatttactgaacaagctggactttatagggaagaaattaaagcaaacatttttatttctcaac

SEQ ID NO: 83124 - DNA, 713 bp, Homo sapiens
ctgagcccgttcttggtgtttgagaatgcattcatgttttagctgttttcctttatttttatgctggtcacttcttactcttgtgctctgtgaaggtaaaacagttcatgtgtctcttctttccttagaagctttttcatcccttggaatttactttacccttcacctcagttctctgataggtttgaaatgttgtgattttgtagttttttttttttttcctggccttttcttgtgaggaaagaagtgatattttcttgtggatttatacatcttaagttgaatcagaacctgtcccaggatttaaacagttcatggagagtattgccttttactaaaatagtttcttggctttcatggacttagaatttatagtatttactgtgtgtggtctattgcaaaacaagttcaataatttctaattggaattttagtgttaaagtggtctgacttatatagtggatctagcccaatcttaactagtttgtaaacctagctaaatcttttaatgtctgcatctcaaccagtctttattgttttccgctatttttcacatatgcaatttacaggggagagggatgtttgtgatgctggaaattatatgctgtagtgacgtgaataaatttagctatttgcaaagatcacaggtaatattattaacagatgtcaagagtctattctattctattctttttagaatatatagtagacta

SEQ ID NO: 83125 - DNA, 321 bp, Homo sapiens
aacttttcaaataggcccagggcactcccaaacattttttaaataccaggtaagaaccctgacccacaccctccctcataacttggaatctaggccattcgcacattgatgggaacgaaacaggcatgcaggaactaaatgggaagactcttaaagcactgcctccttgcatcgaggcccttgaaacacattaaacaaagcagaaaggagccaaaagattgctgggttttagtcctaggtcaaagtcagctgtgggtacccagacccctaaaggcatgatgaacggtgctgggctgaaacaaagtccttctgcagaacact

SEQ ID NO: 83126 - DNA, 577 bp, Homo sapiens
tggagagcaaggttgtgtgtgtgtgtgtgtgtgtgtgtgtgtgtgtgtgtgtgtgtttaatgacactttcccttcctgagaggcatcttttaaatccagtctcttgatttgtgccaaatagaaacccaaaaaagacctttaatcctttgtccattggatgtgatgactttatatgtaagtgtagcttcagtttattttggaatagtgaccttttttttaatatactgttttatgagaggaaataaactccttccagaattttctcacttaaaataacttcacatcttaattacgaataggataaatatctattgtgaactacatgagaaagctgacccaactcgaataacctctacctggtatcctttctgcaacaatccaaataagttaaaagagtttttgtttagataagctgtaaaaatgataaatctatctttggtcctcagttgaaactaccaccactcatttgattgtgattctcattcttagccaaagaatatcaaaaccaaatgtgaagcttttcatacttacagatgcctgggcccccatccctggtggttttgggtctggcatagtc

SEQ ID NO: 83127 - DNA, 887 bp, Homo sapiens
ttgtacttttagtagagacggggtttctccatgttggtcaggctggtcttgaactcccgacgtcaggtgatccacccgcctcgacctcccaaagtgctgggattacaggcgtgacacccccgcctggcccatagcaaagctttattcacttaacgagtcatggccaacagcgtctggttagctcacagaggccacagttttatctgtggagtctggtaaccacgccactcacgaccctgtacattgattagatgcagcaggtcatctcaaacacacagctctctccaacaccccttagaatacaacacttgggtggtgattttacttaacattctggtacttcatcccaaaaagacatcggtagagattagtgtaactcaacaacaggcagaaaacatacaagaaagtttaagacggatgtctagcagtgcctgaactgttaagaagcaaacgtgagtaaatgccttagtttcaatagaaaaagaaagttcacagtgggacctcagaagcagaggctgtgagatcacctttcaagaattggaggagaattgcagtaagtgatagagccggacgctgagctgcagcagcctctgggaattggcggggctgtggcttgtcctgtcctgccgccccccgcgtggcctcggaaactgtcagatggtgcctaaggcagagtcgggcaaagaaagaaccagcgttcgtttcctcctggactctctaggtccatggagctggtgggggaacggccctgtcttgcccgaggaggaaattcgagtcgagcccccactcctctccccgcgggactgataaacatgtccctcattcgccccgggaggctggcacccaggcacgacgcgaggacggccagactcgccgacggcggccgc

SEQ ID NO: 83128 - DNA, 579 bp, Homo sapiens
aggaactggggggaagaggctgcagggctccgggcctttaggatgtttagattccattgtatcttagcctcgttttaacctaccttgtatcattctgtctcatcaatcataatttaaatatttgttttctctacatctctttgatcttttctgtaaattgtggtctttgacagaattttatgtgaaaagaatgctgacagtggcattcgaattttttaaaaaattctctctgattaacacatttctcttttgtggctgaaccactcatcataggaggattgttcactggtcctttgctttcaacagctcttaagatcatttgtggattgtgtaactggagaattgtgtttgggagggtttcggcttcctggccacaaggcatcttctctcccatcttgcagtaagttgaccgtctttgcgctggacgatctgcaggcctggtggtctgagaggtaccttgctctcttagttatagtgcctctttctgcgtgtgtcacgagaaagtgttcagaagaaccaatgtattttcccaagaaaaagaaatcaggaacctggtgtattttgcctgatgctttaggt

SEQ ID NO: 83129 - DNA, 362 bp, Homo sapiens
caagtcacggggagcatgttaaatgtcaaagaaactatgtaaactggtagatgttaattaactctgccagacaaaacagttgcaggattggataaatgaggaaatccatcatctaagaagttatatgcaagaacggaagggatgagaagtcattctcatacacaaaacttctcaattctcctgtgtctggatgaaggccatagacattttatgaatttaaagtgggagcaccaaaaatgtcattggagtgcttatttcttcaagcttggtgtgttataaatgtcatctagggacgatgccataccagtaggaagatatcatttacagcgtgttctagacactgaaaccatttcagtcacaga

SEQ ID NO: 83130 - DNA, 399 bp, Homo sapiens
ttatttttttgaactaggggcttgctttgttgcctaggctggtctccaactcttccgttcaagtgatcctcccacttcagcttcctgagtaactgggattataggagaacgtgcccagttaaggaccagctctttgaatagcaaaggacaagcttatcatagttgtgatttagaatttaaaacctcagataaactatggttataggtaatatatttatactaactttaaaaaatatcaaattttattattattattttttggatttaaaaaatgtttctggccaggcgtggtggctctcacctgtaatcccagcagttctggggaggccaaggtgggaggatcgcttcagtccaggagttcaacatcagcctgggcaacatagcaggactgtgtgtcta

SEQ ID NO: 83131 - DNA, 332 bp, Homo sapiens
  misc_feature (26)..(26): n is a, c, g, or t
  misc_feature (211)..(211): n is a, c, g, or t
  misc_feature (247)..(247): n is a, c, g, or t
aatctgaaatccaaaatatctgtttnattctgctgttatccatcatttatcaattcaaaaatgtttaacaaaaaaaagtagggctcttctcttccccactgtcaaaacaatgtgaatcaaaatggctaaaagaaactcctagtgttccctattgacacaaacacacacttaaggctcttataatacattctgcccagatcccaagattttngagcttcctttagctacctcctagcaacagctactngatcacttctttaaaacctcagcttttctaacgagcctctaaaatgactttcagcctcctcagaaaaacacaggtttctcaattc

SEQ ID NO: 83132 - DNA, 941 bp, Homo sapiens
cccctgcccgctgcacaccagctgtgccatttgggaggaatgggttccatactcggtgttggcattcttcacagcgccaagcactgagcgagttgggtctggaacttacatggaattttctgtaattggtacagaatttaaatgagaggcttccccaacaagggcatggctggtggtttcaggggctacccagataccaaggaggggaaaggccatttagagtgacagatgtggtgggggtggggcttctggtgaccttggttggggctgtgcttgagtgagaagagaggatgctgctgcttccagagggagctgttgtaggtgatggcagctttgaggatatgggaggagtggggagaggaagagggaacgaccaggtaagagggattttgatttaaacgatgggggaaaaggaagtatatttatgtagacgcatggctagatttgatcatttcttgaattagttttctctagtttcttctgctcatcagctttctctttaactcagcatctctctgaatgggcttattactcttctctcatctctagtactcccctgaaagaaaaaaattccagacaccctcctgcctctctttctgtttcttccctgttcttttctgctgtctcttgtatcttagtgctttgcacagtacctgccatatgttaggtgctcaaggcatatttgttatatgagcatgatatggtagggtcttaggggcggatccctcatgaatgggcttggtgccattcgtaatggggatcggagcttcctgggtccttagatatggggaagatcctggattgtcaacaaaagaagtctgggcatcctattcagtgccctcccttcttccctggcctattactactctcttctcacctcttatctctctctctatctcatcaattcctggcctgtgaacctttgaatataccaggttccc

SEQ ID NO: 83133 - DNA, 191 bp, Homo sapiens
ttttcctgattgtctttgtaataaaaactgagaggatattcgtcatccctggctgagctgcactgaattctactcttttatacatgtaataaaacagcaaacaacatcaaaatacattattaattaggcatgaatttcttaaaatggtttacatcatctcatttaacttcagagcttgcagacattaacag

SEQ ID NO: 83134 - DNA, 672 bp, Homo sapiens
gggggttgtgaatagagcctgaggcctacagatgtgtgtgtgtgaagttaccaggtgtggttctgcagctggggcatctgcagtgtggggcaggcccagcctgtctggaagcctgggcttctcctatccaccccaggccctgcccctgcagggccacacaggacgtgctactttgggtgtttaacctgtggatggcatcaggtgacgtgggaatttacaactgtcctgttggggtcaagcaaggccatagatgccaggaaccgtgctagggtctcaagaccaggggtggttttctcttcaaaaagacaagacagcactaccattgttcccgttagagcaaggccgcctgcagagggagaggagggaaggggtttggagtggacacctggggttcagatcctgcctgggcagctccctggccagtgtgcctgtgcctgccacctcaccctcagactcagcgtctggcactggagcccacaggctgtcagtgagtttcctgttgctgccgtagtcaccaccacacacagcacacagctagtgtcttatagctctggaggtcagaggtcctcaaagatgtcagcagggctgtgttcctcctggtggcccctcggccctgtcttcccatctccagcctctgcttttgttgtcaccgcccctcctctgtccctcaca

SEQ ID NO: 83135 - DNA, 346 bp, Homo sapiens
aggctaagtgggtcagagaggctaagtgggagaggagggaaggggtttggagtggacacctggggttcagatcctgcctgggcagctccctggccagtgtgcctgtgcctgccacctcaccctcagactcagcgtctggcactggagcccacaggctgtcagtgagtttcctgttgctgccgtagtcaccaccacacacagcacacagctagtgtcttatagctctggaggtcagaggtcctcaaagatgtcagcagggctgtgttcctcctggtggcccctcggccctgtcttcccatctccagcctctgcttttgttgtcaccgcccctcctctgtccctcaca

SEQ ID NO: 83136 - DNA, 280 bp, Homo sapiens
ttatattctatttactctctaagaagacaggatctgtgtctgattcctttgtttactacagagctgagcacatggtatttaatacattatagattatgaaagttccataactatttatcaaatagatgcatgtactcatatacatcagatcgattaagaaaacacactattactgctctaatcctattgctgtgattgtctattgtttttatacttctgggttaactattgaataaaagggtaagcattcatattgatttgactccctctttcttacggg

SEQ ID NO: 83137 - DNA, 367 bp, Homo sapiens
tgtggaggccagctgtttcagtaggcagtagagaatgaaaaccttatgggagtgaattgaagagaaaattggaggctaggaagtagaggctgtgagcagtttagcaatttagatttatgaggagagtgggaggaaggtgaaatcccagtcacaggtaacagcagcctgctgcccctttaggttatataattcatggaccaggaagtgtgtttgtcacagctttttgaagtatgtgccccaggataaatttttttaaagtgaggctgggcgcggtggctcacacctgtggtccccgctgttggggaggctgaggaaggcagatcactcgaaccaggtcaggagttctaaaccagtgtggccaacgtgg

SEQ ID NO: 83138 - DNA, 736 bp, Homo sapiens
acactctacccaagtcccaaaagcaggttcacataactcctgtcttcattatctgatatccggcttgcttacattctctcgctcccgcagcttccactatagcagtgtttcttcaccctggcagcagcagttcctccctgcggttgcaactaaatccaggttgcagtttttccaacatttactataccagccttaccagcctcatcaccactcacaccagcaccctcttctccaagacatttgaagttctacaatgaacccgtcggagatgcaaagaaaagggcctccacggagtctgcaggtgtacccaacagctccgaagagacagcgaccatcaagaacaggccaagatgacgatggcagttttgtcgaaaagagaagggggaaatgtggggaaaagcaagagagatcagattgttactgtgtctgtgtagaaagaagtagacataggagactccattttcttatgtactaggagaaattcttctgccttgagattctgttaatctatgaccttacctccaaccccgtgctctctgaaacatgtgctgtgtcaactcagagttgaatggattaagggcagtgcaagatgtgctttgttaaacagatgcttgaaggcagcatgctccttaagagtcatcaccaggactttcttataagctaattaacaaatttgtacatggttaacaattgtttacattaaattctattggtaaagtaactgatgtgattttgt

SEQ ID NO: 83139 - DNA, 1062 bp, Homo sapiens
aacttggttgctagttccttgagaactgaaaccatcaattgcacttcttggtatcctccacaataaggtatctaggtactcaaatatttgttggttgattaaaaacataaaccacaagacataattaactctttttaaaattgtggtaaaaaaacatgtatttaccatcttaatcatttttaagtatactgtatattagtgtttactatatgcacattgttgtgcaacacatctctaggactttttcatccagaattctttttttttgagacagagtcttgctgtgtcgcccaagctggagttcagtggcaccatcctggctcactgcaactgctgcctcccaggttcaagtgattctcctgcctcagcctcccgagtagctgggattacatgtgcctgccaccacgcctggcaagtttttgtatttttagtagaaatggtgttttaccatgttggccaagactggcctagaactccagacctcaagtgatccacccgcctcagcagcccaaagtggtgggattacaggcatgagcaactgtgcctggcctagccattttctataaacctgaaaatagatgccagaaaagaaggtgccgctataaaatgctttcttgagtgatttatgtctaacatacaattaaacatttatgagaaggaaattatcaggttaaaatataaactcacttgccaattatttgattttcaggatatctgacttttgttaattactgaaaataaagtattatttctaatcacaaaaaaaaaaaaaaaaaaaaaaaaaaaaaaaaaaaaaaaaaaaaaaaaaaaaaaaaaaaaaaagaaaaaaaaaaaaaaaaaaaagaaaaaaaaaaagaaaacacagacaaacagacgaacagaacaaaaaacagaaaagaataagaacgaaaagatagcaacaaacaacaaagaaaataaacgacaagagaacactaaagaacgtaagagctatgacacacaagagtagagacacgagtgaagtgagacaaatgacaacagagcatcaaagagatacgagacgaggaaaatcaataaaaagaa

SEQ ID NO: 83140 - DNA, 396 bp, Homo sapiens
cacaccaccaagtgtgaggccgactccagcgtcccacccccagggctccccctcgcagccccagatgaccctgtcattcctggcagtggctggggcacctgtgttgcgacgaggagttcccagacccctgaggctgtctgtggcctgcagagcccccagggcgccgaggtctgacctgcagcgcctgaggtctgactgtctctgcctgcagcatgccggcccctctcctgcagcccctgcccctcacctgcctgggacctgccccgcctccgcatgcatgtggatagacccccacgggccgtggccaacgcttgtccctggggccacacagggacactggaggtcacagttatttattgatcacaattgtggacattaaaacagaaactgttcaca

SEQ ID NO: 83141 - DNA, 241 bp, Homo sapiens
agctgagattgcagcgctgcgctccagcctgggtgacagaatgagaccctgtctcaaaaaagtaaagttggaattttgtttgtgaacacgcgtgtcagaaagatttcagtttgtgaatgatcgtgaagtggtggaagggagggtcctctgatgtggaaggacagttgtgacaccaaatgtggatggatggagcctgtaacaatggtgtgagctgaggcagccaggagattcttgagagggt

SEQ ID NO: 83142 - DNA, 112 bp, Homo sapiens
ggcgagtccgcagtgcaaagtaaaagcaagtttgttgagaaagtaaagttgtgaaacagctaccccatagacagtaggacgttcctgaaagtaagaggaacgtatgcaccct

SEQ ID NO: 83143 - DNA, 246 bp, Homo sapiens
  misc_feature (27)..(27): n is a, c, g, or t
  misc_feature (29)..(29): n is a, c, g, or t
  misc_feature (31)..(31): n is a, c, g, or t
agttctgaaaggaaaccagagagcacnangngtctagtttttagctgtatgtaggttttatatgtgtgtaatgttcagacctgtgtttcataaaatcattaatttaactcgagatggatttttgtaggaaagtagaaagataattaaggaggaagcaaatcttttcatgagaaagtgtaggataggtttcacagcgttgtcctgagaaggagaattgcttgatattggaatagattgcggtgtttg

SEQ ID NO: 83144 - DNA, 2303 bp, Homo sapiens
caccagtctttgttgagtcccttcattggtgctgaaaccaggctcttgggaaccttattggcagtgtttaattcttttgtaatttatgtctgtttgaaatctgtctgtccagcttgggttacttgaagatgctttgaatctggaatggctcttactgcatatcatggggcagctttgagtacctggtagtctcagaattttggtaagttccgagactgctgttggtatactgaggaagatctgtattcactgattacacaagccaggagcgacaacgaggattaacgtggttacctagtatgcatgcctttctggtgtattgattttccagaatatttctcaaatttcatatacctatgagccttattcttgggataaattgatttatactgctagactccttgcaattgaaacagtaccacttctgagcactcaccctgagcacagataaccatagctggagtaacctggattagtaaggacacgttttctttcatctgtacacctttgaattagtaaaccaaagattaaaacactaattttaaaaaactttttagctttttaatgggctaggtgtatgaaattgtatgaaacaaagtaagtttataattgtttcccaggttttgttgagggagtggcttgcttataactcttaggagaagtaaatcctttgtgttccctcaagtcacagcccttggatacagcatccagggcctttctgatatgcacacctctcttggtgcctcagtcacctttcttttccttggtgccaaatatgtgcccagttgaggaatttcgtacagtcacatgcctcatgctatcattttggttaaggatggactgcatgtatgatagtggtcccataagatcatagtgtcatatttatactgtaccttttctgtgtttagatacacaaacactttgtgttacaattgtctacagtattcggtacagtacgtgctgtacagttttgtagcctgggaacaataggatgttgcatacagtctaggtttgtggcaggctataccttctaagtttgcctgggcacactgcaatgttcccacagtggtaaaatttcctaatggcacatttcaacatgtatttccacacattcctcagaatgtatcgctgttgttaagcaacacatgactgaacttgcagttccctacccgaaacacacgtgtaacttacatagccacatccctgatttccttcagggtctgttcacatgttatcagtgagtccttttgccaaagtattatgaatagtccccacccccacttttccctaatgtgctccctgttctgtgtcttccccgtactatctgtccccatccaatatactctaaatagttcatgtttcttattttttaagtttctctctcccccggaaggtaggtgtgttgttttcatttactgtagaataatgccttgaattaataggtgctaaatatttgttgaacgattaaatacaacatacaatttagtaagtttacaactactgcatatttatggaaagaaatatattgattctttctcattatgggcagcagtgaataaagtaagctaatcctgggcttgggtatttgtgtcactcatatttgctatgagtggttgatttaaagtgctgatttcatttgcatttcatagcttcatctaattttaattaaaattggaggggcaattatatagtgattaaatgcaaatgttttataatttccaaatttatctgattaacctaaagaactaaaaccaaggtatgttttaagggaattaatgtgttttccaaatcatgttgtggccattgctgtggactggcagtatctattcaccatacataatgactggaaggcggctgtggacaccctgttcctcttggcagcacaggaatggaagtgggtcccagtcctgatgattaacactgaaaagggagactgctggtagcttctggaaaaaatttcctcaagcctaagaaagaagcagagcaagagatgctccttttgcttctggacatcgccttgtctgaaaaagaagcttgcagctggggagctctgattgccagcctgagggtgaagcttgacctgcgatgcagtcagccgcctccgcacttcttgtttagttagatgataaatttccttcctacccaaccattataagctggcagtttggtaactgcagccccaggaacatcgaaaccgacacatctcatgtcataacctaattttgaatatttatttcattgctacttcattgccacttgtacctcataataaatccatttttgaaaaccttaaaaaaaaaaag

SEQ ID NO: 83145 - DNA, 2249 bp, Homo sapiens
caccagtctttgttgagtcccttcattggtgctgaaaccaggctcttgggaaccttattggcagtgtttaattcttttgtaatttatgtctgtttgaaatctgtctgtccagcttgggttacttgaagatgctttgaatctggaatggctcttactgcatatcatggggcagctttgagtacctggtagtctcagaattttggtaagttccgagactgctgttggtatactgaggaagatctgtattcactgattacacaagccaggagcgacaacgaggattaacgtggttacctagtatgcatgcctttctggtgtattgattttccagaatatttctcaaatttcatatacctatgagccttattcttgggataaattgatttatactgctagactccttgcaattgaaacagtaccacttctgagcactcaccctgagcacagataaccatagctggagtaacctggattagtaaggacacgttttctttcatctgtacacctttgaattagtaaaccaaagattaaaacactaattttaaaaaactttttagctttttaatgggctaggtgtatgaaattgtatgaaacaaagtaagtttataattgtttcccaggttttgttgagggagtggcttgcttataactcttaggagaagtaaatcctttgtgttccctcaagtcacagcccttggatacagcatccagggcctttctgatatgcacacctctcttggtgcctcagtcacctttcttttccttggtgccaaatatgtgcccagttgaggaatttcgtacagtcacatgcctcatgctatcattttggttaaggatggactgcatgtatgatagtggtcccataagatcatagtgtcatatttatactgtaccttttctgtgtttagatacacaaacactttgtgttacaattgtctacagtattcggtacagtacgtgctgtacagttttgtagcctgggaacaataggatgttgcatacagtctaggtttgtggcaggctataccttctaagtttgcctgggcacactgcaatgttcccacagtggtatcgctgttgttaagcaacacatgactgaacttgcagttccctacccgaaacacacgtgtaacttacatagccacatccctgatttccttcagggtctgttcacatgttatcagtgagtccttttgccaaagtattatgaatagtccccacccccacttttccctaatgtgctccctgttctgtgtcttccccgtactatctgtccccatccaatatactctaaatagttcatgtttcttattttttaagtttctctctcccccggaaggtaggtgtgttgttttcatttactgtagaataatgccttgaattaataggtgctaaatatttgttgaacgattaaatacaacatacaatttagtaagtttacaactactgcatatttatggaaagaaatatattgattctttctcattatgggcagcagtgaataaagtaagctaatcctgggcttgggtatttgtgtcactcatatttgctatgagtggttgatttaaagtgctgatttcatttgcatttcatagcttcatctaattttaattaaaattggaggggcaattatatagtgattaaatgcaaatgttttataatttccaaatttatctgattaacctaaagaactaaaaccaaggtatgttttaagggaattaatgtgttttccaaatcatgttgtggccattgctgtggactggcagtatctattcaccatacataatgactggaaggcggctgtggacaccctgttcctcttggcagcacaggaatggaagtgggtcccagtcctgatgattaacactgaaaagggagactgctggtagcttctggaaaaaatttcctcaagcctaagaaagaagcagagcaagagatgctccttttgcttctggacatcgccttgtctgaaaaagaagcttgcagctggggagctctgattgccagcctgagggtgaagcttgacctgcgatgcagtcagccgcctccgcacttcttgtttagttagatgataaatttccttcctacccaaccattataagctggcagtttggtaactgcagccccaggaacatcgaaaccgacacatctcatgtcataacctaattttgaatatttatttcattgctacttcattgccacttgtacctcataataaatccatttttgaaaaccttaaaaaaaaaaag

SEQ ID NO: 83146 - DNA, 483 bp, Homo sapiens
ttccttataatttatttgctgaagaagtcagttcttttgtctggattttgctgattttatcttggttttcttgcttatcttacataaaaactgaaagctctatcttaaccaactaggttcttagccttggccagacattacactcacctgggaagcttgtaaaatcctgacatgtgtggaaagcagcttgtcacttcctcaataagttaaacatagaattaccatatgacccagcaatttcactccaaaagaatggaaacaggttcagacacagtcttgtattcgtatgttcacagcagcactattttcaatagccaaaagatggaaacaacccaaatatccttcagctgaggaaagggtcaacaatatgtggtatttccacgcaatggaatattattcatccttagaagtcacaaagtactcatgcgtgtttacaacctggatgaaccttgaaaacactgcggtaaatgaaagaagcctgac

SEQ ID NO: 83147 - DNA, 1039 bp, Homo sapiens
ctctctgccccttaataaatgtttttggtactgactactgctgctcctgctaataccatcctgtagaaatttttcttgagtgaggaatagtttttagaaggcttttatgatgataacttttaaatttatttttaactatgccagcaggttattagatatataggttcaaaggagattgaggctggagtctgttcaaacattttcagaggtgaagatgacacagggttcatggagatttccttcatggtaccagaacagggcagggtttcactgcatgataatacccatgtttccattgcttgtagacctaatcatttttacttattgattggcactgtgggccaagatcgtgacatccatcctaataagcaggtctcatcaaaagccttagaatggagaaaattttaataatgctttattagttggttaagtaagccctgatgtttggctttctagtgaccggtcattgccctgcagactctgtaatgggacagtttggctgggtgtagggggtcatgccaggctgaggtgggaggattactgtaggccaggagttttgagactagcctaggcaacatagaccgccccccatccctataaatatttaacaattagctgagcataatggtgtgtgtgcttgtagtcttagctgctgaggaggctgaggtgagaggatcacttcagctcaagagcttgaggttacagtgagctatatgattgcaccagtgaactccagcctgggcaacacagtgagaccctgtctcaaaacaaaaacaaaaacaaaaacaggtagggagagacaaggagaagggtagtactgacatggcctgtctttactttcccctctcagccctggaactctccacagggaaaggttttttgttccttcttcttgtctaataaatggcttgacttgaggggtatcttggaggcattctcaacccaaccctgaaggtttatcagcactttcctggtggacagcacctcagcctctgccctggctcctttcatcctcatcccctagagccaggatcccagc

SEQ ID NO: 83148 - DNA, 454 bp, Homo sapiens
ttgatagtaaaagaatcaaaatagactattcagcattgctgctcctaactcaggtaaaacaggagaaatgttgctgtgtgtgtattaaactcaaaaaaacaacatgaaatctgagatggcatgagagatgaaaggcaacatgcttaagtggtctttaagataagacaaagaaaagacttcagctactactcaatagcaaacccatcaggctgcttctgaaagacaggagtcccaagtattatatgaaattaccatgaaaaaagtaactcctaaataagacattgtatacttaaatatatttgtgaaaaatgcaactgtttttcccttctaacaaactggggaaaaaatactttcatcaaattttccctgaatgagccaggagcagtggctcatacctgtaatcccagcactttgggaggctgaggcaggcagatcacctgaggtcacgagttgg

SEQ ID NO: 83149 - DNA, 405 bp, Homo sapiens
caaaaaaaaaaaattttttttttcttcaaacaaccctgctaagaggatgaagaccagctaccaactaagtgaaaatatttgcaagccacatatgtagcaaaggagtcagatcaaggttataggaagaaactcaatattaaagaaataatccagttagaaaataggcaaaagatatgtagagacatttcacctaaggggatattcagatgactaatgagcacctgaaacgatgtccagtatcactagccattaaggaaatgcaaatgaagaccacaatagtataccagtatacatctattagaacagctgaaataaaaaatagtggcaatagtaaatacggctgaggctgtgaagaaactgtatttctcccatatttgtttgaaatgtgaattggtacagtcgttc

SEQ ID NO: 83150 - DNA, 783 bp, Homo sapiens
tggctcatacctgtaatcccagctagtcgggaggctggggcaggaaaatcatctgagcctgggaggtggaggttgcagtgaaccgagatcgcgccattgcactccagcctgggcaacaagagcaaaactccatctcaaaaaaaaaaagataagaaagaaaatattctgattgctttcagccacaagaaaaactaatgttataaattaatatgtctcatgcagtataatcatcggaactcttgactttatgtcaacttgcctcagcgtggcctgctcaaggcagaagcatgcagtcaaggagagggtgattgtctgcttctctttttcctctgggagcctctcctccacagcccgcactttctgggacttctgaccctccaggcttggagtttctctgaacatgttaaatgatttgagctgatgcttctctcctggttactccgatgggctggccaggaagctgtctgactgctcctcttcacttggagttgggggatggactctgctttggtttgtcattcatcacccttggcaaccttagcatggggtggccgtctccacacggactgtctctctgttgtgtcccatcgtactctcaggcagtcctcttgggcaagatctctttttctcttttttaaagacagggtcttgctatgttgcctaagttggagtgcagtggctattcataggcgtgatcatagctcgctgcagcctccaactcctgggctcaagtaatcctcccgcctcagcctcccaagtagctgggactatagtcacacccca

SEQ ID NO: 83151 - DNA, 233 bp, Homo sapiens
cagaatcagcccaaatgcccatcaatcaactgtgcataaagaaactgtgatatatatatatcatagaagttcaaacagaaaaaatacaaaaaacttagcagaggattgtatcctttgccgtttattttgatgaccatgccatcttctaatccccagaaaaaaactggaaaacagaataaatataattttctgattattcttatgtaacataaatggaatatatatatatatat

SEQ ID NO: 83152 - DNA, 342 bp, Homo sapiens
atttatgaggatcagatgaagacacacttgaaaagctcccagcacagtagctggagtgtgtcaagcttttcgtattttctctcctcaactgtgctttcttaagaaagctgcaaaatagtctgggcacagtggctgacacctgtaatcctggcactttgggaggctgaggtgggagaacagcttaaagccaggagttcaagaccagcctgggcaacaaagcgagaccctgtctgtaccagaaaacaaaaataaaattagttgggcatggtggtacatgcctgcagtcccagctactcggaaggctgtggtgagctgtgatggcaccactgtaatccagcctgg

SEQ ID NO: 83153 - DNA, 521 bp, Homo sapiens
tttgcctggcatctccactttgcctggcaccttctgctcctccaagatccagctccaatggcccctcccctggaaaccctttcccgaccacgccaaactcaaaaaagtctctcctgggctcccaccgtctccgcacacccatgcccatcaacgtccatcctcccatctgacccgggctccttgagggcacggcccaggcctgactcatcttggtcaccagcatcgcccagcacgaggcttggcacaccagaagcctcaggaaatgtttgtctaactaataggtgggagagtgtgtgagtgagtggctagacgagggaatccgtgagtgagagaattgagggcaggaagggcagaacggatgaaggaacaggaaggcaggagcagacgagaatcaggcttagggtgggaggaacggatggatgaataacagatccagtatcccggtctcagtttctccaagaaagcaagatgggttcgccgggactgagctcctcccccctccgcctcaagcctcactaagc

SEQ ID NO: 83154 - DNA, 382 bp, Homo sapiens
gccttgctgatcacatttaataatatccttagcatttaaatgcaaatctaaaaatttaaaagtgtttacactctttgcatttgcaaaatatctgaattaagtaaatttcattaagacgtgtcttactatattatctaattattcgggtcacttatttattagtgtatagcattacttaatgttgtctttctcagtggtgacatagtatggtaataacaatcatcaaacatctttagttgacaagaatttgaaatggatagtggggccaggcgcagtggctcatgctgtaatcccagcaataagtgaggcctagatgagcaaatcactggagcccagaagttcgagaccagcctgagcaacatgacgaaaccccgtctctaca

SEQ ID NO: 83155 - DNA, 330 bp, Homo sapiens
aggcaaaagaagtaaaatagctatcctatgctcaaagaaagagaatatttatctcttctcacaaatgttaattcacactgattcactctcctggaaatgaagaagaatggatagaaaaagtaccgataaattggctgtattttgttttacacacacaccatattatacacctctgtagttgctttcctgtcatctctcctaagggggtgaattctttagtaagaatgtcttcttactaaaattggccataagtgtttgtaaaaaatatatttttgatccagaataaattgatttcagcatccagtggtatcctacacattatatatactt

SEQ ID NO: 83156 - DNA, 570 bp, Homo sapiens
atcagacagagaaacttataagtatgttaatatttgtcaaattgcaattaaagtactggtcttcatcacttagaagcaaaattatcttctgaagaagttgattcagaaggagtgaattttaactagctagaaacaatgtattattatgtatcagcacctggaaataataatgtttttcataggcctccccattactggaaactaaacaatgatgaataatttgaattaaatatttagagaggctaatttttacttaataggaataaccagaggagtcaacaattttttttttttttgatggagtttcattcttgttgccaaggctggagtacaatggcgtgatcttggctcaccacaacctctgcctcctgggttcaagcgattctcctgcctcagcctcccgagtagctgggattacaggcatgcaccaccacgccaggctaattttttgtatttttagtagcgatggggtttctccatgttagtcaggctgatcttggaactcccgaccttaggtgatctgcctgccttggcctccctaagtgctgggattacaggcgtgagccacca

SEQ ID NO: 83157 - DNA, 539 bp, Homo sapiens
aatgatgagcctaaaataaccaggttacaaggaagtactacgcctttagaaccattctgtatccattgatggaaggacaactttcttgggcactaaaacttctcaaccagaagatctcagttacaggggcaggaaacaaagctttcacaagtagctcattggacataaccataagagacatcatcttcatggtggctttgtattctgtgtattgaggctgtaacaatgtcagtcaagatgtgagtagccagagagagaagaccaggaatagctgtcctcttactgaatggtgcttaactgaggttgatatatcatatattacactcaccaaagtcatgcttagactgcctcctgaaaaaagctgaaccaatttctaagatgacaggctttaggcataaattatctttcctatacgtgttcaaaagggagaattttttaggagcaaaacacgtaaaactttttttggtaaaaacaacttggtttcagcactactatacatttcatcatttcccctggctcatccattaaatctccctatg

SEQ ID NO: 83158 - DNA, 394 bp, Homo sapiens
gctcttaagatttaacctgaaagactgattcaggccacaaagggaagtgggggtcagacatgccttattatacctctctggcattaacatcaacacagattttaagtctaataagaaacattttacagcctgttctctctgaaacctgttagccaaagcttcatctgcatgataaaactttggtctctacaacctcttgcatcccaaacattcctttctattgatcccaggtctttagacaaactcaaccaattgtcaaccagaaaatgtttagatttacctgtaggctggaagcccatgctttgagttatcccacctttctggactttctggttctacaaatcactgcacctggcctcattttcttatttaatttgaccttttgacttgaact

SEQ ID NO: 83159 - DNA, 362 bp, Homo sapiens
catgtcatagtggcctgctctcctaacacagcacaatttagggcatattttcatgatggtctatcactggattacaacacatctcttcattaaagtcttgggaaagaggcttcaacttttctgtgttgagaaaacttcacaggtgtgtaaagtttgatcagtatgtataatatatttgattacatatattttatttttatttttcatttttttgcatacatagcaggtgtatatacttatgggttatatgagatattttgataaaggcatgcaatgtgtaataatcacatcagggtaaatgcagtatctatccatcaccccaagcatttatcctttgtgttacatacagtccaattacactc

SEQ ID NO: 83160 - DNA, 758 bp, Homo sapiens
ggtagatggtgtcagaattaaattggaggacacccagctggtgcatggtgtgtgggcacagaagtcttctgtgttgaccgttcgggtgtgagagcagaggataggcagggtttcagagattttatgaaataggtgggaataacactttctgagacttggtttccccatctgtaaaaaaggaagtagtaatagtacccacttgggagagttctgtgaggactcaaatgacacgaggactcaaaaagctgggtacggtgtctggcccatcgtaaaggctgagtaattgacaggtgcatttatccctgtggttcctcactgagcccgtgataaatgggcctgtggcaggacatgagtgagctgcaggaacaggagccaggcctcccaccttgccggcttggaagaccgtctggctgcagcagagacattcttcccagaaagaaggggctttccatggtgaaccactgtggccaggcccagaggcctttacaatgccaatgtcccaagaagagaggggccatcagaaggatggaaattttctatgtgcttccagaaatcaacctacagattgatcccttctcaaaagactaatttttattctagtcatgcccagctataagcatttgggcatttacagataatctttgttcctgaagggcatccgagtatgtccttcctccttttaatgcccatgacccttactatcctggaacagagtccacattgcagaaaggacaaggctcaccacgttcagggcccca

SEQ ID NO: 83161 - DNA, 392 bp, Homo sapiens
ggtagatggtgtcagaattaaattggaggacacccagctggtgcatggtgtgtgggcacagaagtcttctgtgttgaccgttcgggtgtgagagcagaggataggcagggtttcagagattttatgaaataggtgggaataacactttctgagacttggtttccccatctgtaaaaaaggaagtagtaatagtacccacttgggagagttctgtgaggactcaaatgacacgaggactcaaaaagctgggtacggtgtctggcccatcgtaaaggctgagtaattgacaggtgcatttatccctgtggttcctcactgagcccgtgataaattcgcgtagacagcattctgaagttggtctgggtcagatgcggccgtttatcctcaagagt

SEQ ID NO: 83162 - DNA, 174 bp, Homo sapiens
tgagtctagaatacacattactggcattttgtgtgtagaattaatgtttatggaatgaataagtgcatggataacagttgatcccacaggaacgaatgaggaggtgcttcattcagtagtagtctacaagacttgtcaggaactttgcaatgttgaaggtctgccaaggaggag

SEQ ID NO: 83163 - DNA, 3411 bp, Homo sapiens
tccaaatcatagctcacccatttattgttcttgtgtgagtccttgggcaaaatcattaatatctctgagaatccctccactcactgatcaatctggaataataatgtttccctgtggtgggtgctgtgaatatttacacaaagtaaaagcatggatttacataaagtgtcctgcaaagggcccagcacacagtaagtgattaataaatgctagttcccttcctttctcctgtcctgtttctcctcaaggctccatgcactggtccactggtctctcctcatgtcccctcctggtgccaggacactctgccagccactccttttccctgcctgctggagggccaggtgctcccgccttccaccctccgccctcctccctcccctgggccctgctccctgccctcctgggcagccagggcagccaggacggcaccaagggagctgccccatggacagggccccacagagacagcaccgagcctcacgggagctgctggctgcaaagaagacccacacctcacaaattgaagtgatcccttgcaaaatctgtggggacaagtcgtctgggatccactacggggttatcacctgtgaggggtgcaagggcttcttccgccggagccagcgctgtaacgcggcctactcctgcacccgtcagcagaactgccccatcgaccgcaccagccgaaaccgatgccagcactgccgcctgcagaaatgcctggcgctgggcatgtcccgagatgctgtcaagttcggccgcatgtccaagaagcagagggacagcctgcatgcagaagtgcagaaacagctgcagcagcggcaacagcagcaacaggaaccagtggtcaagacccctccagcaggggcccaaggagcagataccctcacctacaccttggggctcccagacgggcagctgcccctgggctcctcgcctgacctgcctgaggcttctgcctgtccccctggcctcctgaaagcctcaggctctgggccctcatattccaacaacttggccaaggcagggctcaatggggcctcatgccaccttgaatacagccctgagcggggcaaggctgagggcagagagagcttctatagcacaggcagccagctgacccctgaccgatgtggacttcgttttgaggaacacaggcatcctgggcttggggaactgggacagggcccagacagctacggcagccccagtttccgcagcacaccggaggcaccctatgcctccctgacagagatagagcacctggtgcagagcgtctgcaagtcctacagggagacatgccagctgcggctggaggacctgctgcggcagcgctccaacatcttctcccgggaggaagtgactggctaccagaggaagtccatgtgggagatgtgggaacggtgtgcccaccacctcaccgaggccattcagtacgtggtggagttcgccaagaggctctcaggctttatggagctctgccagaatgaccagattgtgcttctcaaagcaggagcaatggaagtggtgctggttaggatgtgccgggcctacaatgctgacaaccgcacggtcttttttgaaggcaaatacggtggcatggagctgttccgagccttgggctgcagcgagctcatcagctccatctttgacttctcccactccctaagtgccttgcacttttccgaggatgagattgccctctacacagcccttgttctcatcaatgcccatcggccagggctccaagagaaaaggaaagtagaacagctgcagtacaatctggagctggcctttcatcatcatctctgcaagactcatcgccaaagcatcctggcaaagctgccacccaaggggaagcttcggagcctgtgtagccagcatgtggaaaggctgcagatcttccagcacctccaccccatcgtggtccaagccgctttccctccactctacaaggagctcttcagcactgaaaccgagtcacctgtggggctgtccaagtgacctggaagagggactccttgcctctccctatggcctgctggcccacctccctggaccccgttccaccctcacccttttcctttcccatgaaccctggagggtggtccccaccagctctttggaagtgagcagatgctgcggctggctttctgtcagcaggccggcctggcagtgggacaatcgccagagggtggggctggcagaacaccatctccagcctcagctttgacctgtctcatttcccatattccttcacacccagcttctggaaggcatggggtggctgggatttaaggacttctgggggaccaagacatcctcaagaaaacaggggcatccagggctccctggatgaatagaatgcaattcattcagaagctcagaagctaagaataagcctttgaaatacctcattgcatttccctttgggcttcggcttggggagatggatcaagctcagagactggcagtgagagcccagaaggacctgtataaaatgaatctggagctttacattttctgcctctgccttcctcccagctcagcaaggaagtatttgggcaccctaccctttacctggggtctaaccaaaaatggatgggatgaggatgagaggctggagataattgttttatgggatttgggtgtgggactagggtacaatgaaggccaagagcatctcagacatagagttaaaactcaaacctcttatgtgcactttaaagatagactttaggggctggcacaaatctgatcagagacacatatccatacacaggtgaaacacatacagactcaacagcaatcatgcagttccagagacacatgaacctgacacaatctctcttatccttgaggccacagcttggaggagcctagaggcctcaggggaaagtcccaatcctgagggaccctcccaaacatttccatggtgctccagtccactgatcttgggtctggggtgatccaaataccaccccagctccagctgtcttctaccactagaagacccaagagaagcagaagtcgctcgcactggtcagtcggaaggcaagatcagatcctggaggactttcctggcctgcccgccagccctgctcttgttgtggagaaggaagcagatgtgatcacatcaccccgtcattgggcaccgctgactccagcatggaggacaccagggagcagggcctgggcctgtttccccagctgtgatcttgcccagaacctctcttggcttcataaacagctgtgaaccctcccctgaaggattaacagcaatgatgggcagtcgtggagttgggggggttgggggtgggattgtgtcctctaaggggacgggttcatctgagtaaacataaaccccaacttgtgccattctttataaaatgattttaaaggcaaaaaaag

SEQ ID NO: 83164 - DNA, 3334 bp, Homo sapiens
tccaaatcatagctcacccatttattgttcttgtgtgagtccttgggcaaaatcattaatatctctgagaatccctccactcactgatcaatctggaataataatgtttccctgtggtgggtgctgtgaatatttacacaaagtaaaagcatggatttacataaagtgtcctgcaaagggcccagcacacagtaagtgattaataaatgctagttcccttcctttctcctgtcctgtttctcctcaaggctccatgcactggtccactggtctctcctcatgtcccctcctggtgccaggacactctgccagccactccttttccctgcctgctggagggccaggtgctcccgccttccaccctccgccctcctccctcccctgggccctgctccctgccctcctgggcagccagggcagccaggacggcaccaagggagctgccccatggacagggccccacagagacagcaccgagcctcacgggagctgctggctgcaaagaagacccacacctcacaaattgaagtgatcccttgcaaaatctgtggggacaagtcgtctgggatccactacggggttatcacctgtgaggggtgcaagggcttcttccgccggagccagcgctgtaacgcggcctactcctgcacccgtcagcagaactgccccatcgaccgcaccagccgaaaccgatgccagcactgccgcctgcagaaatgcctggcgctgggcatgtcccgagatgctgtcaagttcggccgcatgtccaagaagcagagggacagcctgcatgcagaagtgcagaaacagctgcagcagcggcaacagcagcaacaggaaccagtggtcaagacccctccagcaggggcccaaggagcagataccctcacctacaccttggggctcccagacgggcagctgcccctgggctcctcgcctgacctgcctgaggcttctgcctgtccccctggcctcctgaaagcctcaggctctgggccctcatattccaacaacttggccaaggcagggctcaatggggcctcatgccaccttgaatacagccctgagcggggcaaggctgagggcagagagagcttctatagcacaggcagccagctgacccctgaccgatgtggacttcgttttgaggaacacaggcatcctgggcttggggaactgggacagggcccagacagctacggcagccccagtttccgcagcacaccggaggcaccctatgcctccctgacagagatagagcacctggtgcagagcgtctgcaagtcctacagggagacatgccagctgcggctggaggacctgctgcggcagcgctccaacatcttctcccgggaggaagtgactggctaccagaggaagtccatgtgggagatgtgggaacggtgtgcccaccacctcaccgaggccattcagtacgtggtggagttcgccaagaggctctcaggctttatggagctctgccagaatgaccagattgtgcttctcaaagcaggagcaatggaagtggtgctggttaggatgtgccgggcctacaatgctgacaaccgcacggtcttttttgaaggcaaatacggtggcatggagctgttccgagccttgggctgcagcgagctcatcagctccatctttgacttctcccactccctaagtgccttgcacttttccgaggatgagattgccctctacacagcccttgttctcatcaatgcccatcggccagggctccaagagaaaaggaaagtagaacagctgcagtacaatctggagctggcctttcatcatcatctctgcaagactcatcgccaaagcatcctggcaaagctgccacccaaggggaagcttcggagcctgtgtagccagcatgtggaaaggctgcagatcttccagcacctccaccccatcgtggtccaagccgctttccctccactctacaaggagctcttcagcactgaaaccgagtcacctgtggggctgtccaagtgacctggaagagggactccttgcctctccctatggcctgctggcccacctccctggaccccgttccaccctcacccttttcctttcccatgaaccctggagggtggtccccaccagctctttggaagtgagcagatgctgcggctggctttctgtcagcaggccggcctggcagtgggacaatcgccagagggtggggctggcagaacaccatctccagcctcagctttgacctgtctcatttcccatattccttcacacccagcttctggaaggcatggggtggctgggatttaaggacttctgggggaccaagacatcctcaagaaaacaggggcatccagggctccctggatgaatagaatgcaattcattcagaagctcagaagctaagaataagcctttgaaatacctcattgcatttccctttgggcttcggcttggggagatggatcaagctcagagactggcagtgagagcccagaaggacctgtataaaatgaatctggagctttacattttctgcctctgccttcctcccagctcagcaaggaagtatttgggcaccctaccctttacctggggtctaaccaaaaatggatgggatgaggatgagaggctggagataattgttttatgggatttgggtgtgggactagggtacaatgaaggccaagagcatctcagacatagagttaaaactcaaacctcttatgtgcactttaaagatagactttaggggctggcacaaatctgatcagagacacatatccatacacaggtgaaacacatacagactcaacagcaatcatgcagttccagagacacatgaacctgacacaatctctcttatccttgaggccacagcttggaggagcctagaggcctcaggggaaagtcccaatcctgagggaccctcccaaacatttccatggtgctccagtccactgatcttgggtctggggtgatccaaataccaccccagctccagctgtcttctaccactagaagacccaagagaagcagaagtcgctcgcactggtcagtcggaaggcaagatcagatcctggaggactttcctggcctgcccgccagccctgctcttgttgtggagaaggaagcagatgtgatcacatcaccccgtcattgggcaccgctgactccagcatggaggacaccagggagcagggcctgggcctgtttccccagctgtgatcttgcccagaacctctcttggcttcataaacagctgtgaaccctcccctgaaggattaacagcaatgatgggcaacttgtgccattctttataaaatgattttaaaggcaaaaaaag

SEQ ID NO: 83165 - DNA, 3357 bp, Homo sapiens
tccaaatcatagctcacccatttattgttcttgtgtgagtccttgggcaaaatcattaatatctctgagaatccctccactcactgatcaatctggaataataatgtttccctgtggtgggtgctgtgaatatttacacaaagtaaaagcatggatttacataaagtgtcctgcaaagggcccagcacacagtaagtgattaataaatgctagttcccttcctttctcctgtcctgtttctcctcaaggctccatgcactggtccactggtctctcctcatgtcccctcctggtgccaggacactctgccagccactccttttccctgcctgctggagggccaggtgctcccgccttccaccctccgccctcctccctcccctgggccctgctccctgccctcctgggcagccagggcagccaggacggcaccaagggagctgccccatggacagggccccacagagacagcaccgagcctcacgggagctgctggctgcaaagaagacccacacctcacaaattgaagtgatcccttgcaaaatctgtggggacaagtcgtctgggatccactacggggttatcacctgtgaggggtgcaagggcttcttccgccggagccagcgctgtaacgcggcctactcctgcacccgtcagcagaactgccccatcgaccgcaccagccgaaaccgatgccagcactgccgcctgcagaaatgcctggcgctgggcatgtcccgagatgctgtcaagttcggccgcatgtccaagaagcagagggacagcctgcatgcagaagtgcagaaacagctgcagcagcggcaacagcagcaacaggaaccagtggtcaagacccctccagcaggggcccaaggagcagataccctcacctacaccttggggctcccagacgggcagctgcccctgggctcctcgcctgacctgcctgaggcttctgcctgtccccctggcctcctgaaagcctcaggctctgggccctcatattccaacaacttggccaaggcagggctcaatggggcctcatgccaccttgaatacagccctgagcggggcaaggctgagggcagagagagcttctatagcacaggcagccagctgacccctgaccgatgtggacttcgttttgaggaacacaggcatcctgggcttggggaactgggacagggcccagacagctacggcagccccagtttccgcagcacaccggaggcaccctatgcctccctgacagagatagagcacctggtgcagagcgtctgcaagtcctacagggagacatgccagctgcggctggaggacctgctgcggcagcgctccaacatcttctcccgggaggaagtgactggctaccagaggaagtccatgtgggagatgtgggaacggtgtgcccaccacctcaccgaggccattcagtacgtggtggagttcgccaagaggctctcaggctttatggagctctgccagaatgaccagattgtgcttctcaaagcaggagcaatggaagtggtgctggttaggatgtgccgggcctacaatgctgacaaccgcacggtcttttttgaaggcaaatacggtggcatggagctgttccgagccttgggctgcagcgagctcatcagctccatctttgacttctcccactccctaagtgccttgcacttttccgaggatgagattgccctctacacagcccttgttctcatcaatgcccatcggccagggctccaagagaaaaggaaagtagaacagctgcagtacaatctggagctggcctttcatcatcatctctgcaagactcatcgccaaagcatcctggcaaagctgccacccaaggggaagcttcggagcctgtgtagccagcatgtggaaaggctgcagatcttccagcacctccaccccatcgtggtccaagccgctttccctccactctacaaggagctcttcagcactgaaaccgagtcacctgtggggctgtccaagtgacctggaagagggactccttgcctctccctatggcctgctggcccacctccctggaccccgttccaccctcacccttttcctttcccatgaaccctggagggtggtccccaccagctctttggaagtgagcagatgctgcggctggctttctgtcagcaggccggcctggcagtgggacaatcgccagagggtggggctggcagaacaccatctccagcctcagctttgacctgtctcatttcccatattccttcacacccagcttctggaaggcatggggtggctgggatttaaggacttctgggggaccaagacatcctcaagaaaacaggggcatccagggctccctggatgaatagaatgcaattcattcagaagctcagaagctaagaataagcctttgaaatacctcattgcatttccctttgggcttcggcttggggagatggatcaagctcagagactggcagtgagagcccagaaggacctgtataaaatgaatctggagctttacattttctgcctctgccttcctcccagctcagcaaggaagtatttgggcaccctaccctttacctggggtctaaccagtgtgggactagggtacaatgaaggccaagagcatctcagacatagagttaaaactcaaacctcttatgtgcactttaaagatagactttaggggctggcacaaatctgatcagagacacatatccatacacaggtgaaacacatacagactcaacagcaatcatgcagttccagagacacatgaacctgacacaatctctcttatccttgaggccacagcttggaggagcctagaggcctcaggggaaagtcccaatcctgagggaccctcccaaacatttccatggtgctccagtccactgatcttgggtctggggtgatccaaataccaccccagctccagctgtcttctaccactagaagacccaagagaagcagaagtcgctcgcactggtcagtcggaaggcaagatcagatcctggaggactttcctggcctgcccgccagccctgctcttgttgtggagaaggaagcagatgtgatcacatcaccccgtcattgggcaccgctgactccagcatggaggacaccagggagcagggcctgggcctgtttccccagctgtgatcttgcccagaacctctcttggcttcataaacagctgtgaaccctcccctgaaggattaacagcaatgatgggcagtcgtggagttgggggggttgggggtgggattgtgtcctctaaggggacgggttcatctgagtaaacataaaccccaacttgtgccattctttataaaatgattttaaaggcaaaaaaag

SEQ ID NO: 83166 - DNA, 1583 bp, Homo sapiens
tccaaatcatagctcacccatttattgttcttgtgtgagtccttgggcaaaatcattaatatctctgagaatccctccactcactgatcaatctggaataataatgtttccctgtggtgggtgctgtgaatatttacacaaagtaaaagcatggatttacataaagtgtcctgcaaagggcccagcacacagtaagtgattaataaatgctagttcccttcctttctcctgtcctgtttctcctcaaggctccatgcactggtccactggtctctcctcatgtcccctcctggtgccaggacactctgccagccactccttttccctgcctgctggagggccaggtgctcccgccttccaccctccgccctcctccctcccctgggccctgctccctgccctcctgggcagccagggcagccaggacggcaccaagggagctgccccatggacagggccccacagagacagcaccgagcctcacgggagctgctggctgcaaagaagacccacacctcacaaattgaagtgatcccttgcaaaatctgtggggacaagtcgtctgggatccactacggggttatcacctgtgaggggtgcaagggcttcttccgccggagccagcgctgtaacgcggcctactcctgcacccgtcagcagaactgccccatcgaccgcaccagccgaaaccgatgccagcactgccgcctgcagaaatgcctggcgctgggcatgtcccgagatgctgtcaagttcggccgcatgtccaagaagcagagggacagcctgcatgcagaagtgcagaaacagctgcagcagcggcaacagcagcaacaggaaccagtggtcaagacccctccagcaggggcccaaggagcagataccctcacctacaccttggggctcccagacgggcagctgcccctgggctcctcgcctgacctgcctgaggcttctgcctgtccccctggcctcctgaaagcctcaggctctgggccctcatattccaacaacttggccaaggcagggctcaatggggcctcatgccaccttgaatacagccctgagcggggcaaggctgagggcagagagagcttctatagcacaggcagccagctgacccctgaccgatgtggacttcgttttgaggaacacaggcatcctgggcttggggaactgggacagggcccagacagctacggcagccccagtttccgcagcacaccggaggcaccctatgcctccctgacagagatagagcacctggtgcagagcgtctgcaagtcctacagggagacatgccagctgcggctggaggacctgctgcggcagcgctccaacatcttctcccgggaggaagtgactggctaccagaggaagtccatgtgggagatgtgggaacggtgtgcccaccacctcaccgaggccattcagtacgtggtggagttcgccaagaggctctcaggctttatggagctctgccagaatgaccagattgtgcttctcaaagcaggagcaatggaagtggtgctggttagatgtgccggcgctgctgaaatgctacgtaatcctctagggtcacc

SEQ ID NO: 83167 - DNA, 546 bp, Homo sapiens
agaagttgaggaactgtcctcatgcctcctggtccctggtagtctggagaaggacaaggaatgttactttacaggctctgaagtcctcaggttgagcgggacaggtgggtttggcatttctaagcctaaactctgggccttctgagggaatgaggtgagagagcctctgaccccaccgctatgtgggtcacgctgatcgctgagcatctaagctgctccttaggtgctgatcctgtcacctcggtgcattacaggggaaaaagtctcagccacagcctctatgttctgtttgcctataggaccatgatactgttccaggcttcagaggagaagaaatgacccaatttcaagtgcgtactgggggattgagggcatcttcttgctattcctcaagcaagccaagagggttgctatctcagggttttaacacctgtttactcttcctagagtgacattatccagagagcttcctggttcatcccttacttcatctgagtctctgctcaaagtttactgcttgagaaaggtcttttgtaaccattctac

SEQ ID NO: 83168 - DNA, 395 bp, Homo sapiens
aatttaccaaatgccaattgatttttttgtgtgcattttaatctctctgtgcttccttgttggtactggagggcccagattttcaggttccccccaaccccagtccataccaaagcagaaacaaggctcacagaattggaaatggaactgaggcctcctgcctctctgtccaatgttctttctgctaataaatatctattgcttttcctgcccggcatgcattctttcttctggtaacatttttaaaaattgaggtaaacgtcatgtaatgggccaggcatagtggtcacgcctgtagtcctagcactttgcgaggctgaggcaggcagatcacttgagctcaggagtttgacaccagcttgggcaacatggggaaaccctgtctctatgaaaaa

SEQ ID NO: 83169 - DNA, 406 bp, Homo sapiens
gtgagccgagattgcaccagtgcactccagcttgggcaacagagcgagactccgtctttaaaaaaaaaaaaaaaaaaaaaaaggcaagctgtaaaacagcctcaggcagatccttcaggagccattccagaagaagacgttgttaccttaggagatgccagctccctgcctgtcattgcccctgaagactttccatgggacaaagtgtggaggtggaagacagtgatattgatgatcctgaccctgtgtaggcctaggctaatatgtatgtttgggtcttagtttttaacaatttttttttaattttagaagtagaaaaagtttataaaattaagaatataaagtatttttcatacagctgtacaatgtatttgtgttttaagctaaatgttattagaaaatagtt

SEQ ID NO: 83170 - DNA, 315 bp, Homo sapiens
ctatatttgagttgataattgctacaggaaaaaatgaaaaatcactcattatgcagattggtgtccctataaattcatggtctcaaatctcaaccagtttctcagaactgcctatcaatcttagtcgtctttgtcagttttctcattaacttaattattatctaaacctccttaagtcttcttatatcccttgtcactccccttcaacctcgccttactctcagttttctacttaaagaaaattaaagcatgacttctctcaaattatcatctttccccccttattacaaccagccctccttatatgtggattcc

SEQ ID NO: 83171 - DNA, 623 bp, Homo sapiens
ttcatttgcatttattccccattgtgcttttgcttctgtttctcttttaagtggagcaacactgtctgaagacacgttatctgtgcagagccagagaactttaaaaggaaagtttaaatgttcttagttctcctgaggtccaggtaagaagggggtggtaagaagaggatgggggacagatggctgagatcccttgggaggagatataggggagcactggaattcccccgactcccactccttgctcccttggccctctgccctccatgctggagagctgataggtagctggagtggcccagggagacctatgggaaggacccgtcctaccattagggggcttctctctatgaatgctaagaaacaaagggcatccattccaaatgagtagcagaggtgaccttctagggtttctacccatgctcagttgtatcccattccctgttcaccttttgtccccagcactgatataaaagccatatatatgttagtcaggtttgcactgagtcttcttccaatccttcagcctggacaacagagtgaggtccccttgtggccagaggccagccctccttgcctgccttcctttgacctctcttttccatccatgaagccctcaggcc

SEQ ID NO: 83172 - DNA, 431 bp, Homo sapiens
agagataggggtctcaccatgtttcccaggctggtctcgaacttctggcctcaagcaatctttccatctcatcctcccaatgtgctgggattacaggcatgagccactgcaccaagcctaggacatttttaataatcacctcccttaccccagccaaggttcccaatcctcagagaaaaagctgttcaagacaaaccttcctaagcagacccagaggaacagacacggtcatgggccagcacagagcactgggcgtccctaagggcagtgactacggtgattccccggtctctgagcccccttctgccttggtgttcatggcacagccggtgaacccagattctcggcggggcatctgaccttcgaccctgtgtaatgtttagggggcccgggtacaggggacggaaagtgtgggcttaacccgggggggc

SEQ ID NO: 83173 - DNA, 520 bp, Homo sapiens
agtctgtttctttaattggagtgagtggcacttggcacacccacacagccaccttaaacattgtgggaaatcaagtccaagtatctcaagtaacagtacaacaatccatatcaggaaaaacagcttagggcttgacttcattatggttttggctgccattttatgcattctgagtagaagaaacattcctcctagcgcccccaccttgtctttaacattccgcagtggaagttcctcaaagctctccgttttgaaagcatcctctatgattaccagccactaaattgcatctgccaccgagggcccaatgggctttgaacctgttattcttgggaaattcaagctgcgagggagagagagaacgttgtacacgtgtgcagctgtgctttggagtacaagaagtaatcgtatgtgtctgtgtgttttttatgggggtaggggaagggtatattaattaacccaactgagaaggagatgactgtgttccaggaaggagccaatgaaatgagtttgctttaaa

SEQ ID NO: 83174 - DNA, 775 bp, Homo sapiens
tcttaagaagaaatgctctactcaaaaccatgcctggtttatgtaatgtggctttctttctcctgagctgggggttgcactagctgttacctgggacacaaatagtatggatggaatgctataaatcggaagtatgggtttttggacatcttgcttagatttgagctttcacccttaaactttgtatttttctttggacggaagtattggataaaggtaccagaaaatcagtgcgttgaatttgaactgtatctttttgggggaaggggcaggtgtgtctttctctcaatactatgtttacttttggctctcgtataccaaaaggaagggaggatgctaaagtctaatagttggcaaatagctgtctttcctgctgtgggtggcactgagaaggatgagacctaatcctaacttcgtaaacttttcatcttataggaaggtgaagtacatagattatggacagtgcaggctgtttatgaagataaatgttttcatcttaacagtactttgagcactgtgtgctgggctaatgagaaacacaagacagccaggtgcttatctataagagctgtctcagaaaaggtggttcagagccaacttgtgagggaaaccctgctcccactcctgggctcagttttgccttcattttctttccagtcaacagttcccaccatttacctcttagcacactacccttaacacacaccaagctatttttttttttagtaatgtttcattatggaaattttcaaagtaaacagagagtagaataatg

SEQ ID NO: 83175 - DNA, 3292 bp, Homo sapiens
ggcgggggggtgggggggggggcgctagttctagaccacgccccttccttgttcgctcggaaagaggaccaaaatggaggagtaagaatcatgattaaattgagcgagcgcaactaatcacgcgaagagggccgcaggcgggccgtcttccgcaagcgtgcttccaggcctccactccccacctattcggcggcaccctgttacttctgctcctgcgcgctgcttcccgcgacctcacaggcagagcgaacacgcacggagtcgcaggggcgcgcaaagggggaggagcgggcgtgaccaggcgcgcgcgcgcgtctggagtgactctagagagcaggagcagatccggggtagagggaaaagagctccgggccaggggctgccgtcgccgccgtcggggagtcagcccgccagcccgccagctcgtcagcccgccagccagcgcttcgcgggccctgtcggtcccgatcagaccaaacattgtctggcttgcactgtaaaactagttagctgaagacgacttctcaggtttcttcaggatgcctgcagcacttgtggagaatagccaggttatctgtgaagtgtgggccagtaatctagaagaagagatgaggaagatccgagaaatcgtgctcagttacagttatattgccatggacacagaatttccaggtgttgtggtgcgaccaattggtgaatttcgtagttccatagattaccaatatcagcttctgcggtgcaatgttgaccttttaaaaattatccagctgggccttacattcacaaatgagaagggagagtatccttctggaatcaatacttggcagttcaatttcaaatttaaccttacagaggacatgtactcccaggattccatagatctccttgctaactcaggactacagtttcagaagcatgaagaggaagggattgacacactgcactttgcagagctgcttatgacatcaggagtggttctctgtgacaatgtcaaatggctttcatttcatagtggctatgattttggctatatggtaaagttgcttacagattctcgtttgccagaagaggaacatgaattctttcatattctgaaccttttcttcccatccatttatgatgtgaaatacctgatgaagagctgcaaaaatcttaagggaggtcttcaggaagttgctgatcagttggatttgcagaggattggaaggcagcaccaggcaggctcagactcactgctgacaggaatggctttctttaggatgaaagagttgttttttgaggacagcattgatgatgccaagtactgtgggcggctctatggcttaggcacaggagtggcccagaagcagaatgaggatgtggactctgcccaggagaagatgagcatcctggcgattatcaacaacatgcagcagtgatggcgccaggctctgcagggtgggcctgatcccagagtggtgcttactgtgctgactgtgtacttatcttccccaagagaaaatgcttcttttgagcacactgtacctaccatctgcattgagcagaaagacttttgttttactgaagacaaaagatgtttttattttagacccagaagagaggagtttgctctgaatttgtaaataagtcttccccattcctcatactcgagcctctcctctctggttgcctcctgccaccagcatccatggctcatttgacacctttttaaatatcaggacaagtctgaaacaaagtagtaaaatgtatataactcttacctgttgtcattctttttcttttaaatttgttgctaatctctgataatgaagattcttactctgattctcagctgagctgtgagggcttccagggaaaatggaacaaaatggtgttcttaggtaatgggttgtagatactgagtcttcctttccttttctgacccttctcgaggacatttgctttcctcacacttttgtagtctctctttacatattactatatggaaatgaattgctctgtgctgaaatttgaagaccagataatgaaactgaaaagcaaacaattttactgaatctgtctacccttcattcatgagaactccagaatgagtgttgaccactgaagcatcttttaagtctgtgttccattgtgccattcaggtttgctgtcacatatgcatcatctgaaatcatttgaaatttttgtacaataaaatatcctggatttgatcctgaaggaaactagtaagatcagatttttgggtcatgtctgttgtattttcagtaatgtgatttcagatggtcatctggattctcccacttctctactccattatttctctacttttccttccagcaaacctgaaacgtgagggagatggattaatgtgagtaacaggaatgtgtctttaaaaagctagagtggttacatttaatcaggcagtaagataatttgggttcttgagttgttttggagtaatatcccacaactggggtaggaagctcaggacttttttctttaaagctagtcatttcaaaagcatattgtatttttttgaatgactacagtatggacaatttcaaaaaccaaaacccactttggattggtggaagtaaaaactggtaactcactcaagtgaatgaatggtcttgcattttaaaagcttatgggaaactcaatttgaaatgattagaaaatgtcaagtattataagctggtatttaagatgcttgtaaatactatttatgtttttaattttgtaaaataaagatttctttttaaccactggcaaaaaaaaaaaaaaaaaaactcgagactagttctctcaacggaggcaggttggagccgctgccgtcgccatgacccgcggtaaccagcgtgagctcgcccgccagaagaatatgaaaaagcagagcgactcggttaagggaaagcgccgagatgacgggctttctgctgccgcccgcaagcagagggactcggagatcatgcagcagaagcagaaaaaggcaaacgagaagaaggaggaacccaagtagctttgtggcttcgtgtccaaccctcttgcccttcgcctgtgtgcctggagccagtcccaccacgctcgcgtttcctcctgtagtgctcacaggtcccagcaccgatggcattccctttgccctgagtctgcagcgggtcccttttgtgcttccttcccctcaggtagcctctctccccctgggccactcccgggggtgagggggttaccccttcccagtgttttttattcctgtggggctcaccccaaagtattaaaagtagctttgtaattc

SEQ ID NO: 83176 - DNA, 2819 bp, Homo sapiens
ggcgggggggtgggggggggggcgctagttctagaccacgccccttccttgttcgctcggaaagaggaccaaaatggaggagtaagaatcatgattaaattgagcgagcgcaactaatcacgcgaagagggccgcaggcgggccgtcttccgcaagcgtgcttccaggcctccactccccacctattcggcggcaccctgttacttctgctcctgcgcgctgcttcccgcgacctcacaggcagagcgaacacgcacggagtcgcaggggcgcgcaaagggggaggagcgggcgtgaccaggcgcgcgcgcgcgtctggagtgactctagagagcaggagcagatccggggtagagggaaaagagctccgggccaggggctgccgtcgccgccgtcggggagtcagcccgccagcccgccagctcgtcagcccgccagccagcgcttcgcgggccctgtcggtcccggtaagcgggcctgcgcttaccggaaagaggagcgtaagatgaaagagtatcagaccaaacattgtctggcttgcactgtaaaactagttagctgaagacgacttctcaggtttcttcaggatgcctgcagcacttgtggagaatagccaggttatctgtgaagtgtgggccagtaatctagaagaagagatgaggaagatccgagaaatcgtgctcagttacagttatattgccatggacacagaatttccaggtgttgtggtgcgaccaattggtgaatttcgtagttccatagattaccaatatcagcttctgcggtgcaatgttgaccttttaaaaattatccagctgggccttacattcacaaatgagaagggagagtatccttctggaatcaatacttggcagttcaatttcaaatttaaccttacagaggacatgtactcccaggattccatagatctccttgctaactcaggactacagtttcagaagcatgaagaggaagggattgacacactgcactttgcagagctgcttatgacatcaggagtggttctctgtgacaatgtcaaatggctttcatttcatagtggctatgattttggctatatggtaaagttgcttacagattctcgtttgccagaagaggaacatgaattctttcatattctgaaccttttcttcccatccatttatgatgtgaaatacctgatgaagagctgcaaaaatcttaagggaggtcttcaggaagttgctgatcagttggatttgcagaggattggaaggcagcaccaggcaggctcagactcactgctgacaggaatggctttctttaggatgaaagagttgttttttgaggacagcattgatgatgccaagtactgtgggcggctctatggcttaggcacaggagtggcccagaagcagaatgaggatgtggactctgcccaggagaagatgagcatcctggcgattatcaacaacatgcagcagtgatggcgccaggctctgcagggtgggcctgatcccagagtggtgcttactgtgctgactgtgtacttatcttccccaagagaaaatgcttcttttgagcacactgtacctaccatctgcattgagcagaaagacttttgttttactgaagacaaaagatgtttttattttagacccagaagagaggagtttgctctgaatttgtaaataagtcttccccattcctcatactcgagcctctcctctctggttgcctcctgccaccagcatccatggctcatttgacacctttttaaatatcaggacaagtctgaaacaaagtagtaaaatgtatataactcttacctgttgtcattctttttcttttaaatttgttgctaatctctgataatgaagattcttactctgattctcagctgagctgtgagggcttccagggaaaatggaacaaaatggtgttcttaggtaatgggttgtagatactgagtcttcctttccttttctgacccttctcgaggacatttgctttcctcacacttttgtagtctctctttacatattactatatggaaatgaattgctctgtgctgaaatttgaagaccagataatgaaactgaaaagcaaacaattttactgaatctgtctacccttcattcatgagaactccagaatgagtgttgaccactgaagcatcttttaagtctgtgttccattgtgccattcaggtttgctgtcacatatgcatcatctgaaatcatttgaaatttttgtacaataaaatatcctggatttgatcctgaaggaaactagtaagatcagatttttgggtcatgtctgttgtattttcagtaatgtgatttcagatggtcatctggattctcccacttctctactccattatttctctacttttccttccagcaaacctgaaacgtgagggagatggattaatgtgagtaacaggaatgtgtctttaaaaagctagagtggttacatttaatcaggcagtaagataatttgggttcttgagttgttttggagtaatatcccacaactggggtaggaagctcaggacttttttctttaaagctagtcatttcaaaagcatattgtatttttttgaatgactacagtatggacaatttcaaaaaccaaaacccactttggattggtggaagtaaaaactggtaactcactcaagtgaatgaatggtcttgcattttaaaagcttatgggaaactcaatttgaaatgattagaaaatgtcaagtattataagctggtatttaagatgcttgtaaatactatttatgtttttaattttgtaaaataaagatttctttttaaccactggca

SEQ ID NO: 83177 - DNA, 1759 bp, Homo sapiens
ggcgggggggtgggggggggggcgctagttctagaccacgccccttccttgttcgctcggaaagaggaccaaaatggaggagtaagaatcatgattaaattgagcgagcgcaactaatcacgcgaagagggccgcaggcgggccgtcttccgcaagcgtgcttccaggcctccactccccacctattcggcggcaccctgttacttctgctcctgcgcgctgcttcccgcgacctcacaggcagagcgaacacgcacggagtcgcaggggcgcgcaaagggggaggagcgggcgtgaccaggcgcgcgcgcgcgtctggagtgactctagagagcaggagcagatccggggtagagggaaaagagctccgggccaggggctgccgtcgccgccgtcggggagtcagcccgccagcccgccagctcgtcagcccgccagccagcgcttcgcgggccctgtcggtcccgatcagaccaaacattgtctggcttgcactgtaaaactagttagctgaagacgacttctcaggtttcttcaggatgcctgcagcacttgtggagaatagccaggttatctgtgaagtgtgggccagtaatctagaagaagagatgaggaagatccgagaaatcgtgctcagttacagttatattgccatggacacagaatttccaggtgttgtggtgcgaccaattggtgaatttcgtagttccatagattaccaatatcagcttctgcggtgcaatgttgaccttttaaaaattatccagctgggccttacattcacaaatgagaagggagagtatccttctggaatcaatacttggcagttcaatttcaaatttaaccttacagaggacatgtactcccaggattccatagatctccttgctaactcaggactacagtttcagaagcatgaagaggaagggattgacacactgcactttgcagagctgcttatgacatcaggagtggttctctgtgacaatgtcaaatggctttcatttcatagtggctatgattttggctatatggtaaagttgcttacagattctcgtttgccagaagaggaacatgaattctttcatattctgaaccttttcttcccatccatttatgatgtgaaatacctgatgaagagctgcaaaaatcttaagggaggtcttcaggaagttgctgatcagttggatttgcagaggattggaaggcagcaccaggcaggctcagactcactgctgacaggaatggctttctttaggatgaaagagttgttttttgaggacagcattgatgatgccaagtactgtgggcggctctatggcttaggcacaggagtggcccagaagcagaatgaggatgtggactctgcccaggagaagatgagcatcctggcgattatcaacaacatgcagcagtgatggcgccaggctctgcagggtgggcctgatcccagagtggtgcttactgtgctgactgtgtacttatcttccccaagagaaaatgcttcttttgagcacactgtacctaccatctgcattgagcagaaagacttttgttttactgaagacaaaagatgtttttattttagacccagaagagaggagtttgctctgaatttgtaaataagtcttccccattcctcatactcgagcctctcctctctggttgcctcctgccaccagcatccatggctcatttgacacctttttaaatatcaggacaagtctgaaacaaagtagtaaaatgtatataactctta

SEQ ID NO: 83178 - DNA, 3254 bp, Homo sapiens
ggcgggggggtgggggggggggcgctagttctagaccacgccccttccttgttcgctcggaaagaggaccaaaatggaggagtaagaatcatgattaaattgagcgagcgcaactaatcacgcgaagagggccgcaggcgggccgtcttccgcaagcgtgcttccaggcctccactccccacctattcggcggcaccctgttacttctgctcctgcgcgctgcttcccgcgacctcacaggcagagcgaacacgcacggagtcgcaggggcgcgcaaagggggaggagcgggcgtgaccaggcgcgcgcgcgcgtctggagtgactctagagagcaggagcagatccggggtagagggaaaagagctccgggccaggggctgccgtcgccgccgtcggggagtcagcccgccagcccgccagctcgtcagcccgccagccagcgcttcgcgggccctgtcggtcccgatcagaccaaacattgtctggcttgcactgtaaaactagttagctgaagacgacttctcaggtttcttcaggatgcctgcagcacttgtggagaatagccaggttatctgtgaagtgtgggccagtaatctagaagaagagatgaggaagatccgagaaatcgtgctcagttacagttatattgccatggacacagaatttccaggtgttgtggtgcgaccaattggtgaatttcgtagttccatagattaccaatatcagcttctgcggtgcaatgttgaccttttaaaaattatccagctgggccttacattcacaaatgagaagggagagtatccttctggaatcaatacttggcagttcaatttcaaatttaaccttacagaggacatgtactcccaggattccatagatctccttgctaactcaggactacagtttcagaagcatgaagaggaagggattgacacactgcactttgcagagctgcttatgacatcaggagtggttctctgtgacaatgtcaaatggctttcatttcatagtggctatgattttggctatatggtaaagttgcttacagattctcgtttgccagaagaggaacatgaattctttcatattctgaaccttttcttcccatccatttatgatgtgaaatacctgatgaagagctgcaaaaatcttaagggaggtcttcaggaagttgctgatcagttggatttgcagaggattggaaggcagcaccaggcaggctcagactcactgctgacaggaatggctttctttaggatgaaagagttgttttttgaggacagcattgatgatgccaagtactgtgggcggctctatggcttaggcacaggagtggcccagaagcagaatgaggatgtggactctgcccaggagaagatgagcatcctggcgattatcaacaacatgcagcagtgatggcgccaggctctgcagggtgggcctgatcccagagtggtgcttactgtgctgactgtgtacttatcttccccaagagaaaatgcttcttttgagcacactgtacctaccatctgcattgagcagaaagacttttgttttactgaagacaaaagatgtttttattttagacccagaagagaggagtttgctctgaatttgtaaataagtcttccccattcctcatactcgagcctctcctctctggttgcctcctgccaccagcatccatggctcatttgacacctttttaaatatcaggacaagtctgaaacaaagtagtaaaatgtatataactcttacctgttgtcattctttttcttttaaatttgttgctaatctctgataatgaagattcttactctgattctcagctgagctgtgagggcttccagggaaaatggaagtcttcctttccttttctgacccttctcgaggacatttgctttcctcacacttttgtagtctctctttacatattactatatggaaatgaattgctctgtgctgaaatttgaagaccagataatgaaactgaaaagcaaacaattttactgaatctgtctacccttcattcatgagaactccagaatgagtgttgaccactgaagcatcttttaagtctgtgttccattgtgccattcaggtttgctgtcacatatgcatcatctgaaatcatttgaaatttttgtacaataaaatatcctggatttgatcctgaaggaaactagtaagatcagatttttgggtcatgtctgttgtattttcagtaatgtgatttcagatggtcatctggattctcccacttctctactccattatttctctacttttccttccagcaaacctgaaacgtgagggagatggattaatgtgagtaacaggaatgtgtctttaaaaagctagagtggttacatttaatcaggcagtaagataatttgggttcttgagttgttttggagtaatatcccacaactggggtaggaagctcaggacttttttctttaaagctagtcatttcaaaagcatattgtatttttttgaatgactacagtatggacaatttcaaaaaccaaaacccactttggattggtggaagtaaaaactggtaactcactcaagtgaatgaatggtcttgcattttaaaagcttatgggaaactcaatttgaaatgattagaaaatgtcaagtattataagctggtatttaagatgcttgtaaatactatttatgtttttaattttgtaaaataaagatttctttttaaccactggcaaaaaaaaaaaaaaaaaaactcgagactagttctctcaacggaggcaggttggagccgctgccgtcgccatgacccgcggtaaccagcgtgagctcgcccgccagaagaatatgaaaaagcagagcgactcggttaagggaaagcgccgagatgacgggctttctgctgccgcccgcaagcagagggactcggagatcatgcagcagaagcagaaaaaggcaaacgagaagaaggaggaacccaagtagctttgtggcttcgtgtccaaccctcttgcccttcgcctgtgtgcctggagccagtcccaccacgctcgcgtttcctcctgtagtgctcacaggtcccagcaccgatggcattccctttgccctgagtctgcagcgggtcccttttgtgcttccttcccctcaggtagcctctctccccctgggccactcccgggggtgagggggttaccccttcccagtgttttttattcctgtggggctcaccccaaagtattaaaagtagctttgtaattc

SEQ ID NO: 83179 - DNA, 1640 bp, Homo sapiens
ggcgggggggtgggggggggggcgctagttctagaccacgccccttccttgttcgctcggaaagaggaccaaaatggaggagtaagaatcatgattaaattgagcgagcgcaactaatcacgcgaagagggccgcaggcgggccgtcttccgcaagcgtgcttccaggcctccactccccacctattcggcggcaccctgttacttctgctcctgcgcgctgcttcccgcgacctcacaggcagagcgaacacgcacggagtcgcaggggcgcgcaaagggggaggagcgggcgtgaccaggcgcgcgcgcgcgtctggagtgactctagagagcaggagcagatccggggtagagggaaaagagctccgggccaggggctgccgtcgccgccgtcggggagtcagcccgccagcccgccagctcgtcagcccgccagccagcgcttcgcgggccctgtcggtcccgatcagaccaaacattgtctggcttgcactgtaaaactagttagctgaagacgacttctcaggtttcttcaggatgcctgcagcacttgtggagaatagccaggttatctgtgaagtgtgggccagtaatctagaagaagagatgaggaagatccgagaaatcgtgctcagttacagttatattgccatggacacagaatttccaggtgttgtggtgcgaccaattggtgaatttcgtagttccatagattaccaatatcagcttctgcggtgcaatgttgaccttttaaaaattatccagctgggccttacattcacaaatgagaagggagagtatccttctggaatcaatacttggcagttcaatttcaaatttaaccttacagaggacatgtactcccaggattccatagatctccttgctaactcaggactacagtttcagaagcatgaagaggaagggattgacacactgcactttgcagagctgcttatgacatcaggagtggttctctgtgacaatgtcaaatggctttcatttcatagtggctatgattttggctatatggtaaagttgcttacagattctcgtttgccagaagaggaacatgaattctttcatattctgaaccttttcttcccatccatttatgatgtgaaatacctgatgaagagctgcaaaaatcttaagggaggtcttcaggaagttgctgatcagttggatttgcagaggattggaaggcagcaccaggcaggctcagactcactgctgacaggaatggctttctttaggatgaaagagttgttttttgaggacagcattgatgatgccaagtactgtgggcggctctatggcttaggcacaggagtggcccagaagcagaatgaggatgtggactctgcccaggagaagatgagcatcctggcgattatcaacaacatgcagcagtgatggcgccaggctctgcagggtgggcctgatcccagagtggtgcttactgtgctgactgtgtacttatcttccccaagagaaaatgcttcttttgagcacactgtacctaccatctgcattgagcagaaagacttttgttttactgaagacaaaagatgtttttattttagacccagaagagaggactggctacgatatgatccatgagtacgcacccgagca

SEQ ID NO: 83180 - DNA, 3391 bp, Homo sapiens
ggcgggggggtgggggggggggcgctagttctagaccacgccccttccttgttcgctcggaaagaggaccaaaatggaggagtaagaatcatgattaaattgagcgagcgcaactaatcacgcgaagagggccgcaggcgggccgtcttccgcaagcgtgcttccaggcctccactccccacctattcggcggcaccctgttacttctgctcctgcgcgctgcttcccgcgacctcacaggcagagcgaacacgcacggagtcgcaggggcgcgcaaagggggaggagcgggcgtgaccaggcgcgcgcgcgcgtctggagtgactctagagagcaggagcagatccggggtagagggaaaagagctccgggccaggggctgccgtcgccgccgtcggggagtcagcccgccagcccgccagctcgtcagcccgccagccagcgcttcgcgggccctgtcggtcccgatcagaccaaacattgtctggcttgcactgtaaaactagttagctgaagacgacttctcaggtttcttcaggatgcctgcagcacttgtggagaatagccaggttatctgtgaagtgtgggccagtaatctagaagaagagatgaggaagatccgagaaatcgtgctcagttacagttatattgccatggacacagaatttccaggtgttgtggtgcgaccaattggtgaatttcgtagttccatagattaccaatatcagcttctgcggtgcaatgttgaccttttaaaaattatccagctgggccttacattcacaaatgagaagggagagtatccttctggaatcaatacttggcagttcaatttcaaatttaaccttacatataagaaagaaaaagtcaacaataatacatgtgttgcttgagctaagacataggagaacagacaacacatacccattacatttctaggaaatacgagagaggacatgtactcccaggattccatagatctccttgctaactcaggactacagtttcagaagcatgaagaggaagggattgacacactgcactttgcagagctgcttatgacatcaggagtggttctctgtgacaatgtcaaatggctttcatttcatagtggctatgattttggctatatggtaaagttgcttacagattctcgtttgccagaagaggaacatgaattctttcatattctgaaccttttcttcccatccatttatgatgtgaaatacctgatgaagagctgcaaaaatcttaagggaggtcttcaggaagttgctgatcagttggatttgcagaggattggaaggcagcaccaggcaggctcagactcactgctgacaggaatggctttctttaggatgaaagagttgttttttgaggacagcattgatgatgccaagtactgtgggcggctctatggcttaggcacaggagtggcccagaagcagaatgaggatgtggactctgcccaggagaagatgagcatcctggcgattatcaacaacatgcagcagtgatggcgccaggctctgcagggtgggcctgatcccagagtggtgcttactgtgctgactgtgtacttatcttccccaagagaaaatgcttcttttgagcacactgtacctaccatctgcattgagcagaaagacttttgttttactgaagacaaaagatgtttttattttagacccagaagagaggagtttgctctgaatttgtaaataagtcttccccattcctcatactcgagcctctcctctctggttgcctcctgccaccagcatccatggctcatttgacacctttttaaatatcaggacaagtctgaaacaaagtagtaaaatgtatataactcttacctgttgtcattctttttcttttaaatttgttgctaatctctgataatgaagattcttactctgattctcagctgagctgtgagggcttccagggaaaatggaacaaaatggtgttcttaggtaatgggttgtagatactgagtcttcctttccttttctgacccttctcgaggacatttgctttcctcacacttttgtagtctctctttacatattactatatggaaatgaattgctctgtgctgaaatttgaagaccagataatgaaactgaaaagcaaacaattttactgaatctgtctacccttcattcatgagaactccagaatgagtgttgaccactgaagcatcttttaagtctgtgttccattgtgccattcaggtttgctgtcacatatgcatcatctgaaatcatttgaaatttttgtacaataaaatatcctggatttgatcctgaaggaaactagtaagatcagatttttgggtcatgtctgttgtattttcagtaatgtgatttcagatggtcatctggattctcccacttctctactccattatttctctacttttccttccagcaaacctgaaacgtgagggagatggattaatgtgagtaacaggaatgtgtctttaaaaagctagagtggttacatttaatcaggcagtaagataatttgggttcttgagttgttttggagtaatatcccacaactggggtaggaagctcaggacttttttctttaaagctagtcatttcaaaagcatattgtatttttttgaatgactacagtatggacaatttcaaaaaccaaaacccactttggattggtggaagtaaaaactggtaactcactcaagtgaatgaatggtcttgcattttaaaagcttatgggaaactcaatttgaaatgattagaaaatgtcaagtattataagctggtatttaagatgcttgtaaatactatttatgtttttaattttgtaaaataaagatttctttttaaccactggcaaaaaaaaaaaaaaaaaaactcgagactagttctctcaacggaggcaggttggagccgctgccgtcgccatgacccgcggtaaccagcgtgagctcgcccgccagaagaatatgaaaaagcagagcgactcggttaagggaaagcgccgagatgacgggctttctgctgccgcccgcaagcagagggactcggagatcatgcagcagaagcagaaaaaggcaaacgagaagaaggaggaacccaagtagctttgtggcttcgtgtccaaccctcttgcccttcgcctgtgtgcctggagccagtcccaccacgctcgcgtttcctcctgtagtgctcacaggtcccagcaccgatggcattccctttgccctgagtctgcagcgggtcccttttgtgcttccttcccctcaggtagcctctctccccctgggccactcccgggggtgagggggttaccccttcccagtgttttttattcctgtggggctcaccccaaagtattaaaagtagctttgtaattc

SEQ ID NO: 83181 - DNA, 3130 bp, Homo sapiens
ggcgggggggtgggggggggggcgctagttctagaccacgccccttccttgttcgctcggaaagaggaccaaaatggaggagtaagaatcatgattaaattgagcgagcgcaactaatcacgcgaagagggccgcaggcgggccgtcttccgcaagcgtgcttccaggcctccactccccacctattcggcggcaccctgttacttctgctcctgcgcgctgcttcccgcgacctcacaggcagagcgaacacgcacggagtcgcaggggcgcgcaaagggggaggagcgggcgtgaccaggcgcgcgcgcgcgtctggagtgactctagagagcaggagcagatccggggtagagggaaaagagctccgggccaggggctgccgtcgccgccgtcggggagtcagcccgccagcccgccagctcgtcagcccgccagccagcgcttcgcgggccctgtcggtcccgatcagaccaaacattgtctggcttgcactgtaaaactagttagctgaagacgacttctcaggtttcttcaggatgcctgcagcacttgtggagaatagccaggttatctgtgaagtgtgggccagtaatctagaagaagagatgaggaagatccgagaaatcgtgctcagttacagttatattgccatggacacagaatttccaggtgttgtggtgcgaccaattggtgaatttcgtagttccatagattaccaatatcagcttctgcggtgcaatgttgaccttttaaaaattatccagctgggccttacattcacaaatgagaagggagagtatccttctggaatcaatacttggcagttcaatttcaaatttaaccttactggctatgattttggctatatggtaaagttgcttacagattctcgtttgccagaagaggaacatgaattctttcatattctgaaccttttcttcccatccatttatgatgtgaaatacctgatgaagagctgcaaaaatcttaagggaggtcttcaggaagttgctgatcagttggatttgcagaggattggaaggcagcaccaggcaggctcagactcactgctgacaggaatggctttctttaggatgaaagagttgttttttgaggacagcattgatgatgccaagtactgtgggcggctctatggcttaggcacaggagtggcccagaagcagaatgaggatgtggactctgcccaggagaagatgagcatcctggcgattatcaacaacatgcagcagtgatggcgccaggctctgcagggtgggcctgatcccagagtggtgcttactgtgctgactgtgtacttatcttccccaagagaaaatgcttcttttgagcacactgtacctaccatctgcattgagcagaaagacttttgttttactgaagacaaaagatgtttttattttagacccagaagagaggagtttgctctgaatttgtaaataagtcttccccattcctcatactcgagcctctcctctctggttgcctcctgccaccagcatccatggctcatttgacacctttttaaatatcaggacaagtctgaaacaaagtagtaaaatgtatataactcttacctgttgtcattctttttcttttaaatttgttgctaatctctgataatgaagattcttactctgattctcagctgagctgtgagggcttccagggaaaatggaacaaaatggtgttcttaggtaatgggttgtagatactgagtcttcctttccttttctgacccttctcgaggacatttgctttcctcacacttttgtagtctctctttacatattactatatggaaatgaattgctctgtgctgaaatttgaagaccagataatgaaactgaaaagcaaacaattttactgaatctgtctacccttcattcatgagaactccagaatgagtgttgaccactgaagcatcttttaagtctgtgttccattgtgccattcaggtttgctgtcacatatgcatcatctgaaatcatttgaaatttttgtacaataaaatatcctggatttgatcctgaaggaaactagtaagatcagatttttgggtcatgtctgttgtattttcagtaatgtgatttcagatggtcatctggattctcccacttctctactccattatttctctacttttccttccagcaaacctgaaacgtgagggagatggattaatgtgagtaacaggaatgtgtctttaaaaagctagagtggttacatttaatcaggcagtaagataatttgggttcttgagttgttttggagtaatatcccacaactggggtaggaagctcaggacttttttctttaaagctagtcatttcaaaagcatattgtatttttttgaatgactacagtatggacaatttcaaaaaccaaaacccactttggattggtggaagtaaaaactggtaactcactcaagtgaatgaatggtcttgcattttaaaagcttatgggaaactcaatttgaaatgattagaaaatgtcaagtattataagctggtatttaagatgcttgtaaatactatttatgtttttaattttgtaaaataaagatttctttttaaccactggcaaaaaaaaaaaaaaaaaaactcgagactagttctctcaacggaggcaggttggagccgctgccgtcgccatgacccgcggtaaccagcgtgagctcgcccgccagaagaatatgaaaaagcagagcgactcggttaagggaaagcgccgagatgacgggctttctgctgccgcccgcaagcagagggactcggagatcatgcagcagaagcagaaaaaggcaaacgagaagaaggaggaacccaagtagctttgtggcttcgtgtccaaccctcttgcccttcgcctgtgtgcctggagccagtcccaccacgctcgcgtttcctcctgtagtgctcacaggtcccagcaccgatggcattccctttgccctgagtctgcagcgggtcccttttgtgcttccttcccctcaggtagcctctctccccctgggccactcccgggggtgagggggttaccccttcccagtgttttttattcctgtggggctcaccccaaagtattaaaagtagctttgtaattc

SEQ ID NO: 83182 - DNA, 2035 bp, Homo sapiens
ggcgggggggtgggggggggggcgctagttctagaccacgccccttccttgttcgctcggaaagaggaccaaaatggaggagtaagaatcatgattaaattgagcgagcgcaactaatcacgcgaagagggccgcaggcgggccgtcttccgcaagcgtgcttccaggcctccactccccacctattcggcggcaccctgttacttctgctcctgcgcgctgcttcccgcgacctcacaggcagagcgaacacgcacggagtcgcaggggcgcgcaaagggggaggagcgggcgtgaccaggcgcgcgcgcgcgtctggagtgactctagagagcaggagcagatccggggtagagggaaaagagctccgggccaggggctgccgtcgccgccgtcggggagtcagcccgccagcccgccagctcgtcagcccgccagccagcgcttcgcgggccctgtcggtcccgatcagaccaaacattgtctggcttgcactgtaaaactagttagctgaagacgacttctcaggtttcttcaggatgcctgcagcacttgtggagaatagccaggttatctgtgaagtgtgggccagtaatctagaagaagagatgaggaagatccgagaaatcgtgctcagttacagttatattgccatggacacagaatttccaggtgttgtggtgcgaccaattggtgaatttcgtagttccatagattaccaatatcagcttctgcggtgcaatgttgaccttttaaaaattatccagctgggccttacattcacaaatgagaagggagagtatccttctggaatcaatacttggcagttcaatttcaaatttaaccttacagaggacatgtactcccaggattccatagatctccttgctaactcaggactacagtttcagaagcatgaagaggaagggattgacacactgcactttgcagagctgcttatgacatcaggagtggttctctgtgacaatgtcaaatggctttcatttcatagtggctatgattttggctatatggtaaagttgcttacagattctcgtttgccagaagaggaacatgaattctttcatattctgaaccttttcttcccatccatttatgatgtgaaatacctgatgaagagctgcaaaaatcttaagggaggtcttcaggaagttgctgatcagttggatttgcagaggattggaaggcagcaccaggcaggctcagactcactgctgacaggaatggctttctttaggatgaaagaggtaagcttccttgaatgtgatcacaggcctctcggcagtaacttgctgaaggctaaggaggtagtggatggtctgttatgtgggctgaggtttgttgaacatttattttttatttatttattatttattttttttgagatgaagccttgctctgtcacccaggctggagtgcagtggtgcgatctcagctcactgcaacctccgcctcccgggttcaagctttctgcctcagcctcctgagtagctgggattataggtgcccgccaccatgccctactaatttttgtatttttagtagagacagggtttcgccatgttggccaggctggtttcaaactcttgacctcaggtgatctgcctgccttggtctcccaaagtgctgggattacaggcatgagccactctgcctggccgaattttttgtatttttagtagacacggggtttcactatgctggccaggctggtctcgaactcctgacctcaggtgatccgcctggcttggtctcccaaagtgctgggattacaggcgtgagccaccacgcccagccacatagactgtttttttagcaagttgatgtccactttgaaagtggttgttttttgttatggtattctgcatgtcacatgtttgagaggcaaaagcagcattctgacgtgaaagccactttccagtaaccaagtattcttgagcacacccaagtccagaacttcatgttcttgtcagctctaatcctttcagttatttgctttttttctgattcctgt

SEQ ID NO: 83183 - DNA, 2941 bp, Homo sapiens
ggcgggggggtgggggggggggcgctagttctagaccacgccccttccttgttcgctcggaaagaggaccaaaatggaggagtaagaatcatgattaaattgagcgagcgcaactaatcacgcgaagagggccgcaggcgggccgtcttccgcaagcgtgcttccaggcctccactccccacctattcggcggcaccctgttacttctgctcctgcgcgctgcttcccgcgacctcacaggcagagcgaacacgcacggagtcgcaggggcgcgcaaagggggaggagcgggcgtgaccaggcgcgcgcgcgcgtctggagtgactctagagagcaggagcagatccggggtagagggaaaagagctccgggccaggggctgccgtcgccgccgtcggggagtcagcccgccagcccgccagctcgtcagcccgccagccagcgcttcgcgggccctgtcggtcccggacacagaatttccaggtgttgtggtgcgaccaattggtgaatttcgtagttccatagattaccaatatcagcttctgcggtgcaatgttgaccttttaaaaattatccagctgggccttacattcacaaatgagaagggagagtatccttctggaatcaatacttggcagttcaatttcaaatttaaccttactggctatgattttggctatatggtaaagttgcttacagattctcgtttgccagaagaggaacatgaattctttcatattctgaaccttttcttcccatccatttatgatgtgaaatacctgatgaagagctgcaaaaatcttaagggaggtcttcaggaagttgctgatcagttggatttgcagaggattggaaggcagcaccaggcaggctcagactcactgctgacaggaatggctttctttaggatgaaagagttgttttttgaggacagcattgatgatgccaagtactgtgggcggctctatggcttaggcacaggagtggcccagaagcagaatgaggatgtggactctgcccaggagaagatgagcatcctggcgattatcaacaacatgcagcagtgatggcgccaggctctgcagggtgggcctgatcccagagtggtgcttactgtgctgactgtgtacttatcttccccaagagaaaatgcttcttttgagcacactgtacctaccatctgcattgagcagaaagacttttgttttactgaagacaaaagatgtttttattttagacccagaagagaggagtttgctctgaatttgtaaataagtcttccccattcctcatactcgagcctctcctctctggttgcctcctgccaccagcatccatggctcatttgacacctttttaaatatcaggacaagtctgaaacaaagtagtaaaatgtatataactcttacctgttgtcattctttttcttttaaatttgttgctaatctctgataatgaagattcttactctgattctcagctgagctgtgagggcttccagggaaaatggaacaaaatggtgttcttaggtaatgggttgtagatactgagtcttcctttccttttctgacccttctcgaggacatttgctttcctcacacttttgtagtctctctttacatattactatatggaaatgaattgctctgtgctgaaatttgaagaccagataatgaaactgaaaagcaaacaattttactgaatctgtctacccttcattcatgagaactccagaatgagtgttgaccactgaagcatcttttaagtctgtgttccattgtgccattcaggtttgctgtcacatatgcatcatctgaaatcatttgaaatttttgtacaataaaatatcctggatttgatcctgaaggaaactagtaagatcagatttttgggtcatgtctgttgtattttcagtaatgtgatttcagatggtcatctggattctcccacttctctactccattatttctctacttttccttccagcaaacctgaaacgtgagggagatggattaatgtgagtaacaggaatgtgtctttaaaaagctagagtggttacatttaatcaggcagtaagataatttgggttcttgagttgttttggagtaatatcccacaactggggtaggaagctcaggacttttttctttaaagctagtcatttcaaaagcatattgtatttttttgaatgactacagtatggacaatttcaaaaaccaaaacccactttggattggtggaagtaaaaactggtaactcactcaagtgaatgaatggtcttgcattttaaaagcttatgggaaactcaatttgaaatgattagaaaatgtcaagtattataagctggtatttaagatgcttgtaaatactatttatgtttttaattttgtaaaataaagatttctttttaaccactggcaaaaaaaaaaaaaaaaaaactcgagactagttctctcaacggaggcaggttggagccgctgccgtcgccatgacccgcggtaaccagcgtgagctcgcccgccagaagaatatgaaaaagcagagcgactcggttaagggaaagcgccgagatgacgggctttctgctgccgcccgcaagcagagggactcggagatcatgcagcagaagcagaaaaaggcaaacgagaagaaggaggaacccaagtagctttgtggcttcgtgtccaaccctcttgcccttcgcctgtgtgcctggagccagtcccaccacgctcgcgtttcctcctgtagtgctcacaggtcccagcaccgatggcattccctttgccctgagtctgcagcgggtcccttttgtgcttccttcccctcaggtagcctctctccccctgggccactcccgggggtgagggggttaccccttcccagtgttttttattcctgtggggctcaccccaaagtattaaaagtagctttgtaattc

SEQ ID NO: 83184 - DNA, 2460 bp, Homo sapiens
actctgtctcaaaaaaaaaaaaaaaaaaaaaagattcagattatagtacgataaactactcagaaaaagtgaaagttcctaacatgaagtagcatttacaagctttgagaaataaaatggttgaacactggggcctgataaccactgcttttttaacctctgtggtttattctcttgtagtggctatgattttggctatatggtaaagttgcttacagattctcgtttgccagaagaggaacatgaattctttcatattctgaaccttttcttcccatccatttatgatgtgaaatacctgatgaagagctgcaaaaatcttaagggaggtcttcaggaagttgctgatcagttggatttgcagaggattggaaggcagcaccaggcaggctcagactcactgctgacaggaatggctttctttaggatgaaagagttgttttttgaggacagcattgatgatgccaagtactgtgggcggctctatggcttaggcacaggagtggcccagaagcagaatgaggatgtggactctgcccaggagaagatgagcatcctggcgattatcaacaacatgcagcagtgatggcgccaggctctgcagggtgggcctgatcccagagtggtgcttactgtgctgactgtgtacttatcttccccaagagaaaatgcttcttttgagcacactgtacctaccatctgcattgagcagaaagacttttgttttactgaagacaaaagatgtttttattttagacccagaagagaggagtttgctctgaatttgtaaataagtcttccccattcctcatactcgagcctctcctctctggttgcctcctgccaccagcatccatggctcatttgacacctttttaaatatcaggacaagtctgaaacaaagtagtaaaatgtatataactcttacctgttgtcattctttttcttttaaatttgttgctaatctctgataatgaagattcttactctgattctcagctgagctgtgagggcttccagggaaaatggaacaaaatggtgttcttaggtaatgggttgtagatactgagtcttcctttccttttctgacccttctcgaggacatttgctttcctcacacttttgtagtctctctttacatattactatatggaaatgaattgctctgtgctgaaatttgaagaccagataatgaaactgaaaagcaaacaattttactgaatctgtctacccttcattcatgagaactccagaatgagtgttgaccactgaagcatcttttaagtctgtgttccattgtgccattcaggtttgctgtcacatatgcatcatctgaaatcatttgaaatttttgtacaataaaatatcctggatttgatcctgaaggaaactagtaagatcagatttttgggtcatgtctgttgtattttcagtaatgtgatttcagatggtcatctggattctcccacttctctactccattatttctctacttttccttccagcaaacctgaaacgtgagggagatggattaatgtgagtaacaggaatgtgtctttaaaaagctagagtggttacatttaatcaggcagtaagataatttgggttcttgagttgttttggagtaatatcccacaactggggtaggaagctcaggacttttttctttaaagctagtcatttcaaaagcatattgtatttttttgaatgactacagtatggacaatttcaaaaaccaaaacccactttggattggtggaagtaaaaactggtaactcactcaagtgaatgaatggtcttgcattttaaaagcttatgggaaactcaatttgaaatgattagaaaatgtcaagtattataagctggtatttaagatgcttgtaaatactatttatgtttttaattttgtaaaataaagatttctttttaaccactggcaaaaaaaaaaaaaaaaaaactcgagactagttctctcaacggaggcaggttggagccgctgccgtcgccatgacccgcggtaaccagcgtgagctcgcccgccagaagaatatgaaaaagcagagcgactcggttaagggaaagcgccgagatgacgggctttctgctgccgcccgcaagcagagggactcggagatcatgcagcagaagcagaaaaaggcaaacgagaagaaggaggaacccaagtagctttgtggcttcgtgtccaaccctcttgcccttcgcctgtgtgcctggagccagtcccaccacgctcgcgtttcctcctgtagtgctcacaggtcccagcaccgatggcattccctttgccctgagtctgcagcgggtcccttttgtgcttccttcccctcaggtagcctctctccccctgggccactcccgggggtgagggggttaccccttcccagtgttttttattcctgtggggctcaccccaaagtattaaaagtagctttgtaattc

SEQ ID NO: 83185 - DNA, 2061 bp, Homo sapiens
cataactctcaccatggttctctgtcccattctgcagttgttttttgaggacagcattgatgatgccaagtactgtgggcggctctatggcttaggcacaggagtggcccagaagcagaatgaggatgtggactctgcccaggagaagatgagcatcctggcgattatcaacaacatgcagcagtgatggcgccaggctctgcagggtgggcctgatcccagagtggtgcttactgtgctgactgtgtacttatcttccccaagagaaaatgcttcttttgagcacactgtacctaccatctgcattgagcagaaagacttttgttttactgaagacaaaagatgtttttattttagacccagaagagaggagtttgctctgaatttgtaaataagtcttccccattcctcatactcgagcctctcctctctggttgcctcctgccaccagcatccatggctcatttgacacctttttaaatatcaggacaagtctgaaacaaagtagtaaaatgtatataactcttacctgttgtcattctttttcttttaaatttgttgctaatctctgataatgaagattcttactctgattctcagctgagctgtgagggcttccagggaaaatggaacaaaatggtgttcttaggtaatgggttgtagatactgagtcttcctttccttttctgacccttctcgaggacatttgctttcctcacacttttgtagtctctctttacatattactatatggaaatgaattgctctgtgctgaaatttgaagaccagataatgaaactgaaaagcaaacaattttactgaatctgtctacccttcattcatgagaactccagaatgagtgttgaccactgaagcatcttttaagtctgtgttccattgtgccattcaggtttgctgtcacatatgcatcatctgaaatcatttgaaatttttgtacaataaaatatcctggatttgatcctgaaggaaactagtaagatcagatttttgggtcatgtctgttgtattttcagtaatgtgatttcagatggtcatctggattctcccacttctctactccattatttctctacttttccttccagcaaacctgaaacgtgagggagatggattaatgtgagtaacaggaatgtgtctttaaaaagctagagtggttacatttaatcaggcagtaagataatttgggttcttgagttgttttggagtaatatcccacaactggggtaggaagctcaggacttttttctttaaagctagtcatttcaaaagcatattgtatttttttgaatgactacagtatggacaatttcaaaaaccaaaacccactttggattggtggaagtaaaaactggtaactcactcaagtgaatgaatggtcttgcattttaaaagcttatgggaaactcaatttgaaatgattagaaaatgtcaagtattataagctggtatttaagatgcttgtaaatactatttatgtttttaattttgtaaaataaagatttctttttaaccactggcaaaaaaaaaaaaaaaaaaactcgagactagttctctcaacggaggcaggttggagccgctgccgtcgccatgacccgcggtaaccagcgtgagctcgcccgccagaagaatatgaaaaagcagagcgactcggttaagggaaagcgccgagatgacgggctttctgctgccgcccgcaagcagagggactcggagatcatgcagcagaagcagaaaaaggcaaacgagaagaaggaggaacccaagtagctttgtggcttcgtgtccaaccctcttgcccttcgcctgtgtgcctggagccagtcccaccacgctcgcgtttcctcctgtagtgctcacaggtcccagcaccgatggcattccctttgccctgagtctgcagcgggtcccttttgtgcttccttcccctcaggtagcctctctccccctgggccactcccgggggtgagggggttaccccttcccagtgttttttattcctgtggggctcaccccaaagtattaaaagtagctttgtaattc

SEQ ID NO: 83186 - DNA, 792 bp, Homo sapiens
ggcgggggggtgggggggggggcgctagttctagaccacgccccttccttgttcgctcggaaagaggaccaaaatggaggagtaagaatcatgattaaattgagcgagcgcaactaatcacgcgaagagggccgcaggcgggccgtcttccgcaagcgtgcttccaggcctccactccccacctattcggcggcaccctgttacttctgctcctgcgcgctgcttcccgcgacctcacaggcagagcgaacacgcacggagtcgcaggggcgcgcaaagggggaggagcgggcgtgaccaggcgcgcgcgcgcgtctggagtgactctagagagcaggagcagatccggggtagagggaaaagagctccgggccaggggctgccgtcgccgccgtcggggagtcagcccgccagcccgccagctcgtcagcccgccagccagcgcttcgcgggccctgtcggtcccgatcagaccaaacattgtctggcttgcactgtaaaactagttagctgaagacgacttctcaggtttcttcaggatgcctgcagcacttgtggagaatagccaggttatctgtgaagtgtgggccagtaatctagaagaagagatgaggaagatccgagaaatcgtgctcagttacagttatattgccatgtggaccagaatttccggtgttgtggtgcgaccatgtggtgaaggaagtctaggaagaaggaaggagcgctaacgatttggtggtgaagctaggaaaagattccggaaggagcggtgcatttgtgaagattccgtcc

SEQ ID NO: 83187 - DNA, 348 bp, Homo sapiens
tgacagagtcttttagataatcatctgtataccaagtaataacatgttacaagttatttaattctgtcatctagtaattttgattaagagaaactacaagtagctcaaacaattacactagtattcattgtttgaaccattagcaggaatagactactttaaggctggctgttgcttcacgtgggttacaaataactatttgctactttttcatagataaagcccctgaccttcatggaagcattagggaaaaagaaaacttaatttctttctttcttcaaagaacttttttcctttcactagatataagaaagaaaaagtcaacaataatacatgtgttgcttgagc

SEQ ID NO: 83188 - DNA, 441 bp, Homo sapiens
cccgccagccagcgcttcgcgggccctgtcggtcccggtaagcgggcctgcgcttaccggaaagaggagcgtaagatgaaagagtagaccattgggggtctgtagggggaaggggagtgggggcgtgtgtaaggggcagggtgtgtgaggaggagaggaaccccagcaaagagtagtaataataatggccaccgtcacacgataatattcgagtaatatgtgcggggactttacaaagcatctcatatgcttcattttaacttctactccaatcctccgaggtgcgtactgttatcaaacccattttacaagataggaaaaccgaggcacgaaatagattaagtggcttatgcaaggacacacgactactacgtggcctggcctggcttcgaacttagttatcttagtcctaaggcccgtaattttaactttgctttacca

SEQ ID NO: 83189 - DNA, 365 bp, Homo sapiens
ggattgattgcacctgtgaggttgaggctgtagtgagctgtgattgtgccactgccctccagcctgggtgacagagacagaccaaccctatctcaaaaaaacacaaaaagaattttgtgcccaagtttggggcttgccacataacttttataaatggaggtaaaattttatttatgaattaccaattcagcatccactgttttgtgaaaccttgtgatgagagactttttccttttccaggacacagaatttccaggtgttgtggtgcgaccaattggtgaatttcgtagttccatagattaccaatatcagcttctgcggtgcaatgttgaccttttaaaaattatccagctgggccttacatt

SEQ ID NO: 83190 - DNA, 550 bp, Homo sapiens
aataatgagcaaatgtatacctattataattaggaaatttagtttatggaggaaaatctcatttttctatctgtcacagaaatatgatctactttgcatgcttgtttgaatgttggaaagagtgaattgatctattaagttaggaaaagcatttcaaaaatacttgtactataattataaggtggtggtaatagtgtggccactacttctgtttcattattcaccagttaataaataaacaccttgttttttagagaggacatgtactcccaggattccatagatctccttgctaactcaggactacagtttcagaagcatgaagaggaagggattgacacactgcactttgcagagctgcttatgacatcaggagtggttctctgtgacaatgtcaaatggctttcatttcataggtcagtcctagggaatgtgtatttctctctcactttgggctacactgaagcagggaattgaattcttagtcatttttgcagtcctagtgactgttctgttcagcagcagcagccagaagttgaattggtgcttg

SEQ ID NO: 83191 - DNA, 2528 bp, Homo sapiens
agcggagagtggtgccgtccggttgtttggtgggaggcacgtaagaccgctctgggcacgggggcgctcacctcactggctcgttcggttctaggagcagatccggggtagagggaaaagagctccgggccaggggctgccgtcgccgccgtcggggagtcagcccgccagcccgccagctcgtcagcccgccagccagcgcttcgcgggccctgtcggtcccgatcagaccaaacattgtctggcttgcactgtaaaactagttagctgaagacgacttctcaggtttcttcaggatgcctgcagcacttgtggagaatagccaggttatctgtgaagtgtgggccagtaatctagaagaagagatgaggaagatccgagaaatcgtgctcagttacagttatattgccatggacacagaatttccaggtgttgtggtgcgaccaattggtgaatttcgtagttccatagattaccaatatcagcttctgcggtgcaatgttgaccttttaaaaattatccagctgggccttacattcacaaatgagaagggagagtatccttctggaatcaatacttggcagttcaatttcaaatttaaccttacagaggacatgtactcccaggattccatagatctccttgctaactcaggactacagtttcagaagcatgaagaggaagggattgacacactgcactttgcagagctgcttatgacatcaggagtggttctctgtgacaatgtcaaatggctttcatttcatagtggctatgattttggctatatggtaaagttgcttacagattctcgtttgccagaagaggaacatgaattctttcatattctgaaccttttcttcccatccatttatgatgtgaaatacctgatgaagagctgcaaaaatcttaagggaggtcttcaggaagttgctgatcagttggatttgcagaggattggaaggcagcaccaggcaggctcagactcactgctgacaggaatggctttctttaggatgaaagagttgttttttgaggacagcattgatgatgccaagtactgtgggcggctctatggcttaggcacaggagtggcccagaagcagaatgaggatgtggactctgcccaggagaagatgagcatcctggcgattatcaacaacatgcagcagtgatggcgccaggctctgcagggtgggcctgatcccagagtggtgcttactgtgctgactgtgtacttatcttccccaagagaaaatgcttcttttgagcacactgtacctaccatctgcattgagcagaaagacttttgttttactgaagacaaaagatgtttttattttagacccagaagagaggagtttgctctgaatttgtaaataagtcttccccattcctcatactcgagcctctcctctctggttgcctcctgccaccagcatccatggctcatttgacacctttttaaatatcaggacaagtctgaaacaaagtagtaaaatgtatataactcttacctgttgtcattctttttcttttaaatttgttgctaatctctgataatgaagattcttactctgattctcagctgagctgtgagggcttccagggaaaatggaacaaaatggtgttcttaggtaatgggttgtagatactgagtcttcctttccttttctgacccttctcgaggacatttgctttcctcacacttttgtagtctctctttacatattactatatggaaatgaattgctctgtgctgaaatttgaagaccagataatgaaactgaaaagcaaacaattttactgaatctgtctacccttcattcatgagaactccagaatgagtgttgaccactgaagcatcttttaagtctgtgttccattgtgccattcaggtttgctgtcacatatgcatcatctgaaatcatttgaaatttttgtacaataaaatatcctggatttgatcctgaaggaaactagtaagatcagatttttgggtcatgtctgttgtattttcagtaatgtgatttcagatggtcatctggattctcccacttctctactccattatttctctacttttccttccagcaaacctgaaacgtgagggagatggattaatgtgagtaacaggaatgtgtctttaaaaagctagagtggttacatttaatcaggcagtaagataatttgggttcttgagttgttttggagtaatatcccacaactggggtaggaagctcaggacttttttctttaaagctagtcatttcaaaagcatattgtatttttttgaatgactacagtatggacaatttcaaaaaccaaaacccactttggattggtggaagtaaaaactggtaactcactcaagtgaatgaatggtcttgcattttaaaagcttatgggaaactcaatttgaaatgattagaaaatgtcaagtattataagctggtatttaagatgcttgtaaatactatttatgtttttaattttgtaaaataaagatttctttttaaccactggca

SEQ ID NO: 83192 - DNA, 3238 bp, Homo sapiens
ggcgggggggtgggggggggggcgctagttctagaccacgccccttccttgttcgctcggaaagaggaccaaaatggaggagtaagaatcatgattaaattgagcgagcgcaactaatcacgcgaagagggccgcaggcgggccgtcttccgcaagcgtgcttccaggcctccactccccacctattcggcggcaccctgttacttctgctcctgcgcgctgcttcccgcgacctcacaggcagagcgaacacgcacggagtcgcaggggcgcgcaaagggggaggagcgggcgtgaccaggcgcgcgcgcgcgtctggagtgactctagagagcaggagcagatccggggtagagggaaaagagctccgggccaggggctgccgtcgccgccgtcggggagtcagcccgccagcccgccagctcgtcagcccgccagccagcgcttcgcgggccctgtcggtcccgatcagaccaaacattgtctggcttgcactgtaaaactagttagctgaagacgacttctcaggtttcttcaggatgcctgcagcacttgtggagaatagccaggttatctgtgaagtgtgggccagtaatctagaagaagagatgaggaagatccgagaaatcgtgctcagttacagttatattgccatggacacagaatttccaggtgttgtggtgcgaccaattggtgaatttcgtagttccatagattaccaatatcagcttctgcggtgcaatgttgaccttttaaaaattatccagctgggccttacattcacaaatgagaagggagagtatccttctggaatcaatacttggcagttcaatttcaaatttaaccttacagaggacatgtactcccaggattccatagatctccttgctaactcaggactacagtttcagaagcatgaagaggaagggattgacacactgcactttgcagagctgcttatgacatcaggagtggttctctgtgacaatgtcaaatggctttcatttcatagtggctatgattttggctatatggtaaagttgcttacagattctcgtttgccagaagaggaacatgaattctttcatattctgaaccttttcttcccatccatttatgatgtgaaatacctgatgaagagctgcaaaaatcttaagggaggtcttcaggaagttgctgatcagttggatttgcagaggattggaaggcagcaccaggcaggctcagactcactgctgacaggaatggctttctttaggatgaaagagttgttttttgaggacagcattgatgatgccaagtactgtgggcggctctatggcttaggcacaggagtggcccagaagcagaatgaggatgtggactctgcccaggagaagatgagcatcctggcgattatcaacaacatgcagcagtgatggcgccaggctctgcagggtgggcctgatcccagagtggtgcttactgtgctgactgtgtacttatcttccccaagagaaaatgcttcttttgagcacactgtacctaccatctgcattgagcagaaagacttttgttttactgaagacaaaagatgtttttattttagacccagaagagaggagtttgctctgaatttgtaaataagtcttccccattcctcatactcgagcctctcctctctggttgcctcctgccaccagcatccatggctcatttgacacctttttaaatatcaggacaagtctgaaacaaagtagtaaaatgtatataactcttacctgttgtcattctttttcttttaaatttgttgctaatctctgataatgaagattcttactctgattctcagctgagctgtgagggcttccagggaaaatggaacaaaatggtgttcttaggtaatgggttgtagatactgagtcttcctttccttttctgacccttctcgaggacatttgctttcctcacacttttgtagtctctctttacatattactatatggaaatgaattgctctgtgctgaaatttgaagaccagataatgaaactgatgagtgttgaccactgaagcatcttttaagtctgtgttccattgtgccattcaggtttgctgtcacatatgcatcatctgaaatcatttgaaatttttgtacaataaaatatcctggatttgatcctgaaggaaactagtaagatcagatttttgggtcatgtctgttgtattttcagtaatgtgatttcagatggtcatctggattctcccacttctctactccattatttctctacttttccttccagcaaacctgaaacgtgagggagatggattaatgtgagtaacaggaatgtgtctttaaaaagctagagtggttacatttaatcaggcagtaagataatttgggttcttgagttgttttggagtaatatcccacaactggggtaggaagctcaggacttttttctttaaagctagtcatttcaaaagcatattgtatttttttgaatgactacagtatggacaatttcaaaaaccaaaacccactttggattggtggaagtaaaaactggtaactcactcaagtgaatgaatggtcttgcattttaaaagcttatgggaaactcaatttgaaatgattagaaaatgtcaagtattataagctggtatttaagatgcttgtaaatactatttatgtttttaattttgtaaaataaagatttctttttaaccactggcaaaaaaaaaaaaaaaaaaactcgagactagttctctcaacggaggcaggttggagccgctgccgtcgccatgacccgcggtaaccagcgtgagctcgcccgccagaagaatatgaaaaagcagagcgactcggttaagggaaagcgccgagatgacgggctttctgctgccgcccgcaagcagagggactcggagatcatgcagcagaagcagaaaaaggcaaacgagaagaaggaggaacccaagtagctttgtggcttcgtgtccaaccctcttgcccttcgcctgtgtgcctggagccagtcccaccacgctcgcgtttcctcctgtagtgctcacaggtcccagcaccgatggcattccctttgccctgagtctgcagcgggtcccttttgtgcttccttcccctcaggtagcctctctccccctgggccactcccgggggtgagggggttaccccttcccagtgttttttattcctgtggggctcaccccaaagtattaaaagtagctttgtaattc

SEQ ID NO: 83193 - DNA, 1936 bp, Homo sapiens
ggcgggggggtgggggggggggcgctagttctagaccacgccccttccttgttcgctcggaaagaggaccaaaatggaggagtaagaatcatgattaaattgagcgagcgcaactaatcacgcgaagagggccgcaggcgggccgtcttccgcaagcgtgcttccaggcctccactccccacctattcggcggcaccctgttacttctgctcctgcgcgctgcttcccgcgacctcacaggcagagcgaacacgcacggagtcgcaggggcgcgcaaagggggaggagcgggcgtgaccaggcgcgcgcgcgcgtctggagtgactctagagagcaggagcagatccggggtagagggaaaagagctccgggccaggggctgccgtcgccgccgtcggggagtcagcccgccagcccgccagctcgtcagcccgccagccagcgcttcgcgggccctgtcggtcccgatcagaccaaacattgtctggcttgcactgtaaaactagttagctgaagacgacttctcaggtttcttcaggatgcctgcagcacttgtggagaatagccaggttatctgtgaagtgtgggccagtaatctagaagaagagatgaggaagatccgagaaatcgtgctcagttacagttatattgccatggacacagaatttccaggtgttgtggtgcgaccaattggtgaatttcgtagttccatagattaccaatatcagcttctgcggtgcaatgttgaccttttaaaaattatccagctgggccttacattcacaaatgagaagggagagtatccttctggaatcaatacttggcagttcaatttcaaatttaaccttacagaggacatgtactcccaggattccatagatctccttgctaactcaggactacagtttcagaagcatgaagaggaagggattgacacactgcactttgcagagctgcttatgacatcaggagtggttctctgtgacaatgtcaaatggctttcatttcatagtggctatgattttggctatatggtaaagttgcttacagattctcgtttgccagaagaggaacatgaattctttcatattctgaaccttttcttcccatccatttatgatgtgaaatacctgatgaagagctgcaaaaatcttaagggaggtcttcaggaagttgctgatcagttggatttgcagaggattggaaggcagcaccaggcaggctcagactcactgctgacaggaatggctttctttaggatgaaagagttgttttttgaggacagcattgatgatgccaagtactgtgggcggctctatggcttaggcacaggagtggcccagaagcagaatgaggatgtggactctgcccaggagaagatgagcatcctggcgattatcaacaacatgcagcagtgatggcgccaggctctgcagggtgggcctgatcccagagtggtgcttactgtgctgactgtgtacttatcttccccaagagaaaatgcttcttttgagcacactgtacctaccatctgcattgagcagaaagacttttgttttactgaagacaaaagatgtttttattttagacccagaagagaggagtttgctctgaatttgtaaataagtcttccccattcctcatactcgagcctctcctctctggttgcctcctgccaccagcatccatggctcatttgacacctttttaaatatcaggacaagtctgaaacaaagtagtaaaatgtatataactcttacctgttgtcattctttttcttttaaatttgttgctaatctctgataatgaagattcttactctgattctcagctgagctgtgagggcttccagggaaaatggaacaaaatggtgttcttaggtaatgggttgtagatactgatctgtattaactgcttggggatcctctaggtcagc

SEQ ID NO: 83194 - DNA, 3151 bp, Homo sapiens
ggcgggggggtgggggggggggcgctagttctagaccacgccccttccttgttcgctcggaaagaggaccaaaatggaggagtaagaatcatgattaaattgagcgagcgcaactaatcacgcgaagagggccgcaggcgggccgtcttccgcaagcgtgcttccaggcctccactccccacctattcggcggcaccctgttacttctgctcctgcgcgctgcttcccgcgacctcacaggcagagcgaacacgcacggagtcgcaggggcgcgcaaagggggaggagcgggcgtgaccaggcgcgcgcgcgcgtctggagtgactctagagagcaggagcagatccggggtagagggaaaagagctccgggccaggggctgccgtcgccgccgtcggggagtcagcccgccagcccgccagctcgtcagcccgccagccagcgcttcgcgggccctgtcggtcccggtaagcgggcctgcgcttaccggaaagaggagcgtaagatgaaagagtgacacagaatttccaggtgttgtggtgcgaccaattggtgaatttcgtagttccatagattaccaatatcagcttctgcggtgcaatgttgaccttttaaaaattatccagctgggccttacattcacaaatgagaagggagagtatccttctggaatcaatacttggcagttcaatttcaaatttaaccttacagaggacatgtactcccaggattccatagatctccttgctaactcaggactacagtttcagaagcatgaagaggaagggattgacacactgcactttgcagagctgcttatgacatcaggagtggttctctgtgacaatgtcaaatggctttcatttcatagtggctatgattttggctatatggtaaagttgcttacagattctcgtttgccagaagaggaacatgaattctttcatattctgaaccttttcttcccatccatttatgatgtgaaatacctgatgaagagctgcaaaaatcttaagggaggtcttcaggaagttgctgatcagttggatttgcagaggattggaaggcagcaccaggcaggctcagactcactgctgacaggaatggctttctttaggatgaaagagttgttttttgaggacagcattgatgatgccaagtactgtgggcggctctatggcttaggcacaggagtggcccagaagcagaatgaggatgtggactctgcccaggagaagatgagcatcctggcgattatcaacaacatgcagcagtgatggcgccaggctctgcagggtgggcctgatcccagagtggtgcttactgtgctgactgtgtacttatcttccccaagagaaaatgcttcttttgagcacactgtacctaccatctgcattgagcagaaagacttttgttttactgaagacaaaagatgtttttattttagacccagaagagaggagtttgctctgaatttgtaaataagtcttccccattcctcatactcgagcctctcctctctggttgcctcctgccaccagcatccatggctcatttgacacctttttaaatatcaggacaagtctgaaacaaagtagtaaaatgtatataactcttacctgttgtcattctttttcttttaaatttgttgctaatctctgataatgaagattcttactctgattctcagctgagctgtgagggcttccagggaaaatggaacaaaatggtgttcttaggtaatgggttgtagatactgagtcttcctttccttttctgacccttctcgaggacatttgctttcctcacacttttgtagtctctctttacatattactatatggaaatgaattgctctgtgctgaaatttgaagaccagataatgaaactgaaaagcaaacaattttactgaatctgtctacccttcattcatgagaactccagaatgagtgttgaccactgaagcatcttttaagtctgtgttccattgtgccattcaggtttgctgtcacatatgcatcatctgaaatcatttgaaatttttgtacaataaaatatcctggatttgatcctgaaggaaactagtaagatcagatttttgggtcatgtctgttgtattttcagtaatgtgatttcagatggtcatctggattctcccacttctctactccattatttctctacttttccttccagcaaacctgaaacgtgagggagatggattaatgtgagtaacaggaatgtgtctttaaaaagctagagtggttacatttaatcaggcagtaagataatttgggttcttgagttgttttggagtaatatcccacaactggggtaggaagctcaggacttttttctttaaagctagtcatttcaaaagcatattgtatttttttgaatgactacagtatggacaatttcaaaaaccaaaacccactttggattggtggaagtaaaaactggtaactcactcaagtgaatgaatggtcttgcattttaaaagcttatgggaaactcaatttgaaatgattagaaaatgtcaagtattataagctggtatttaagatgcttgtaaatactatttatgtttttaattttgtaaaataaagatttctttttaaccactggcaaaaaaaaaaaaaaaaaaactcgagactagttctctcaacggaggcaggttggagccgctgccgtcgccatgacccgcggtaaccagcgtgagctcgcccgccagaagaatatgaaaaagcagagcgactcggttaagggaaagcgccgagatgacgggctttctgctgccgcccgcaagcagagggactcggagatcatgcagcagaagcagaaaaaggcaaacgagaagaaggaggaacccaagtagctttgtggcttcgtgtccaaccctcttgcccttcgcctgtgtgcctggagccagtcccaccacgctcgcgtttcctcctgtagtgctcacaggtcccagcaccgatggcattccctttgccctgagtctgcagcgggtcccttttgtgcttccttcccctcaggtagcctctctccccctgggccactcccgggggtgagggggttaccccttcccagtgttttttattcctgtggggctcaccccaaagtattaaaagtagctttgtaattc

SEQ ID NO: 83195 - DNA, 3202 bp, Homo sapiens
ggcgggggggtgggggggggggcgctagttctagaccacgccccttccttgttcgctcggaaagaggaccaaaatggaggagtaagaatcatgattaaattgagcgagcgcaactaatcacgcgaagagggccgcaggcgggccgtcttccgcaagcgtgcttccaggcctccactccccacctattcggcggcaccctgttacttctgctcctgcgcgctgcttcccgcgacctcacaggcagagcgaacacgcacggagtcgcaggggcgcgcaaagggggaggagcgggcgtgaccaggcgcgcgcgcgcgtctggagtgactctagagagcaggagcagatccggggtagagggaaaagagctccgggccaggggctgccgtcgccgccgtcggggagtcagcccgccagcccgccagctcgtcagcccgccagccagcgcttcgcgggccctgtcggtcccggacacagaatttccaggtgttgtggtgcgaccaattggtgaatttcgtagttccatagattaccaatatcagcttctgcggtgcaatgttgaccttttaaaaattatccagctgggccttacattcacaaatgagaagggagagtatccttctggaatcaatacttggcagttcaatttcaaatttaaccttacatataagaaagaaaaagtcaacaataatacatgtgttgcttgagctaagacataggagaacagacaacacatacccattacatttctaggaaatacgagagaggacatgtactcccaggattccatagatctccttgctaactcaggactacagtttcagaagcatgaagaggaagggattgacacactgcactttgcagagctgcttatgacatcaggagtggttctctgtgacaatgtcaaatggctttcatttcatagtggctatgattttggctatatggtaaagttgcttacagattctcgtttgccagaagaggaacatgaattctttcatattctgaaccttttcttcccatccatttatgatgtgaaatacctgatgaagagctgcaaaaatcttaagggaggtcttcaggaagttgctgatcagttggatttgcagaggattggaaggcagcaccaggcaggctcagactcactgctgacaggaatggctttctttaggatgaaagagttgttttttgaggacagcattgatgatgccaagtactgtgggcggctctatggcttaggcacaggagtggcccagaagcagaatgaggatgtggactctgcccaggagaagatgagcatcctggcgattatcaacaacatgcagcagtgatggcgccaggctctgcagggtgggcctgatcccagagtggtgcttactgtgctgactgtgtacttatcttccccaagagaaaatgcttcttttgagcacactgtacctaccatctgcattgagcagaaagacttttgttttactgaagacaaaagatgtttttattttagacccagaagagaggagtttgctctgaatttgtaaataagtcttccccattcctcatactcgagcctctcctctctggttgcctcctgccaccagcatccatggctcatttgacacctttttaaatatcaggacaagtctgaaacaaagtagtaaaatgtatataactcttacctgttgtcattctttttcttttaaatttgttgctaatctctgataatgaagattcttactctgattctcagctgagctgtgagggcttccagggaaaatggaacaaaatggtgttcttaggtaatgggttgtagatactgagtcttcctttccttttctgacccttctcgaggacatttgctttcctcacacttttgtagtctctctttacatattactatatggaaatgaattgctctgtgctgaaatttgaagaccagataatgaaactgaaaagcaaacaattttactgaatctgtctacccttcattcatgagaactccagaatgagtgttgaccactgaagcatcttttaagtctgtgttccattgtgccattcaggtttgctgtcacatatgcatcatctgaaatcatttgaaatttttgtacaataaaatatcctggatttgatcctgaaggaaactagtaagatcagatttttgggtcatgtctgttgtattttcagtaatgtgatttcagatggtcatctggattctcccacttctctactccattatttctctacttttccttccagcaaacctgaaacgtgagggagatggattaatgtgagtaacaggaatgtgtctttaaaaagctagagtggttacatttaatcaggcagtaagataatttgggttcttgagttgttttggagtaatatcccacaactggggtaggaagctcaggacttttttctttaaagctagtcatttcaaaagcatattgtatttttttgaatgactacagtatggacaatttcaaaaaccaaaacccactttggattggtggaagtaaaaactggtaactcactcaagtgaatgaatggtcttgcattttaaaagcttatgggaaactcaatttgaaatgattagaaaatgtcaagtattataagctggtatttaagatgcttgtaaatactatttatgtttttaattttgtaaaataaagatttctttttaaccactggcaaaaaaaaaaaaaaaaaaactcgagactagttctctcaacggaggcaggttggagccgctgccgtcgccatgacccgcggtaaccagcgtgagctcgcccgccagaagaatatgaaaaagcagagcgactcggttaagggaaagcgccgagatgacgggctttctgctgccgcccgcaagcagagggactcggagatcatgcagcagaagcagaaaaaggcaaacgagaagaaggaggaacccaagtagctttgtggcttcgtgtccaaccctcttgcccttcgcctgtgtgcctggagccagtcccaccacgctcgcgtttcctcctgtagtgctcacaggtcccagcaccgatggcattccctttgccctgagtctgcagcgggtcccttttgtgcttccttcccctcaggtagcctctctccccctgggccactcccgggggtgagggggttaccccttcccagtgttttttattcctgtggggctcaccccaaagtattaaaagtagctttgtaattc

SEQ ID NO: 83196 - DNA, 3178 bp, Homo sapiens
ggcgggggggtgggggggggggcgctagttctagaccacgccccttccttgttcgctcggaaagaggaccaaaatggaggagtaagaatcatgattaaattgagcgagcgcaactaatcacgcgaagagggccgcaggcgggccgtcttccgcaagcgtgcttccaggcctccactccccacctattcggcggcaccctgttacttctgctcctgcgcgctgcttcccgcgacctcacaggcagagcgaacacgcacggagtcgcaggggcgcgcaaagggggaggagcgggcgtgaccaggcgcgcgcgcgcgtctggagtgactctagagagcaggagcagatccggggtagagggaaaagagctccgggccaggggctgccgtcgccgccgtcggggagtcagcccgccagcccgccagctcgtcagcccgccagccagcgcttcgcgggccctgtcggtcccggtaagcgggcctgcgcttaccggaaagaggagcgtaagatgaaagagtatcagaccaaacattgtctggcttgcactgtaaaactagttagctgaagacgacttctcaggtttcttcaggatgcctgcagcacttgtggagaatagccaggttatctgtgaagtgtgggccagtaatctagaagaagagatgaggaagatccgagaaatcgtgctcagttacagttatattgccatggacacagaatttccaggtgttgtggtgcgaccaattggtgaatttcgtagttccatagattaccaatatcagcttctgcggtgcaatgttgaccttttaaaaattatccagctgggccttacattcacaaatgagaagggagagtatccttctggaatcaatacttggcagttcaatttcaaatttaaccttactggctatgattttggctatatggtaaagttgcttacagattctcgtttgccagaagaggaacatgaattctttcatattctgaaccttttcttcccatccatttatgatgtgaaatacctgatgaagagctgcaaaaatcttaagggaggtcttcaggaagttgctgatcagttggatttgcagaggattggaaggcagcaccaggcaggctcagactcactgctgacaggaatggctttctttaggatgaaagagttgttttttgaggacagcattgatgatgccaagtactgtgggcggctctatggcttaggcacaggagtggcccagaagcagaatgaggatgtggactctgcccaggagaagatgagcatcctggcgattatcaacaacatgcagcagtgatggcgccaggctctgcagggtgggcctgatcccagagtggtgcttactgtgctgactgtgtacttatcttccccaagagaaaatgcttcttttgagcacactgtacctaccatctgcattgagcagaaagacttttgttttactgaagacaaaagatgtttttattttagacccagaagagaggagtttgctctgaatttgtaaataagtcttccccattcctcatactcgagcctctcctctctggttgcctcctgccaccagcatccatggctcatttgacacctttttaaatatcaggacaagtctgaaacaaagtagtaaaatgtatataactcttacctgttgtcattctttttcttttaaatttgttgctaatctctgataatgaagattcttactctgattctcagctgagctgtgagggcttccagggaaaatggaacaaaatggtgttcttaggtaatgggttgtagatactgagtcttcctttccttttctgacccttctcgaggacatttgctttcctcacacttttgtagtctctctttacatattactatatggaaatgaattgctctgtgctgaaatttgaagaccagataatgaaactgaaaagcaaacaattttactgaatctgtctacccttcattcatgagaactccagaatgagtgttgaccactgaagcatcttttaagtctgtgttccattgtgccattcaggtttgctgtcacatatgcatcatctgaaatcatttgaaatttttgtacaataaaatatcctggatttgatcctgaaggaaactagtaagatcagatttttgggtcatgtctgttgtattttcagtaatgtgatttcagatggtcatctggattctcccacttctctactccattatttctctacttttccttccagcaaacctgaaacgtgagggagatggattaatgtgagtaacaggaatgtgtctttaaaaagctagagtggttacatttaatcaggcagtaagataatttgggttcttgagttgttttggagtaatatcccacaactggggtaggaagctcaggacttttttctttaaagctagtcatttcaaaagcatattgtatttttttgaatgactacagtatggacaatttcaaaaaccaaaacccactttggattggtggaagtaaaaactggtaactcactcaagtgaatgaatggtcttgcattttaaaagcttatgggaaactcaatttgaaatgattagaaaatgtcaagtattataagctggtatttaagatgcttgtaaatactatttatgtttttaattttgtaaaataaagatttctttttaaccactggcaaaaaaaaaaaaaaaaaaactcgagactagttctctcaacggaggcaggttggagccgctgccgtcgccatgacccgcggtaaccagcgtgagctcgcccgccagaagaatatgaaaaagcagagcgactcggttaagggaaagcgccgagatgacgggctttctgctgccgcccgcaagcagagggactcggagatcatgcagcagaagcagaaaaaggcaaacgagaagaaggaggaacccaagtagctttgtggcttcgtgtccaaccctcttgcccttcgcctgtgtgcctggagccagtcccaccacgctcgcgtttcctcctgtagtgctcacaggtcccagcaccgatggcattccctttgccctgagtctgcagcgggtcccttttgtgcttccttcccctcaggtagcctctctccccctgggccactcccgggggtgagggggttaccccttcccagtgttttttattcctgtggggctcaccccaaagtattaaaagtagctttgtaattc

SEQ ID NO: 83197 - DNA, 502 bp, Homo sapiens
ttctggatccccgttactggcatttgttgatttagagatactcaaactccatcctgataaagctctatttaatctgggtttacttagtcgttggtttagtttgaagtgcggggagttgttttggaaagtaggttgctacttgtggtgaaaaggctttttgctgacgtccttacctggtggaatgataagagatggtttcagtagatggccaagcattggatcagatatctgtcaacctaacttgaagagaaagccatgaaagaagtgtggctaaaaactgctgggttatgcttgctcaggaaactccctgtctgggtcacttaccttttattactaacttttcactcagtcactatactggatttcccctttttcctctcagaaaattagtaagcatgtcatttcctatccacatctatgcatttcaatcagataagagctgtgaaggtaccacgtccatgttggaccatatactaaacattggcttattgcatgatgtgct

SEQ ID NO: 83198 - DNA, 907 bp, Homo sapiens
ggttgacccgggccctcctccacacccccttccttcttcgcctcctccctctttcctgcacgggggctcgggctcactataaaaggtgggagcgcgtggtgccccagcaacgacgagtttcagaacgatggagagctcccgcgtgaggctgctgcccctcctgggcgccgccctgctgctgatgctacctctgttgggtacccgtgcccaggaggacgccgagctccagccccgagccctggacatctactctgccgtggatgatgcctcccacgagaaggagctgatcgaagcgctgcaagaagtcttgaagaagctcaagagtaaacgtgttcccatctatgagaagaagtatggccaagtccccatgtgtgacgccggtgagcagtgtgcagtgaggaaaggggcaaggatcgggaagctgtgtgactgtccccgaggaacctcctgcaattccttcctcctgaagtgcttatgaaggggcgtccattctcctccatacatccccatccctctactttccccagaggaccacaccttcctccctggagtttggcttaagcaacagataaagtttttattttcctctgaagggaaagggctcttttcctgctgtttcaaaaataaaagaacacattagatgttactgtgtgaagaataatgccttgtatggtgttgatacgtgtgtgaagtattcttattttatttgtctgacaaactcttgtgtacctttgtgtaaagaagggaagctttgtttgaaaattgtatttttgtatgtggcatggcagaatgaaaattagatctagctaatctcggtagatgtcattacaacctggaaaataaatcaccctaagtgacacaaattgaagcatgtacaaattatacataataaagtgtttttaataat

SEQ ID NO: 83199 - DNA, 831 bp, Homo sapiens
cgtggcctctaatcatccactctgttcatggaggcgtctattcgtccttcatggctaccttttgtttgttcgccagatatctcgctgactccccccttgggcccctctgttctatccacctttgtggacccgtccgcggagactccgtctcctccccgagccctggacatctactctgccgtggatgatgcctcccacgagaaggagctgatcgaagcgctgcaagaagtcttgaagaagctcaagagtaaacgtgttcccatctatgagaagaagtatggccaagtccccatgtgtgacgccggtgagcagtgtgcagtgaggaaaggggcaaggatcgggaagctgtgtgactgtccccgaggaacctcctgcaattccttcctcctgaagtgcttatgaaggggcgtccattctcctccatacatccccatccctctactttccccagaggaccacaccttcctccctggagtttggcttaagcaacagataaagtttttattttcctctgaagggaaagggctcttttcctgctgtttcaaaaataaaagaacacattagatgttactgtgtgaagaataatgccttgtatggtgttgatacgtgtgtgaagtattcttattttatttgtctgacaaactcttgtgtacctttgtgtaaagaagggaagctttgtttgaaaattgtatttttgtatgtggcatggcagaatgaaaattagatctagctaatctcggtagatgtcattacaacctggaaaataaatcaccctaagtgacacaaattgaagcatgtacaaattatacataataaagtgtttttaataat

SEQ ID NO: 83200 - DNA, 1334 bp, Homo sapiens
ggttgacccgggccctcctccacacccccttccttcttcgcctcctccctctttcctgcacgggggctcgggctcactataaaaggtgggagcgcgtggtgccccagcaacgacgagtttcagaacgatggagagctcccgcgtgaggctgctgcccctcctgggcgccgccctgctgctgatgctacctctgttgggtacccgtgcccaggaggacgccgagctccagccccgagccctggacatctactctgccgtggatgatgcctcccacgagaaggagctggtcggtattcccctcgctctcgacccccttgagctgtcgccttgtctcttctcttgcacgcctccctcctccccccacccccactcctattcccagagtcagggcgcggggagctgagcgcaacgcccaggcacccactgccatccgaagagcgtctcgagctcacgggctcctggcagtctgttgagcgaatccctcatcccggcccctctgagcaacaggggccccagcggctcagagacccgcggtcagtacctgggacagcgtccgctaagtttccacccctcgaccattccctgtgtccgcggagtcccaccgcagagtgcgtgtgggtccggggctccttataactagggctggaagtgcgcacctgggctgggctcgcagccaaggcggcaacttcaggctccgaagcggtgtgttgcagatcgaagcgctgcaagaagtcttgaagaagctcaagagtaaacgtgttcccatctatgagaagaagtatggccaagtccccatgtgtgacgccggtgagcagtgtgcagtgaggaaaggggcaaggatcgggaagctgtgtgactgtccccgaggaacctcctgcaattccttcctcctgaagtgcttatgaaggggcgtccattctcctccatacatccccatccctctactttccccagaggaccacaccttcctccctggagtttggcttaagcaacagataaagtttttattttcctctgaagggaaagggctcttttcctgctgtttcaaaaataaaagaacacattagatgttactgtgtgaagaataatgccttgtatggtgttgatacgtgtgtgaagtattcttattttatttgtctgacaaactcttgtgtacctttgtgtaaagaagggaagctttgtttgaaaattgtatttttgtatgtggcatggcagaatgaaaattagatctagctaatctcggtagatgtcattacaacctggaaaataaatcaccctaagtgacacaaattgaagcatgtacaaattatacataataaagtgtttttaataat

SEQ ID NO: 83201 - DNA, 886 bp, Homo sapiens
ggttgacccgggccctcctccacacccccttccttcttcgcctcctccctctttcctgcacgggggctcgggctcactataaaaggtgggagcgcgtggtgccccagcaacgacgagtttcagaacgatggagagctcccgcgtgaggctgctgcccctcctgggcgccgccctgctgctgatgctacctctgttgggtacccgtgcccaggaggacgccgagctccagccccgagccctggacatctactctgccgtggatgatgcctcccacgagaaggagctgatcgaagcgctgcaagaagtcttgaagaagctcaagagtaaacgtgttcccatctatgagaagaagtatggccaagtccccatgtgtgacgccggtgagcagtgtgcagtgaggaaaggggcaaggatcgggaagctgtgtgactgtccccgaggaacctcctgcaattccttcctcctgaagtgcttatgaaggggcgtccattctcctccatacatccccatccctctactttccccagaggaccacaccttcctccctggagtttggcttaagcaacagataaagtttttattttcctctgaagggaaagggctcttttcctgctgtttcaaaaataaaagaacacattagatgttactgtgtgaagaataatgccttgtatggtgttgatacgtgtgtgaagtattcttattttatttgggtgtttatcgatgccaccattggctcacctgtgttcaggtccacacccaaaagctggactgattctgaatgttctgcttgaattttaagtaatgtttcctgaagtgcaaaacagagtcttgagcagaacttgggaataatggcatggtcagaaatgttgtgatcaagtgtggctgg

SEQ ID NO: 83202 - DNA, 1106 bp, Homo sapiens
ggttgacccgggccctcctccacacccccttccttcttcgcctcctccctctttcctgcacgggggctcgggctcactataaaaggtgggagcgcgtggtgccccagcaacgacgagtttcagaacgatggagagctcccgcgtgaggctgctgcccctcctgggcgccgccctgctgctgatgctacctctgttgggtacccgtgcccaggaggacgccgagctccagccccgagccctggacatctactctgccgtggatgatgcctcccacgagaaggagctgatcgaagcgctgcaagaagtcttgaagaagctcaagagtaaacgtgttcccatctatgagaagaagtatggccaagtccccatgtgtgacgccggtgagcagtgtgcagtgaggaaaggggcaaggatcgggaagctgtgtgactgtccccgaggaacctcctgcaattccttcctcctgaagtgcttatgaaggggcgtccattctcctccatacatccccatccctctactttccccagaggaccacaccttcctccctggagtttggcttaagcaacagataaagtttttattttcctctgaagggaaagggctcttttcctgctgtttcaaaaataaaagaacacattagatgttactgtgtgaagaataatgccttgtatggtgttgatacgtgtgtgaagtattcttattttatttgtctgacaaactcttgtgtacctttgtgtaaagaagggaagctttgtttgaaaattgtatttttgtatgtggcatggcagaatgaaaattagatctagctaatctcggtagatgtcattacaacctggaaaataaatcaccctaagtgacacaaattgaagcatgtacaaattatacataataaagtgtttttaataatacacaaaaacacaacaaaaaaaaaaatttggggcggccttggagccggaagagttttaaaccctctgtgtggcgcgggcccctgggttatgggaactgtgcctacgggtccagaaaccgggcggaatggggggtttcacccataaacgccggggccgggttgaaaacgaggggtggggctgggtctaacgggccgggga

SEQ ID NO: 83203 - DNA, 997 bp, Homo sapiens
  misc_feature (944)..(944): n is a, c, g, or t
  misc_feature (964)..(964): n is a, c, g, or t
ggttgacccgggccctcctccacacccccttccttcttcgcctcctccctctttcctgcacgggggctcgggctcactataaaaggtgggagcgcgtggtgccccagcaacgacgagtttcagaacgatggagagctcccgcgtgaggctgctgcccctcctgggcgccgccctgctgctgatgctacctctgttgggtacccgtgcccaggaggacgccgagctccagccccgagccctggacatctactctgccgtggatgatgcctcccacgagaaggagctgatcgaagcgctgcaagaagtcttgaagaagctcaagagtaaacgtgttcccatctatgagaagaagtatggccaagtccccatgtgtgacgccggtgagcagtgtgcagtgaggaaaggggcaaggatcgggaagctgtgtgactgtccccgaggaacctcctgcaattccttcctcctgaagtgcttatgaaggggcgtccattctcctccatacatccccatccctctactttccccagaggaccacaccttcctccctggagtttggcttaagcaacagataaagtttttattttcctctgaagggaaagggctcttttcctgctgtttcaaaaataaaagaacacattagatgttactgtgtgaagaataatgccttgtatggtgttgatacgtgtgtgaagtattcttattttatttgtctgacaaactcttgtgtacctttgtgtaaagaagggaagctttgtttgaaaattgtatttttgtatgtggcatggcagaatgaaaattagatctagctaatctcggtagatgtcattacaacctggaaaataaatcaccctaagtgacacaaattgaagcatgtacaaattatacataataaagtgtttttaataatctcgtgccgaattcggcacgaggcggccaagggtgcntgagcggcgcactggttgantgcccggtttggcccggccttctgacgagggtc

SEQ ID NO: 83204 - DNA, 3026 bp, Homo sapiens
tgaaaagggcaggtagcaaatattagaggctttgcaagctaagacaaaatgaaggacattatttaggtactcaaggaaacttttcaccaaatttttattctaaaaattgaaaactcaaaatattgagtacaatttgagattctttttttagtaatagagttctactaatgggaataatgggattttttggcaggggacgggaggtaacattttgctcaatttgggctgaaagttggtatcccctcattggaataaatagaaaatgttaatctgttaatgctgatgtgtaatgggatttcacgtatttcatctttgaaaatgtcttttcacacaaacaggtcaaggtactgctaaatactgacacatccacccatgagcatgtgattttagttaagcatattcatcacttgtaaggcatttgtaggattcatctttttggtatttgccctttagcatgtcattcattcaagatgattcatttccaacagaagattaagaggaaactttaaaagcatttaattgcagttaaatgcttttaaaatttaaaaattttctttgcactgcatcaaggtccaaaaaactgctacaggaaaatatatccactaaaaatggatttggcaatacagcgctgttttgacttctcatagcacagaaagtatataaagcagcttgacaatcttaagttttagtttttattgaaatgaatttaccatattatgttgttgtaccttgtaatttcaggtcaaattcattaagaaacattttcaagtctgtggcaaaagttaatttccaaagttactcagtgttaaaaaacagtggttgaggatggtttttctcattcagaaaaatttcaatgtcagcccagagcccaaaaaaataaaaataaatctttagcactgctaagccattgaacgcctgtgtggcaaatcaaatcaggatattcagcttctgtttctcacaaaaaaaaaaaaaatcatggaactgaagatggttaagtccacaagagcaaatgaagttaactgttgaccagttcagtaacaccaatatttcctgtgaagtacctgctgatgaataatcaagtgagtaactacaggctttaaacaacttacgttttcacaagccttaaaatttgaccaaataaactttttttctgcttcatgcatttttcccagcatcggttgcatcacatcttagtagattccacttcaggttgtactgtttatcaacttttttgaaaatattcctacttgtagttccatacaaattcttcgatcacttcaaatccagcaatggtttctcaaaaaataaagctaggcagtactgactagtaagaggcaaagaattaacagtgtcatttgatgttgtgtccaaaatcctcattcttcaaactactgttctcatcaaagggctgatgtcttaattttctctggacacatgtctttgggttggttactatcttcaagcacgatgtaattcagcattagtaaatggttttctttgcttggctaacaaataggctacttgtaaacattttggttgcagcctcatttttattacttttgtgaaattttgctgtgatgtttcatttaaattttctaattcttctgactgttgctttcccaccagttgggaatattgtgatgttagtctgatactgtcagtctattcttttaccagttatggtgacactgcattataaacacaatgtaccagcatataataaaatagtccatattccagtgtgccttgaaagtgtaacattcaaaggtacttttcttgttctgagatacagggcatgaactggtagcagaaaaagtaataaatctagcaatacacagggcattccaaatgctttcaggtaatatctgcatcaccatgattctgtagcttgccaagcggcaatgtgaaacaagacacacatacacaggttctgtagcagctactcaactttcccattatagcaaaaaagtatccatagataatatgtaaattagtgtggctgcattccaataaaaacttatagacactaaaatttgaatttcatgtaattttcagatgtcaggaaataatcttttgattatttttcccaaccatttaaaagccattttcagttcatgggccacacaaaaacaggcagcaagctgattctggctacgggccatagtttgacaacccttgctctagtagatttaacagaatatatgagcctgtaattaattaatggctcagtaacactaaaatatcagccaaatatcttacatctggaacctagactttacaaacattgagactgtctggaacaaaataaaaaagtaaaacttagacccagtaaaagtcaaaatgttcctctacaaaagttacactatacggttgctcaacctacaatgaggttacatctgaaaaaatactaagatgcatttaatgcagcaacagcatacagtcccccaatttacgatggttcaacttataaattttgactttgcaatggtgcaaaagcaatacacattcagtagaaactataaccccatctttggtcctaaggcgctcctaaacttttgatggggttacctctcaatacacccactgtaaagttgaaaaatcattaagtcgaaagtaagttagggattatctatactttttagggacagaagccagaaatgatacaagttatgagattgagcaactatgtggctaataaaaaggcaatctttatcattcctatttgaaatccagcattgatttctcaaatagttgaacagaatttaaatattagttttctcagctaacaaatcacaagcgaaaagaagcttcacttcctttttaacgaagacaaaagaagccagttagaaacttactacattgtgttagattttttaaaaagccacagttataccaaatgtatttactttgtgaagtatatccttcggaataaatgcattcctggaaaggagaaacagaagtcagtccttaattagctagttgaggtactcataaagaacaagaataagccaacacttgaaatgcag

SEQ ID NO: 83205 - DNA, 2989 bp, Homo sapiens
tgaaaagggcaggtagcaaatattagaggctttgcaagctaagacaaaatgaaggacattatttaggtactcaaggaaacttttcaccaaatttttattctaaaaattgaaaactcaaaatattgagtacaatttgagattctttttttagtaatagagttctactaatgggaataatgggattttttggcaggggacgggaggtaacattttgctcaatttgggctgaaagttggtatcccctcattggaataaatagaaaatgttaatctgttaatgctgatgtgtaatgggatttcacgtatttcatctttgaaaatgtcttttcacacaaacaggtcaaggtactgctaaatactgacacatccacccatgagcatgtgattttagttaagcatattcatcacttgtaaggcatttgtaggattcatctttttggtatttgccctttagcatgtcattcattcaagatgattcatttccaacagaagattaagaggaaactttaaaaattttctttgcactgcatcaaggtccaaaaaactgctacaggaaaatatatccactaaaaatggatttggcaatacagcgctgttttgacttctcatagcacagaaagtatataaagcagcttgacaatcttaagttttagtttttattgaaatgaatttaccatattatgttgttgtaccttgtaatttcaggtcaaattcattaagaaacattttcaagtctgtggcaaaagttaatttccaaagttactcagtgttaaaaaacagtggttgaggatggtttttctcattcagaaaaatttcaatgtcagcccagagcccaaaaaaataaaaataaatctttagcactgctaagccattgaacgcctgtgtggcaaatcaaatcaggatattcagcttctgtttctcacaaaaaaaaaaaaaatcatggaactgaagatggttaagtccacaagagcaaatgaagttaactgttgaccagttcagtaacaccaatatttcctgtgaagtacctgctgatgaataatcaagtgagtaactacaggctttaaacaacttacgttttcacaagccttaaaatttgaccaaataaactttttttctgcttcatgcatttttcccagcatcggttgcatcacatcttagtagattccacttcaggttgtactgtttatcaacttttttgaaaatattcctacttgtagttccatacaaattcttcgatcacttcaaatccagcaatggtttctcaaaaaataaagctaggcagtactgactagtaagaggcaaagaattaacagtgtcatttgatgttgtgtccaaaatcctcattcttcaaactactgttctcatcaaagggctgatgtcttaattttctctggacacatgtctttgggttggttactatcttcaagcacgatgtaattcagcattagtaaatggttttctttgcttggctaacaaataggctacttgtaaacattttggttgcagcctcatttttattacttttgtgaaattttgctgtgatgtttcatttaaattttctaattcttctgactgttgctttcccaccagttgggaatattgtgatgttagtctgatactgtcagtctattcttttaccagttatggtgacactgcattataaacacaatgtaccagcatataataaaatagtccatattccagtgtgccttgaaagtgtaacattcaaaggtacttttcttgttctgagatacagggcatgaactggtagcagaaaaagtaataaatctagcaatacacagggcattccaaatgctttcaggtaatatctgcatcaccatgattctgtagcttgccaagcggcaatgtgaaacaagacacacatacacaggttctgtagcagctactcaactttcccattatagcaaaaaagtatccatagataatatgtaaattagtgtggctgcattccaataaaaacttatagacactaaaatttgaatttcatgtaattttcagatgtcaggaaataatcttttgattatttttcccaaccatttaaaagccattttcagttcatgggccacacaaaaacaggcagcaagctgattctggctacgggccatagtttgacaacccttgctctagtagatttaacagaatatatgagcctgtaattaattaatggctcagtaacactaaaatatcagccaaatatcttacatctggaacctagactttacaaacattgagactgtctggaacaaaataaaaaagtaaaacttagacccagtaaaagtcaaaatgttcctctacaaaagttacactatacggttgctcaacctacaatgaggttacatctgaaaaaatactaagatgcatttaatgcagcaacagcatacagtcccccaatttacgatggttcaacttataaattttgactttgcaatggtgcaaaagcaatacacattcagtagaaactataaccccatctttggtcctaaggcgctcctaaacttttgatggggttacctctcaatacacccactgtaaagttgaaaaatcattaagtcgaaagtaagttagggattatctatactttttagggacagaagccagaaatgatacaagttatgagattgagcaactatgtggctaataaaaaggcaatctttatcattcctatttgaaatccagcattgatttctcaaatagttgaacagaatttaaatattagttttctcagctaacaaatcacaagcgaaaagaagcttcacttcctttttaacgaagacaaaagaagccagttagaaacttactacattgtgttagattttttaaaaagccacagttataccaaatgtatttactttgtgaagtatatccttcggaataaatgcattcctggaaaggagaaacagaagtcagtccttaattagctagttgaggtactcataaagaacaagaataagccaacacttgaaatgcag

SEQ ID NO: 83206 - DNA, 427 bp, Homo sapiens
gatggcctttgagcatggacctgatgaaaagtgaagccatgcagatatcttagaggaaaagcatcatggacagagggaagagcaaatgcagagaccctgtattagtccgttttcatactactataaagatactacccgagactgggtaatttgtagacaaaggaggtttaattgactcacagtttcacatggctggggaggcctcaggaaacttacaatcatggcagaaggtgaaagggaagaaagaaccttcttcaagtggtagcaggagagagaagagcaagccaaagaagagctgcccaacacttatcaaaccatcagatctcgtgagaactcactcgctatcacgagtacagcatggggggatctgcccccatgatctgattacctcccaccaggtctctccctcaacatctggggattacaa

SEQ ID NO: 83207 - DNA, 296 bp, Homo sapiens
aggtcaagaggtgagtgcatttacaaatttgataggtgttgccgaattactgaatgaaagggatacccactttaattcccttcagcagtatacagtagtgcatgtttacccacagcttcaccatcaagttgttttcaaacttagttttttcccctaaactgaaaggtgaaagtgattattttatattcttaacctagtttatttaccaaggaaataactctattactattgtaaattgaatgctagcatattttcacatatagaatgtaactgtcagaataaaaacaaaaaatact

SEQ ID NO: 83208 - DNA, 448 bp, Homo sapiens
attttttaagttgtaaagatatcttggccaggcatggtagctcatgcctgtaatcccagcactttgagaggcagaggcaggaggagtgcttgagcctaggagttcaagaccagcctgggcaacatggtgagaccctgtctctacaaaaaataacataaaaattagctgggtgtggtgtgctcacagctatttgggaggctaaggcaggaggatcactcgagcccaagagattgaggctgcagtgagctatgtttgcaccactgcactccagccagggtgacagagcaagactttgtctccaaaaaaaaaaaaaaaagcctgagaccaaaatttgagaactgctgttttagtccatcttttataatgatctaactatagaacaaaagtaaaaatcaaaaggcataatagtactctcattcattatcaaaagatatagcttgagaccaaa

SEQ ID NO: 83209 - DNA, 315 bp, Homo sapiens
cacaaatcaaaatgcataactcaatgaattttcgccaagtactcatttagctggctcccaggaaagtaacagaacacacaccagccccttagaagccccgtgtcacttttaatcacagtctttaacccttgctcccctagagtaactacctacttttctgacttacaatcatatagttttgttttgttttgtttttttgcttgcttttaagttttacatgaatggtatcctacactatgattgttctagcttctttttttttttttttttttgagacggagtgtcgctttgtcgcccaggctggagttcagtgtt

SEQ ID NO: 83210 - DNA, 751 bp, Homo sapiens
tttataagttttccaaaatcccaaagtagaagtttccttaaaaaaatcatcttgtataataccagtattcaaacatgggtaaggttaatcacccccaatcactcaggagatagttgcagaatttgaattacaatctcttcttactttcctagcctgtggcttgtcacttctccaaattgccatgctaaatatgcatgaaaattgagggagaatgctagttaaaaagaaattaggatttatcactggaattgaaactaagagtacaaaagtctgaacgaatgaaacttttctccaaattttacaaattcttgttcctttctcattagaagagcatgctatccaaagcataaatctcccttgaaaataacagaggcttcttaagccctctcttagctatgatcaatggatgatattatgcttcccatagctaatgtgatagctccttgcctaggattcctgttgaaataaggattctagccccatgttaagtttttcaaattactacaaattttagataagcatttggagctttttatactagaattatcaattttttattttagctaattacctgtgggcattatacttgaggcaggtaccaaactacttacagcctttttaatgaaaatgtgctgtgtactttgaatccattcatagacaaaattaccttgatgttctcttaactcattctttattttagtgattaaatacaacctttgagttgttcaatatcatttgaaaatggtaggat

SEQ ID NO: 83211 - DNA, 190 bp, Homo sapiens
tggggccctcaagccacctaagttcagagtaaaccggggaactcgtgtggctgcccctcctgtacagattccgactctgcagggtaaacggcctgggctcttcaataaataaagtgtgaggaaaagaatggaccctgccaagcacagtggcacacgcctgtagtcccaggagcttgggaggccgaggcag

SEQ ID NO: 83212 - DNA, 459 bp, Homo sapiens
atgttctgaagaaacacgaatttcatacacaagcgtggatttttgcatgttttaaattgtaaatgcgactaactccaaggaagttggaacttgaagcaggctcaaagcaaacttagtcgcgtcatccgccaccatcctccagggtaaaccgaggagcacagttaattggttttccacgggtatttgccacttgtcagatgggctgttatggacgtaaccacgtaattcctggaacccagtgagagtcagcttcctttacgggcgtctgacaagatgtgctcaaacaccttgaagatctttatggaaacaacttttggctctttatcaagatgtcattcagggctctgaacagtcgaatacgttgtggatgggtttgctgtagttatacagtgtgcatttgatacttgtcaatagcgctagtaatgttattgcaaaaataaaaccttctttaaaaaagag

SEQ ID NO: 83213 - DNA, 809 bp, Homo sapiens
gcttcttgctgaaggtgtggagtggatttcatctcaggctgtgggctccagggagagtggctgatccccgggctgggaaggcaggggcggcctgaggtgagctggggatgccttgcacactcggcccgttgaaatgaacctcacgcggactctagcacacctggctggaacaagggtctgccggtccacacaggtgccattggtgagaggggaggcgagaggccctttctctttgggaagaacgaatgtgagcctaggcaacatattgaaaaattaaaaaactttctaggcattgtgcacacctgtagtctcagctacttgggacgctgaggcaagaggatctcttttaagttcaggagtttgaggatgcagtgagctatgattctaccactgcactccagcctgggtggcagagcaagaccctgtctcaaaaaaataaagaaacccaggtggggccggctgagtctcctctgtctctcgcctcagactacgccctgggcaaggactgcatcatgcatggctacatgtccaagatgggcaaccccttcctgacccagtggcagcggcggtacttctacctgttaccccaaccgactcgagtggcggggcgagggcgaggccccggtaaggagcccatgcggggggtccgggagccgggcttccgggtggctggcccggccggcatcttacctgcaccaccatccctggcctgcagcagagcctgctgaccatggaggagatccagacggaggaggagacgcagatcaggaggcgcaagtgcctgctcctccagatccgcggagggaaga

SEQ ID NO: 83214 - DNA, 998 bp, Homo sapiens
ggcctatgcatcctgctctagctgggagtggaagggccagacctggtgtttccctgggttcttggcctttgtcttctcgacattcagtaggagtgaccgtgctgggccccagacctctgtgaggattcctttttagacccaatgagacatttgtggacagaagatgctctggtgagacagaccttagggtgactctaaaggggatctgagcctaaggattctggaagtttccagtctttggctccacagttcctcaggagaggttcagtctgcctaggactgggcctcccttttcacgaagagtgggcaagagctcaggttgtgaactctgatctggatttattccttcctatgggatgtccagaaggtgttcctgttcctggcttagaagcagaccatgccaaggcatcagattcctcccagcaaggtgatgcttgcagggatgggcaggagggctagggaccaggcctgttgtcctttcagtgaggaaagtgtgtcctgccctgtctgagaggcaggcagcaccaggaggcaaaaatgggctcctgtcctaaaccctgaagagcagtcatgggggaccctcactcacagctgtgccttcttgctgttcctagatttattccagttaagcatttataggcatttatctgtgtgtctgatgccctgacgtttttgctgtaggtaagaagtgatggagtgagctgagctgccaggcttcctggagtgattcttggatgctgggtcacgtggttaggggccctgatgggactgaactggaaggaaccagaataggacagaaccaagcccctgattagtgggcactggtggcctggcctcatgaccacaggacacactgttcccagggcacagacaccctgggctttggttgggtcttggcctccaggtagggccctgttgggcagcgggcagcaactcctgagacactactgtgattcttggtggtggctgtggtaaaaaacctgcagggctagagtttg

SEQ ID NO: 83215 - DNA, 345 bp, Homo sapiens
aaagtattgtatttaggctttggtggctatctggtctctattgtgactactcaattctgcctttcaatacattaatgaataagtatgaccctatttcagtaaaattttatttgaaaaaaacaggtggcaggccagaattggcctgtgggccatagtttgccaccccttagtctagtttcataaagaagcttgttatttttattgagattgcattgtttataaatcttaggagggaacatcttcataatgttgaattgttctatgcaagaacaaaggctgtccttccatttattcaagtctatttttgggtctcaggagggagaagttttcctatgctttatttgg

SEQ ID NO: 83216 - DNA, 946 bp, Homo sapiens
agtgaatcttgatggcagctgcactgagcctggtgacagagcaagatgctgtctcaaaataaatttaaaaataaaataagagaattaaagtttagcaggttgggtggcaaaatgaggccacacatttaaagcccctcctcctgattcttttctctgccttggctgcctcctgtggcattttaggtgctgagaaatgaaaacagtagggaaaatagttccaggatcctcatgttaatttgccagaaatggcatcttcaagtcgtcagagggatctgagagttccttcctggcctgacttgagaaaatccgtctgtccccagctctgcgtctgcctccactgcccagtcacctcctctccatgctcttggggctgggccctaccccaccatgcagtgctgccctggagcagtgagcttggtgggtcctgtctggcatgagagctgcctttgggagctggatcccagcctctaccactgggtctggtgcctagcaggctatggataaacttctgctgactccggcctctcctaagccactgcaacgtggtcggtgtagtgcacagtgtgtgtgcagcgtggccttactcacagcctccacattagagagaatctgactgaagtcttactgctgcctcgtgtgaacataaatgtttgccagaaccatgagcaggaaatgttaatctgccttgtttcctgtcctttacacggaagaatttttttctgtatggaatgcgtgccttacaaataatgagtggaaatacccatcgctaatgaaaagttatacttgactgttagtcagctaaataatctgagatttctaatacttttaatttggcttttacaatgcaatttatcttagcttttttgatttcttaggtcatatctttagaactatatatttgaatgttaatgtaattttcatattgaaattaaaatgttgaactgcg

SEQ ID NO: 83217 - DNA, 569 bp, Homo sapiens
ctttccaaagaaattgctataaggcagtgtatctaggcagggattatgcttaattgagatgcacacagtttaacatctggtgtcaaacctggcttccttctttgtgaccaccctatagatgtttgcttttgggaccactgagtaaaccaggccctgagaatccaagcatgaatccacttctgccctacttttaaggatttacgttccatgcaggaaagcagataaccataatttctgaataaataagacaacaaaatgaaatggatgctggtcaactctgatgcaaattttaagaaggagactatgcctctgtgtctcccagcttcacagaaaaaaaaaaaagaaaaaagaaagatgctcagagtggggtacctacacttggaaaaaacgcaagtataagtctgccattcccatgaatccaagatgaatcctggcacagagtaggtcctcaaattttgcaaaattaattttgaatctttatcaccctggccaatgcactgccataatgcaaatcttactatctacctttctatgtcagtcacatttttaaaactgtgtaacctatgaaa

SEQ ID NO: 83218 - DNA, 1661 bp, Homo sapiens
agcggagtggagtgtgggttggggccgggggtggggggcagaggggggtggcccaggtggccctaggaccccccctccatggaaaaccagctatggcataacaccgtgagatgttgcaatcaataccaagaaagcccccacgatgccgaggacatcttactcctgctgctgggcctcatcgttcttgtcaacattggcatcaacgtggcaactatgatgtggcatggactccagaacgccttagacaagatgattgattgggctactcagaaaaatgaaattcaggccagtgaaagtcccccaagtggtcccccagacaaggctcaggatgtccacatccactgcatcctggaccctgtgcaggtgaagatgtcccgacccacgcagtactcctctttctcctgccaccatttctccaaccatcacagtagcagtcttcttcgctgtgttcgtcgccgccgccgccgccaccgccgttgtcgccgtcgctgctgcaaccaccagcagcggccgcagaactacagacaaatcccccatagccactcagtcttccgtaacccacatcgcagccaaaagatgtcacaactacaccgagtgcctttctttgatcaggaggacccggattcctacctggaggaggaggacaacctgcccttcccgtatcccaagtacccacgtcgcggctggggcgggttttatcagagagcgggcctgccctccaatgtggggctgtggggccaccagggtggtatcctggccagtctgccaccaccctctctctacctgtcacctgagctgcgctgcatgcccaagcgtgtagaggccaggtctgagctgaggctgcagtcctatgggcgccacggttcccaatcccgactgtggggcaatgtggaggctgagcagtgggcctcgtctccaccacctccccaccggctgccccctaacccctcttgggtccccgtggggcacagcccttacccctcagtgggctggatgctgtatgactcctgggatcagcggcgtcgtggcacggagggctttgagcgcccccctgcctcggtgtcccggaacgcccggcctgaggcccagggctgccgggagcaccactccccacagtcccaccagcagagcctgcttggtcacgcctatggccagtcccaccgcagtccccacccatccacggaacccttgggctacagctcccaggacccccgtgaggtgcggcgtcgggcagctgactgggctgaggctctgcccgcctggcgtcctctgactacctctgcctccctcacggtgttggacgaggcctcccatcaacggaccccagctccaagctcagtgctggtcccccattcctcccagccctggcccaaagtccaggctgcggaccctgcccctcccccgaccatgtttgtcccactcagccggaatccagggggcaatgccaactaccaggtgtacgacagcctggagctgaagcggcaggtgcagaagagcagagccaggtccagctcactgccaccggcttccacctccaccttgaggccctctctgcacaggagccagaccgagaaactcaactgaccagcaggcggatgtggggtgtggggcagggcatggagggagaggaataaagagaaacagagtccaggaaacactgt

SEQ ID NO: 83219 - DNA, 1323 bp, Homo sapiens
agcggagtggagtgtgggttggggccgggggtggggggcagaggggggtggcccaggtggccctaggaccccccctccatggaaaaccagctatggcataacaccgtgagatgttgcaatcaataccaagaaagcccccacgatgccgaggacatcttactcctgctgctgggcctcatcgttcttgtcaacattggcatcaacgtggcaactatgatgtggcatggactccagaacgccttagacaagatgattgattgggctactcagaaaagaggacccggattcctacctggaggaggaggacaacctgcccttcccgtatcccaagtacccacgtcgcggctggggcgggttttatcagagagcgggcctgccctccaatgtggggctgtggggccaccagggtggtatcctggccagtctgccaccaccctctctctacctgtcacctgagctgcgctgcatgcccaagcgtgtagaggccaggtctgagctgaggctgcagtcctatgggcgccacggttcccaatcccgactgtggggcaatgtggaggctgagcagtgggcctcgtctccaccacctccccaccggctgccccctaacccctcttgggtccccgtggggcacagcccttacccctcagtgggctggatgctgtatgactcctgggatcagcggcgtcgtggcacggagggctttgagcgcccccctgcctcggtgtcccggaacgcccggcctgaggcccagggctgccgggagcaccactccccacagtcccaccagcagagcctgcttggtcacgcctatggccagtcccaccgcagtccccacccatccacggaacccttgggctacagctcccaggacccccgtgaggtgcggcgtcgggcagctgactgggctgaggctctgcccgcctggcgtcctctgactacctctgcctccctcacggtgttggacgaggcctcccatcaacggaccccagctccaagctcagtgctggtcccccattcctcccagccctggcccaaagtccaggctgcggaccctgcccctcccccgaccatgtttgtcccactcagccggaatccagggggcaatgccaactaccaggtgtacgacagcctggagctgaagcggcaggtgcagaagagcagagccaggtccagctcactgccaccggcttccacctccaccttgaggccctctctgcacaggagccagaccgagaaactcaactgaccagcaggcggatgtggggtgtggggcagggcatggagggagaggaataaagagaaacagagtccaggaaacactgt

SEQ ID NO: 83220 - DNA, 1539 bp, Homo sapiens
attcggcacgagggtaacccacatcgcagccaaaagatgtcacaactacaccgagtgcctttctttgatcaggaggacccggattcctacctggaggaggaggacaacctgcccttcccgtatcccaagtacccacgtcgcggctggggcgggttttatcagagagcgggcctgtcccccaagtggtcccccagacaaggctcaggatgtccacatccactgcatcctggaccctgtgcaggtgaagatgtcccgacccacgcagtactcctctttctcctgccaccatttctccaaccatcacagtagcagtcttcttcgctgtgttcgtcgccgccgccgccgccaccgccgttgtcgccgtcgctgctgcaaccaccagcagcggccgcagaactacagacaaatcccccatagccactcagtcttccgtaacccacatcgcagccaaaagatgtcacaactacaccgagtgcctttctttgatcaggaggacccggattcctacctggaggaggaggacaacctgcccttcccgtatcccaagtacccacgtcgcggctggggcgggttttatcagagagcgggcctgccctccaatgtggggctgtggggccaccagggtggtatcctggccagtctgccaccaccctctctctacctgtcacctgagctgcgctgcatgcccaagcgtgtagaggccaggtctgagctgaggctgcagtcctatgggcgccacggttcccaatcccgactgtggggcaatgtggaggctgagcagtgggcctcgtctccaccacctccccaccggctgccccctaacccctcttgggtccccgtggggcacagcccttacccctcagtgggctggatgctgtatgactcctgggatcagcggcgtcgtggcacggagggctttgagcgcccccctgcctcggtgtcccggaacgcccggcctgaggcccagggctgccgggagcaccactccccacagtcccaccagcagagcctgcttggtcacgcctatggccagtcccaccgcagtccccacccatccacggaacccttgggctacagctcccaggacccccgtgaggtgcggcgtcgggcagctgactgggctgaggctctgcccgcctggcgtcctctgactacctctgcctccctcacggtgttggacgaggcctcccatcaacggaccccagctccaagctcagtgctggtcccccattcctcccagccctggcccaaagtccaggctgcggaccctgcccctcccccgaccatgtttgtcccactcagccggaatccagggggcaatgccaactaccaggtgtacgacagcctggagctgaagcggcaggtgcagaagagcagagccaggtccagctcactgccaccggcttccacctccaccttgaggccctctctgcacaggagccagaccgagaaactcaactgaccagcaggcggatgtggggtgtggggcagggcatggagggagaggaataaagagaaacagagtccaggaaacactgt

SEQ ID NO: 83221 - DNA, 1600 bp, Homo sapiens
agcggagtggagtgtgggttggggccgggggtggggggcagaggggggtggcccaggtggccctaggaccccccctccatggaaaaccagctatggcataacaccgtgagatgttgcaatcaataccaagaaagcccccacgatgccgaggacatcttactcctgctgctgggcctcatcgttcttgtcaacattggcatcaacgtggcaactatgatgtggcatggactccagaacgccttagacaagatgattgattgggctactcagaaaaatgaaattcaggccagtgaaagtcccccaagtggtcccccagacaaggctcaggatgtccacatccactgcatcctggaccctgtgcaggtgaagatgtcccgacccacgcagtactcctctttcgccgccgccaccgccgttgtcgccgtcgctgctgcaaccaccagcagcggccgcagaactacagacaaatcccccatagccactcagtcttccgtaacccacatcgcagccaaaagatgtcacaactacaccgagtgcctttctttgatcaggaggacccggattcctacctggaggaggaggacaacctgcccttcccgtatcccaagtacccacgtcgcggctggggcgggttttatcagagagcgggcctgccctccaatgtggggctgtggggccaccagggtggtatcctggccagtctgccaccaccctctctctacctgtcacctgagctgcgctgcatgcccaagcgtgtagaggccaggtctgagctgaggctgcagtcctatgggcgccacggttcccaatcccgactgtggggcaatgtggaggctgagcagtgggcctcgtctccaccacctccccaccggctgccccctaacccctcttgggtccccgtggggcacagcccttacccctcagtgggctggatgctgtatgactcctgggatcagcggcgtcgtggcacggagggctttgagcgcccccctgcctcggtgtcccggaacgcccggcctgaggcccagggctgccgggagcaccactccccacagtcccaccagcagagcctgcttggtcacgcctatggccagtcccaccgcagtccccacccatccacggaacccttgggctacagctcccaggacccccgtgaggtgcggcgtcgggcagctgactgggctgaggctctgcccgcctggcgtcctctgactacctctgcctccctcacggtgttggacgaggcctcccatcaacggaccccagctccaagctcagtgctggtcccccattcctcccagccctggcccaaagtccaggctgcggaccctgcccctcccccgaccatgtttgtcccactcagccggaatccagggggcaatgccaactaccaggtgtacgacagcctggagctgaagcggcaggtgcagaagagcagagccaggtccagctcactgccaccggcttccacctccaccttgaggccctctctgcacaggagccagaccgagaaactcaactgaccagcaggcggatgtggggtgtggggcagggcatggagggagaggaataaagagaaacagagtccaggaaacactgt

SEQ ID NO: 83222 - DNA, 234 bp, Homo sapiens
gtaatgaattataagaatctgaattgagagctaaaatatctgggttgtaggcctactctgccacgattttcttatttgcaaatattagagctgaactagatgacctcaaaggctctaaccaactccaaaacctacaattcaatggctgactgatatacattgtatactctttaaaaacaattaaaatcaaagaagataataaatgtgtcatgtattatacaactattatacacg

SEQ ID NO: 83223 - DNA, 583 bp, Homo sapiens
gcttcccttgctcagaatccatgctcaccagctgctcataatttggcttcccaggaagatttgcctaaagggagagaataattgatagttacatttctcactgtaaattaaaatattgatagtgttttaaaaaaatagttactgtgagcttggttaatgtgggtttgccatgatagttccactctctatgtactgaaacagtgggcctgaatttttaaggatctgagttatcagactttctgtacacattaaatataggccaaggtatggccatctcacgagagtgaccagctgaccatattcctctactaccctcagacctctatacccacactgtccaatatggtagccactagccacatgtggatattgggtgcctgagatatgactagtccaaactgagatgtgctgtaagtacacaatatacactggatttcaaagacttagtaccccccaaaagaatgtaaaaacatctaattgtttttatattgacattttaaagtgatacaatattttggacgtattggaatagatgttactaaaattaattccatgttttctaaatgtggctactagaaaaccg

SEQ ID NO: 83224 - DNA, 948 bp, Homo sapiens
agcgggagtgggaatgagtgtgagctcgtgagtgggcgccgccgccaccgcccccgccgccgtcgtctcggtagcagccttcgccacgccggggtcttcagctccactggggccatgtcagagcgagaagagcggcggtttgtggagatccctcgggagtctgtccggctcatggcggagagcacgggcctggagctgagcgatgaggtggcggcgctgctcgcagaggacgtgtgctatcgtctgagagaggccacgcagaatagctctcagttcatgaagcacaccaaacgccggaagctgacggttgaggacttcaacagggccctcagatggagcagcgtggaggctgtgtgtggttacggatcacaggaggcactgcccatgcgccccgccagggagggtgaactctactttcctgaggatcgagaggtgaacctggtggagctggccctggctaccaacatccccaaaggctgtgctgagacagctgtcagagttcatgtctcctacctggatggcaaagggaacctggcacctcaaggatcggtgcccagtgctgtgtcttcactgacagatgaccttctcaagtactatcaccaggtgactcgtgctgtgctaggggatgatccgcaactgatgaaggtgaaatctgtaagccatgacctggagcaactgcaccggctgctgcaggtggcacggagcctatttcgtaatccgcacctgtgcttggggccctatgtccgctgtctggtgggcagtgtcctctactgtgtcctggagccactggctgcctccatcaaccccctgaatgaccactggactctgcgggatggggctgccctcctgctcagccacatcttctggactcatggggaccttgtaagtggcctctatcagcatatcctgctatccctgcagaagatcctggcagatcctgtgcggccg

SEQ ID NO: 83225 - DNA, 513 bp, Homo sapiens
agcgggagtgggaatgagtgtgagctcgtgagtgggcgccgccgccaccgcccccgccgccgtcgtctcggtagcagccttcgccacgccggggtcttcagctccactggggccatgtcagagcgagaagagcggcggtttgtggagatccctcgggagtctgtccggctcatggcggagagcacgggcctggagctgagcgatgaggtggcggcgctgctcgcagaggacgtgtgctatcgtctgagagaggccacgcagaatagctctcagttcatgaagcacaccaaacgccggaagctgacggttgaggacttcaacagggccctcagatggagcagcgtggagccactggctgcctccatcaaccccctgaatgaccactggactctgcgggatggggctgccctcctgctcagccacatcttctggactcatggggaccttgtaagtggcctctatcagcatatcctgctatccctgcagaagatcctggcagatcctgtgcggccg

SEQ ID NO: 83226 - DNA, 1023 bp, Homo sapiens
agcgggagtgggaatgagtgtgagctcgtgagtgggcgccgccgccaccgcccccgccgccgtcgtctcggtagcagccttcgccacgccggggtcttcagctccactggggccatgtcagagcgagaagagcggcggtttgtggagatccctcgggagtctgtccggctcatggcggagagcacgggcctggagctgagcgatgaggtggcggcgctgctcgcagaggacgtgtgctatcgtctgagagaggccacgcagaatagctctcagttcatgaagcacaccaaacgccggaagctgacggttgaggacttcaacagggccctcagatggagcagcgtggaggctgtgtgtggttacggatcacaggaggcactgcccatgcgccccgccagggagggtgaactctactttcctgaggatcgagaggtgaacctggtggagctggccctggctaccaacatccccaaaggctgtgctgagacagctgtcagagttcatgtctcctacctggatggcaaagggaacctggcacctcaaggatcggtgcccagtgctgtgtcttcactgacagatgaccttctcaagtactatcaccaggtgactcgtgctgtgctaggggatgatccgcaactgatgaaggttgcactccaggacttgcagacgaactccaagattggggcactcctgccttactttgtttatgtggtcagtggggtgaaatctgtaagccatgacctggagcaactgcaccggctgctgcaggtggcacggagcctatttcgtaatccgcacctgtgcttggggccctatgtccgctgtctggtgggcagtgtcctctactgtgtcctggagccactggctgcctccatcaaccccctgaatgaccactggactctgcgggatggggctgccctcctgctcagccacatcttctggactcatggggaccttgtaagtggcctctatcagcatatcctgctatccctgcagaagatcctggcagatcctgtgcggccg

SEQ ID NO: 83227 - DNA, 996 bp, Homo sapiens
agcgggagtgggaatgagtgtgagctcgtgagtgggcgccgccgccaccgcccccgccgccgtcgtctcggtagcagccttcgccacgccggggtcttcagctccactggggccatgtcagagcgagaagagcggcggtttgtggagatccctcgggagtctgtccggctcatggcggagagcacgggcctggagctgagcgatgaggtggcggcgctgctcgcagaggacgtgtgctatcgtctgagagaggccacgcagaatagctctcagttcatgaagcacaccaaacgccggaagctgacggttgaggacttcaacagggccctcagatggagcagcgtggaggctgtgtgtggttacggatcacaggaggcactgcccatgcgccccgccagggagggtgaactctactttcctgaggatcgagaggtgaacctggtggagctggccctggctaccaacatccccaaaggctgtgctgagacagctgtcagagttcatgtctcctacctggatggcaaagggaacctggcacctcaaggatcggatgaccttctcaagtactatcaccaggtgactcgtgctgtgctaggggatgatccgcaactgatgaaggttgcactccaggacttgcagacgaactccaagattggggcactcctgccttactttgtttatgtggtcagtggggtgaaatctgtaagccatgacctggagcaactgcaccggctgctgcaggtggcacggagcctatttcgtaatccgcacctgtgcttggggccctatgtccgctgtctggtgggcagtgtcctctactgtgtcctggagccactggctgcctccatcaaccccctgaatgaccactggactctgcgggatggggctgccctcctgctcagccacatcttctggactcatggggaccttgtaagtggcctctatcagcatatcctgctatccctgcagaagatcctggcagatcctgtgcggccg

SEQ ID NO: 83228 - DNA, 525 bp, Homo sapiens
  misc_feature (373)..(373): n is a, c, g, or t
  misc_feature (379)..(379): n is a, c, g, or t
  misc_feature (395)..(395): n is a, c, g, or t
  misc_feature (489)..(489): n is a, c, g, or t
  misc_feature (508)..(508): n is a, c, g, or t
  misc_feature (510)..(510): n is a, c, g, or t
agcgggagtgggaatgagtgtgagctcgtgagtgggcgccgccgccaccgcccccgccgccgtcgtctcggtagcagccttcgccacgccggggtcttcagctccactggggccatgtcagagcgagaagagcggcggtttgtggagatccctcgggagtctgtccggctcatggcggagagcacgggcctggagctgagcgatgaggtggcggcgctgctcgcagaggacgtgtgctatcgtctgagagaggccacgcagaatagctctcagttcatgaagcacaccaaacgccggaagctgacggttgagaaccatgtcagagcgagaagagcgggcggtttgtggagatccctcgggagtctgtccggcngtcccntgccgccagggggcgnggggccggaggacccttctctttcggtgaccctggccgacatttaccgggagctctacgccttcttcggtgacagcttggccacacgctttgcnaccggccagcctgcgaccncnacggtccgcggtcgc

SEQ ID NO: 83229 - DNA, 286 bp, Homo sapiens
ggaaccatcacagattggaggggattaaggagaatgacagctaaatgaaacgtgagagcctggattggatcctggaatagtggaaggatattaagagaaaaactggtgaactctgaatcaagtctgtattttagtaacagtattgcccaatgttgttaatgtaatgattttgataaattatacaagatgctaacattagggaaagctaggtgaaggtgtacagaaaccctctgtgctatatttgtaactttttaatttcaaataaaaagtaaaaaataaaactgtt

SEQ ID NO: 83230 - DNA, 649 bp, Homo sapiens
catttcaaagtctttcctcacagtcccttaccatgcacaagtactctgaaaccagagaacagcacggtgggtgaattcaaaaaacagaatttagaattcttgtttaattgctaactttctgaaagccctcagaaaaagacccaagttcatttcatatcagccccaaaactaagagacaatgaaaacttgacctgtgagagtctggcactgtcaatgtccacagcacttctctcaaaatgatccctctgaatacttacaataatcccaccagggcaaaaggttcacaacagcagttcctcagccaagtcgtgggaaaggctgtatcacattccggtcttctgcttcccagtctcacactctccccacatcacaggcacagttacctcgcaggagaatgtctctgaagccccttagagtcattatgcaagaggtctcacggaacaacttttcgctgtgactgaagagatgaaatgtaaaatgaggaaacacgaaagaagaaatggtctgctacacaaacatacaaagtaggtgtgatgtgctagataacgaggtgatgtgctgatggagctcaactctgaccccagttccacagctccagtcaaaagatctgcgtttaagaaaggagaaacaaggtggctcatgcctgtaa

SEQ ID NO: 83231 - DNA, 504 bp, Homo sapiens
catttcaaagtctttcctcacagtcccttaccatgcacaagtactctgaaaccagagaacagcacggtgggtgaattcaaaaaacagaatttagaattcttgtttaattgctaactttctgaaagccctcagaaaaagacccaagttcatttcatatcagccccaaaactaagagacaatgaaaacttgacctgtgagagtctggcactgtcaatgtccacagcacttctctcaaaatgatccctctgaatacttacaataatcccaccagggcaaaaggttcacaacagcagttcctcagccaagtcgtgggaaaggctgtatcacattccggtcttctgcttcccagtctcacactctccccacatcacaggcacagttacctcgcaggagaatgtctctgaagccccttagagtcattatgcaagaggtctctagaatacatctttggttgcgtataaggtggtctgttttgttcatcgactaaagaaacattagataagt

SEQ ID NO: 83232 - DNA, 476 bp, Homo sapiens
tctttaaaatagtcttggcagcctaaaataggcattttctggaactagcttggggtaaatgaaacctcgccatcttataaaatgctgtcagatttgcagcatttaatacagatgtcccatattgactggtatttcactgtctatgttgtatttccgcatgttgtatctctcacttaattctcacacagccctgtgagtttgatcttatcccctccacatgaggaaacaggctcagaaagttgagggcttgttgaagtttatgcgtggatgcagagctggagctctggtctttgatctacgtgttgtgctaatgccatggtctgtggacaggttgttactgacagcctgaagcctctcagtgtaggtgcatacagataagttaggcagtgttggtccagagatagtttctatgaataataattaataaaaatgaactattaagtcagaaaattgaacaaatatttattattgagtac

SEQ ID NO: 83233 - DNA, 512 bp, Homo sapiens
ttcatacatcctctgaaatctaggcagaggtccccaaacctcaattcttgacatctgtgcactcgcaggcccaacatcacatgggaactaccaaggcctgggacttgcaccctctcaagcaatggcctgagctgtatgttggcctcttttagccaagtcttaaggctgcacacagcaggagggaaaaaatcatttttcccgtctaggcctctgggtctgtgacaggaggggctgcagtaaaggtctctgacatgtcctggagatattttccccattgtcttgatgattaatcttcagctcattgttacctacgcagatttattcagactgcttgaatttctccccggaaaatggggttttcttttctatcacattgtcaggctgcaaatttttctaacttttatgctttgcttcctcttgaatgctttgctgcttagaaatttcttctgccagataccctagatcaggtctctcaagttcaaagttccacaaatctctggggcaaaggaaaa

SEQ ID NO: 83234 - DNA, 353 bp, Homo sapiens
ctggataatcagggccatgtgctttaacaggatgtaaaggggaagctcatgattaaacatgggaaatatgcagcaaattgcaagacctgagcttaaccgcataattagaacataatttttcacttcttccagagcatcagccaagcaaaggactgagaaatctgcaacccaattgtcctaaaaagaaacttaggcttcacatttgtgacataatttcttttaaaatgaatataaaattttattttttatatttgtagagcataggatgattgaaatccagttgttgttttgtctgacctccatatctaatatggctagtgccgttactactctacagaacgcgcaataagtca

SEQ ID NO: 83235 - DNA, 410 bp, Homo sapiens
ggggcagtgggtgggggatgggaatccgggcctgggactgggacgggatgggtgaggcctcctggatctgttgcctatggcgtggacaggcagaaagcatacccagatggcggtaccttgcaaaccagttcatcaaggtgcattgagggcacatgtcctgcgcgctgaatcctgtggggagcccagtgacctataattcccaggccgcattcaattccgcccatccaaaactgtgctggaaggagtgaagggtaccacggtgaatgtggcaaagtccttccccaagttgaaaatctaccaacagtaatgacttatgtagtgggctcatcctaggtacctggcactttgctaagtgctttatgcagttatttaatcctcgcagcaatcctaggaggtgagcactattattg

SEQ ID NO: 83236 - DNA, 1229 bp, Homo sapiens
gctgattgcaacctgctgcccaaactgcatattgtcaaggtggtggccaaaaaatatcgcaactttgatattccaaaagaaatgactggcatctggagatacctaactaatgcatacagtagggacgagttcaccaatacctgtcccagtgataaggaggttgaaatagcatatagtgatgtagccaaaagactcaccaagtaaaatcgcgtttgtaaaagagatgtcttcatgtcttcccctaagaatacgcttttcctaacaggctactccttcctgtagagcagaaattgtattttgcacgaacatgcagttattgaagattaggatcaaggatagacaaggtatagtagttatcttaaaatatacactcctaagcagtattattttaaaatcctttaccctggctacctcccctacccgggttcccctctctttaatttggagacactccaccacaaacttttcactttagaggtagcttgccatctctcaggagccctcaccattgtgtccattcactgtgtatagatggcagaacttttgaggtgcaatgtttaattgttaaaaatagtagccacgactttatcaggcagccccaaactggtgcataatgcatggtacaagaaatatttatgtattttttggaattttgtaatatttagtaagagtatatgaaaggattgctactgtatcagaaatattgtttcaatttagtctatcctggatatgtactaacgaatattaccaccagagaagagagctttctacaaaagtcactacagattttgctatattgctttgtagatagatttttacttttgcctaaaagcatttatccttcataccaattgtaacatctgacaccatgtagaagctaaaagtttagagggagtgagggttttctcaagaccttcctcaagcattttatctttagaagagaaactgatgggcacctgaatactgtctaaatatgttttgatatatgtgttttgccctgtgccattcatttggaacattgttgctttcttcctttattttaaaaagcttgtttttaggtaatcatagagctggctatttatacatcttttgagcaacactgcataaactgatattcagatgatttagctacagcagtacaatgattagcaatgtaaaaattaacacagaaattaacctaaggaatgaagggtgggtttgtcaaaatatcaagtaaatttttgtttcta

SEQ ID NO: 83237 - DNA, 370 bp, Homo sapiens
gacttgtaccctaactgacgtgctcagacagccgcgtcgactggccggagcatcaacggctacacgttgcccctcacactgctcccgtggcgagcgcggggcggatggagaagctctctgtggaagctctcaaaagactgacgggcgagttcaaagggaagtactaccctctgaagagcatgacggagaaggagcagcagcagctcatcgatgaccacttcctgttcgacaagcccgtgtccccgctggtgctggcctcaggcatggcccgagactgaccctctctgttctccatgatcttctcaaatctctctgatttagtccttcatttaataaacattttcttttcttttttttttttttttttttt

SEQ ID NO: 83238 - DNA, 430 bp, Homo sapiens
gtagagacggggtttccaccatgttggccaggctggttttgaactcctgacctccaataatcgacccacttcagcctcccaaattgctgggattataggcatgagccaccgtgcctggccaggaattttaattcttaagccaaacacttgaaagtttctttttatggtctggtggtttttacttattgagagaaagatgaaataaagaaataaaacatttatagatgtgaactttatgtgtgatttatgatctagattattatagtagtatttcttttttcataaaatatttattttatttatgaaattgaaataatgtctatcttcttcatagcaccgtggagcagagaagagaggttggagtggtggggaatattactttaggaacactgattgtaagaggcattaatttggcactttacgggggtac

SEQ ID NO: 83239 - DNA, 430 bp, Homo sapiens
gtagagacggggtttccaccatgttggccaggctggttttgaactcctgacctccaataatcgacccacttcagcctcccaaattgctgggattataggcatgagccaccgtgcctggccaggaattttaattcttaagccaaacacttgaaagtttctttttatggtctggtggtttttacttattgagagaaagatgaaataaagaaataaaacatttatagatgtgaactttatgtgtgatttatgatctagattattatagtagtatttcttttttcataaaatatttattttatttatgaaattgaaataatgtctatcttcttcatagcaccgtggagcagagaagagaggttggagtggtggggaatattactttaggaacactgattgtaagaggcattaaatatgggcaaaagtttaaaaa

SEQ ID NO: 83240 - DNA, 636 bp, Homo sapiens
catactctggcctcgttcgtctctgttgaaaggaaatggcagcctcttgccataccaggaaagggtaagtcacaaaaagtgattttgctcttgtttattctgtgacgtacatttctttgaaaaacattttagtttttcaaccccagaagggaaaccatcagccatgctaaaatttattgttaagcctagcaaagtggaaatgatcgtggaaaatattagagaggtataatttttattttttgagactttgtacaaatagtaaaacatgcctttccccatatcagttcagacttacccacaaaagcccaggcagccaaatggactataacaacccaggtgtcatttattttcttaagatatcatttaatgtaacaagacagaaagagccagaggttcactaccaggaagaaaatgatatggccatgaatagtgtgatttgcatttaacttttaattttagaacggctaaatgaaaagaaaaaatgctaaatatattttaatctaccaagtgaatgaatgctttctagcttgttttctaaactgctcagaagagtgggaattgctgtaagaaccctcctctgtactggattaaattattctggagggccatccaaggtaaagtctctcctttatttaa

SEQ ID NO: 83241 - DNA, 313 bp, Homo sapiens
acaagccttttgagtcataatcagcatatgtatgtaagaaaccccccctaggctggaggaggaacaggaagaaatgaacacgcagaaaaatccttggattacacacaagcatttccaccagctggagtggaaacgcctcctaacatttggagaatcacagtggaccttaagtaaggagtattgcctctctgggtggctcagatttgctctacagtaaaggctgtctcgaactctcctcacaaagcatacatgcaagccatgaaaaggccatactttccaagtaagttagcaattttccaaacagaggctaata

SEQ ID NO: 83242 - DNA, 257 bp, Homo sapiens
cataactgcagctgttccttaagtaatttgtatctgctttaaaccactagagaattaaactattctcaatcaattctaaagggtgctggaaatacatgtctttcagcatcttcaggctgagtttcaagtgctagtttcctgctagtttcccagtgcatgcctcacattttggcccagtcaagtaagtcccatcaccagcaaatccacagtgattccacatcaggaaattcccagtggttccatatctgagcttgctc

SEQ ID NO: 83243 - DNA, 1178 bp, Homo sapiens
  misc_feature (7)..(7): n is a, c, g, or t
  misc_feature (363)..(363): n is a, c, g, or t
  misc_feature (475)..(475): n is a, c, g, or t
ggacggngcagctctctggtgtgctgctttcccagccaccccaggtcatgacccaacactgtactgatggctcttgggcagaatgtctagggactctgtggccctcatactggctggttactaggctgggcacagcacttcctgaaatgtttgaagagtaggcatgatccagttaaagtctcttatgcccctgccattctctctctcttttttttttttttttttttttttgggggaaagggggctcaaaagttcccccggggggcgccacaagttataagcgggttccccgggtttcctgggcaactgtggggcgccccatatatgagggagcgcctggattaataacgagctacacggcangcggcgccgcgcagtgtttacaacaaccggtcgaggagcctggggaaaaacgggcgcaccgcggggcgactctgtgggagaaggggaccacctttatcctctccgtgtgggngcggggcgcaccaatatagtgtggcgcgacaaaaaacccacaccctatcacagagagaagatttataaaacgcgcctcatagaggaggggaatactttttatcaacatttttctagacggggtgttaatatacggtgtgtggtacacaccaatcacgacgcgcggaaatattatttgctgtgcgcggacggtgttaacgagaagagctgtgtgggggccatacaccgcagggggcagtatatatagaattatttgcgtggagaacacaacattatttttttattctccacgcgggagagagggcatatagtttttggtgtgaaaaaaaaataaaaggggggggtggctgaagattaccggagaaagaggagacatacataaacgtgcgacggcaagaacaactacccctagagggagacgcacgttggcaactacagacccgcaattctatggaggcagagggtgtggtcacaacaaggcagaggggcggcataagctccaacaaaaaaacgaccaccagcaaagaggagatgacgtaatgagtgcggacacgcgaaagccgaagcggagagacactacttaggcgaagagtgcacccgaaacaagcaacacagacaacaacctaggcacccctggtgacgacacaactacttagagaacacccacaggcacaagaacagagaacgaagaaggaaaaaaaggc

SEQ ID NO: 83244 - DNA, 484 bp, Homo sapiens
tttcaaagacagctatgagggggaattctctcagtgtgcagggcttcacgcactacacttggtcatcaaattcatgttgaaagagatgcagcctcagcctcagtttgcgcaaacttaatttacccaaaccaagggaaccccgggcgcctaaggttgggccctttgggaaacaaggggggggccaacaaggaacaaggaaattccaattcaaggaaggggcccttaggtgggggaaggacggaaaaagtttacgggaggcaatccatacgcacaagggataatctcgggacagtaagtggtttagtcgttagacttgaacacttaatgtggacgaagacacaatgtgggaagatctttcagttgcaggttaacacctaccagaaatcatctattttggaagaggcactagacagccaagtagatggactgactcagccacttgatgccagccagtttctgtcattggccattccagtgctgctga

SEQ ID NO: 83245 - DNA, 1358 bp, Homo sapiens
ccattatcagattagatgcaaagtgggctggcatgccagggggtgacaggaacagtgtctccagaaatcctctgtgaagacacccaagtattgttcagaagtggccctgtatctggaagagggaaaactgcacccacttcttgcagacatacagttccagctccccccacaggacttgctcatacatccaacaaatatttaatcagtgcccaccatctgccactgtgccaggtgcccggcctcatcatgagtcaggcagaggtggtctgtgcagttttcccacaatgtgagagggtgctgagaagacttttaacgcttatttaactacggaaataactcttggtttggtacctactacaaaataaaaacaagcgcttgttgataatttctggatggatgactgtggaaagctggaggagactgaggatcaatttgctctaatgaaccttcccttgactatcatctccgttacctcctgccgcatccctacggcaaatatgcaagactctcacgcagctaatttccaggggtttgcagtctggggaggaagcagaaagcacatccctcactgaccctgaggaggggcaaatctctggtagcagtcacaggtacgtgctgtacacacttcccatcctttgagccttcccagctggagagcaccaagagaacgcagttggggaggccccgaaagatgaagggttgttgagcttgaaggcagtgaaaaagtaaatggaagaaagctctctgccctccactgcctaaatgcaggatatagatttagaaggataaaaggggtctgctccctctctcgaccagggaaaagttaaccactgaagacaactttagactcttatgggcctggagctggaaccagaggaatggacatgaaggcgctttactaactctatttatctgccagttacttacctttctacaagttctccccttagacactcaaagttcttttcctttgtcctgtcgcttccctaaaacttggcttttctttgttgaagatgctatacaagctggaattcaaagctaccactttgagaactactcaattcctgcgtgtctcccaggcagatgtgaaatacacatgttaataaacttccactggtttttctcttgttaatctgtcttttgtaacaggagtccgttccaaccacaaatctaggggggctgaggaaaaacccctacagtggcacacactgaagaaggccccctcactttccaaggtttcccatctcaggtggaaggaggcctgctaagtcatgtgaaaattattcaggaaaagatcaaagtgcttctacttctgcagttctaaaaatatctttaagtgcatgaaaacatgtataatg

SEQ ID NO: 83246 - DNA, 352 bp, Homo sapiens
gataatgtaaatttttgcttctgggcttgtcatcaggattgcaatttttagatttagtttgctaattgtttggcctttgaaaaattatatacacttggtttgttttggttttcttaagtcaaaacaaggaaataaaatcacatttgctttccaagaaaagataatgtttaagtggttgtttagtgttttgtgtctttgggggtgggagggggtgtgtggaatacacaaacacacacacacaaacacacacagtctatatataatcttattggagccatcactatattttaagaaaatgaaataatctattgaagcttaaaattagaattttgattaagctaagagctatttt

SEQ ID NO: 83247 - DNA, 613 bp, Homo sapiens
cttcagaaggattatgggaggaagttgtgtaaattagaacatagttatattacaaataatccaatcacagaacccagagtatgtacctttgtgcatattttcaatctcatttcctttttctttttttttagaccaagtcttgcacttgtcccccaggctggagtgcaatggtgtgatctcggctcactgcaacctctgcctcccaggttcaagtgattgtcctgcctcaccctcctgagtagctgggattacaggtgcctgccaccaagcctggctaatttttgtatttttagtagagatggggtttcaccatgttggccaggctggtctcgaactcctgacctcaggtgatctgcccgccttggcctcccaaagtgctggaattacaggcatgagccactgcgccggcctcttttttcctttgagacagagtctcactctgtcgcccaggctggagtgcagtggcacaatctcggctcactgcaacctccacctcctgggttctagcgattctcgtgcctcagcctcctgagtggctggaattacagatgtgtgctaccacgtccagctagttttttgtatttttagtagagacgaggtttcaccatgttgg

SEQ ID NO: 83248 - DNA, 432 bp, Homo sapiens
cagaattagagctgtaccccaagggggaattctgtcctaggagacagtgagtgctaagtacactctggacaagcaccagacacagaagctgcctcagtttgtgctccccctgcaaagcagagcctgagacaaggatttgggtacaaggagtttcactcaatattatatttccaagatgcacccatgctttatatggctatagtgcatccattttactgctttatactttccattaggtgactatattagtatatatttataattcctaggtctttttgttctcttatttgttaataattataaactccaagcccattgtggtagattgctatttctcagagatattttctgctccttcctgggggacaataatacttttctcccatcaatggcagatgtgggcttgtgacattttctggtcaatgaaatgag

SEQ ID NO: 83249 - DNA, 425 bp, Homo sapiens
agctcattcctgagatgagaggctcagtcacgaaaacattgccaagcacttgtggcctctcccatgcaactaagcacctggtcatccccacttcccaacgtgcagcatgtgtcacccatcttttcatatccatttctatggtatttggattaaaaattaaaccctccaaatttcagcagacaacactaggtgaccaccacctgtctgtagtgatctcgataccatcacggatctatctcttgacagctgactccaacgccaacttgcttttcctctgacctgtttcaccaggtgctcacacctactcacccatgtctcagagactatagactttgtgatatacctgattatacagccccagcctatctgccattgcatcagagcagctgcacttgaccaaggagctctcgctgcacacactgtgc

SEQ ID NO: 83250 - DNA, 795 bp, Homo sapiens
gtctttcactctctcatactttctcctctcccctctcccaagcacatctgagttgctgcctgttcttcacacttagctccaaacccatgaaaaattgccaagtataaaagcttctcaagaatgagatggattctagggtgtcttcacctgagaagcaagataaagagaatttcgtgggtgtcaacaataaacggcttggtgtatgtggctggatcctgttttccctctctttcctgttggtgatcattaccttccccatctccatatggatgtgcttgaagatcattaaggagtatgaacgtgctgttgtattccgtctgggacgcatccaagctgacaaagccaaggggccaggtttgatcctggtcctgccatgcatagatgtgtttgtcaaagttgacctccgaacagttacttgcaacattcctccacaagagatcctcaccagagactccgtaactactcaggtagatggagttgtctattacagaatctatagtgctgtctcagcagtggctaatgtcaacgatgtccatcaagcaacatttctgctggctcaaaccactctgagaaatgtcttagggacacagaccttgtcccagatcttagctggacgagaagagatcgcccatagcatccagactttacttgatgatgccaccgaactgtgggggatccgggtggcccgagtggaaatcaaagatgttcggattcccgtgcagttgcagagatccatggcagccgaggctgaggccacccgggaagcgagagccaaggtaagtgttgtgcagttca

SEQ ID NO: 83251 - DNA, 3612 bp, Homo sapiens
cgggcgcccagagggcaaatgaggggcggcggggtggcgggtgggggggagacgcggaatttcccagcgcgggggctctggcttaccctgcaaccgggcagtctctttctgtttacggagagaaaggggaaatggaaaagtcggggaggcggtggctggcgtccgctgcgccgcccctgggcaggctcagacgccgtgagtcaggggcagagcagggcggtctgagcgtgcgggcgacgcgggtctcactcgtccgctccgctctggactgcgcgccacgctctggggtccggcgccctggttcctgcttctgccgctgccgccgccggatcccagtggcccggcgtgctcggctcccacaggcctgcagccagcatcgcaccgaaccttcggggggccgcggctggagcgctcggccggcgtgggagcgccaaggccgcagatgcaatcttcttaccgcgaagaagccaggggaataggtagccacatcttgtttgcagataagaaaggaagctaacgcagtatctgcaaagccaggagtctgactcagtacttttctcactcatgcatacaaagcagctaaaaatgacacagcttatttaccatgcccctgacactgcactgagcactttatgagcttgaactctgttaatcctcacgaccacctcatgagactctccagaaagagcaacagtaatggagtacatgagcactggaagtgacaataaagaagagattgatttattaattaaacatttaaatgtgtctgatgtaatagacattatggaaaatctttatgcaagtgaagagccagcagtttatgaacccagtctaatgaccatgtgtcaagacagtaatcaaaacgatgagcgttctaagtctctgctgcttagtggccaagaggtaccatggttgtcatcagtcagatatggaactgtggaggatttgcttgcttttgcaaaccatatatccaacactgcaaagcatttttatggacaacgaccacaggaatctggaattttattaaacatggtcatcactccccaaaatggacgttaccaaatagattccgatgttctcctgatcccctggaagctgacttacaggaatattggttctgattttattcctcggggcgcctttggaaaggtatacttggcacaagatataaagacgaagaaaagaatggcgtgtaaactgatcccagtagatcaatttaagccatctgatgtggaaatccaggcttgcttccggcacgagaacatcgcagagctgtatggcgcagtcctgtggggtgaaactgtccatctctttatggaagcaggcgagggagggtctgttctggagaaactggagagctgtggaccaatgagagaatttgaaattatttgggtgacaaagcatgttctcaagggacttgattttctacactcaaagaaagtgatccatcatgatattaaacctagcaacattgttttcatgtccacaaaagctgttttggtggattttggcctaagtgttcaaatgaccgaagatgtctattttcctaaggacctccgaggaacagagatttacatgagcccagaggtcatcctgtgcaggggccattcaaccaaagcagacatctacagcctgggggccacgctcatccacatgcagacgggcaccccaccctgggtgaagcgctaccctcgctcagcctatccctcctacctgtacataatccacaagcaagcacctccactggaagacattgcagatgactgcagtccagggatgagagagctgatagaagcttccctggagagaaaccccaatcaccgcccaagagccgcagacctactaaaacatgaggccctgaacccgcccagagaggatcagccacgctgtcagagtctggactctgccctcttggagcgcaagaggctgctgagtaggaaggagctggaacttcctgagaacattgctgattcttcgtgcacaggaagcaccgaggaatctgagatgctcaagaggcaacgctctctctacatcgacctcggcgctctggctggctacttcaatcttgttcggggaccaccaacgcttgaatatggctgaaggatgccatgtttgctctaaattaagacagcattgatctcctggaggctggttctgctgcctctacacaggggccctgtacagtgaatggtgccattttcgaaggagcagtgtgacctcctgtgacccatgaatgtgcctccaagcggccctgtgtgtttgacatgtgaagctatttgatatgcaccaggtctcaaggttctcatttctcaggtgacgtgattctaaggcaggaatttgagagttcacagaaggatcgtgtctgctgactgtttcattcactgtgcactttgctcaaaattttaaaaataccaatcacaaggataatagagtagcctaaaattactattcttggttcttatttaagtatggaatattcattttactcagaatagctgttttgtgtatattggtgtatattatataactctttgagcctttattggtaaattctggtatacattgaattcattataatttgggtgactagaacaacttgaagattgtagcaataagctggactagtgtcctaaaaatggctaactgatgaattagaagccatctgacagcaggccactagtgacagtttcttttgtgttcctatggaaacattttatactgtacatgctatgctgaagacattcaaaacgtgatgttttgaatgtggataaaactgtgtaaaccacataatttttgtacatcccaaaggatgagaatgtgacctttaagaaaaatgaaaacttttgtaaattattgatgattttgtaattcttatgactaaattttcttttaagcatttgtatattaaaatagcatactgtgtatgttttatatcaaatgccttcatgaatctttcatacatatatatatttgtaacattgtaaagtatgtgagtagtcttatgtaaagtatgtttttacattatgcaaataaaacccaatacttttgtccaatgtggttggtcaaatcaactgaataaattcagtattttgccttagttgttgtgaagcctgtgattctcagctgggactgaggatgggctataggagttgagttatagattggaaggaaatgtgtatcataagaaggcaaaaaataccaggagctttgcaaattgtattaatacactccttttctattgctcttgtatgaagctattgtcagctggaatggtttgcatcccccggtacattgaggtagaaaaaacaattgtggttgtgcctgtaatcccagcactttgggatgctgaagcgggaaaactggttgagcccaagagttcaagaccagcctggccaacatgatgaaatcccatctctacaaaaaatacaaaaatttgccaggtgtgatggtgcatgcctgtagtcccagctactcaggtggctgagatgtgaggatcacttaagcctgggaggcgaaggttgcagtgagccaagatcatgccacactacactccagcctggataacagagggaggccttgtccctgctaaaaataaaataataattgtgtgcc

SEQ ID NO: 83252 - DNA, 3076 bp, Homo sapiens
caatcgcgaaaccggtttcgcgattggtaccaatcgcgaaaccaaatcctgttgccaatccttgtatgtcagtttcccatgggtcttgaatgcaaatacaaatatcgtaaactaaatatttgtgttttctttcctagactctccagaaagagcaacagtaatggagtacatgagcactggaagtgacaataaagaagagattgatttattaattaaacatttaaatgtgtctgatgtaatagacattatggaaaatctttatgcaagtgaagagccagcagtttatgaacccagtctaatgaccatgtgtcaagacagtaatcaaaacgatgagcgttctaagtctctgctgcttagtggccaagaggtaccatggttgtcatcagtcagatatggaactgtggaggatttgcttgcttttgcaaaccatatatccaacactgcaaagcatttttatggacaacgaccacaggaatctggaattttattaaacatggtcatcactccccaaaatggacgttaccaaatagattccgatgttctcctgatcccctggaagctgacttacaggaatattggttctgattttattcctcggggcgcctttggaaaggtatacttggcacaagatataaagacgaagaaaagaatggcgtgtaaactgatcccagtagatcaatttaagccatctgatgtggaaatccaggcttgcttccggcacgagaacatcgcagagctgtatggcgcagtcctgtggggtgaaactgtccatctctttatggaagcaggcgagggagggtctgttctggagaaactggagagctgtggaccaatgagagaatttgaaattatttgggtgacaaagcatgttctcaagggacttgattttctacactcaaagaaagtgatccatcatgatattaaacctagcaacattgttttcatgtccacaaaagctgttttggtggattttggcctaagtgttcaaatgaccgaagatgtctattttcctaaggacctccgaggaacagagatttacatgagcccagaggtcatcctgtgcaggggccattcaaccaaagcagacatctacagcctgggggccacgctcatccacatgcagacgggcaccccaccctgggtgaagcgctaccctcgctcagcctatccctcctacctgtacataatccacaagcaagcacctccactggaagacattgcagatgactgcagtccagggatgagagagctgatagaagcttccctggagagaaaccccaatcaccgcccaagagccgcagacctactaaaacatgaggccctgaacccgcccagagaggatcagccacgctgtcagagtctggactctgccctcttggagcgcaagaggctgctgagtaggaaggagctggaacttcctgagaacattgctgattcttcgtgcacaggaagcaccgaggaatctgagatgctcaagaggcaacgctctctctacatcgacctcggcgctctggctggctacttcaatcttgttcggggaccaccaacgcttgaatatggctgaaggatgccatgtttgctctaaattaagacagcattgatctcctggaggctggttctgctgcctctacacaggggccctgtacagtgaatggtgccattttcgaaggagcagtgtgacctcctgtgacccatgaatgtgcctccaagcggccctgtgtgtttgacatgtgaagctatttgatatgcaccaggtctcaaggttctcatttctcaggtgacgtgattctaaggcaggaatttgagagttcacagaaggatcgtgtctgctgactgtttcattcactgtgcactttgctcaaaattttaaaaataccaatcacaaggataatagagtagcctaaaattactattcttggttcttatttaagtatggaatattcattttactcagaatagctgttttgtgtatattggtgtatattatataactctttgagcctttattggtaaattctggtatacattgaattcattataatttgggtgactagaacaacttgaagattgtagcaataagctggactagtgtcctaaaaatggctaactgatgaattagaagccatctgacagcaggccactagtgacagtttcttttgtgttcctatggaaacattttatactgtacatgctatgctgaagacattcaaaacgtgatgttttgaatgtggataaaactgtgtaaaccacataatttttgtacatcccaaaggatgagaatgtgacctttaagaaaaatgaaaacttttgtaaattattgatgattttgtaattcttatgactaaattttcttttaagcatttgtatattaaaatagcatactgtgtatgttttatatcaaatgccttcatgaatctttcatacatatatatatttgtaacattgtaaagtatgtgagtagtcttatgtaaagtatgtttttacattatgcaaataaaacccaatacttttgtccaatgtggttggtcaaatcaactgaataaattcagtattttgccttagttgttgtgaagcctgtgattctcagctgggactgaggatgggctataggagttgagttatagattggaaggaaatgtgtatcataagaaggcaaaaaataccaggagctttgcaaattgtattaatacactccttttctattgctcttgtatgaagctattgtcagctggaatggtttgcatcccccggtacattgaggtagaaaaaacaattgtggttgtgcctgtaatcccagcactttgggatgctgaagcgggaaaactggttgagcccaagagttcaagaccagcctggccaacatgatgaaatcccatctctacaaaaaatacaaaaatttgccaggtgtgatggtgcatgcctgtagtcccagctactcaggtggctgagatgtgaggatcacttaagcctgggaggcgaaggttgcagtgagccaagatcatgccacactacactccagcctggataacagagggaggccttgtccctgctaaaaataaaataataattgtgtgcc

SEQ ID NO: 83253 - DNA, 462 bp, Homo sapiens
cacagtgacattaatttcataactgtgtatcagaatgctgctaaaataaccagcttcctaataggtgggtcttagaaaaagccagcttgactgaagttctcaccgtctcacatttttattttgttgtaggtcatcactccccaaaatggacgttaccaaatagattccgatgttctcctgatcccctggaagctgacttacaggaatattggttctgattttattcctcggggcgcctttggaaaggtatacttggcacaagatataaagacgaagaaaagaatggcgtgtaaactggtatgtgttttctacctagataacccacactgtgtgtttggcattctggcttttgtttttttgtccatttgcattaaccaaaggtttttatcgtttgattgggtcttatctgagggtgcactgcctcaaagcatttgtttttctgaatttattggctacttgggg

SEQ ID NO: 83254 - DNA, 486 bp, Homo sapiens
atgactttggggttatttagaatctcgcttgtatttttgtgttctagatcccagtagatcaatttaagccatctgatgtggaaatccaggcttgcttccggcacgagaacatcgcagagctgtatggcgcagtcctgtggggtgaaactgtccatctctttatggaagcaggcgagggagggtctgttctggagaaactggagagctgtggaccaatgagagaatttgaaattatttgggtgacaaagcatgttctcaagggacttgattttctacactcaaagaaagtgatccatcatgatattaaacgtaagtatctttggacatatacctttttggctcaaagagactagttattcaggagacaaacaagctccttcctgtaatctgaagaccctccatggagggtggaaagctccctcagagcaccgtccgtcttccttctccagagacatatcttagaatcatgcggggttactagagctt

SEQ ID NO: 83255 - DNA, 3381 bp, Homo sapiens
cgggcgcccagagggcaaatgaggggcggcggggtggcgggtgggggggagacgcggaatttcccagcgcgggggctctggcttaccctgcaaccgggcagtctctttctgtttacggagagaaaggggaaatggaaaagtcggggaggcggtggctggcgtccgctgcgccgcccctgggcaggctcagacgccgtgagtcaggggcagagcagggcggtctgagcgtgcgggcgacgcgggtctcactcgtccgctccgctctggactgcgcgccacgctctggggtccggcgccctggttcctgcttctgccgctgccgccgccggatcccagtggcccggcgtgctcggctcccacaggcctgcagccagcatcgcaccgaaccttcggggggccgcggctggagcgctcggccggcgtgggagcgccaaggccgcagactctccagaaagagcaacagtaatggagtacatgagcactggaagtgacaataaagaagagattgatttattaattaaacatttaaatgtgtctgatgtaatagacattatggaaaatctttatgcaagtgaagagccagcagtttatgaacccagtctaatgaccatgtgtcaagacagtaatcaaaacgatgagcgttctaagtctctgctgcttagtggccaagaggtaccatggttgtcatcagtcagatatggaactgtggaggatttgcttgcttttgcaaaccatatatccaacactgcaaagcatttttatggacaacgaccacaggaatctggaattttattaaacatggtcatcactccccaaaatggacgttaccaaatagattccgatgttctcctgatcccctggaagctgacttacaggaatattggttctgattttattcctcggggcgcctttggaaaggtatacttggcacaagatataaagacgaagaaaagaatggcgtgtaaactgatcccagtagatcaatttaagccatctgatgtggaaatccaggcttgcttccggcacgagaacatcgcagagctgtatggcgcagtcctgtggggtgaaactgtccatctctttatggaagcaggcgagggagggtctgttctggagaaactggagagctgtggaccaatgagagaatttgaaattatttgggtgacaaagcatgttctcaagggacttgattttctacactcaaagaaagtgatccatcatgatattaaacctagcaacattgttttcatgtccacaaaagctgttttggtggattttggcctaagtgttcaaatgaccgaagatgtctattttcctaaggacctccgaggaacagagatttacatgagcccagaggtcatcctgtgcaggggccattcaaccaaagcagacatctacagcctgggggccacgctcatccacatgcagacgggcaccccaccctgggtgaagcgctaccctcgctcagcctatccctcctacctgtacataatccacaagcaagcacctccactggaagacattgcagatgactgcagtccagggatgagagagctgatagaagcttccctggagagaaaccccaatcaccgcccaagagccgcagacctactaaaacatgaggccctgaacccgcccagagaggatcagccacgctgtcagagtctggactctgccctcttggagcgcaagaggctgctgagtaggaaggagctggaacttcctgagaacattgctgattcttcgtgcacaggaagcaccgaggaatctgagatgctcaagaggcaacgctctctctacatcgacctcggcgctctggctggctacttcaatcttgttcggggaccaccaacgcttgaatatggctgaaggatgccatgtttgctctaaattaagacagcattgatctcctggaggctggttctgctgcctctacacaggggccctgtacagtgaatggtgccattttcgaaggagcagtgtgacctcctgtgacccatgaatgtgcctccaagcggccctgtgtgtttgacatgtgaagctatttgatatgcaccaggtctcaaggttctcatttctcaggtgacgtgattctaaggcaggaatttgagagttcacagaaggatcgtgtctgctgactgtttcattcactgtgcactttgctcaaaattttaaaaataccaatcacaaggataatagagtagcctaaaattactattcttggttcttatttaagtatggaatattcattttactcagaatagctgttttgtgtatattggtgtatattatataactctttgagcctttattggtaaattctggtatacattgaattcattataatttgggtgactagaacaacttgaagattgtagcaataagctggactagtgtcctaaaaatggctaactgatgaattagaagccatctgacagcaggccactagtgacagtttcttttgtgttcctatggaaacattttatactgtacatgctatgctgaagacattcaaaacgtgatgttttgaatgtggataaaactgtgtaaaccacataatttttgtacatcccaaaggatgagaatgtgacctttaagaaaaatgaaaacttttgtaaattattgatgattttgtaattcttatgactaaattttcttttaagcatttgtatattaaaatagcatactgtgtatgttttatatcaaatgccttcatgaatctttcatacatatatatatttgtaacattgtaaagtatgtgagtagtcttatgtaaagtatgtttttacattatgcaaataaaacccaatacttttgtccaatgtggttggtcaaatcaactgaataaattcagtattttgccttagttgttgtgaagcctgtgattctcagctgggactgaggatgggctataggagttgagttatagattggaaggaaatgtgtatcataagaaggcaaaaaataccaggagctttgcaaattgtattaatacactccttttctattgctcttgtatgaagctattgtcagctggaatggtttgcatcccccggtacattgaggtagaaaaaacaattgtggttgtgcctgtaatcccagcactttgggatgctgaagcgggaaaactggttgagcccaagagttcaagaccagcctggccaacatgatgaaatcccatctctacaaaaaatacaaaaatttgccaggtgtgatggtgcatgcctgtagtcccagctactcaggtggctgagatgtgaggatcacttaagcctgggaggcgaaggttgcagtgagccaagatcatgccacactacactccagcctggataacagagggaggccttgtccctgctaaaaataaaataataattgtgtgcc

SEQ ID NO: 83256 - DNA, 3023 bp, Homo sapiens
cgcggggaagcggggacccgctgtcactgcgcctcccgctgccgacgccgcctggacggccgcactctccctgcccgagacccgactctccagaaagagcaacagtaatggagtacatgagcactggaagtgacaataaagaagagattgatttattaattaaacatttaaatgtgtctgatgtaatagacattatggaaaatctttatgcaagtgaagagccagcagtttatgaacccagtctaatgaccatgtgtcaagacagtaatcaaaacgatgagcgttctaagtctctgctgcttagtggccaagaggtaccatggttgtcatcagtcagatatggaactgtggaggatttgcttgcttttgcaaaccatatatccaacactgcaaagcatttttatggacaacgaccacaggaatctggaattttattaaacatggtcatcactccccaaaatggacgttaccaaatagattccgatgttctcctgatcccctggaagctgacttacaggaatattggttctgattttattcctcggggcgcctttggaaaggtatacttggcacaagatataaagacgaagaaaagaatggcgtgtaaactgatcccagtagatcaatttaagccatctgatgtggaaatccaggcttgcttccggcacgagaacatcgcagagctgtatggcgcagtcctgtggggtgaaactgtccatctctttatggaagcaggcgagggagggtctgttctggagaaactggagagctgtggaccaatgagagaatttgaaattatttgggtgacaaagcatgttctcaagggacttgattttctacactcaaagaaagtgatccatcatgatattaaacctagcaacattgttttcatgtccacaaaagctgttttggtggattttggcctaagtgttcaaatgaccgaagatgtctattttcctaaggacctccgaggaacagagatttacatgagcccagaggtcatcctgtgcaggggccattcaaccaaagcagacatctacagcctgggggccacgctcatccacatgcagacgggcaccccaccctgggtgaagcgctaccctcgctcagcctatccctcctacctgtacataatccacaagcaagcacctccactggaagacattgcagatgactgcagtccagggatgagagagctgatagaagcttccctggagagaaaccccaatcaccgcccaagagccgcagacctactaaaacatgaggccctgaacccgcccagagaggatcagccacgctgtcagagtctggactctgccctcttggagcgcaagaggctgctgagtaggaaggagctggaacttcctgagaacattgctgattcttcgtgcacaggaagcaccgaggaatctgagatgctcaagaggcaacgctctctctacatcgacctcggcgctctggctggctacttcaatcttgttcggggaccaccaacgcttgaatatggctgaaggatgccatgtttgctctaaattaagacagcattgatctcctggaggctggttctgctgcctctacacaggggccctgtacagtgaatggtgccattttcgaaggagcagtgtgacctcctgtgacccatgaatgtgcctccaagcggccctgtgtgtttgacatgtgaagctatttgatatgcaccaggtctcaaggttctcatttctcaggtgacgtgattctaaggcaggaatttgagagttcacagaaggatcgtgtctgctgactgtttcattcactgtgcactttgctcaaaattttaaaaataccaatcacaaggataatagagtagcctaaaattactattcttggttcttatttaagtatggaatattcattttactcagaatagctgttttgtgtatattggtgtatattatataactctttgagcctttattggtaaattctggtatacattgaattcattataatttgggtgactagaacaacttgaagattgtagcaataagctggactagtgtcctaaaaatggctaactgatgaattagaagccatctgacagcaggccactagtgacagtttcttttgtgttcctatggaaacattttatactgtacatgctatgctgaagacattcaaaacgtgatgttttgaatgtggataaaactgtgtaaaccacataatttttgtacatcccaaaggatgagaatgtgacctttaagaaaaatgaaaacttttgtaaattattgatgattttgtaattcttatgactaaattttcttttaagcatttgtatattaaaatagcatactgtgtatgttttatatcaaatgccttcatgaatctttcatacatatatatatttgtaacattgtaaagtatgtgagtagtcttatgtaaagtatgtttttacattatgcaaataaaacccaatacttttgtccaatgtggttggtcaaatcaactgaataaattcagtattttgccttagttgttgtgaagcctgtgattctcagctgggactgaggatgggctataggagttgagttatagattggaaggaaatgtgtatcataagaaggcaaaaaataccaggagctttgcaaattgtattaatacactccttttctattgctcttgtatgaagctattgtcagctggaatggtttgcatcccccggtacattgaggtagaaaaaacaattgtggttgtgcctgtaatcccagcactttgggatgctgaagcgggaaaactggttgagcccaagagttcaagaccagcctggccaacatgatgaaatcccatctctacaaaaaatacaaaaatttgccaggtgtgatggtgcatgcctgtagtcccagctactcaggtggctgagatgtgaggatcacttaagcctgggaggcgaaggttgcagtgagccaagatcatgccacactacactccagcctggataacagagggaggccttgtccctgctaaaaataaaataataattgtgtgcc

SEQ ID NO: 83257 - DNA, 3562 bp, Homo sapiens
cgggcgcccagagggcaaatgaggggcggcggggtggcgggtgggggggagacgcggaatttcccagcgcgggggctctggcttaccctgcaaccgggcagtctctttctgtttacggagagaaaggggaaatggaaaagtcggggaggcggtggctggcgtccgctgcgccgcccctgggcaggctcagacgccgtgagtcaggggcagagcagggcggtctgagcgtgcgggcgacgcgggtctcactcgtccgctccgctctggactgcgcgccacgctctggggtccggcgccctggttcctgcttctgccgctgccgccgccggatcccagtggcccggcgtgctcggctcccacaggcctgcagccagcatcgcaccgaaccttcggggggccgcggctggagcgctcggccggcgtgggagcgccaaggccgcagatgcaatcttcttaccgcgaagaagccaggggaataggtagccacatcttgtttgcagataagaaaggaagctaacgcagtatctgcaaagccaggagtctgactcagtacttttctcactcatgcatacaaagcagctaaaaatgacacagcttatttaccatgcccctgacactgcactgagcactttatgagcttgaactctgttaatcctcacgaccacctcatgagactctccagaaagagcaacagtaatggagtacatgagcactggaagtgacaataaagaagagattgatttattaattaaacatttaaatgtgtctgatgtaatagacattatggaaaatctttatgcaagtgaagagccagcagtttatgaacccagtctaatgaccatgtgtcaagacagtaatcaaaacgatgagcgttctaagtctctgctgcttagtggccaagaggtaccatggttgtcatcagtcagatatggaactgtggaggatttgcttgcttttgcaaaccatatatccaacactgcaaagcatttttatggacaacgaccacaggaatctggaattttattaaacatggtcatcactccccaaaatggacgttaccaaatagattccgatgttctcctgatcccctggaagctgacttacaggaatattggttctgattttattcctcggggcgcctttggaaaggtatacttggcacaagatataaagacgaagaaaagaatggcgtgtaaactgatcccagtagatcaatttaagccatctgatgtggaaatccaggcttgcttccggcacgagaacatcgcagagctgtatggcgcagtcctgtggggtgaaactgtccatctctttatggaagcaggcgagggagggtctgttctggagaaactggagagctgtggaccaatgagagaatttgaaattatttgggtgacaaagcatgttctcaagggacttgattttctacactcaaagaaagtgatccatcatgatattaaacgtaagtatctttggacatatacatgtctattttcctaaggacctccgaggaacagagatttacatgagcccagaggtcatcctgtgcaggggccattcaaccaaagcagacatctacagcctgggggccacgctcatccacatgcagacgggcaccccaccctgggtgaagcgctaccctcgctcagcctatccctcctacctgtacataatccacaagcaagcacctccactggaagacattgcagatgactgcagtccagggatgagagagctgatagaagcttccctggagagaaaccccaatcaccgcccaagagccgcagacctactaaaacatgaggccctgaacccgcccagagaggatcagccacgctgtcagagtctggactctgccctcttggagcgcaagaggctgctgagtaggaaggagctggaacttcctgagaacattgctgattcttcgtgcacaggaagcaccgaggaatctgagatgctcaagaggcaacgctctctctacatcgacctcggcgctctggctggctacttcaatcttgttcggggaccaccaacgcttgaatatggctgaaggatgccatgtttgctctaaattaagacagcattgatctcctggaggctggttctgctgcctctacacaggggccctgtacagtgaatggtgccattttcgaaggagcagtgtgacctcctgtgacccatgaatgtgcctccaagcggccctgtgtgtttgacatgtgaagctatttgatatgcaccaggtctcaaggttctcatttctcaggtgacgtgattctaaggcaggaatttgagagttcacagaaggatcgtgtctgctgactgtttcattcactgtgcactttgctcaaaattttaaaaataccaatcacaaggataatagagtagcctaaaattactattcttggttcttatttaagtatggaatattcattttactcagaatagctgttttgtgtatattggtgtatattatataactctttgagcctttattggtaaattctggtatacattgaattcattataatttgggtgactagaacaacttgaagattgtagcaataagctggactagtgtcctaaaaatggctaactgatgaattagaagccatctgacagcaggccactagtgacagtttcttttgtgttcctatggaaacattttatactgtacatgctatgctgaagacattcaaaacgtgatgttttgaatgtggataaaactgtgtaaaccacataatttttgtacatcccaaaggatgagaatgtgacctttaagaaaaatgaaaacttttgtaaattattgatgattttgtaattcttatgactaaattttcttttaagcatttgtatattaaaatagcatactgtgtatgttttatatcaaatgccttcatgaatctttcatacatatatatatttgtaacattgtaaagtatgtgagtagtcttatgtaaagtatgtttttacattatgcaaataaaacccaatacttttgtccaatgtggttggtcaaatcaactgaataaattcagtattttgccttagttgttgtgaagcctgtgattctcagctgggactgaggatgggctataggagttgagttatagattggaaggaaatgtgtatcataagaaggcaaaaaataccaggagctttgcaaattgtattaatacactccttttctattgctcttgtatgaagctattgtcagctggaatggtttgcatcccccggtacattgaggtagaaaaaacaattgtggttgtgcctgtaatcccagcactttgggatgctgaagcgggaaaactggttgagcccaagagttcaagaccagcctggccaacatgatgaaatcccatctctacaaaaaatacaaaaatttgccaggtgtgatggtgcatgcctgtagtcccagctactcaggtggctgagatgtgaggatcacttaagcctgggaggcgaaggttgcagtgagccaagatcatgccacactacactccagcctggataacagagggaggccttgtccctgctaaaaataaaataataattgtgtgcc

SEQ ID NO: 83258 - DNA, 2188 bp, Homo sapiens
  misc_feature (31)..(31): n is a, c, g, or t
tacgctaccctagaggttaccgactagtccnaacatacctagcaacattgttttcatgtccacaaaagctgttttggtggattttggcctaagtgttcaaatgaccgaagatgtctattttcctaaggacctccgaggaacagagatttacatgagcccagaggtcatcctgtgcaggggccattcaaccaaagcagacatctacagcctgggggccacgctcatccacatgcagacgggcaccccaccctgggtgaagcgctaccctcgctcagcctatccctcctacctgtacataatccacaagcaagcacctccactggaagacattgcagatgactgcagtccagggatgagagagctgatagaagcttccctggagagaaaccccaatcaccgcccaagagccgcagacctactaaaacatgaggccctgaacccgcccagagaggatcagccacgctgtcagagtctggactctgccctcttggagcgcaagaggctgctgagtaggaaggagctggaacttcctgagaacattgctgattcttcgtgcacaggaagcaccgaggaatctgagatgctcaagaggcaacgctctctctacatcgacctcggcgctctggctggctacttcaatcttgttcggggaccaccaacgcttgaatatggctgaaggatgccatgtttgctctaaattaagacagcattgatctcctggaggctggttctgctgcctctacacaggggccctgtacagtgaatggtgccattttcgaaggagcagtgtgacctcctgtgacccatgaatgtgcctccaagcggccctgtgtgtttgacatgtgaagctatttgatatgcaccaggtctcaaggttctcatttctcaggtgacgtgattctaaggcaggaatttgagagttcacagaaggatcgtgtctgctgactgtttcattcactgtgcactttgctcaaaattttaaaaataccaatcacaaggataatagagtagcctaaaattactattcttggttcttatttaagtatggaatattcattttactcagaatagctgttttgtgtatattggtgtatattatataactctttgagcctttattggtaaattctggtatacattgaattcattataatttgggtgactagaacaacttgaagattgtagcaataagctggactagtgtcctaaaaatggctaactgatgaattagaagccatctgacagcaggccactagtgacagtttcttttgtgttcctatggaaacattttatactgtacatgctatgctgaagacattcaaaacgtgatgttttgaatgtggataaaactgtgtaaaccacataatttttgtacatcccaaaggatgagaatgtgacctttaagaaaaatgaaaacttttgtaaattattgatgattttgtaattcttatgactaaattttcttttaagcatttgtatattaaaatagcatactgtgtatgttttatatcaaatgccttcatgaatctttcatacatatatatatttgtaacattgtaaagtatgtgagtagtcttatgtaaagtatgtttttacattatgcaaataaaacccaatacttttgtccaatgtggttggtcaaatcaactgaataaattcagtattttgccttagttgttgtgaagcctgtgattctcagctgggactgaggatgggctataggagttgagttatagattggaaggaaatgtgtatcataagaaggcaaaaaataccaggagctttgcaaattgtattaatacactccttttctattgctcttgtatgaagctattgtcagctggaatggtttgcatcccccggtacattgaggtagaaaaaacaattgtggttgtgcctgtaatcccagcactttgggatgctgaagcgggaaaactggttgagcccaagagttcaagaccagcctggccaacatgatgaaatcccatctctacaaaaaatacaaaaatttgccaggtgtgatggtgcatgcctgtagtcccagctactcaggtggctgagatgtgaggatcacttaagcctgggaggcgaaggttgcagtgagccaagatcatgccacactacactccagcctggataacagagggaggccttgtccctgctaaaaataaaataataattgtgtgcc

SEQ ID NO: 83259 - DNA, 3559 bp, Homo sapiens
cgggcgcccagagggcaaatgaggggcggcggggtggcgggtgggggggagacgcggaatttcccagcgcgggggctctggcttaccctgcaaccgggcagtctctttctgtttacggagagaaaggggaaatggaaaagtcggggaggcggtggctggcgtccgctgcgccgcccctgggcaggctcagacgccgtgagtcaggggcagagcagggcggtctgagcgtgcgggcgacgcgggtctcactcgtccgctccgctctggactgcgcgccacgctctggggtccggcgccctggttcctgcttctgccgctgccgccgccggatcccagtggcccggcgtgctcggctcccacaggcctgcagccagcatcgcaccgaaccttcggggggccgcggctggagcgctcggccggcgtgggagcgccaaggccgcagatgcaatcttcttaccgcgaagaagccaggggaataggtagccacatcttgtttgcagataagaaaggaagctaacgcagtatctgcaaagccaggagtctgactcagtacttttctcactcatgcatacaaagcagctaaaaatgacacagcttatttaccatgcccctgacactgcactgagcactttatgagcttgaactctgttaatcctcacgaccacctcatgagactctccagaaagagcaacagtaatggagtacatgagcactggaagtgacaataaagaagagattgatttattaattaaacatttaaatgtgtctgatgtaatagacattatggaaaatctttatgcaagtgaagagccagcagtttatgaacccagtctaatgaccatgtgtcaagacagtaatcaaaacgatgagcgttctaagtctctgctgcttagtggccaagaggtaccatggttgtcatcagtcagatatggaactgtggaggatttgcttgcttttgcaaaccatatatccaacactgcaaagcatttttatggacaacgaccacaggaatctggaattttattaaacatggtcatcactccccaaaatggacgttaccaaatagattccgatgttctcctgatcccctggaagctgacttacaggaatattggttctgattttattcctcggggcgcctttggaaaggtatacttggcacaagatataaagacgaagaaaagaatggcgtgtaaactgatcccagtagatcaatttaagccatctgatgtggaaatccaggcttgcttccggcacgagaacatcgcagagctgtatggcgcagtcctgtggggtgaaactgtccatctctttatggaagcaggcgagggagggtctgttctggagaaactggagagctgtggaccaatgagagaatttgaaattatttgggtgacaaagcatgttctcaagggacttgattttctacactcaaagaaagtgatccatcatgatattaaacctagcaacattgttttcatgtccacaaaagctgttttggtggattttggcctaagtgttcaaatgaccgaagatgtctattttcctaaggacctccgaggaacagagatttacatgagcccagaggtcatcctgtgcaggggccattcaaccaaagcagacatctacagcctgggggccacgctcatccacatgcagacgggcaccccaccctgggtgaagcgctaccctcgctcagcctatccctcctacctgtacataatccacaagcaagcacctccactggaagacattgcagatgactgcagtccagggatgagagagctgatagaagcttccctggagagaaaccccaatcaccgcccaagagccgcagacctatctggactctgccctcttggagcgcaagaggctgctgagtaggaaggagctggaacttcctgagaacattgctgattcttcgtgcacaggaagcaccgaggaatctgagatgctcaagaggcaacgctctctctacatcgacctcggcgctctggctggctacttcaatcttgttcggggaccaccaacgcttgaatatggctgaaggatgccatgtttgctctaaattaagacagcattgatctcctggaggctggttctgctgcctctacacaggggccctgtacagtgaatggtgccattttcgaaggagcagtgtgacctcctgtgacccatgaatgtgcctccaagcggccctgtgtgtttgacatgtgaagctatttgatatgcaccaggtctcaaggttctcatttctcaggtgacgtgattctaaggcaggaatttgagagttcacagaaggatcgtgtctgctgactgtttcattcactgtgcactttgctcaaaattttaaaaataccaatcacaaggataatagagtagcctaaaattactattcttggttcttatttaagtatggaatattcattttactcagaatagctgttttgtgtatattggtgtatattatataactctttgagcctttattggtaaattctggtatacattgaattcattataatttgggtgactagaacaacttgaagattgtagcaataagctggactagtgtcctaaaaatggctaactgatgaattagaagccatctgacagcaggccactagtgacagtttcttttgtgttcctatggaaacattttatactgtacatgctatgctgaagacattcaaaacgtgatgttttgaatgtggataaaactgtgtaaaccacataatttttgtacatcccaaaggatgagaatgtgacctttaagaaaaatgaaaacttttgtaaattattgatgattttgtaattcttatgactaaattttcttttaagcatttgtatattaaaatagcatactgtgtatgttttatatcaaatgccttcatgaatctttcatacatatatatatttgtaacattgtaaagtatgtgagtagtcttatgtaaagtatgtttttacattatgcaaataaaacccaatacttttgtccaatgtggttggtcaaatcaactgaataaattcagtattttgccttagttgttgtgaagcctgtgattctcagctgggactgaggatgggctataggagttgagttatagattggaaggaaatgtgtatcataagaaggcaaaaaataccaggagctttgcaaattgtattaatacactccttttctattgctcttgtatgaagctattgtcagctggaatggtttgcatcccccggtacattgaggtagaaaaaacaattgtggttgtgcctgtaatcccagcactttgggatgctgaagcgggaaaactggttgagcccaagagttcaagaccagcctggccaacatgatgaaatcccatctctacaaaaaatacaaaaatttgccaggtgtgatggtgcatgcctgtagtcccagctactcaggtggctgagatgtgaggatcacttaagcctgggaggcgaaggttgcagtgagccaagatcatgccacactacactccagcctggataacagagggaggccttgtccctgctaaaaataaaataataattgtgtgcc

SEQ ID NO: 83260 - DNA, 1231 bp, Homo sapiens
cgggcgcccagagggcaaatgaggggcggcggggtggcgggtgggggggagacgcggaatttcccagcgcgggggctctggcttaccctgcaaccgggcagtctctttctgtttacggagagaaaggggaaatggaaaagtcggggaggcggtggctggcgtccgctgcgccgcccctgggcaggctcagacgccgtgagtcaggggcagagcagggcggtctgagcgtgcgggcgacgcgggtctcactcgtccgctccgctctggactgcgcgccacgctctggggtccggcgccctggttcctgcttctgccgctgccgccgccggatcccagtggcccggcgtgctcggctcccacaggcctgcagccagcatcgcaccgaaccttcggggggccgcggctggagcgctcggccggcgtgggagcgccaaggccgcagatgcaatcttcttaccgcgaagaagccaggggaataggtagccacatcttgtttgcagataagaaaggaagctaacgcagtatctgcaaagccaggagtctgactcagtacttttctcactcatgcatacaaagcagctaaaaatgacacagcttatttaccatgcccctgacactgcactgagcactttatgagcttgaactctgttaatcctcacgaccacctcatgagactctccagaaagagcaacagtaatggagtacatgagcactggaagtgacaataaagaagagattgatttattaattaaacatttaaatgtgtctgatgtaatagacattatggaaaatctttatgcaagtgaagagccagcagtttatgaacccagtctaatgaccatgtgtcaagacagtaatcaaaacgatgagcgttctaagtctctgctgcttagtggccaagaggtaccatggttgtcatcagtcagatatggaactgtggaggatttgcttgcttttgcaaaccatatatccaacactgcaaagcatttttatggacaacgaccacaggaatctggaattttattaaacatggtacgtttctttccgatcagttgggtgctatgtgctcagctttcctactgcagcttcatttaatgcagagtggtgtttgaatttggcttagatgggctggcaggcatgattttaaaaaatgtaatcatcagtaagaagtacttccatgttaaagatgcaaaaaaaaaagtcttcattaaaatttctatttaaagattat

SEQ ID NO: 83261 - DNA, 397 bp, Homo sapiens
ctgagctgctcttgattcgtgtgtatgtttagtgaaagtttgttttcagtgcctgtagctgataccactgactctgtgagtaagagtaagctctctggatctcaggtttccctctgcaaagtgagctggactaaaggttatcttaggtccctttcaactctgcactgtcaacttgaattcatacacacagttgacacagaaccctcgttttctgaacaaaagcatataaaatcctgttgccaatccttgtatgtcagtttcccatgggtcttgaatgcaaatacaaatatcgtaaactaaatatttgtgttttctttcctagactctccagaaagagcaacagtaatggagtacatgagcactggaagtgacaataaagaagagattgatttattaa

SEQ ID NO: 83262 - DNA, 605 bp, Homo sapiens
gatcacttgagcccaggagttcgaggctacggtgagttgtgttggtgccactgtactccagcctggatgacagagcaaagaccctgtctcaaaaggaaaagaaaaaagaaattaaagggaagcttgcttgcttaagggctgaactgcattcgttgcagggcatgtggtggaaaacggattactttctaggtcctggtactagcatgcttttgctgttgagggtgtatcaccatacctttgatgctaagagagctggtttgttgatagatccacaagcaagcacctccactggaagacattgcagatgactgcagtccagggatgagagagctgatagaagcttccctggagagaaaccccaatcaccgcccaagagccgcagacctactaaaacatgaggccctgaacccgcccagagaggatcagccacgctgtcagagtctggactctgccctcttggagcgcaagaggctgctgagtaggaaggagctggaacttcctgagaacattgctggtagggacaccctgctgtgtgccgcacacttacttcccttctctttctgtccacatcaaacctctgatgtagttcatgaaagcacttggaa

SEQ ID NO: 83263 - DNA, 3052 bp, Homo sapiens
cgggcgcccagagggcaaatgaggggcggcggggtggcgggtgggggggagacgcggaatttcccagcgcgggggctctggcttaccctgcaaccgggcagtctctttctgtttacggagagaaaggggaaatggaaaagtcggggaggcggtggctggcgtccgctgcgccgcccctgggcaggctcagacgccgtgagtcaggggcagagcagggcggtctgagcgtgcgggcgacgcgggtctcactcgtccgctccgctctggactgcgcgccacgctctggggtccggcgccctggttcctgcttctgccgctgccgccgccggatcccagtggcccggcgtgctcggctcccacaggcctgcagccagcatcgcaccgaaccttcggggggccgcggctggagcgctcggccggcgtgggagcgccaaggccgcagatgcaatcttcttaccgcgaagaagccaggggaataggtagccacatcttgtttgcagataagaaaggaagctaacgcagtatctgcaaagccaggagtctgactcagtacttttctcactcatgcatacaaagcagctaaaaatgacacagcttatttaccatgcccctgacactgcactgagcactttatgagcttgaactctgttaatcctcacgaccacctcatgagactctccagaaagagcaacagtaatggagtacatgagcactggaagtgacaataaagaagagattgatttattaattaaacatttaaatgtgtctgatgtaatagacattatggaaaatctttatgcaagtgaagagccagcagtttatgaacccagtctaatgaccatgtgtcaagacagtaatcaaaacgatgagcgttctaagtctctgctgcttagtggccaagaggtaccatggttgtcatcagtcagatatggaactgtggaggatttgcttgcttttgcaaaccatatatccaacactgcaaagcatttttatggacaacgaccacaggaatctggaattttattaaacatggtcatcactccccaaaatggacgttaccaaatagattccgatgttctcctgatcccctggaagctgacttacaggaatattggttctgattttattcctcggggcgcctttggaaaggtatacttggcacaagatataaagacgaagaaaagaatggcgtgtaaactgatcccagtagatcaatttaagccatctgatgtggaaatccaggcttgcttccggcacgagaacatcgcagagctgtatggcgcagtcctgtggggtgaaactgtccatctctttatggaagcaggcgagggagggtctgttctggagaaactggagagctgtggaccaatgagagaatttgaaattatttgggtgacaaagcatgttctcaagggacttgattttctacactcaaagaaagtgatccatcatgatattaaacctagcaacattgttttcatgtccacaaaagctgttttggtggattttggcctaagtgttcaaatgaccgaagatgtctattttcctaaggacctccgaggaacagagatttacatgagcccagaggtcatcctgtgcaggggccattcaaccaaagcagacatctacagcctgggggccacgctcatccacatgcagacgggcaccccaccctgggtgaagcgctaccctcgctcagcctatccctcctacctgtacataatccacaagcaagcacctccactggaagacattgcagatgactgcagtccagggatgagagagctgatagaagcttccctggagagaaaccccaatcaccgcccaagagccgcagacctactaaaacatgaggccctgaacccgcccagagaggatcagccacgctgtcagagtctggactctgccctcttggagcgcaagaggctgctgagtaggaaggagctggaacttcctgagaacattgctgattcttcgtgcacaggaagcaccgaggaatctgagatgctcaagaggcaacgctctctctacatcgacctcggcgctctggctggctacttcaatcttgttcggggaccaccaacgcttgaatatggctgaaggatgccatgtttgctctaaattaagacagcattgatctcctggaggctggttctgctgcctctacacaggggccctgtacagtgaatggtgccattttcgaaggagcagtgtgacctcctgtgacccatgaatgtgcctccaagcggccctgtgtgtttgacatgtgaagctatttgatatgcaccaggtctcaaggttctcatttctcaggtgacgtgattctaaggcaggaatttgagagttcacagaaggatcgtgtctgctgactgtttcattcactgtgcactttgctcaaaattttaaaaataccaatcacaaggataatagagtagcctaaaattactattcttggttcttatttaagtatggaatattcattttactcagaatagctgttttgtgtatattggtgtatattatataactctttgagcctttattggtaaattctggtatacattgaattcattataatttgggtgactagaacaacttgaagattgtagcaataagctggactagtgtcctaaaaatggctaactgatgaattagaagccatctgacagcaggccactagtgacagtttcttttgtgttcctatggaaacattttatactgtacatgctatgctgaagacattcaaaacgtgatgttttgaatgtggataaaactgtgtaaaccacataatttttgtacatcccaaaggatgagaatgtgacctttaagaaaaatgaaaacttttgtaaattattgatgattttgtaattcttatgactaaattttcttttaagcatttgtatattaaaatagcatactgtgtatgttttatatcaaatgccttcatgaatctttcatacatatatatatttgtaacattgtaaagtatgtgagtagtcttatgtaaagtatgtttttacattatgcaaataaaacccaatacttttgtcca

SEQ ID NO: 83264 - DNA, 2245 bp, Homo sapiens
  misc_feature (1)..(1): n is a, c, g, or t
ngatattaaacctagcaacattgttttcatgtcatgatggatcactttctttgagtgtagaaaatcaaagaaagtgatccatcatgatattaaacctagcaacattgttttcatgtccacaaaagctgttttggtggattttggcctaagtgttcaaatgaccgaagatgtctattttcctaaggacctccgaggaacagagatttacatgagcccagaggtcatcctgtgcaggggccattcaaccaaagcagacatctacagcctgggggccacgctcatccacatgcagacgggcaccccaccctgggtgaagcgctaccctcgctcagcctatccctcctacctgtacataatccacaagcaagcacctccactggaagacattgcagatgactgcagtccagggatgagagagctgatagaagcttccctggagagaaaccccaatcaccgcccaagagccgcagacctactaaaacatgaggccctgaacccgcccagagaggatcagccacgctgtcagagtctggactctgccctcttggagcgcaagaggctgctgagtaggaaggagctggaacttcctgagaacattgctgattcttcgtgcacaggaagcaccgaggaatctgagatgctcaagaggcaacgctctctctacatcgacctcggcgctctggctggctacttcaatcttgttcggggaccaccaacgcttgaatatggctgaaggatgccatgtttgctctaaattaagacagcattgatctcctggaggctggttctgctgcctctacacaggggccctgtacagtgaatggtgccattttcgaaggagcagtgtgacctcctgtgacccatgaatgtgcctccaagcggccctgtgtgtttgacatgtgaagctatttgatatgcaccaggtctcaaggttctcatttctcaggtgacgtgattctaaggcaggaatttgagagttcacagaaggatcgtgtctgctgactgtttcattcactgtgcactttgctcaaaattttaaaaataccaatcacaaggataatagagtagcctaaaattactattcttggttcttatttaagtatggaatattcattttactcagaatagctgttttgtgtatattggtgtatattatataactctttgagcctttattggtaaattctggtatacattgaattcattataatttgggtgactagaacaacttgaagattgtagcaataagctggactagtgtcctaaaaatggctaactgatgaattagaagccatctgacagcaggccactagtgacagtttcttttgtgttcctatggaaacattttatactgtacatgctatgctgaagacattcaaaacgtgatgttttgaatgtggataaaactgtgtaaaccacataatttttgtacatcccaaaggatgagaatgtgacctttaagaaaaatgaaaacttttgtaaattattgatgattttgtaattcttatgactaaattttcttttaagcatttgtatattaaaatagcatactgtgtatgttttatatcaaatgccttcatgaatctttcatacatatatatatttgtaacattgtaaagtatgtgagtagtcttatgtaaagtatgtttttacattatgcaaataaaacccaatacttttgtccaatgtggttggtcaaatcaactgaataaattcagtattttgccttagttgttgtgaagcctgtgattctcagctgggactgaggatgggctataggagttgagttatagattggaaggaaatgtgtatcataagaaggcaaaaaataccaggagctttgcaaattgtattaatacactccttttctattgctcttgtatgaagctattgtcagctggaatggtttgcatcccccggtacattgaggtagaaaaaacaattgtggttgtgcctgtaatcccagcactttgggatgctgaagcgggaaaactggttgagcccaagagttcaagaccagcctggccaacatgatgaaatcccatctctacaaaaaatacaaaaatttgccaggtgtgatggtgcatgcctgtagtcccagctactcaggtggctgagatgtgaggatcacttaagcctgggaggcgaaggttgcagtgagccaagatcatgccacactacactccagcctggataacagagggaggccttgtccctgctaaaaataaaataataattgtgtgcc

SEQ ID NO: 83265 - DNA, 1639 bp, Homo sapiens
cgggcgcccagagggcaaatgaggggcggcggggtggcgggtgggggggagacgcggaatttcccagcgcgggggctctggcttaccctgcaaccgggcagtctctttctgtttacggagagaaaggggaaatggaaaagtcggggaggcggtggctggcgtccgctgcgccgcccctgggcaggctcagacgccgtgagtcaggggcagagcagggcggtctgagcgtgcgggcgacgcgggtctcactcgtccgctccgctctggactgcgcgccacgctctggggtccggcgccctggttcctgcttctgccgctgccgccgccggatcccagtggcccggcgtgctcggctcccacaggcctgcagccagcatcgcaccgaaccttcggggggccgcggctggagcgctcggccggcgtgggagcgccaaggccgcagatgcaatcttcttaccgcgaagaagccaggggaataggtagccacatcttgtttgcagataagaaaggaagctaacgcagtatctgcaaagccaggagtctgactcagtacttttctcactcatgcatacaaagcagctaaaaatgacacagcttatttaccatgcccctgacactgcactgagcactttatgagcttgaactctgttaatcctcacgaccacctcatgagactctccagaaagagcaacagtaatggagtacatgagcactggaagtgacaataaagaagagattgatttattaattaaacatttaaatgtgtctgatgtaatagacattatggaaaatctttatgcaagtgaagagccagcagtttatgaacccagtctaatgaccatgtgtcaagacagtaatcaaaacgatgagcgttctaagtctctgctgcttagtggccaagaggtaccatggttgtcatcagtcagatatggaactgtggaggatttgcttgcttttgcaaaccatatatccaacactgcaaagcatttttatggacaacgaccacaggaatctggaattttattaaacatggtcatcactccccaaaatggacgttaccaaatagattccgatgttctcctgatcccctggaagctgacttacaggaatattggttctgattttattcctcggggcgcctttggaaaggtatacttggcacaagatataaagacgaagaaaagaatggcgtgtaaactgatcccagtagatcaatttaagccatctgatgtggaaatccaggcttgcttccggcacgagaacatcgcagagctgtatggcgcagtcctgtggggtgaaactgtccatctctttatggaagcaggcgagggagggtctgttctggagaaactggagagctgtggaccaatgagagaatttgaaattatttgggtgacaaagcatgttctcaagggacttgattttctacactcaaagaaagtgatccatcatgatattaaacgtaagtatctttggacatatacctttttggctcaaagagactagttattcaggagacaaacaagctccttcctgtaatctgaagaccctccatggagggtggaaagctccctcagagcaccgtccgtcttccttctccagagacatatcttagaatcatgcggggttactagagctt

SEQ ID NO: 83266 - DNA, 428 bp, Homo sapiens
ctatttttaaagggaaacatcttttctgggttgagaagaagcaagatcacaaaataaaggaggttgaaaaaattaccgaaatacttttgtgcacgagagtctagccttacgaaatggctggacaggtgtagtccttggtctttctctgcgtgaggtataaaatggtttttaagtataaaaccctgccaggcacagtggctcaggcctgtaatccccgcacattgggaggccaaggagggtggatcatgaggtcaggagttcgagaccagcctggccaatatggtgatgccccatctctactaaaatacaaaacttagctgtgcatggtggcgcacacctgtagtcccagctacttagaaggctgaggtgggagagttgcttgagccctggaggatgaggctgtggtgagctatgatcatgccattgcg

SEQ ID NO: 83267 - DNA, 387 bp, Homo sapiens
gttggcaggcacctgtaatcccagctactcaggaggctgaagcaggagaatcgcttgaacctgggaggtggaggatgcagtgagctgagatcacgccactgtgctccagcctgggtgacaagagtgaaactccatctcaaaaaaaaaaaaaaaaattgtaggtcacactgtactatcatttctggcttgcctgaatactgcccaactcagctccaagcccctctatgggcctgcaggtggagtgcccttaagggagggctcaccccaacaagccaccctgtcctgctggagcagccaactggcagaaagacagtcagtcagcagggcctcgttttttcttgcctctgacagaagagcagagcacagctctacaaatggtacttccag

SEQ ID NO: 83268 - DNA, 412 bp, Homo sapiens
ggtttcaccatgttggccaggctggtcttgaactcctgacttcaggtgatccacctgccttggcctcccaaagtgctgggatgacaggcatcagccatcgtgaccggcctacatttttttaaaaaggtaataacaatcatgaatggagttgttttgggttttattttcataattgtcctcagaaagataaggtaaatgtgtgtactggcagttttcccatttctgagcatgctttgttgaggaataataaaagagaatgactctgccataaagactatctgcagaaaaacacagttcttattaattcaagtttccttttgcttaaagagccagaactcagtaatctccacaacttcagaataaaccacccaggactcatcaacatcattttatcctgaaaccatatggattt

SEQ ID NO: 83269 - DNA, 516 bp, Homo sapiens
ccagatttgctaaacagataaggcagcaatatgtcatgaaaatgaatactcaagaggccaagcagaaagcagatattaaaatcaaagacagaacactatttgtggatcagaatttgtcaatgtctgtgcaagataatgaaagcaaccgagaaccttcagatcctagtcagtgtgatgctaacaatatgaagcattctgacttgaataatctcaaactctcagtccctgataatagacagctgttagagcaggagagcatcatgaaggctcagccccaacatgagtctctgggaattatttggaacttgttgcaaaatctattcaagattggattacaaaagaagaagctatatatcaggaatctaaaatgaatgagaaaatcatcaggaccagagctgagctggaattgaaatcttctgctaatgccaaacttacttctgctagcaaaattttttccattaaagaatctaaaagtaacaaaggaatcagcaaaacagagatatcagatcaagaaaa

SEQ ID NO: 83270 - DNA, 443 bp, Homo sapiens
cagcagcgcagtctaatggactggagttttactgaacattttaaaccgaaagtactgcttcaggtccttcaagaagcccataagcaatataggtgtgttgattcttactaccacacccaagacaactctttacttttagtctttcacaatccaatgaatagacaacgtttgcattgtgaatattggaacattgctctccactccaatgttggattcaggaattatttggaacttgttgcaaaatctattcaagattggattacaaaagaagaagctatatatcaggaatctaaaatgaatgagaaaatcatcaggaccagagctgagctggaattgaaatcttctgctaatgccaaacttacttctgctagcaaaattttttccattaaagaatctaaaagtaacaaaggaatcagcaaaacagagatatcagatcaagaaaa

SEQ ID NO: 83271 - DNA, 365 bp, Homo sapiens
ccagatttgctaaacagataaggcagcaatatgtcatgaaaatgaatactcaagaggccaagcagaaagcagatattaaaatcaaagacagaacactatttgtggatcagaatttgtcaatgtctgtgcaagataatgaaagcaaccgagaaccttcagatcctagtcagtgtgatgctaacaatatgaagcattctgacttgaataatctcaaactctcagtccctgataatagacagctgttagagcaggagagcatcatgaaggctcagccccaacatgagtctctgggtaagttaaagtgtgtgtgtgtgtgtgtgtgtgtgtgtgtgtaagacactattatagtacacataaatcaaaaa

SEQ ID NO: 83272 - DNA, 328 bp, Homo sapiens
gctagacattatgaaaaaagaatgggcagttttgaagagtaaatgcagtcattgaaataatgggcatataacaatggtgatagatgatacattaaatattgaaaaaaattcatgagtctgctactgaaggaggaaggaatgaagggaaagaaggaagaaggtggggggagtgcaaggaaaagagaaagaagatggacaagctcttttctacagaataccgtcaatgaatgtagaaggaattataaaattagaaaatcatcattttacacactccaatgtaatcatttatatgggaaagggtcatcagtagatgccaatacaactggat

SEQ ID NO: 83273 - DNA, 838 bp, Homo sapiens
tattctccacagactcctctccattggatctctagcacctagaatagagctgggtacacatgatgaggtgcttaatacgtatttgtcaaattgaatgtcaagttttaggagtttaaagagtgttttcaaatggggagaagccgagacacaaatagtctcaggaatgagatgaaattatttaaccaattggagatgaaattcgaaatggaaactatgacatgactcaacatcctcaagccctgaagtaataattagcacataaagttggtctgttatggactttgtgttgtgctccctgcaaaattggatacagagagaagacagctgtctgcaaaccagaaagagagtcctcactgcacttcatatctgccaatggatccttgctcttgaacctcccaacctgcagaatcatgagaaacaaacattgtgtaagccacccactctacagtaatttgttctagcagaccgagctgactgaggttaaaattcctatgcgaatctgactgacccagcttgggcttcattccaacctcttggctagataagagtgtggaaccttaactgatggtccctttgactgcccgccacaagggaagatccaaagtgtggcagagagtgaccaggtcccagacaggcaaaatcagcagatgtccattcgcaagccaaaagagctccagaaaatgttctctttgaatagaaaccatgtttgctatactcatcctggaaagtggccatcctgctggtccttagagcaggctgtgcctgggagccatctttgaatatcctctgagctcagagggagagacatacctctagtgaggatcctggaaacctccgt

SEQ ID NO: 83274 - DNA, 357 bp, Homo sapiens
cataagtctctactgatataaagcacaattgaataataactgggagagggagggagaataaataagttctacgtaaaagaatttcttataaattttgtagatatgactttctaaacaaattctcattcttaagaattcatagtgacttccttccaaaaattacaatatggaaaactgataaaaaatgagtaactctacagtggaggaatctgacacatactacatcagccaggttattgaggtcaacatcaacagccataaatcatgtgaacagtatgtacacttggtatgatgtaacgaatagcacttcacttctgtggtctttctccccaggctcattatctcagtataatcatg

SEQ ID NO: 83275 - DNA, 824 bp, Homo sapiens
caatgtatatgggaaaatgattttaccaacttaagaacttacaactccagtacttaatatgtgttgactgtgagtgtatgtgtgtctgtgtgtatgttttaaatttaactgagatatttgtatacttttttatattctcagaatatggatggatataatacttattttatatactagtatgtgttaaaatggcctattaatgatttattatggacattcttctctaatttaaaaagatcatggagtaggatggttaatatattacttttaaaacaaactgtcaagaggcttgaggagctatatgtttttatttttcttgatcaatccatgtttgatctattgcataatttagtcacttaattcttagttttaaaatgtagtaaggaaatattttatgactcgactgaaggacatagaatgctgttgacattttactgggaaatttttttattgtgaggggttgtctagcccacctgctgtaggctaatagtgccctccaagttttgggacaaccaagaaatgctcccagacatttccaaaagaacctctgtctcatttctgtcctgttttttttgtttgtttttttttgttttttgtttttttttagcttctccctctctattgtacctatctattcaacccaagtctctcccatctttaaaaaacttcctcccttggccccattttcccttctacctgctgcagaatgttctcttccctttcaaaatgaaattcttaagtaattatttcttgccaatagaaattttattaactaattcatgacactatttttgcatgattcagtgcattttttgggagaaaat

SEQ ID NO: 83276 - DNA, 564 bp, Homo sapiens
ggactgcaggtgtatgccaccatgtccagtgaattctttgttattttttctaatggcagagaaaggaccatattttcttagtctgccaacatttcatgcctctggaattgggcctaaggccaagtgggtagtccgtcacttccctagttcttacagtgtgaatatggggtgacaagaaaatgtgcatttcaaatcaattcccagatgactccaaagtcttacatactagaatagcagacttttctgttcaaagggcagtttttaaagagttgtcatatgtgcccaattttttttcccaagtgtgccatagattttcggtccctccctgttattaaaaaaaaaatcagtttacaaaaaaaaaaaaaaaaaaaaaaaaaaaaaaaaaaaaaaaaaaaaaaaaaaaaaaaaaaaaaaaaaaacaacaaaaaaaaaaaacaaaacaaaaaaaaaaaaaggggggggggccgcacaaaacggcacgcacaccgtgagagacaaaaaaaccaagatcaacaccagacagaaaacagaacgtgcgaaaccgaaggagagacccaaacaaag

SEQ ID NO: 83277 - DNA, 940 bp, Homo sapiens
cccaggacacaaaaactgcggaaggccgcaggacctctgcctaggaaagccagtctctcgttccaccttatgagaaacacccacaggtgtggaggggcaacccacccctacagaaggggccactggggcagggaagagacagatgttggattttagaggatccggtaaaggatgctactcttctccatccaagtttgaaagcgactgagagagacacacaacagtcagacagagagagatcaaaatattttcctgtgacttaagagcaatggccaagctggcttcctgctatcctacccttgaacttgacattcacccactgaaaatgcccagtccctggctcagtggggataccagaggctgctaactgccaggcagcaacagaccaataaaggcttccaaaagagatggtgcgctgggctgggcatgcccaggagctcctcccacgcttggccatcagattaggatcctgagacccggagaagttaagcaacctgtccaagttcacacaacatatgaggagatttattatgaaaattggctcgcgtgatgatagaggccaagaagtcccacgatctgccgtctgcaagctgaggaccaggaaagctagtcatatatgtaattcagactgaatctgaaggcccaagaaccaggagcacgtggatgtcccagctcaagaagagacagagacttctcccttcctctgcctttctgttgtattcaggcacttaatgggactgggtgctgcccaccccttttggcgagaacaaccttcttttatttatttatttattttctgaaatggagtctcgctctgtcacctaggctggagtgcagtggcgcgatattggctcactgcaacctttgcctcccaggttcaagacattctcctgcatcagccccccgagtagctgggattacaggcatgcaccaccatgcc

SEQ ID NO: 83278 - DNA, 601 bp, Homo sapiens
accacatcctctatttttggaagggcatacagcgtgctggtaatgtcactgattaagttttgccttacttcggaaagattctaatgctctcttagcagatgctttgtgctatcgtgaacaatagggcacagatcttttattgatattcaatcacagcatcttatcagtctgagttttttagttcattcaagaaatccatatcttatcattccacaggcttgttctgtgtccttgagctggttcccttgtcttcaagttacagttttcctctctctaaacctgataaccagtgctaccttattaaaaattattatttttttgtccgggcacagtggctcatgcctgtaatcccatcactttgggaggccaagggtggtggatcacctgaggtcaggagtttgagaccagcctgacctatatggcgaaaccccgtatctactaaaaatacaaaaattagccgggcgtggtggcatgtgcctgtaatcccagctactcgggaggcagagacaggagaatcgcttgaacccgggaggtggaggttgcaggagctgagatcgtgccactgcactccagcctgggcgacagagtaagactctatctg

SEQ ID NO: 83279 - DNA, 295 bp, Homo sapiens
attaaatgggcacagaccaggaatgctgccaaacatcaaagtgatacccaatactacccaaaatgacaatagtacggtctagaaatgtcctgagatgccaaacaaccagatgtctacccagacactaagtaaaaatgatgacaataagccaatgcctgtaagtaaaacttttcataaatcataaaaacatctttcagccgggcgcggtggctcacgcttgtaatcccagcactttgggaggtcaaggcaggcgaatcacgaggtcaagagattgagaccaacttggccaacatgg

SEQ ID NO: 83280 - DNA, 471 bp, Homo sapiens
tgtggtattagcgcccactgaaaagccccagtgtaatcaggaattcagggagctctctccgccaagagccccacagggctcccagtctttagcctgcttccttcccaaacctgactgaacaaccaaagatcaccacacgtctgagggaagcctacagcgagaaagagactaacaaagacagaaaaatggacattaacccccaaaagagacaaaatctgactggccataaaagagtgctttaaaatataatttagcaataaatcatctacaaccccccattaacatcccagagaagatcgcattttccaaagatggccatgaggatacttttctacagtgtgaccttggcacccctctgtcaggagcaggagtcgaaatttccttctggagtctgggcaggccctggctacttagcctaattgattgtggcagactaggccagctgtgtgacttctgagcctgggtcataaa

SEQ ID NO: 83281 - DNA, 386 bp, Homo sapiens
atttggctattctagaagcctgtaatctttcgaatttgcccagtcaaccaagcctggggtttaaatgaattttcaacacctttctgctgacagtcacacatgttaaaccttgatttgcttaaaagtattattaaggatgagaatgtaatactgccagtggtatgtggtgatattattgtggcgctggggggatgaaactaacgtctttcagtaaatgtttaattttacacaccatataatcagttgtattattgcaagtgcacagcaggtatgtagaaaaatagaatgcatatatttaacatattagaaataactttattaatattcctatttcatgttctcatgaaattttaatcatttgcattttttagcttcaaacattttta

SEQ ID NO: 83282 - DNA, 274 bp, Homo sapiens
agatcaacacaaagttgctcaaagtgtggaatataaactgatgtttgcccaggaatcatttgttaccagtctgtggtggtaattgaagcctgtttggtcacaaactaggattgcagcatctgcttgtaggctcaaaataaagggatggagaaaaatcgaccaagcaaatggaaaacagaaaagagcaacttgcttcctgaaaattcacgggtctcgctctgttacccaagctggagtgcagcggtgtgatcatggttcactgcagcttcaactt

SEQ ID NO: 83283 - DNA, 865 bp, Homo sapiens
catggacagaagcaggggctaaagctctgttcctctctcctggaagcttgcagacctcccttcagaaccaatcccaagaagccacctatccggaacaacacaagacggagtttttgctcttaccgcccagggtggagtgcaatggcgcaatcttgactcactggcgaatcctcatgggtattgcccgcgttcatgcggcagttcgtccgtgacgcgtcaaggcgcatagcgcgatagctagcgtgagcgtagtcagcgagggcactgacatggcggaacctgaggagattgcctaccttgattccctcggtagtcctgtagagtcactacatcgtgtcacgtacaggttgaggacatccccgtgcatataatcccatgcgctgagtcccttggcggagaacacattgaggctcgcgagagagggggaatccagcatgagagacttgaacaacgttgcaagcctctgtggcaccattatcggtccatttcaacgtaggaaaagtagacccagacctggttgaacggaagcgtgcccaatcactttgccaatggactatgcaatagtatagacacgattcaccgagagggatatccaacatgcggatcgcaggcccttcggacggattaggaacaccgtaagtccacagggctgacgcactaatgacaatgggccacaataaacgagtcctcgtgttgtcacattgtgcgtcacctctcttacaacaggcaggggtatcacgtgtacacgcatctacaattacccacggacccaggtaggaaattgcattagcatttgccaagaaccatgcagagtaggagccgttccactaaatggctgatgcagacccacttcgcgagcacaggt

SEQ ID NO: 83284 - DNA, 247 bp, Homo sapiens
tcggaaggagaaggagaagagaggaggggagggagaggggaggaaaggaaggaaggaaataaatgaagcattttgtatctactgatggaagggcacaccatctcccctgatccactcttactaaaagagaaacagtcaaacctgaatgtgatgaggccgttctctctccactcccgggagtggagagagaaagcagggtgttttttctttcttttttttttccttaaagacggagtcttgctgggta

SEQ ID NO: 83285 - DNA, 1016 bp, Homo sapiens
tgctgaaagctgcagagatgatggaaagatgacagggagatgatgggacgaccagctgcagagaggagctaccctctctactgatagctgaacacttgttgggacgacttgcctaaccctttctgctaggagctgaacagacgttgggacaccctggctgcagaaaggagctgcccccctgtgggtttcctcagagctgttctgtcactcaataaagctcctcttcatctggctcactctccacttgtctgcttacctcattcttcttggacaagaactcaggacctgccaaatggcgaggctaaaagagctgtagcataaacagggctgagatgtaccctttgcttgccacattacaggtgaagtgaaggagagaagagctgcagccctttggggaacccagacctgggagctccccaagccagggctgtgattccttctttggggccctgtggttcctggtgtctctaaacttttgggtgccaccgtgttccccagtgccagctgtggaagctgcttgcagtgtgcttggtctggccgaagcctcacagggagccggcacctatagctgcttgccctgctgaagcagctggcacgtctgtgtgcagtggccagaccccacgcacgctcaaacacgcctcgccattccacgcctgactcgcccttggtaggcatgggactcaggcctgtagtgtgagcctagtgcagcctgccaggccaagtgggtgagatgagcccagcaggcctgagcaaaggtgccccagccacagaggttttggccagaaaaacgacagcctgaagatctcgtaacacagcggcattttctctcccagtttgcagtgctcccccatctcggtgctgtggggtctgcttgcagctcagcgtctgttcgagcccatctgttcacacgctcctgtcatcctcctgtgtctgtgaagtcttaaacctttagttaagtcaatacgtgttcggtgagatgcgattctctatttcattcactaaatcaagactagctg

SEQ ID NO: 83286 - DNA, 1143 bp, Homo sapiens
  misc_feature (44)..(44): n is a, c, g, or t
  misc_feature (47)..(47): n is a, c, g, or t
gtactgccaggacatatgggggaaaatttttttgtttgtttgtnttnttaaataaaaggccaggtgtggtggcttatgcctgtaatcctcccaaagtgctgggaggaagtttctttttatagaactattacagctaatacatgaggaaggaattataaaattataatgttacaaatttgtatttaagccctaataaatcaatgaatctaggcattgagcatcatgaatactaatattaccagaagacagccagacacatttgcttcctgatgtaagacagtaccacgtgtgaagtggtctctcccacccagacagttgaatcttaatcagatcaaacatctaaattcacctagtaacttaagggaaatactgaagatgaaaatagtaaagaatagcaaggagatacaactttgctgttagtagcaagaaaaattgagattgtgggacactgtatagcacagacaactagtttcttcctccctccacaaaatctcaaggaaaaaatgtgaggggacatattttaaaattttaattaattaaaataaaaatttagatcctcatttgcactagccacatttcaagtgctcaatagctatatgtatctagtggctaccatattggacagtgctgatttagaacatttccatctttgcagaaggttatattgagcagttacattagtttcttaaggctgccataacaaattactacaaaatgggtgacttaaaataacaaatttgttccctgacgcttttggaggacagaagttcaaaatcaagatgttgcaaggtactggcaggacatatgggggaaaatttttttgtttgtttgtttttttaaataaaaggccaggtgtggtggcttatgcctgtaatcctcccaaagtgctgggaggaagtttctttttatagaactattacagctaatacatgaggaaggaattataaaattataatgttacaaatttgtatttaagccctaataaatcaatgaatctaggcattgagcatcatgaatactaatattaccagaagacagccagacacatttgcttcctgatgaaagacaccccctggtgaaagggtttttccaccccaaaaggggaatctttatcagaacaaaacttttaaattccccttggac

SEQ ID NO: 83287 - DNA, 1609 bp, Homo sapiens
  misc_feature (44)..(44): n is a, c, g, or t
  misc_feature (47)..(47): n is a, c, g, or t
gtactgccaggacatatgggggaaaatttttttgtttgtttgtnttnttaaataaaaggccaggtgtggtggcttatgcctgtaatcctcccaaagtgctgggaggaagtttctttttatagaactattacagctaatacatgaggaaggaattataaaattataatgttacaaatttgtatttaagccctaataaatcaatgaatctaggcattgagcatcatgaatactaatattaccagaagacagccagacacatttgcttcctgatgtaagacagtaccacgtgtgaagtggtctctcccacccagacagttgaatcttaatcagatcaaacatctaaattcacctagtaacttaagggaaatactgaagatgaaaatagtaaagaatagcaaggagatacaactttgctgttagtagcaagaaaaattgagattgtgggacactgtatagcacagacaactagtttcttcctccctccacaaaatctcaaggaaaaaatgtgaggggacatattttaaaattttaattaattaaaataaaaatttagatcctcatttgcactagccacatttcaagtgctcaatagctatatgtatctagtggctaccatattggacagtgctgatttagaacatttccatctttgcagaaggttatattgagcagttacattagtttcttaaggctgccataacaaattactacaaaatgggtgacttaaaataacaaatttgttccctgacgcttttggaggacagaagttcaaaatcaagatgttgcaaggtactggcaggacatatgggggaaaatttttttgtttgtttgtttttttaaataaaaggccaggtgtggtggcttatgcctgtaatcctagcactttgggaggccgaggtgggcggattgcttgagtccaggagttcgagaccagccttggcaacgtggcagaatcccgtctctactaaaaatataacaagtagccaagagtgatggcatgtgcctgtaatcccagctactcggaaggctgagacagaggttgaggtctcagtgagctagaggttgctgtgagccaagatcatgccactgccctccactctgaacggaattagaaaacagttaatttaaaaattcgatattctgtgtgtgtgtgtgtgtgtatgtatgtgtggagagagagagacacacacacacagagaggtggagacagcgtttgtagctttgtgtgtgtgttttggctgttgaaattgttttgaatccagtatttttgagctgaagtttgtaaaattcaacaaaaggaaaaagtaatctgtttttggcaattgagtattggctaaacgttagaaatgtgtttgttcatgtttttaatatcttatgtatactgatgttaggatacttctatagagcttctcaaattgtagcacatatcagaatcacctggaggatttttaaaaacagactgcttgacttcatcctcagagttttcaacttactggcttggagatagggcagacagaatttgcatttctaacaggttcatatgatctgatgctactggttgcgggaccactctttgacaaccgctgcacaataattaaaaaaattaaaa

SEQ ID NO: 83288 - DNA, 296 bp, Homo sapiens
tagtagagccggggtttcaccgtgttggcaaggatggtctcaatctcctgacctcgtgatccgcctgcctcggccccccagagtggtgggattacaggcatgagccactgtgcctggccctaatttctccaactctcatcaacgcgtgttattgtccatttttttgataaaagccacctgcatgggtgtggagtggtatctcattgtggttctgattttcatttccctatggttagctatgttgagcatattttcatgtgctcattggccatttgtatctcttcttttgagaaata

SEQ ID NO: 83289 - DNA, 491 bp, Homo sapiens
cccaaaacaggctgactaggggcctactgcttcccaactaccagctgagggggtccgtcccgaaaagggagaagaggcctaagaggaaacatcaacatctttttactcctagcgagcggcattctgtgtgccttgattgtcttctggaaatatcgctttcagggaaacaatggcgaaatgtcatcagtttcaactgcttttgcactactaagacgcttttctgggttaattagcagcaatacagacaacgatcttttattcaacaacctctctcgagatattttaaataatttctcacactcgaaaaacatgcagaagcgactattggcaaacctgaagagggtggaataccaaatggctgaactggaatattttctagttagcgagggtttgagaggtgcgtcaggtctccagaaattcacctcaaaagcgtacaggatgtaatgccagtggtggaaatcattaaagacactttgagtagattcatttga

SEQ ID NO: 83290 - DNA, 777 bp, Homo sapiens
gctttaatgtgttgttgaggttgatccattgtaacatgttatcactacttcattcctttttatagctaagtatactttttatagtaagtatgccattgtagatatataccacaagtttatcgattcatccagttgagttgtttctactgtttggctaatgttcatagtgctgttatgaatgttcgtgtacaagtatttgagtccgtgttttcaattatttggggtatatgcctgggagtggagttgctgggtcatgttgaaatcgcacatttaactttttgaggaactgtcaaactttccctcagcagctgtaccgttttaccttccaccattgatgtatgagggttccaatttctccacaccttcaccaacacttattttgccattttaaaaattatagccatcctcatgggtgtggtctctcattgtggttttgatttgcatttccctgattactaatgatgtggagcatcttttgttgtctttggccatctgcgtatcttctttgaagaaatgtctgttgaggtcctttgttcattgaaattttgttgttgggttctgagttccttatatattctgggtactaggcccttataatattttcgcctataagtttttgctttataatgtcctcattgttttcaaacttactttatgtaatatgtacacttctaaaaaaaagaaacatggaaaagggcaaactgtaagaagttttttgtgttatgttttttgtgacagtctgtgcatatatacacaaatataatgtatgttctctcc

SEQ ID NO: 83291 - DNA, 615 bp, Homo sapiens
taaatgtaagtctggtcatttcacttctctgctaaaaaccttccagtgacttccccttttaccgagaataaaaaggtagtgatttacagtgatctttaagaccctacctacacagttgcctgcccctattctcttgagttcatatcctactagtttcttccttactctctatgctacagtaacactggcctcctttttgttcctcgaacacacagggtatgctcctatgcatgcactggctatttcctctatctggaatactctttcccctagataccacatgactcactacatcaccttctttagctcgttgatgaaacgtcactttgggcttggccggtggctcacctgtaatcccaacactttgggaggctgaagcaggagaattcacttgagtccaggaattcaagactagcctgggcaacatgatgagacctcccctctacaaaaggtaaactaaattagctgggcgtggtggtacatggcggtagtcccagctgctcaggaggaggctaaagtaggagaatcacttgagcctgggaggctgagggtgcaatgagtcatgattgtgccactttactccagcatgagtcacaaagcgagaccctgtctcaa

SEQ ID NO: 83292 - DNA, 805 bp, Homo sapiens
ggaagcagggcagccatgagccttcaggaggaggccgagcccaccccaagccccccgtcccctaatagggagtccctggcgctggccttgacagcagcccacagccgaagtggatctgagggccggactccagagagggcgtccagccccggcctgaacaagccactgctggccacaggggatagcccagcaccctctgtcggggacctggccgcctgcgccccctcacccacttcagccgcccacatgccctgcagccttgggcccctgccccgtgaagacccacttacctcgccttccagggcccaaggtgggctgggggggcagctgccagcatctccgtcctgcagggaccctcccggcccccagcagctgctggcctgttctcctgcctgggcacctctggaagaggcagatggcgtccaagccacgacagatactggggctgaggattccccggtggctcccccgtctttgacaacaagcccctgcgatcccaaggaagccctggctggttgccttctccagggggagggcagccccctggaagacccttcctcctggcctcctggctccgtcagtgctgtaacctgcactcacagtggggacacccccaaagacagcactttaagaattccagaggattccagaaaagagaagctgtgggagtctcctggccgagccacctctcctcctctggcaggggccgtctcccccagcgtggccgtcagggctactggcctgtccagcactcccaccggagatgaggcacaggcaggcaggggactcccagggccagaccccc

SEQ ID NO: 83293 - DNA, 508 bp, Homo sapiens
ctctggaaatttaatgtaatttgaatttttatggattcactactgttaggtgtattaaagttgcaatgaactgtagtgaatgtttttatattgtaagtaacttccaggttacctgcttttaaagttcctgtttttatttgtcaacttttcttaaagtgaggtttgcccgttccttttgttgtcatcttctaaagttttgatcatttgaattaggaaaatttttccatcttgttgtaaagcttgctcctgtgtaaaccatagacttttttttttttttgagacagagacttgctctgtcacccaggctggagtgcagtggtgctctttctgctcaccgcaacctctgcctcctgggttcaagcgattcttctgcctcagcctcccaagtagctaggattacaggcatgcgccaccacactcagctaatttttgtatttttagtagagacagggtttcaccatgttggccaggctggtcttgacctcaggtgttctacccgcctcagcct

SEQ ID NO: 83294 - DNA, 505 bp, Homo sapiens
ggcagatacggaagccagtgcgtcagggtcagaggctgcaaagctggaggagaactggggcgtctgctgggcgtggcgatgaaggggctggtgtgccaggtggacagaatgccagggagagcggggaaggaacagtgctcatgtggccccgccatgttcagccaggattcataaagaaagtggaaccaggatatcatggtccacctctttagggaggagagggatgagcggtgagaggtggtggtgtcacctgcccggccagccgtccccacagcttctccacctccgctcccactcggccaccccttccttcccctcctctccatggaggaggcctccctgcttttagctttgcctctcccacccctcactggcaaggcaccgtccttgggattagaaagatgaaaaggccaccgccatcacggagggaatggacaacggataaaaccaccagctcctggaaaaggacgtgcagcggctcccagagccttggcaagccaacacc

SEQ ID NO: 83295 - DNA, 577 bp, Homo sapiens
agcgggcggggcgggcaggggttgtggcgcggcaagcggcgggccagcgacggcgcgaatggcggactctcagctgttctgtgtggcggaggaacgcagcggccactgcgccgtggtggacggaaacttcctctacgtgtgggggggctacgtggtaaggggaagaggcgggacggggtagactcgcgccgggagaccctcggcctgagcggacgcagcgcccgccacacccgctcccgaggctgcggcccaggcctggcgcgcccggcgcctgcagccccccagcccctccgctggccgccgcccccacagccgcgccagggcttgacgtcgtcccgccgttgcttcttctattaaagcctcagacccggctccgggcctcttaacactctccgcccctctttgccagcaattcagtaaccacggtttgcccaatgcaaaggcagttacagcgcgattaattattatccttaaatactggcgcagacctagaaggacccgaggacgccgtgctgtatcattttgtatatatttccttattcccacggcgcgattcgaaataaaatatcgaaatcac

SEQ ID NO: 83296 - DNA, 462 bp, Homo sapiens
agaagctgtgtaactgtttgctgtgtaactgataaacataattttatgtattctgtatttttagtctattgaagacaatgaagtatatttgcctaatgatgaaatttggacctatgatattgatagtgggttgtggtaagtaattttaaattgcatactgtctgatcttaatatctattataaatgtttctgtagactctagggaatttgagaccatactttgaacatactgcaacatttttgaagtctccctttcctttcctttcaatgcttttattttctgactctttcattcccctactgtcttccctgctccactttttgtcttttagtatttctctcaagaccagtgctgtctctgaagattttgttttattctgcaaatttccagttctagtgacgtgtgaaatttttgtgatttttttttttttcctagcagattgaaaaagttttaccctggat

SEQ ID NO: 83297 - DNA, 837 bp, Homo sapiens
  misc_feature (773)..(773): n is a, c, g, or t
  misc_feature (775)..(776): n is a, c, g, or t
  misc_feature (784)..(784): n is a, c, g, or t
  misc_feature (796)..(796): n is a, c, g, or t
agcgggcggggcgggcaggggttgtggcgcggcaagcggcgggccagcgacggcgcgaatggcggactctcagctgttctgtgtggcggaggaacgcagcggccactgcgccgtggtggacggaaacttcctctacgtgtgggggggctacgtgtctattgaagacaatgaagtatatttgcctaatgatgaaatttggacctatgatattgatagtgggttgtggagaatgcacctcatggaaggagaactcccagcctccatgtcaggaagctgtggtgcttgcattaatggaaagctgtacatttttggaggatatgatgacaaaggatacagcaatcgactttattttgttaatttacgaacaagagatgaaacctacatttgggagaaaatcaccgactttgaagggcaaccacctacaccacgtgataaactttcctgctgggtatataaagacagactaatatattttggtggttatgggtgtaggagacacagtgaactccaagactgttttgatgttcatgatgcatcttgggaagagcagatattctggggatgacataatgatgtccacatatttgacacaaagacacagacttggtttcaaccagaaattaaaggtggagttccaccacagccacgagccgcgcatacgtgtgcagttcttggaaataagggttatatctttggcggacgtgttctgcaaactaggatgaatgatttgcactatctaaactagacacctggacttggtctggaagggattncnnttaatggngaaaggccaaanaattcggtcatggctaactttaaacactataggtggtgata

SEQ ID NO: 83298 - DNA, 676 bp, Homo sapiens
tcccttatccagccctagaatcagttattttccaaggagccctggtttctttcattgaagagtggtttttggaaagccaaatctatgcacaagtgtgctcattgctactgggtggacactgcttctaggccttctcagtggacagttagaaaataaatgcgtgtatttctgtgtacagcaagtccttacttaacatcaataggttcttggaaactgcaactttaagcaaaatgacatataaagaatcaaatttttttcttttttttccttaggacctcatgatgcaacagtagaaaccaaatttttttcatgaacagtctaaaaaatgacatttaatgaaacattatttgaggacctgctgtatattgtttcctttaaagtcgcaaagtcttgcaggtgctgtggctcttgcctgtaatctcagctacttgggaggctgaggtgggtggatcatgtgaggccaggagtttgagatcagtctaagcacacatagggagactcccatctctagaagtcattaaaaaattagcagatgtggtggcacgtgcctgtagtcccagctacttaggaggctgtggtgggatgatctcttgagcccaggagttggaggctgcagttagcatgatatctagtgcactccagcctgggtgatagagtgaaaccccatccctgaaaa

SEQ ID NO: 83299 - DNA, 318 bp, Homo sapiens
cctccccatttcaggcaattctcctgcctcatcctcccgagtagctgggattacaggtacccaccaccaggcctggctgattttttgtatttttgggtgaggccaggagtttgagatcagtctaagcacacatagggagactcccatctctagaagtcattaaaaaattagcagatgtggtggcacgtgcctgtagtcccagctacttaggaggctgtggtgggatgatctcttgagcccaggagttggaggctgcagttagcatgatatctagtgcactccagcctgggtgatagagtgaaaccccatccctgaaaa

SEQ ID NO: 83300 - DNA, 454 bp, Homo sapiens
tgggttcaagccatcctcccacctcagcctcctgagtagctgggactacaggcatacacccaccatgtctggctaaaatttttgtactttttgtagagacagggtttcgcccatgttgccccaggctggtctctagctcctgggctcaagcaatctgcctgcctcagcctcccagaggcctggaactacaggcgtgagccgctgctcttggccatttttaatttaagggacagagtctcgctttgttacccaggctggagtgcagtacccttactgcagccttgaactactgggctcgagccgtcctcccgcctcggcctctcaggtagctgggactacaggtgtgtgtccccatgcccagctgactgagctaccaaccatgccactgcatgccagttgtgacaaagtgagaccctgtctctaaaaaataattaaataaaatgtttaatggtgt

SEQ ID NO: 83301 - DNA, 1861 bp, Homo sapiens
actcctttaatatacctaaaaattgttagaaattggtgggaaaataggtagaaaccaaggaagcagacacaacatgcatttatggagattctttttcccttttagacttccatctgaatgagtcagtcaccagggtattctgcatagcattgtatattctgtgtatgtcagatggctttttctttttgactggacttttgggtggtggtagatttttaaacaaatgaaattaaagcaacaataattttgaagcatttgaaaaagccaaagtgtacggtagaaatttctacaaaatgaatattatcaagagtttcatgtgatcactgcagtgttgtcacagctcataaatagcaacagtgtttcatgatttaatggctcagaaatagttattcattagtttttaatttttaatttctaaggtacagagatctataaaaccttgattatttgttagttttgcaattcaaaacagctaatgtctggttatttctcaaagtaagtattttaaacagcctgttaattataagaaactcagaataatgagtgtaaatgtgttatgttatccacccaagtgtacatatgtacctatttttttttaaaaagcagaaatagaaatacaagactggtaaacatgcctttaaaaatatatatattttcaactagtattgtctataatgctgaaatattacttattggtgatttttctgtttcacacactctaaaatataagtaaagccaaccttttttttaaggctgagattcccaaaatgagaatactactttataccatttgtttataagtatgaactgttcttataaatattaatatttacatattcactaatttaacataaatgaaaattaggattaaaaattgcaccaaagcatcggcaaaaacaatactatattctttaaaagtgctcaggtagccaaggcccttgcttttggtatcaaccctcatgaacccataggagctgaatatttgtttcactgcttaataatcctcaatttacactattcataactcttaaaattattctctttttttctaagagcccctcccttccaaaagtgtatttttttcaaagattttcacttctcaattgttgcctttgtacatactatagagtgttgcttgtaagaaaggctaatatggaaccaaactcttgtaagtaatgtaaatagaaaggtgggtggataaagttttcaatactttctactacctcagtttacttgagtactacattatagtttattctttgcttatctggtctaagagacttttaatgctagtagtaaagttggtttctgctttcattgactattttcatcataatttcatcattgattaaaaaaaaaaaccacttgtttattcagttattaaatatatttactatataacacatccattcttgctgtttaaattttcaatagttaatggaaagttgtctttgaccttgaatttacagcattgggtcacattttgccttgctgtgtatgtattcaagagacttccaactagacaaagaaaaaattgttgttttaatggaatgtaaacctgaaattggtgtgtctgcaatctgtttggcccatgaccttttacctagtcccagttattacctgagtctcccatggatgacttgctgccaaggagtgtttgtggatatattttctttggcttaattttcttattctgtgcattaacaaaattatccagttgtctgattttggaattctatgagtcaatctttttggcagaattcagaatattaaaaagttcatacatttgcgggccattgtacctttttttttttttttttttttttgacggagtttcactcttgttacccaggctggagtg

SEQ ID NO: 83302 - DNA, 840 bp, Homo sapiens
ttttagtagagatggggtttcaccagcctgggcaacatggtgagacaccatctctacaaaaaatttaaaacaaaaaaattagctggacatggtggcacatgcctgtagtcctagctactcaggaggctgagtcaagaggatggcttaagcctcggaggtcgaggcttcagtgaaccaggattgtgtcactgcactccagcctgaacaacagagcaaggcctcaaaaaataataaataatagcacataacaattaaccaccttttgaattgctctaattttatttttgaggatagttaacaaatatttagctttcatttgggtcaggaagaataaaagacaataaatccttaggtgtaaatgaatagaagaggtcaaactttgtgatttatttaaatagtagtagttacaaaaggccagttacataactatctctaaaaatattaaattgattcccaactgtacttatttttttcttatctctcaaactatcaatagattcatttaatcaatatttaatgtgattgaggacacccattatgtgcttaggattatgctaaatattaatactaaggtaaatataaaatagtatagtatatggtccctgccttcaagaaacttgcattctagctggagagacaaaaagatacatactttttaaaagttaagtaacccgaaggtccatcaacagcagaatggataaaaatgaatcatcaaaaaaaaaaaagagtcatccatttgtttaaatgagtataaatatgttttctatacagaatgaaaatgaacattgttatacaacatgtatatttctcacattatgttcaataaaaaaagccaaacac

SEQ ID NO: 83303 - DNA, 211 bp, Homo sapiens
gtcttcatgtgtttataatggttaatataaattttaggaaatagaataaaaaataaagcagctcattaagagctatggccatggtgagtacttaacatattggtgagatactgtacaaaataagcagatggctggatgcaatggctaattcctgtaatcctaacacttgggaggccaaggtaagaggattgcttgggcccaggagttcaag

SEQ ID NO: 83304 - DNA, 1894 bp, Homo sapiens
tggcgctattggctctcccgtacggttagcaaggactgtggtagttggcaaacgacaagacatggtccagaggctactttattttcttacttattttataagatgctctgaacttcaagaaacgcatcttttagaaaatggagaagatgaagccatcgttatgccaggcacagtaattactaccactttagagaaaggtgaaatagaagaatcagagtatgtccttgtcacaatgcatagaaacaaaagcagtttgctctttaaagagtcagaagaaattagaactcccaattgtaactgtaaatattgcagtcatccactccttgggcaaaatgtagagaacatttcacaacaagagagagaagatattcaaaacagctctaaggagctgctaggaatttcagatgagtgccggatgatttctccttctgactgccaagaagaaaatgctgttgatgttaaacagtacagagataaattaagaacttgctttgacgccaagttagagacagttgtttgcacaggatctgttccagtagacaaatgtgcattgtcagagtcaggcttagagtcaacagaggaaacatggcagagtgagaagttgctggattcagacagtcacacaggcaaagcaatgagatccacaggaatggttgtggaaaaaaaacctccagataagattgtgcctgcttcattttcttgtgaggctgcccagacaaaggttactttcctgattggggattctatgtcacctgattcagatactgagcttcgaagtcaggcagtggtggatcagattaccagacatcacaccaaaccattgaaggaagaaagaggggctattgatcagcatcaagaaactaaacaaacaaccaaggaccaatctggagagtctgatacacagaacatggtttctgaagagccctgtgaacttccctgttggaatcattcagacccagaaagcatgagcttattcgacgaatattttaatgatgattcaatcgaaaccaggactattgatgatgttccatttaaaacaagtacagatagtaaagaccattgctgtatgttagagttttcaaaaatattgtgtacaaaaaataacaagcagaacaatgaattttgtaaatgtatagaaacagttccccaagattcatgtaaaacctgctttcctcagcaggaccaaagagatacactctccattcttgtcccccatggggataaagagagttcagataaaaaaattgctgtaggaactgaatgggacattccaagaaatgaaagttcagacagtgcccttggggatagtgaaagtgaagatacaggtcatgatatgactagacaagttagcagttattatggaggagagcaagaagattgggcagaagaggatgagataccttttcctgggtcaaagttaatcgaagtgagtgctgttcagcccaacattgccaacttcgggaggtccttgctgggtggctactgctcatcttatgtgcctgactttgttcttcaaggaattgggagtgatgagaggttccgtcagtgtctgatgtcagatttatctcatgctgtgcagcatccagttttggatgaaccaatagcagaagctgtctgtattatagctgacatggataaatggactgttcaagtggccagtagccagagacgagtgacagataataaattgggaaaggaagtattggtttccagtcttgtttccaatctgcttcattccacacttcagctttataagcataacttgtctccaaatttttgtgtaatgcatcttgaagaccggttgcaggagctatacttcaaaagtaaaatgctgtctgaatacctgagggggcagatgcgtgttcatgtcaaggagctgggagtggttctgggg

SEQ ID NO: 83305 - DNA, 456 bp, Homo sapiens
ggtctttctgaaactcttattagtctattcatttttctgtataggttccctaaggttttctacacacaggctcatgttatcagtgaacagatagttttaaatctttcttaacaatctggatgccttttgtccccgctgcccccaacttttttttttttttttgactcattgtactggctagaattttcaatacaatgttgcatggaagtggtgaccatggacatcgttgccttattcctgatcttaggggaaagacattgcatctttcatgattaagtatgttgttagttgtaaggtttttgtgatgccctttattagatggaagaagttccctttttatttttattttgtttaaccgaatacttcttttagagacaggcagttctcttttattcctagttttgagacggtttggttttttttgtccatcccttaatcatgaatgagtgtgggatt

SEQ ID NO: 83306 - DNA, 451 bp, Homo sapiens
ccttacatttttggtcatactttttacaacacaatcattgttctctgaatccatcattttatattcagtgcccgtatctttgtatctgtcactgtgaaagcaaataaagttccagaaatctatccacatggatatctgaaatacagaaagtactttatgtattcatggatgtccatcaactaggttatttatagtatcaaaaatttgcaagtgcttaagtttgaatggaattattttcttaatttccttttcagattactcattgcttacatatagaagtggggttggcttttgtgtattgatcttatatcctttggtctttctgaaactcttattagtctattcatttttctgtataggttccctaaggttttctacacacaggctcatgttatcagtgaacagatagttttaaatctttcttaacaatctggatgccttttgtccccgc

SEQ ID NO: 83307 - DNA, 386 bp, Homo sapiens
ctaaataaatgtcttttgggggcatttttcttccaggtcaaagttaatcgaagtgagtgctgttcagcccaacattgccaacttcgggaggtccttgctgggtggctactgctcatcttatgtgcctgactttgttcttcaaggaattgggagtgatgagaggttccgtcagtgtctgatgtcagatttatctcatgctgtgcaggtgagtgaccttcactgtttttgagtttatttagaagaaactctgttaagcagcagaacccaaaattgccttacatttttggtcatactttttacaacacaatcattgttctctgaatccatcattttatattcagtgcccgtatctttgtatctgtcactgtgaaagcaaataaagttcc

SEQ ID NO: 83308 - DNA, 404 bp, Homo sapiens
ttattagagacgaggtttcaccatgttggtcaggctggtctcaaactcctgatctcaagtgatccacccacctcagcctcccagagtgctgggattacaggtgtgagctaccgcgcccagcccgcacctgcagcttaatcccatttcgctggtgcaacttcatccttccgtatgctcaggccaataaacagtactgtaggctggtcgttctttgacccccatacatcctattggtcggaaaattatgttttctctttggttaaccgcagactttgatatgcacactctttcttggtctgaaacccacccaatagtcccatacgtagatttttggataaacatagaaatggacccttctgatctgaaagtttgaaactcgatatttgttttatttgagttccttc

SEQ ID NO: 83309 - DNA, 146 bp, Homo sapiens
ctgtgctagaccaaactgtttaagcagacgatgtggaatgtgtgttaacgtttccttgtgggcactgtagtgacaaactattttttatttttattttttttgagatggagtctgtcccccaggctggagtgcagtggcaagatctg

SEQ ID NO: 83310 - DNA, 1052 bp, Homo sapiens
ttttttttttttagtagagacgcggtttcaccgtgttagccaggatggtctcgatctcctgacctcgtgatccgctcgtctcggcttcccaaagtgctgagattacaggcttgcaggcgtgagccaccgcgcccggccgagttaaagtactttttctggaacaaagaaacttagcataaatagttaaaatattaagagttgtaattaagggaaatttcagctcaatatgacttcaacagtttaaaaaatgtattatttcacataagaccatggagagaggaattggaagccccagaattgattgggtcagaaattgaaaatgatactatcagtgacccaggtttgaatgtctctctccacagcattgacttcactaatggatgtgacctggttggcagcagtagcttgcacaacatgcttgtttgcagtgagtagtagagagaaggttttgctttcccagaaactctgaaaaaggtcatcaaacctaaatttccttagccttcttcttccatgagcaaatcactagcagatgattgctagcaaggtgttactattacaatgaacccctaagtgtcagagaaagagttagtttggggaaatatcctctccaccacaatcttagtcattgaagtcaatttaacaatatattgaaatatttttcttagaagtttaaagttccattaaagagtaacaattacagaaattataggtagcctttagttctacaagtgacatctcaaaagggagatgattcatcaatttcaaactttccctgcaagtaatactggatgaaaattaacttggcaaacataattaataatcatgggttattaattacttctgcaaggtgggtgtgctgattttaaaaggcttgaataaaacataaatttccttaatttgatactgtaaatggagtaatttggtgatgtaaatggtaatatgtaagggatttttgcttcagatcttacaacttaaaatatttttctaaaattagtttttgtaccatctctccagcatgttccagcctttatcagtcagtccaggcttctata

SEQ ID NO: 83311 - DNA, 855 bp, Homo sapiens
ggactacaggcgcccaacaccttgcctggctaatttttgtatttttagtagagatggggtttcaccatgttggccaggttggtctcgaactcctgacctcaggtgatccacccacctcggcctcccaaagttctgggattacaggagtgagccaccgcacctggccagggaattatcttaagggcaatattcatttggaagtataagttaagatgtatgtgttaaatgtcttcagagctatttgtttaaaattattgattttttaaaaagcagctataactgcttcaactaatatatctccaaaaataattccctaatattatctataatacctagcccatattcagttaaccccggttatttataagatgacttttaagaagtatgtgagtcattatatttagctgtatggctcttagtcttttcatatctaaaataagccaacttaaatattttaaaaatcgctcttaaaaatatcaaagaaatgtagccagcacatcttctttataataaaaatcagaaagatatagaaagtagaaatatttttatagcttccatcattgtgagcatggatgccttcctgatatatttttctatctctatttacttccctatttgttttctttcacatggttgagttcattttgtatgcaattctccctttaataataggcagtgctgtatcttgctttgtaactttaatgtatttgtaacttttaatggctgcataatataccattaagcgagtgtaccacaattctgcaaacataattcaattttctgttaacatttaggattttccccaattgtttgtcatagttaacaataatgtaataaatacttattttgaaaaca

SEQ ID NO: 83312 - DNA, 730 bp, Homo sapiens
cttcgctcaaaaaagattaagaactaccaccgcacctggccagggaattatcttaagggcaatattcatttggaagtataagttaagatgtatgtgttaaatgtcttcagagctatttgtttaaaattattgattttttaaaaagcagctataactgcttcaactaatatatctccaaaaataattccctaatattatctataatacctagcccatattcagttaaccccggttatttataagatgacttttaagaagtatgtgagtcattatatttagctgtatggctcttagtcttttcatatctaaaataagccaacttaaatattttaaaaatcgctcttaaaaatatcaaagaaatgtagccagcacatcttctttataataaaaatcagaaagatatagaaagtagaaatatttttatagcttccatcattgtgagcatggatgccttcctgatatatttttctatctctatttacttccctatttgttttctttcacatggttgagttcattttgtatgcaattctccctttaataataggcagtgctgtatcttgctttgtaactttaatgtatttgtaacttttaatggctgcataatataccattaagcgagtgtaccacaattctgcaaacataattcaattttctgttaacatttaggattttccccaattgtttgtcatagttaacaataatgtaataaatacttattttgaaaaca

SEQ ID NO: 83313 - DNA, 486 bp, Homo sapiens
aatagatgagaaagtggaagcatagccacagatgggatagtttgctgaaggtaacacagcaaagacatgtgctgtgtccgcatgcatttcaactccagcagttccctgctgcccttcagtggtgtcctgagtatccagacaagtgaaatcagcattattgtctactggataccatccatctctgttatgcacacagaggaatatgaaaggctggcgacttggtccttaattactattttgagttagtgttgtgctttcatttctccccgctaggtaccttcattttcaattatgtcgttacctgtgtagccaaacagctcacttaacttccttttccacgacagccttgtgaggctggggcccctctctgactcacttgctgttgtattaccgcacctaatccagtgcctggccgatactggagcccaataaatatgcatgtgtgaattattatgtgccaattaaaaataataataaaagccaaaa

SEQ ID NO: 83314 - DNA, 263 bp, Homo sapiens
cactgcacccggcacttttttatacttttggattctgaatcatgtgagtgtattgccattaccagcaaattttgggaaaagcccactgcaaggatgagtgaagggccccgcagcaggttcctcctcacagcctccactcagggccaacagcttccacacagacgcatggacatgtggactgtggacgtggagcgaatgtggtggctgtctactttgttctcaggatacttctggacagaaaatcccagcatatgactaattag

SEQ ID NO: 83315 - DNA, 575 bp, Homo sapiens
tattactgtgattaatgagataattccccagaggtggggtagtcaggaagcagccatttcccaattggctggcatgtgctcagcaccacaagtctggcaacactatttggtgctgcctccttatgcccatcaggtaatgctggggtaaaagtacccaaggaaagggcttagaaagacaaatggccttttctgccaccaaatggaaccaactggcattgagaatcaagtaacatccagtatgatcctaaggtcttctgtcctaaacagactagctctgtaattctttgaccataatactactaggatgatggaacaaattgattttaccaatgctgaggtccctcaggctcccacgaaacctggctcaagaggagctgcttctactttacaagctctgttggctcactgcttgccactccaggctggccctgtggccttgtgctgggcccgagtgacatttgaactctggtcagtgagaacactgtgggcctcacactctttttaagttgcaaaataaatagatctttaagacattgagcagattttgtggatgtagctgagaatatttttgtcat

SEQ ID NO: 83316 - DNA, 827 bp, Homo sapiens
tctcctgggtctccgttctctgtttggttctctgtcctcctctctctgtgtttctaactcctctcccgtgctctctgccctctttctctagaaacctctccctgctgcctctctggggttctgctgcccccagcactgactctccctcttgggtgtgtgccttctgccctccctttcttgacttgtgcaggcaccatcctcccctccaggtatctgccctgctaatctctctctctctctctctctccccctctttgggactctgccaccctctcttgttaggtctcatccccacttccttccctgagtctttgtccccctccactgaaggatctgtccgtggctgggggcaatttcagtgccaaaagcacagctctcacattccttcccagagctgtgtgtctgtgtggatgggcctgtttgtgcatgtgagcacacgtgtgtgtgtgtatgggaggaattccacatccactctggcccctgctgtgattacacagagagagagggaaggagggagaggatggagagcggggagagtgagggagagagacagagcatgagagcaagggcgtgcaggaaacacaaaggacttttccccacctcctcctgtcctccgaagaaagctgagagaagttcctcatcatttcctttaggaaaggacgattggctgccaagaatctgttacccacagatattaaactgatcacaacccacacacgagcacacagaaaacaaaggcagtggcttttatttttccctctgagctggaagaatatcaacggttcccttatcgacttcaaagcaataaggacttaggagtgttgaga

SEQ ID NO: 83317 - DNA, 327 bp, Homo sapiens
tgtcttaaaaaagatactgtcatggaggtggacttaaactggaaaagagtgatatagccgaaataaattatatatacatttcattgttgcctaagaacagggatcatttgttctgtctcttacagtgtattactgtgcctgcattagaggctggcagtatgtcaggagctctgtctggggtttggttatgtagtctattttgtgaaggaagttaatgtttttggattgcattatgattgtcgcccaaaccattatcctcattataaaaatccttaaatgtgtttgcaattgcttattaaaagtctctggcaagaagagtttaattta

SEQ ID NO: 83318 - DNA, 926 bp, Homo sapiens
ctggccaccagagccagcagcggcaacgcccttccacactgtgggagctttgttccttcactcttcacaataaatcttgctgctgctcactctttgggtctgcactgccattatgagctgtaacactcacagtgaaggtctgcagcttcactcctgaagccagcaagaccaggaacccaccaggaggaacaaacaactcctgacgcgctgcctttatgagctataacgctcactgcgaaggtctgcagcttcattcctgaagccagcgagatgacgaacccaccagaaggaaaaaactctggacacatctgaacatatgaaggaacaaactccagacacaccatctttaagaactgtaacactcaccgcgagggtctgcagcttcattcttgaagtcagcaagaccaagaacccaccggatggaaccaattctggacaccgtttcaatggataaatcttatacttacaaataggaacattttaagcataataccctagtaaacagttaatatcccgtattctagaaaaaaagatgacaaactcagccattagttacatctgctaatacagtgatgactttgcagactctagtaaacggtttgcctatgtaaggagacttttggaagttgtaaaaaataaataaataaaaagacaaaacaaaaaaacaataacagacatacaagaaagagcacaaacgacaacaattaagacaaaaaagggggggggggagcaccaaaagaagcacccccgggggggccactattacaccggaccccccgtctgtgtgggaacaccgggggcccccagaggagggcccgtataaaaagcaggcgcggcgccggcggtaaacacaccgcgcgagggaacaccgccgcccggacctggggggaaaaccaccccgtgcgggcgaattggcgacacccatg

SEQ ID NO: 83319 - DNA, 1005 bp, Homo sapiens
cgcctctgcgcctggcccggcgactgcgggcgctgcggtccactgggtccgcctcttcccggcatgggtttctgcccagctcacccgctgtcagctggggtcctgctctggtgggaggaagaggctcagacgcttccctgccctctcgcctcaaccacctcgaggcagcggctcccaggatgtgcactttgacgactaaagctgagccggcgccgccacgaccttgggcgggtggtcggcctctgccctgagcaggaagtagaaagtctcagcagacccttcctgagggccgagcaacagtgtagtggcgtattccacatagcaaacaggtccccagacagtcccggtgtgcacacttccctgcttctgttcatgatgttctctgaacctgggatcacctttccccttcctcttacctgcccgatcctacttgtcctcccagattcagttttctgaagctcagagggacaccttgtattgctggatgataaaaacaggagcaaagtgatgaagtgctgacaaggcaacaatagaacatgagagattcactgctgtgtaggaagagatcttcggtgaccatgtagcctgaagctctcattttgtcatcgagggacaccaaaactcagaacagtgctaagctcctacatcctgttctggaaggacaatcctgagcacacgatgagccatataaacttcagactgacgctgagtgaaagaatgctggaaaagcatcacaggccagggcagcaaagtcttcaaggtcatccgtgctctgatgatgtcacgcttcttccctgtctggaagacatttccccaagagcataccaccaacatcagggaaatggaatccaactggtcgctgcaaagtttgctgagcacacagtgataaagatggcaagaaggtcctgagagaaacgcaatatttttgtgcagaatgggatgttctgcctttgtcccatgctttgaaatttaccacatgaaaaataaaattaaatactgatcatc

SEQ ID NO: 83320 - DNA, 2269 bp, Homo sapiens
  misc_feature (294)..(294): n is a, c, g, or t
  misc_feature (1561)..(1561): n is a, c, g, or t
  misc_feature (2042)..(2042): n is a, c, g, or t
  misc_feature (2045)..(2045): n is a, c, g, or t
  misc_feature (2072)..(2072): n is a, c, g, or t
  misc_feature (2129)..(2129): n is a, c, g, or t
  misc_feature (2176)..(2176): n is a, c, g, or t
  misc_feature (2201)..(2201): n is a, c, g, or t
  misc_feature (2213)..(2213): n is a, c, g, or t
  misc_feature (2224)..(2224): n is a, c, g, or t
ctgctcaccatttctgagccgatgaggactcacctgggctcctcactggtcagggaactgtggcccagccgcagagtgattgctttgtcaagaagggaaacatttacctttccttcttccctctgctctctcctaattaacaattaaatggaaggagttgaaaagacatgtcagagacttcaatctcctcccggcctgaggatgaagggggctcgaacctgaatgttctcttcgctgtggccagaacctagggggctggggttgctgccagctcgactggaggcctgcttccanccccaggctgtggtgaggggcctcacagatttcacaaacaggagggcggctgaccaagcgccaaactatttagacaaacacacaccctcccttcccgccagagtttgggctgatttctcccaatgctaatgaacagctcataagtattaatagactccttggcacctaggagtcaggcagagtaacttccagtgtgaattttggccaaggaccctgatgcagcctcaggatcttccaagcccctgttgagtccagggggcatgagacacacagggaggctggggctgctcccaggaagcaggctcacaagagccagacaggctcccacagacagcttttaggtcacagaaacctctgcctgccaggtaggcatgaacacagaaaccctcccaaatcctcagactgtggagcacactccaggtgagccaggatcaatccctggtctcagagaacacttagatgggggtgaaaagcaggaactgagagcttcccacccagcacctgtccctgctaccagctaaacctgtgtcggtcagtgcaggaattgtacaggtgatgctctgagcctgtgctgaggccatgtatggactgaggaaacctcactgtgtgtatgtaaagttaattcaaacctatttccctgagtgcttacatattttcataaggaaagttctgttaggagagctgcctgaaacaacacctctgcctgtgctcccactttctcccgctggtgtggggaggagaggctgacatcgctgggtccacgttcctctgccctgggtggggtattaatgctgccattcccacgctgcctgctgtttcccctcatcctcaggagggctggtctctgtgctgcaggcagctccaccaggcctgggagcatgacaccgtctgccaatgccttgcccaggtccactggcctcacccttccgcaggcctgcgccttctgtgactctctgcctcagcaatttctctggatttctttgtcctcaggaatgtgctggggccacaggcaggtcaggccaggctttctggggagtgaatgctctctgccagtggcggatggaactggtagacacgtcccccggattcctcgcctgcaagtgggatggtgccaggaaagttctacaccatccttcccaggtcccaggaggacaagcacagttgtccacaagggaaccaagaggatgttgaaaaatcctggttggatctgaacttggaaacaaatttgaggaatctattttacttaatcctactgaaaaattccctnatgagttaaagaagaacaaagtaaaagaagataaaaaagcagttggtacttgaaatgaagatcaaatcatcaagtcctatatgtcacccacagatctgagatcactgactcccagagacacccagtttctcagtgtcagtacacactgcctgggttagtaagcacaggctgagacctgggaggaattgatgaaccaaatgtgtctgggcttttcacttcctcggcatgagtcagccaagaaagcccacctctcctccccagcagcgtgcagggcctctgcagataaatgtgcaggatagcagacctgggtgtggtgctgcctggcactgagccagcccccagattctttggctgcagagtggcctggccaactcacacaggtagcgcccttttattcttggaaaaggaagcaccaggtggaaagggaggttaaaggagggaacacaacttttttccagacccctctgcccaggatgttaanggntgctggaaaatgcctttggtggctttnaatgtcacagatgacatattccaggatggatccagcctccactggacttggcccctntattttgattcctgcctttccccagcctcagccctgagcggcataanatctacacggggttagctgcaggtngaactcagaacncagctcctagncaagtagagtgaggcctatggcttcatcatcaaaatgtaaaattt

SEQ ID NO: 83321 - DNA, 943 bp, Homo sapiens
cgcctctgcgcctggcccggcgactgcgggcgctgcggtccactgggtccgcctcttcccggcatgggtttctgcccagctcacccgctgtcagctggggtcctgctctggtgggaggaagaggctcagacgcttccctgccctctcgcctcaaccacctcgaggcagcggctcccaggatgtgcactttgacgactaaagctgagccggcgccgccacgaccttgggcgggtggtcggcctctgccctgagcaggaagtagaaagtctcagcagacccttcctgagggccgagcaacagtgtagtggcgtattccacatagcaaacaggcagcatttcttcctgtgacaatatggtgtaagacaaaattgtggcctgccatgaagttgtgagagaaaagcatccctcatttcttcaggaaaggccactgccgttccctccggctcctcttctcaggagtttgtgcattcatgaggtgaattccttggaagatgagggccaagtcttattcttctcagtctcttctgcatctaacagaagaataatggttgcacagaaaatcttggttcagtggttgagtgaatgaatggatgaacaggctcttgcacacaaagaagagacatgatgtatttgcatccttccctgcttcagccagttttctgaagctcagagggacaccttgtattgctggatgataaaaacaggagcaaagtgatgaagtgctgacaaggcaacaatagaacatgagagattcactgctgtgtaggaagagatcttcggtgaccatgtagcctgaagctctcattttgtcatcgagggacaccaaaactcagaacagatagagtctagctctgtgacccaggcttgtgtgcagcggtacgatattggctcactgcgactccaactcccaggttcaagcaattctcctgcctcaggactccca

SEQ ID NO: 83322 - DNA, 628 bp, Homo sapiens
acccccagtgtatgctattctgttatggcagccctagcacactaatataaatgcctactgcctgcaaagtgctttgcctttgagggttgcaaaagaggatcccctccagggatccatggtctcattgggattttcctgtttggtctgtgtcctgttcttgagtctccgcaggcagcatttcttcctgtgacaatatggtgtaagacaaaattgtggcctgccatgaagttgtgagagaaaagcatccctcatttcttcaggaaaggccactgccgttccctccggctcctcttctcaggagtttgtgcattcatgaggtgaattccttggaagatgagggccaagtcttattcttctcagtctcttctgcatctaacagaagaataatggttgcacagaaaatcttggttcagtggttgagtgaatgaatggatgaacaggctcttgcacacaaagaagagacatgatgtatttgcatccttccctgcttcagccaggtaagatctactagctcagacttatcacagccctgtttctgagctggtcccacgaatagagtttttgtttttcaccagcaagcaggctgtttccaagctgggatgataattgttgatgtggcactttaaac

SEQ ID NO: 83323 - DNA, 886 bp, Homo sapiens
cgcctctgcgcctggcccggcgactgcgggcgctgcggtccactgggtccgcctcttcccggcatgggtttctgcccagctcacccgctgtcagctggggtcctgctctggtgggaggaagaggctcagacgcttccctgccctctcgcctcaaccacctcgaggcagcggctcccaggatgtgcactttgacgactaaagctgagccggcgccgccacgaccttgggcgggtggtcggcctctgccctgagcaggaagtagaaagtctcagcagacccttcctgagggccgagcaacagtgtagtggcgtattccacatagcaaacagttttctgaagctcagagggacaccttgtattgctggatgataaaaacaggagcaaagtgatgaagtgctgacaaggcaacaatagaacatgagagattcactgctgtgtaggaagagatcttcggtgaccatgtagcctgaagctctcattttgtcatcgagggacaccaaaactcagaacagtgctaagctcctacatcctgttctggaaggacaatcctgagcacacgatgagccatataaacttcagactgacgctgagtgaaagaatgctggaaaagcatcacaggccagggcagcaaagtcttcaaggtcatccgtgctctgatgatgtcacgcttcttccctgtctggaagacatttccccaagagcataccaccaacatcagggaaatggaatccaactggtcgctgcaaagtttgctgagcacacagtgataaagatggcaagaaggtcctgagagaaacgcaatatttttgtgcagaatgggatgttctgcctttgtcccatgctttgaaatttaccacatgaaaaataaaattaaatactgatcatc

SEQ ID NO: 83324 - DNA, 1173 bp, Homo sapiens
acccccagtgtatgctattctgttatggcagccctagcacactaatataaatgcctactgcctgcaaagtgctttgcctttgagggttgcaaaagaggatcccctccagggatccatggtctcattgggattttcctgtttggtctgtgtcctgttcttgagtctccgcaggcagcatttcttcctgtgacaatatggtgtaagacaaaattgtggcctgccatgaagttgtgagagaaaagcatccctcatttcttcaggaaaggccactgccgttccctccggctcctcttctcaggagtttgtgcattcatgaggtgaattccttggaagatgagggccaagtcttattcttctcagtctcttctgcatctaacagaagaataatggttgcacagaaaatcttggttcagtggttgagtgaatgaatggatgaacaggctcttgcacacaaagaagagacatgatgtatttgcatccttccctgcttcagccaggtccccagacagtcccggtgtgcacacttccctgcttctgttcatgatgttctctgaacctgggatcacctttccccttcctcttacctgcccgatcctacttgtcctcccagattcagttttctgaagctcagagggacaccttgtattgctggatgataaaaacaggagcaaagtgatgaagtgctgacaaggcaacaatagaacatgagagattcactgctgtgtaggaagagatcttcggtgaccatgtagcctgaagctctcattttgtcatcgagggacaccaaaactcagaacagtgctaagctcctacatcctgttctggaaggacaatcctgagcacacgatgagccatataaacttcagactgacgctgagtgaaagaatgctggaaaagcatcacaggccagggcagcaaagtcttcaaggtcatccgtgctctgatgatgtcacgcttcttccctgtctggaagacatttccccaagagcataccaccaacatcagggaaatggaatccaactggtcgctgcaaagtttgctgagcacacagtgataaagatggcaagaaggtcctgagagaaacgcaatatttttgtgcagaatgggatgttctgcctttgtcccatgctttgaaatttaccacatgaaaaataaaattaaatactgatcatc

SEQ ID NO: 83325 - DNA, 623 bp, Homo sapiens
cttttttatttttgagatggagtctcgctctgtcgcccaggctggagtgcagtggtgcaatctcggctcactgcaacctctgcctcccgggttcaagcaattctcctgcctcagcctcccgaatagctgggaccacaggtgtgcgccaccacacccagccaatttttgtgttttcagtagagacaggttttaccatgttggtcaggctggtctcgatctcctgacctcaggtgatccacccacctaggcctcccaaagtgctgggattacaggcataagccatctgcccagctggtctaagaaattcttttgtcaccctctaaacattgcagtgctaagctcctacatcctgttctggaaggacaatcctgagcacacgatgagccatataaacttcagactgacgctgagtgaaagaatgctggaaaagcatcacaggccagggcagcaaagtcttcaaggtcatccgtgctctgatgatgtcacgcttcttccctgtctggaagacatttccccaagagcataccaccaacatcagggaaatggaatccaactggtcgctgcaaagtttgctgagcacacagtgataaagatggcaagaaggtcctgagagaaacgcaata

SEQ ID NO: 83326 - DNA, 1185 bp, Homo sapiens
cgcctctgcgcctggcccggcgactgcgggcgctgcggtccactgggtccgcctcttcccggcatgggtttctgcccagctcacccgctgtcagctggggtcctgctctggtgggaggaagaggctcagacgcttccctgccctctcgcctcaaccacctcgaggcagcggctcccaggatgtgcactttgacgactaaagctgagccggcgccgccacgaccttgggcgggtggtcggcctctgccctgagcaggaagtagaaagtctcagcagacccttcctgagggccgagcaacagtgtagtggcgtattccacatagcaaacaggtgaattccttggaagatgagggccaagtcttattcttctcagtctcttctgcatctaacagaagaataatggttgcacagaaaatcttggttcagtggttgagtgaatgaatggatgaacaggctcttgcacacaaagaagagacatgatgtatttgcatccttccctgcttcagccaggtccccagacagtcccggtgtgcacacttccctgcttctgttcatgatgttctctgaacctgggatcacctttccccttcctcttacctgcccgatcctacttgtcctcccagattcagttttctgaagctcagagggacaccttgtattgctggatgataaaaacaggagcaaagtgatgaagtgctgacaaggcaacaatagaacatgagagattcactgctgtgtaggaagagatcttcggtgaccatgtagcctgaagctctcattttgtcatcgagggacaccaaaactcagaacagtgctaagctcctacatcctgttctggaaggacaatcctgagcacacgatgagccatataaacttcagactgacgctgagtgaaagaatgctggaaaagcatcacaggccagggcagcaaagtcttcaaggtcatccgtgctctgatgatgtcacgcttcttccctgtctggaagacatttccccaagagcataccaccaacatcagggaaatggaatccaactggtcgctgcaaagtttgctgagcacacagtgataaagatggcaagaaggtcctgagagaaacgcaatatttttgtgcagaatgggatgttctgcctttgtcccatgctttgaaatttaccacatgaaaaataaaattaaatactgatcatc

SEQ ID NO: 83327 - DNA, 1853 bp, Homo sapiens
  misc_feature (1145)..(1145): n is a, c, g, or t
  misc_feature (1626)..(1626): n is a, c, g, or t
  misc_feature (1629)..(1629): n is a, c, g, or t
  misc_feature (1656)..(1656): n is a, c, g, or t
  misc_feature (1713)..(1713): n is a, c, g, or t
  misc_feature (1760)..(1760): n is a, c, g, or t
  misc_feature (1785)..(1785): n is a, c, g, or t
  misc_feature (1797)..(1797): n is a, c, g, or t
  misc_feature (1808)..(1808): n is a, c, g, or t
cgcctctgcgcctggcccggcgactgcgggcgctgcggtccactgggtccgcctcttcccggcatgggtttctgcccagctcacccgctgtcagctggggtcctgctctggtgggaggaagaggctcagacgcttccctgccctctcgcctcaaccacctcgaggcagcggctcccaggatgtgcactttgacgactaaagctgagccggcgccgccacgaccttgggcgggtggtcggcctctgccctgagcaggaagtagaaagtctcagcagacccttcctgagggccgagcaacagtgtagtggcgtattccacatagcaaacaggtgaattccttggaagatgagggccaagtcttattcttctcagtctcttctgcatctaacagaagaataatggttgcacagaaaatcttggttcagtggttgagtgaatgaatggatgaacaggctcttgcacacaaagaagagacatgatgtatttgcatccttccctgcttcagccagttttctgaagctcagagggacaccttgtattgctggatgataaaaacaggagcaaagtgatgaagtgctgacaaggcaacaatagaacatgagagattcactgctgtgtaggaagagatcttcggtgaccatgtagcctgaagctctcattttgtcatcgagggacaccaaaactcagaacagatagagtcttgctctgtgacccaggcttgtgtgcagcggtacgatattggctcactgcgacctccacctcccaggttcaagcaattctcctgcctcagcctcccaagtagctgggattacaggtgaagaactaatgttgacggaagttaagcaacctttcccaaagtctcatagtggaatgtgctggggccacaggcaggtcaggccaggctttctggggagtgaatgctctctgccagtggcggatggaactggtagacacgtcccccggattcctcgcctgcaagtgggatggtgccaggaaagttctacaccatccttcccaggtcccaggaggacaagcacagttgtccacaagggaaccaagaggatgttgaaaaatcctggttggatctgaacttggaaacaaatttgaggaatctattttacttaatcctactgaaaaattccctnatgagttaaagaagaacaaagtaaaagaagataaaaaagcagttggtacttgaaatgaagatcaaatcatcaagtcctatatgtcacccacagatctgagatcactgactcccagagacacccagtttctcagtgtcagtacacactgcctgggttagtaagcacaggctgagacctgggaggaattgatgaaccaaatgtgtctgggcttttcacttcctcggcatgagtcagccaagaaagcccacctctcctccccagcagcgtgcagggcctctgcagataaatgtgcaggatagcagacctgggtgtggtgctgcctggcactgagccagcccccagattctttggctgcagagtggcctggccaactcacacaggtagcgcccttttattcttggaaaaggaagcaccaggtggaaagggaggttaaaggagggaacacaacttttttccagacccctctgcccaggatgttaanggntgctggaaaatgcctttggtggctttnaatgtcacagatgacatattccaggatggatccagcctccactggacttggcccctntattttgattcctgcctttccccagcctcagccctgagcggcataanatctacacggggttagctgcaggtngaactcagaacncagctcctagncaagtagagtgaggcctatggcttcatcatcaaaatgtaaaattt

SEQ ID NO: 83328 - DNA, 460 bp, Homo sapiens
ctcttttgtttataaattatccagtctcaggtagttatagcagtgtgaaaatggactaatataggattctcacccagtcagggtcatggatttcttttctggagcagaaatttttctcccatcatacatattttatgggaatgaagaaaggagaaggaactagtgttttgtctttatactaaagaaaaaaatgaaaagaatattaattaaaataattaggcaacaaaactggggagtataaacacaccatttttgatactggcaatgaaaacaaccaagtaaactggaagtgttagaaaccctttataaagggacacagtattagttcatagtgctgggatctatgaaaacacaaattccgataataagaaatatccattgtgtgtaagaaatttcaatatgtatgagtgaaagatagtttgagggttgtatgtatgtgtgtgtgtgtgttttaatacta

SEQ ID NO: 83329 - DNA, 1478 bp, Homo sapiens
caccgcctccatcgccggttgtgttcgcaagaggcgacctcagtttcccaggtggcgctgcggcagccagtccaaagtcggactttcaaaaccaacccgaagttttgaacccggcggcggcagttgtcactggcacaggtttggcgtggtggcgccagtgtactacttctggggaggtctcaaccaggttctggcaccttcaatccccacctgatatctgcgtatcatcacggtatcccgcttttcccccagttccccaagagcgtccttcctttccctagtcacaggatcgcagttttggtctgatagtgcatccacctaccccagtgttgcatccccacttccctctttccatctaacgtggtggcctttcctggggataccttgggtatcccccgctaggagagcaagcacaagacaccagggagccagacccctgccgctcccctgccacaggatatgaatacgagcctcagctggtttgagcagctggatgtgcttctcaacgctactgatggaaatgtggtccggaataagcagtggctgtatcctcttggggtctccacagagctcattggcctgtgcatctgtttcttctgtagcagtggctgtatcttcttggggtctccaccgcaggccagcaccaggagctgctgctgaaacagctggctgagggacgacaggctcaggttggcagttggaaggatctccattcatgttgtccaatctaagctgcctctgcccactaccttcaccatgtctgtttcttcatccagctcttaattcagtcttctggacagtaacagtagctgggaacttttatggaagccagatccccagaggagcaccctttctaacctggagcccagcatctttcagctccatgcccagagtcttaagcaagaggacctattcctttggggccccaaaatgctcctgaatgacctgtaaggactcgttaagaatagtaggatgaaggcttctttgcccaccctcccctccaaggccctgtttctgggctgcccgcccctaccttcttgaagtagctattatctgtcttatctactgaggcttttcactgcctgcccatccttgccccccatctcagctcactgcaacctccgcctcccaggttcaagcaattgtcctgcctcagcctcccaagtagctgggattacaggtgtgcgctaatttttgtatttttagtagagatggggtttcaccatgttggccagtctggtcttgaacttctgacctcaagtgatctgcccgcctcgccctcccaaagtgctgggattacagttgtgagccaccatgcccagcctatagctgtaccttctgagtgcaagctcagttgaacttggaaagtaatgggagttcccattctggtgagtagaatgaggtaggacactgctctagggcagtagtgctgggggatgcaaaggaggatgagatattctggtgggacttggatctgg

SEQ ID NO: 83330 - DNA, 1436 bp, Homo sapiens
caccgcctccatcgccggttgtgttcgcaagaggcgacctcagtttcccaggtggcgctgcggcagccagtccaaagtcggactttcaaaaccaacccgaagttttgaacccggcggcggcagttgtcactggcacaggtttggcgtggtggcgccagtgtactacttctggggaggtctcaaccaggttctggcaccttcaatccccacctgatatctgcgtatcatcacggtatcccgcttttcccccagttccccaagagcgtccttcctttccctagtcacaggatcgcagttttggtctgatagtgcatccacctaccccagtgttgcatccccacttccctctttccatctaacgtggtggcctttcctggggataccttgggtatcccccgctaggagagcaagcacaagacaccagggagccagacccctgccgctcccctgccacaggatatgaatacgagcctcagctggtttgagcagctggatgtgcttctcaacgctactgatggaaatgtggtccggaataagcagtggctgtatcctcttggggtctccacagagctcattggcctgtgcatctgtttcttctgtagcagtggctgtatcttcttggggtctccaccgcagaatagcactgctgtcactcctgcagtgctgtcgggaggagtcagagattatgcagaaggaattgaagttgctgcagtaccagttgagccagcaccaggagctgctgctgaaacagctggctgagggacgacaggctcaggttggcagttggaagatccccagaggagcaccctttctaacctggagcccagcatctttcagctccatgcccagagtcttaagcaagaggacctattcctttggggccccaaaatgctcctgaatgacctgtaaggactcgttaagaatagtaggatgaaggcttctttgcccaccctcccctccaaggccctgtttctgggctgcccgcccctaccttcttgaagtagctattatctgtcttatctactgaggcttttcactgcctgcccatccttgccccccatctcagctcactgcaacctccgcctcccaggttcaagcaattgtcctgcctcagcctcccaagtagctgggattacaggtgtgcgctaatttttgtatttttagtagagatggggtttcaccatgttggccagtctggtcttgaacttctgacctcaagtgatctgcccgcctcgccctcccaaagtgctgggattacagttgtgagccaccatgcccagcctatagctgtaccttctgagtgcaagctcagttgaacttggaaagtaatgggagttcccattctggtgagtagaatgaggtaggacactgctctagggcagtagtgctgggggatgcaaaggaggatgagatattctggtgggacttggatctgg

SEQ ID NO: 83331 - DNA, 1564 bp, Homo sapiens
caccgcctccatcgccggttgtgttcgcaagaggcgacctcagtttcccaggtggcgctgcggcagccagtccaaagtcggactttcaaaaccaacccgaagttttgaacccggcggcggcagttgtcactggcacaggtttggcgtggtggcgccagtgtactacttctggggaggtctcaaccaggttctggcaccttcaatccccacctgatatctgcgtatcatcacggtatcccgcttttcccccagttccccaagagcgtccttcctttccctagtcacaggatcgcagttttggtctgatagtgcatccacctaccccagtgttgcatccccacttccctctttccatctaacgtggtggcctttcctggggataccttgggtatcccccgctaggagagcaagcacaagacaccagggagccagacccctgccgctcccctgccacaggatatgaatacgagcctcagctggtttgagcagctggatgtgcttctcaacgctactgatggaaatgtggtccggaataagcagtggctgtatcctcttggggtctccacagagctcattggcctgtgcatctgtttcttctgtagcagtggctgtatcttcttggggtctccaccgcagaatagcactgctgtcactcctgcagtgctgtcgggaggagtcagagattatgcagaaggaattgaagttgctgcagtaccagttgagccagcaccaggagctgctgctgaaacagctggctgagggacgacaggctcaggttggcagttggaaggatctccattcatgttgtccaatctaagctgcctctgcccactaccttcaccatgtctgtttcttcatccagctcttaattcagtcttctggacagtaacagtagctgggaacttttatggaagccagatccccagaggagcaccctttctaacctggagcccagcatctttcagctccatgcccagagtcttaagcaagaggacctattcctttggggccccaaaatgctcctgaatgacctgtaaggactcgttaagaatagtaggatgaaggcttctttgcccaccctcccctccaaggccctgtttctgggctgcccgcccctaccttcttgaagtagctattatctgtcttatctactgaggcttttcactgcctgcccatccttgccccccatctcagctcactgcaacctccgcctcccaggttcaagcaattgtcctgcctcagcctcccaagtagctgggattacaggtgtgcgctaatttttgtatttttagtagagatggggtttcaccatgttggccagtctggtcttgaacttctgacctcaagtgatctgcccgcctcgccctcccaaagtgctgggattacagttgtgagccaccatgcccagcctatagctgtaccttctgagtgcaagctcagttgaacttggaaagtaatgggagttcccattctggtgagtagaatgaggtaggacactgctctagggcagtagtgctgggggatgcaaaggaggatgagatattctggtgggacttggatctgg

SEQ ID NO: 83332 - DNA, 1112 bp, Homo sapiens
tgcagggggccccaaaggggagtgcttttctcctggagcaatgcctggaggagctgagaaaggaactgcagggccttcagagccaggtgtgggagcaaacccaagcccaagcccaagcccagatgcaaacaggaccaggagaatgcagtactaccaatggccttcctcaggagctgcagactgaaatagcactgctgtcactcctgcagtgctgtcgggaggagtcagagattatgcagaaggaattgaagttgctgcagtaccagttgagccagcaccaggagctgctgctgaaacagctggctgagggacgacaggctcaggttggcagttggaaggatctccattcatgttgtccaatctaagctgcctctgcccactaccttcaccatgtctgtttcttcatccagctcttaattcagtcttctggacagtaacagtagctgggaacttttatggaagccagatccccagaggagcaccctttctaacctggagcccagcatctttcagctccatgcccagagtcttaagcaagaggacctattcctttggggccccaaaatgctcctgaatgacctgtaaggactcgttaagaatagtaggatgaaggcttctttgcccaccctcccctccaaggccctgtttctgggctgcccgcccctaccttcttgaagtagctattatctgtcttatctactgaggcttttcactgcctgcccatccttgccccccatctcagctcactgcaacctccgcctcccaggttcaagcaattgtcctgcctcagcctcccaagtagctgggattacaggtgtgcgctaatttttgtatttttagtagagatggggtttcaccatgttggccagtctggtcttgaacttctgacctcaagtgatctgcccgcctcgccctcccaaagtgctgggattacagttgtgagccaccatgcccagcctatagctgtaccttctgagtgcaagctcagttgaacttggaaagtaatgggagttcccattctggtgagtagaatgaggtaggacactgctctagggcagtagtgctgggggatgcaaaggaggatgagatattctggtgggacttggatctgg

SEQ ID NO: 83333 - DNA, 320 bp, Homo sapiens
actgatagtttcctgccattttgtgtcatcagtggtacttgggtcccagaaatggactggttcttactaagcagtgggaatgcagcaatgagcagtgagtatcactaaagagcggacccttacaccaattcctctcattgttgatttcaacaggttgttgcaactgaagaagatctcgtcccacccagtctgcgggagccatcccccagagcagacgggctagaccacagaatcgcagctcacattgtgtcccttctgccctcactctgtctctcagagagggagaaaaagaatcttcatgacatatttttatctgaaga

SEQ ID NO: 83334 - DNA, 391 bp, Homo sapiens
ggaacaggcggcctttcatactctctaaaggcccaaatttctggtctgtttgcactttttttttattgctgcttacaaagccagcaattcttgcttgagctcccttccccagcaaaataccttcctcggtatgatgagtaacagcgcatactactgctgtttgacctgtttgctagagcgtggggctctccaagcacttggtctgtgtgtgctgcctcttgagttatcatcacagacaacactgaactaaatgtgttgctgctactgaataacgcagagctccggctgctacgcctactgctagaccatctgtttacccagggttttttattaggttaatatttccctctagatactgacatctgtatcaattaaactgatacttgctgct

SEQ ID NO: 83335 - DNA, 448 bp, Homo sapiens
taatgaactatagggatattttgatggactgttctttggaattaacaggtccacaagccagtggcttttctggaaattactgaaagctaattcttcagaagagtatgttctagctaagggtgtactataaaggtggtaaccagtagctagcaataacaagcttgttgttggtttcactgcagaaaatttaccacttgcatgtacttactgcattggtttaccctcaagaaaaagaaatacagcctctatatacctcttacacccactagatagaactaatcaggatctcttttgatcactggagcagataagcaggaaatataactaaccaagattaatttcacatattatctattattatagtttttcctaatctaccccttgacttaatctaattattttcagttcagggagcttcctgaaaatggaggacaaggatacatttcac

SEQ ID NO: 83336 - DNA, 810 bp, Homo sapiens
caaatgggcctgtttagttaaggctttgtgtgaagtatgtgggaagtgggtttcactttcaagaaggcagcatggagctggggcttggcctctgctgtctggtatagaggagcctggggatcaggtgtagctgcagacacagctgggcgcagagggagtggcctcatttcccagccacctactcctgccgtgcctcactcgccggggaatgtgatgtgtaggtcttgagaagaaggcccaggtcctgcagcccggtgaaaagacaactgtggcctaccacgaggccggacacgtggtggtaggctggttcttggagcacgtggaccccctgctgaaggttggtcctcccaccctgagtgagtccacctggcaggcttgggcctggtatctctgggccaacctgtggtcatgtgggcatggtacattcaaggattggccctttagctttttaaggaataaactgctctagaatttgtcaaaagatcccttcggggtgggaaagcagggcagtgggttccaaatggggccttggccatgcgactccagggagcagcctcagtgttaaacccgcctgactcctgagctctggattcgaccgttggcctctccagagactctgcagggtgggcagagcgtaggtggtttccacgtgaagctcccaaaggcgggtgcacttcttggggcatccccatggtgtatggggggcctgggtcaggctgtcttctctcctgttccagtagaaggacctgtggtcagagctagggtcaggtggcctggccgctccagggtggctcctggaggaagtgggga

SEQ ID NO: 83337 - DNA, 1911 bp, Homo sapiens
gctgaaagtgcaggaaatttaaaggcttggaccctgcgagacagacaaaccggtgccaacgtgcgcggacgccgccgccgccgccgccgctggagtccgccgggcagagccggccgcggagcccggagcaggcggagggaagtgcccctagaaccagctcagccagcggcgcttgcacagagcggccggacgaagagcagcgagaggaggaggggagagcggctcgtccacgcgccctgcgccgccgccggcccgggaaggcagcgaggagccggcgcctcccgcgccccgcggtcgccctggagtaatttcggatgcccagccgcggccgccttccccagtagacccgggagaggagttgcggccaacttgtgtgcctttcttccgccccggtgggagccggcgctgcgcgaagggctctcccggcggctcatgctgccggccctgcgcctgcccagcctcgggtgagccgcctccggagagacgggggagcgcggcggcgccgcgggctcggcgtgctctcctccggggacgcgggacgaagcagcagccccgggcgcgcgccagaggcatggagcgctgccccagcctaggggtcaccctctacgccctggtggtggtcctggggctgcgggcgacaccggccggcggccagcactatctccacatccgcccggcacccagcgacaacctgcccctggtggacctcatcgaacacccagaccctatctttgaccccaaggaaaaggatctgaacgagacgctgctgcgctcgctgctcgggggccactacgacccaggcttcatggccacctcgccccccgaggaccggcccggcgggggcgggggtgcagctgggggcgcggaggacctggcggagctggaccagctgctgcggcagcggccgtcgggggccatgccgagcgagatcaaagggctagagttctccgagggcttggcccagggcaagaagcagcgcctaagcaagaagctgcggaggaagttacagatgtggctgtggtcgcagacattctgccccgtgctgtacgcgtggaacgacctgggcagccgcttttggccgcgctacgtgaaggtgggcagctgcttcagtaagcgctcgtgctccgtgcccgagggcatggtgtgcaagccgtccaagtccgtgcacctcacggtgctgcggtggcgctgtcagcggcgcgggggccagcgctgcggctggattcccatccagtaccccatcatttccgagtgcaagtgctcgtgctagaactcgggggccccctgcccgcacccggacacttgatcgatccccaccgacgccccctgcaccgcctccaaccagttccaccaccctctagcgagggttttcaatgaacttttttttttttttttttttttttctgggctacagagacctagctttctggttcctgtaatgcactgtttaactgtgtaggaatgtatatgtgtgtgtatatacggtcccagttttaatttacttattaaaaggtcagtattatacgttaaaagttaccggcttctactgtatttttaaaaaaaagtaagcaaaagaaaaaaaaaagaacagagaaaagagagacttattctggttgttgctaataatgttaacctgctatttatattccagtgcccttcgcatggcgaagcaggggggaaaagttatttttttcttgaagtacaaagagacgggggaacttttgtagaggactttttaaaagctattttccattcttcggaaagtgttttggttttccttggacctcgaagaagctatagagttcaatgttattttacagttattgtaaatatagagaacaaatggaatgactaatcattgtaaattaagagtatctgctatttattctttataatatcccgtgtagtaaa

SEQ ID NO: 83338 - DNA, 421 bp, Homo sapiens
cctgcctcagcctcctgagtagttgggattaccagtagatgggactacaggcacctgccaacacgcccggctaatttttttgtatttttagtagagacggggtttcaccatgttagccaggatggtctggatctcctgacctcgtgatccacctgcctcggcctcccaaagtgctgcgattacaggcatgagccaccgcgcctggccgctttcgatattttctaaactttaattcaaaagcactttgtgctgtgttctatataaaaaacataataaaaattgaaatgaaagaataattgttattataaaagtactagcttacttttgtatggattcagaatatactaaattaactttttaaaacacaacttttaaaaaatgtatcaaaataataaacgtgttctgatatttttaaaataag

SEQ ID NO: 83339 - DNA, 695 bp, Homo sapiens
atcctgataaataacttggcagtggtaataccgtgattacgtttccagagaggtttctcctcagcagttgtcttagttcattttttgttgctgtaatagaatacctgaggctggataatttaccaggaaaaatacagttctgcaggctgggaagttcaaggccatggccctggcttctggcaatggctttcatgcttcatcataacatggtggagaaagtcaaaggggatgcagacatttgcaaatagagtcaaaacccaaagggcaccctgactctataacaactcacttagaagggtactcatccattctcctgagaacaaattccgtttttccagagtgaaaactcactactgaaagaacagcaccaagcaattcctaaaggattcatccccatgattcaaacacattcaactaggtccaagtttccaacacctgcacactggggactaaatttcaacatgagctttggtagggacaaacaaaccatatccaaatcatagcagtagtcttggaaaaacatatagaaagtaggggcagaactgagggcagaagagccaagaaagagcttatagtagtcaaaggtctaagtacttaagtccaaagaaaacttcaacatgaatgaatatgttgctgaacctcactttaaaataagtcaggaaataactgaatggttgacttttaaaaattacctg

SEQ ID NO: 83340 - DNA, 257 bp, Homo sapiens
  misc_feature (50)..(50): n is a, c, g, or t
agaggatcccctacggcaggttgtctccaccggagttgtactcccggcangttgtactcaagaccacatgatccgtaactgcaactgtggccactacctgtacccactgccccgtggggagaaatactgcaacaaccgggacttcccagactgggcccattgctactcagatctacagatgagcgtggcgcagagagagacctgcattggcatgtgcaaggagtcctgcaatgacacccagtacaacctgccggtgg

SEQ ID NO: 83341 - DNA, 2584 bp, Homo sapiens
cttgagccctctcatcaccagttatccatgctgctgcatataaacccagcttatttatttaaactgctgcatggattcccgccgtggataatgcctaccgatgggaatttaggtgacaaaaattttcagatggggaaaccagggcacagagagggtgccactatgcacgtgaagaagtacctgctgaagggcctgcatcggctgcagaagggccccggctacacgtacaaggagctgctggtgtggtactgcgacaacaccaacacccacggccccaagcgcatcatctgtgaggggcccaagaagaaagccatgtggttcctgctcaccctgctcttcgccgccctcgtctgctggcagtggggcatcttcatcaggacctacttgagctgggaggtcagcgtctccctctccgtaggcttcaagaccatggacttccccgccgtcaccatctgcaatgctagccccttcaagtattccaaaatcaagcatttgctgaaggacctggatgagctgatggaagctgtcctggagagaatcctggctcctgagctaagccatgccaatgccaccaggaacctgaacttctccatctggaaccacacacccctggtccttattgatgaacggaacccccaccaccccatggtccttgatctctttggagacaaccacaatggcttaacaagcagctcagcatcagaaaagatctgtaatgcccacgggtgcaaaatggccatgagactatgtagcctcaacaggacccagtgtaccttccggaacttcaccagtgctacccaggcattgacagagtggtacatcctgcaggccaccaacatctttgcacaggtgccacagcaggagctagtagagatgagctaccccggcgagcagatgatcctggcctgcctattcggagctgagccctgcaactaccggaacttcacgtccatcttctaccctcactatggcaactgttacatcttcaactggggcatgacagagaaggcacttccttcggccaaccctggaactgaattcggcctgaagttgatcctggacataggccaggaagactacgtccccttccttgcgtccacggccggggtcaggctgatgcttcacgagcagaggtcataccccttcatcagagatgagggcatctacgccatgtcggggacagagacgtccatcggggtactcgtggacaagcttcagcgcatgggggagccctacagcccgtgcaccgtgaatggttctgaggtccccgtccaaaacttctacagtgactacaacacgacctactccatccaggcctgtcttcgctcctgcttccaagaccacatgatccgtaactgcaactgtggccactacctgtacccactgccccgtggggagaaatactgcaacaaccgggacttcccagactgggcccattgctactcagatctacagatgagcgtggcgcagagagagacctgcattggcatgtgcaaggagtcctgcaatgacacccagtacaagatgaccatctccatggctgactggccttctgaggcctccgaggactggattttccacgtcttgtctcaggagcgggaccaaagcaccaatatcaccctgagcaggaagggaattgtcaagctcaacatctacttccaagaatttaactatcgcaccattgaagaatcagcagccaataacatcgtctggctgctctcgaatctgggtggccagtttggcttctggatggggggctctgtgctgtgcctcatcgagtttggggagatcatcatcgactttgtgtggatcaccatcatcaagctggtggccttggccaagagcctacggcagcggcgagcccaagccagctacgctggcccaccgcccaccgtggccgagctggtggaggcccacaccaactttggcttccagcctgacacggccccccgcagccccaacactgggccctaccccagtgagcaggccctgcccatcccaggcaccccgccccccaactatgactccctgcgtctgcagccgctggacgtcatcgagtctgacagtgagggtgatgccatctaaccctgcccctgcccaccccgggcggctgaaactcactgagcagccaagactgttgcccgaggcctcactgtatggtgccctctccaaagggtcgggagggtagctctccaggccagagcttgtgtccttcaacagagaggccagcggcaactggtccgttactggccaagggctctgtagaatcacggtgctggtacaggatgcaggaataaattgtatcttcacctggttcctaccctcgtccctacctgtcctgatcctggtcctgaagacccctcggaacaccctctcctggtggcaggccacttccctcccagtgccagtctccatccaccccagagaggaacaggcgggtgggccatgtggttttctccttcctggccttggctggcctctggggcaggggtggtggagagatggaagggcatcaggtgtagggaccctgccaagtggcacctgatttactctagaaaataaaagtagaaaatactgaaaaaaa

SEQ ID NO: 83342 - DNA, 829 bp, Homo sapiens
tagctggtctctgagtggactgaaaccaggtcagaatgacctgaaagcccagtatgttggggccgagtgagtggagactcatcacgtccagcctcctggaggctgcctgggagccctcctcttcctcgccccaccaggagacattctgcagaccagtgggccactcacttcctctgtcatcagctgtgcattaagacgcccagagatcatccttctcctggctttccctgggcaattccctctgggaggaaggagcacagagccagcctgcctagcttcctcggtggcctgtcagggtgcatctgtgtcaggtgcttggacggaggctggcatcctcataatgagagctctctgagcattggctttattattaggggcaagccgctcttccccatgttgaagggtgaggaccccagctctgaatggtgggacctgggatactgcggtctggcctgggtccctctgtggggtccagagacctgctgggaagcccaaaagcgtccaggactgtggggtctgtagctgcagccagtcatctcaccacagcttctcagccctggagcacctccaccagctcacctacctcccttaacttgggcatcacttctctggacacccctggtgctggaatggggacatcactgaccatgcctgtgttctctccttatgaaccccctaccctccccaggcctgtcttcgctcctgcttccaagaccacatgatccgtaactgcaactgtggccactacctgtacccactgccccgtggggagaaatactgcaacaaccgggacttcccagactggggtgagcgggggcacgggggatcg

SEQ ID NO: 83343 - DNA, 2598 bp, Homo sapiens
gtgcttccccgcccctgaacctgctccctcccagtcggtctcgccgcgctcgccgggtgtcccagtgtcaccaacactcggccgccgccgccagcttggcgcgcaccgccgcctccgccaccgccgacagcgcgcatcctccgtgtccccgctccgccgcccgagcaggtgccactatgcacgtgaagaagtacctgctgaagggcctgcatcggctgcagaagggccccggctacacgtacaaggagctgctggtgtggtactgcgacaacaccaacacccacggccccaagcgcatcatctgtgaggggcccaagaagaaagccatgtggttcctgctcaccctgctcttcgccgccctcgtctgctggcagtggggcatcttcatcaggacctacttgagctgggaggtcagcgtctccctctccgtaggcttcaagaccatggacttccccgccgtcaccatctgcaatgctagccccttcaagtattccaaaatcaagcatttgctgaaggacctggatgagctgatggaagctgtcctggagagaatcctggctcctgagctaagccatgccaatgccaccaggaacctgaacttctccatctggaaccacacacccctggtccttattgatgaacggaacccccaccaccccatggtccttgatctctttggagacaaccacaatggcttaacaagcagctcagcatcagaaaagatctgtaatgcccacgggtgcaaaatggccatgagactatgtagcctcaacaggacccagtgtaccttccggaacttcaccagtgctacccaggcattgacagagtggtacatcctgcaggccaccaacatctttgcacaggtgccacagcaggagctagtagagatgagctaccccggcgagcagatgatcctggcctgcctattcggagctgagccctgcaactaccggaacttcacgtccatcttctaccctcactatggcaactgttacatcttcaactggggcatgacagagaaggcacttccttcggccaaccctggaactgaattcggcctgaagttgatcctggacataggccaggaagactacgtccccttccttgcgtccacggccggggtcaggctgatgcttcacgagcagaggtcataccccttcatcagagatgagggcatctacgccatgtcggggacagagacgtccatcggggtactcgtggacaagcttcagcgcatgggggagccctacagcccgtgcaccgtgaatggttctgaggtccccgtccaaaacttctacagtgactacaacacgacctactccatccaggcctgtcttcgctcctgcttccaagaccacatgatccgtaactgcaactgtggccactacctgtacccactgccccgtggggagaaatactgcaacaaccgggacttcccagactgggcccattgctactcagatctacagatgagcgtggcgcagagagagacctgcattggcatgtgcaaggagtcctgcaatgacacccagtacaagatgaccatctccatggctgactggccttctgaggcctccgaggactggattttccacgtcttgtctcaggagcgggaccaaagcaccaatatcaccctgagcaggaagggaattgtcaagctcaacatctacttccaagaatttaactatcgcaccattgaagaatcagcagccaataacatcgtctggctgctctcgaatctgggtggccagtttggcttctggatggggggctctgtgctgtgcctcatcgagtttggggagatcatcatcgactttgtgtggatcaccatcatcaagctggtggccttggccaagagcctacggcagcggcgagcccaagccagctacgctggcccaccgcccaccgtggccgagctggtggaggcccacaccaactttggcttccagcctgacacggccccccgcagccccaacactgggccctaccccagtgagcaggccctgcccatcccaggcaccccgccccccaactatgactccctgcgtctgcagccgctggacgtcatcgagtctgacagtgagggtgatgccatctaaccctgcccctgcccaccccgggcggctgaaactcactgagcagccaagactgttgcccgaggcctcactgtatggtgccctctccaaagggtcgggagggtagctctccaggccagagcttgtgtccttcaacagagaggccagcggcaactggtccgttactggccaagggctctgtagaatcacggtgctggtacaggatgcaggaataaattgtatcttcacctggttcctaccctcgtccctacctgtcctgatcctggtcctgaagacccctcggaacaccctctcctggtggcaggccacttccctcccagtgccagtctccatccaccccagagaggaacaggcgggtgggccatgtggttttctccttcctggccttggctggcctctggggcaggggtggtggagagatggaagggcatcaggtgtagggaccctgccaagtggcacctgatttactctagaaaataaaagtagaaaatactgaaaaaaa

SEQ ID NO: 83344 - DNA, 2342 bp, Homo sapiens
cttgagccctctcatcaccagttatccatgctgctgcatataaacccagcttatttatttaaactgctgcatggattcccgccgtggataatgcctaccgatgggaatttaggtgacaaaaattttcagatggggaaaccagggcacagagagggtgccactatgcacgtgaagaagtacctgctgaagggcctgcatcggctgcagaagggccccggctacacgtacaaggagctgctggtgtggtactgcgacaacaccaacacccacggccccaagcgcatcatctgtgaggggcccaagaagaaagccatgtggttcctgctcaccctgctcttcgccgccctcgtctgctggcagtggggcatcttcatcaggacctacttgagctgggaggtcagcgtctccctctccgtaggcttcaagaccatggacttccccgccgtcaccatctgcaatgctagccccttcaagtattccaaaatcaagcatttgctgaaggacctggatgagctgatggaagctgtcctggagagaatcctggctcctgagctaagccatgccaatgccaccaggaacctgaacttctccatctggaaccacacacccctggtccttattgatgaacggaacccccaccaccccatggtccttgatctctttggagacaaccacaatggcttaacaagcagctcagcatcagaaaagatctgtaatgcccacgggtgcaaaatggccatgagactatgtagcctcaacaggacccagtgtaccttccggaacttcaccagtgctacccaggcattgacagagtggtacatcctgcaggccaccaacatctttgcacaggtgccacagcaggagctagtagagatgagctaccccggcgagcagatgatcctggcctgcctattcggagctgagccctgcaactaccggaacttcacgtccatcttctaccctcactatggcaactgttacatcttcaactggggcatgacagagaaggcacttccttcggccaaccctggaactgaattcggcctgaagttgatcctggacataggccaggaagactacgtccccttccttgcgtccacggccggggtcaggctgatgcttcacgagcagaggtcataccccttcatcagagatgagggcatctacgccatgtcggggacagagacgtccatcggggtactcgtggacaagcttcagcgcatgggggagccctacagcccgtgcaccgtgaatggttctgaggtccccgtccaaaacttctacagtgactacaacacgacctactccatccaggcctgtcttcgctcctgcttccaagaccacatgatccgtaactgcaactgtggccactacctgtacccactgccccgtggggagaaatactgcaacaaccgggacttcccagactgggcccattgctactcagatctacagatgagcgtggcgcagagagagacctgcattggcatgtgcaaggagtcctgcaatgacacccagtacaagatgaccatctccatggctgactggccttctgaggcctccgaggactggattttccacgtcttgtctcaggagcgggaccaaagcaccaatatcaccctgagcaggaagggaattgtcaagctcaacatctacttccaagaatttaactatcgcaccattgaagaatcagcagccaataacatcgtctggctgctctcgaatctgggtggccagtttggcttctggatggggggctctgtgctgtgcctcatcgagtttggggagatcatcatcgactttgtgtggatcaccatcatcaagctggtggccttggccaagagcctacggcagcggcgagcccaagccagctacgctggcccaccgcccaccgtggccgagctggtggaggcccacaccaactttggcttccagcctgacacggccccccgcagccccaacactgggccctaccccagtgagcaggccctgcccatcccaggcaccccgccccccaactatgactccctgcgtctgcagccgctggacgtcatcgagtctgacagtgagggtgatgccatctaaccctacctgtcctgatcctggtcctgaagacccctcggaacaccctctcctggtggcaggccacttccctcccagtgccagtctccatccaccccagagaggaacaggcgggtgggccatgtggttttctccttcctggccttggctggcctctggggcaggggtggtggagagatggaagggcatcaggtgtagggaccctgccaagtggcacctgatttactctagaaaataaaagtagaaaatactgaaaaaaa

SEQ ID NO: 83345 - DNA, 788 bp, Homo sapiens
gaagggaattgtcaagctcaacatctacttcctgctcagggtgatattggtgctttggtcccgctcctgagcaggaagggaattgtcaagctcaacatctacttccaagaatttaactatcgcaccattgaagaatcagcagccaataacatcgtctggctgctctcgaatctgggtggccagtttggcttctggatggggggctctgtgctgtgcctcatcgagtttggggagatcatcatcgactttgtgtggatcaccatcatcaagctggtggccttggccaagagcctacggcagcggcgagcccaagccagctacgctggcccaccgcccaccgtggccgagctggtggaggcccacaccaactttggcttccagcctgacacggccccccgcagccccaacactgggccctaccccagtgagcaggccctgcccatcccaggcaccccgccccccaactatgactccctgcgtctgcagccgctggacgtcatcgagtctgacagtgagggtgatgccatctaaccctacctgtcctgatcctggtcctgaagacccctcggaacaccctctcctggtggcaggccacttccctcccagtgccagtctccatccaccccagagaggaacaggcgggtgggccatgtggttttctccttcctggccttggctggcctctggggcaggggtggtggagagatggaagggcatcaggtgtagggaccctgccaagtggcacctgatttactctagaaaataaaagtagaaaatactgaaaaaaa

SEQ ID NO: 83346 - DNA, 299 bp, Homo sapiens
gctctccgttgcttcttgccattgctccagcatcatcttcttaaaacatggacaagaccaagccacctccatcttcagaacccattaaggactcttacccctacaacatgaggctaaactcatgccacagatgatctgtgccatattcttccagcttcctctcccaccaatgctcccacatcccatgttctggcttcccctgacaacttgccagcccccaagcatcacagctgccacttcccctctcccggctcagacagattcctcaggccagacactcctccctcctaatttccacc

SEQ ID NO: 83347 - DNA, 187 bp, Homo sapiens
cctcccaggttcaagcgattccctggcttaatttgtcttcttgctcccttctggcaccatgtgagctcttcacatggtgtgctttcatctgcttttttgaaattgcataatatttgagatgtatataaggcattcactttttatggttatttatttttgtctccctgttctactatagttttttttt

SEQ ID NO: 83348 - DNA, 533 bp, Homo sapiens
agtaagggtaaagatcagtgcttactagacaagcactcattaaatgttaattgttatttatacttgttacttaaagcaaagtgaaggtttttcaatattagaaagtttatcttctcatgactctagattttataagggttactatgtattgttacatctgtcaattgtgttaacaaactgtcgacattctcagtattcaaactgcaggagtaaaaaaatcggttttaatgaacaccttcctcaacctactgatgtttcaagagctgttagatacaaaataagcacttctaacttttcatttggaagcaagaaaaatactgtgcacaatgatatgagtaattgtaatttttaagattggcaaaaattttttgttttcattgaaagtttttcctgatgcttctcttcctttgaccttattttaagtctttatataattgtcggaggctgtttaacattaggcattttgacgcagtaaaggggttcattttaaattaatgttatagtaatatgtttaatactagtggtactgcttt

SEQ ID NO: 83349 - DNA, 409 bp, Homo sapiens
tcgttactggcatttctggcagggacggtggctgagagaagaatctggggaccaggctggagtgcagtggcatgatctcggcttactgcaaccactgtgttccaggttcaagctattctcccgcctcagcctcccaagtagctgggattacaggtgcccaccaccacgcctggctaatttttgtatttttagtagagacaaggttttgccatgttggccaggctggttcaaactcctgacctcaggtgatttgcctgcctcggcctccctaagtgctggtatcgcaggcgtgagccaccgcgccttgcctaggattcttacagttaaatgttgctgttttaatcttgaaatcttgagaactgaattggatgaatttgttctgattttcacttctgttttctttagcttt

SEQ ID NO: 83350 - DNA, 132 bp, Homo sapiens
gccagatagtaacaacgctagaagaaaatatgagtaatgcaaaacttggcactatgctacattaaacctttcttctcacttatggatcctgaaagcaccttgagattgaatgattgcaatagaatctgaaat

SEQ ID NO: 83351 - DNA, 806 bp, Homo sapiens
agaaccacaaacagggaacgcggacgggagtgggagggagcagaaggcacgtggtcctgtgtaaatccatcccgggacgcagtgcaaacaatggtctctgagcccacgtaaccacgcagagcgggacgttccgggatcagtggggagagtcagctccttcccgagccaagcagcagctgcgtgggggagggtcgcaattatttatttttgagacagggtctcgccctcttgcctaggctggagtgcagagttacgatcacagctcactgcagtctcgacctaccaggctcaagcgatcctctggcttcagcctcccgagtagttgggactataggtgcatactttcatgcccagctaatttttttttccccagttttttgtagagatggggtcttactatgttgcccaggctggtcttagacttctgggcttaagagatcctcttgccttggcttcccaaagtgctgggattacagacatgagttaccatgctcagctggggaggggtgcaatttttatttttatctttatttttttgagacggagtttcactccgtcacccacgctagagtatgatctcggctcactgcaacctccacctcccgggttcaagcgattctcgtgcctcagcctcctgagtagctgagattacaggcacccaccaccatgcctggctaatttttgtatttttagagacagggttttgctgtgtggcccaggctggtctcaaactcctgagctcaagcgacccccctgcctcggcctcccaaagtgctggggttacaggcgtgagccactgcgcccgg

SEQ ID NO: 83352 - DNA, 243 bp, Homo sapiens
tttctcagcaaacattaatgtaaaaaaggagagaatataagaaactaatatttttgcacactatagcaaggtctagtacacatctgtaaaaaggtattatccaagtaatagctttgagcaaggaaaaaaaaataacaaaccaaaatcaatctacctctagagctgaaaaatgctttaaaatggcccagtactctctaaaatgattaaatcaaccacaaaaccatctaaatgaaaaatgcagcc

SEQ ID NO: 83353 - DNA, 418 bp, Homo sapiens
gtttgtgcatttactgttctatactagagttgtacaatctccacgttttacataaagcgatcatgccaaggcacacaaacaaaattcttcttccaattcaaaagcacatgggtaagttttctgttttggtttttaacctgcagcaacatggtttcacaaagccctagctgcctttttactagcatcacaaaaagccttggtgtaagttatttttctacatctggctctctctgttttggatacatgggactttagcaggtatatacttggagaataaagttccatagctcaaatattcaatagaggttttgtttttgcatcaacttttcagtaatttcttagtacttttcttttttatgttaggagataaaatgaaaggatttagatttcctgccatgggaaaaataattattttccc

SEQ ID NO: 83354 - DNA, 382 bp, Homo sapiens
gtgggcgcgcgggttgggggctctcgcgccgctccgggctctccccccccccggctgcggttgccgaagagaggccggagcgcggcgcccggctgctccacctggcgcgctgagcaccgcgcggggagcccccgggggcgggcggtggggggcgcggactgcgggaagaaggcacgaggcgtcgccgcagctcggtcaggggccggggccccgccgctcgccgctgcactaacttgccgcttggtctcgcctcgccgccgcggctcgctgcgctttgggtggcggggggcggggagagcggggagtcagagggtctgcggtggccgagggagggaccctacgacggggagcccgcccggtgccgctcttcttcccctccccg

SEQ ID NO: 83355 - DNA, 330 bp, Homo sapiens
caagttttctcacatttatggaaaaactgagcatcctccctcattttctgaatttcttactctagaaattctgcagacacttattgatcacctgccacatgccagacattccacttggctttaactaaaacgtgactgaaaattaaaaataattgtgtgttgtgattattcaaatgtccatccgatcagcctcacccagtgtggaagatgcgatggaaaccactgtctgtagatggggcagtgagggaaggctgggaacaaggggatgaaattttctgtagcatctgctgttaacagcaaaacatataatattaaaatgtgcataacttg

SEQ ID NO: 83356 - DNA, 731 bp, Homo sapiens
tttttgatccttttagctcagcaagctggtgtttgatgacctgagggactttgaccacagttagcttgtttgcccttgattttttttctattttgttatttttccttttcttctctccatattttttcttattcttttaaaatttgtttctttattttttagttgtattttcttatctttttctttgttctttcttcctttttctcatatgatggcctttccatgggtgtgtggagcctgagagtcattctctacctgatgaccactggtccctgccttttgtgggagaggactttgaggagccgcaggatcctctctcccttcactttacatacagtatgaagatcctgagctccgtagagccctatgagatggtgcaggagatgagccaggtgactcaagcagctgcacatgggagcgacgcaaccagcacaatttgctgtgtgtacagggcatgccctgctgagagggattttgtagagaaggaatacaggtgtgcaaattgttgtggcagagttgtcttcatggggtccaatttatgagggtatctggcacctccatgtccttcaaaaatcatgtgtccaaagtaaatgctgagcttaaattctaaaggacaccagaggccacctgggagacaggaaaggaagtccacctggtcctagctgcaggctggccctctgccccgacctggggagcttgagactggactatttctcgaggcacctctccaa

SEQ ID NO: 83357 - DNA, 277 bp, Homo sapiens
tataaccaagagtgttttaaagaaataaattatgtttgcctagcatcacccaactccatcagccaagaccaggcacttaatttgcaagttctagtgcaaaatagatatgtgcaactacttgttcattatttattattcatttcaaagtgatggtatcagagcattagcagaaccacagggccctgtaagactgcacaggtttttaatccatgaagttgtccttgccaatagaatactcatgtgacttctactagtgaatgaccaaaacatggtttag

SEQ ID NO: 83358 - DNA, 823 bp, Homo sapiens
tcctgctgagacaagaaaatattttcacaactcaagacaagttaaatatccacttatgggaacagtgctgaaggcctggactaggatggtagcaatggagacagactaaaggtcagcataacagtcaacattaagggggttgaatcaacagcacatagtacctgattggaaatacagagtaaattacagtgagaaaaagagatgcaatcattcccttgcatatggtccgtatgaagacgggatcattacaggaaaggtgaaggagatacagtcattatgctctatatacacccatttttatggctagcggctgaagatgggatgctttctttgctggaagacctattacctgttaggttgcaaaagatgtgatcatcttcctaaacaataatttagagtcccataacaattttaagtgtgctgttcatgaaaatttgaatacattgtattgggaatataatggaagtgagatgcctcatgtcgtgagaaaatctgacataaactccttaagcatgagaggccatgtgggtatggaagccctgaaagggaggaaaaaacagccagaccctagctgttccagtcatcccaactgaggtgccagacttgtgattgaggccatcttgcatcatctaggcctagtagagctgccaactgactgcagacacatgagtcaatccagctaatgccacatggagcagagacaagccgcccagctgagcccagtccagatgacagaatcatgagcaaataaggttgttgttcttttaagccactaaattttcgggtgatttgttacacagtaataaataactgaaacaactaa

SEQ ID NO: 83359 - DNA, 251 bp, Homo sapiens
agagtctcacttgttaacccaggctggagtgcagtggcgcaatcttggctcactgcaacctccacctcccagattcaagcaattttgtattttcagtagagatggagtttcaccgtgttgcccaggctggtgtcaaactcctgacctcaagtgatccacccgcctcagcctcccaaagtgctggggttacatgcgtgagccagtgcagatatgttttggtccccagcaggatatgttttggtccaatttat

SEQ ID NO: 83360 - DNA, 455 bp, Homo sapiens
aggacatggaatctgagaaggggttcatgcaaatttaggatgtcagtagaaaggctagaatactcggacgcaaactggagggcatgcaatacacatgaagctcagcccaggaaaaccacatgcataatcaggaaggggatggaagttctttcttggtaatttccatcacatcaaagcatcacccttctgatctactggaaaaccccagacttgctaggatctttctacttcatcagaaaaatgaggcaaatgccctagaaaaaagaaaaagtactgattctctgctctaaacccaagaattccaatgtaggtctatcagtctgggtagggtcaaggataaacataaatatgtaaccctaatactagggactggtgatggaaaaaatgtccccattggaggatgaagaaaaacacatccaaaccactatctcagtccccagtctttcctatgcctc

SEQ ID NO: 83361 - DNA, 391 bp, Homo sapiens
gagtaggctgagattcctatcattttgagtagctacacatttcaggttatgcaatcctgagctcagggtgccgcctgcaagcggtccacacccaaaccaccctgactttactcttaaagaggttaacaacccttgagtggtgctatttcagacggttgcgtatgctcagttaaactaatgtgaacacatgtgtttatgtctcgctaaggtgctagaatcattaataacaatcagcatattgcccctgctgggaaaattatgagtgtgagatcctaataaacactcactactgtgtaagggaaggaggtggaagagtggaaattctaagggcaaccctctccatgttacctagaagaaggattttttttttttttttcggaggtaagagaca

SEQ ID NO: 83362 - DNA, 306 bp, Homo sapiens
ctcccacccatatctaatccaacaagtccagctgcctctctctttacaatacccaggatcaggccccttctcagcacccccacagctgctgccccaaaggaagccacgtcatctctcacggagattgtgcagcagccactgcctcctttcaccttcgcctgtggtcattctccccacatggccagggaatgcgtcctgttaaagcctgctaggtcacggtcctcctctactcaaaatgctcccctggctcccactgcccccagagtaaaagcccagaccctacaaatgacacaaagccctacacga

SEQ ID NO: 83363 - DNA, 283 bp, Homo sapiens
agcaaggcaccatgcaggagatggaggagggaccgcaagagcctgtgccccagcctgcctggagctcagagccccagaaaagggacacgcaagggtttgccagggctgatgggagcactgctggctgtgcaggccatcatttcatcactctggccctcagttacctcatctgtaaaaaggggaataaatggtacctccctgctagggtcgtgctgaggctcacagtggctggcatagcatctctagtaaatacacaggaaccattgtcgtcactatggctatc

SEQ ID NO: 83364 - DNA, 794 bp, Homo sapiens
tagaaccattcatctgctgtgtgacctgtgccccttcttacgggcatgtgaggaggaggattgaggacggacaaagagcttgtttcacctgtgatcagtctttgacccttctgtgtgacgcaattccttatggagtttaccaggagcaaaactcacaattcaacagatggtttccacaatatcttaagaggtgtggtgcaaaactggaaactgttcaggatgattacaccctgcttctgatatgagaaaattaaacttgtattcaaaatggatgccaaggcaacataaaattataacaattcactacaagcatagatccagcttgagaatatcattcttttcacattggaaacccacggaggataaaaggatggatcattttgataaaggatgatatactccaggaagaaatgaagatccagtttgcagatgaaaataaagacaatgaataatccttcttggatttcatggattaagaagacacatatttaaaagtctggagaaagacttctcatgaaaagataaagtgaccccttttgcacctcaagtggcattatcagttcacttctcctgagacctggctgttgagatgatttcctgtgttttctcacatcctcacctgtcccttcaataaacgctcatcaccaaaagttttgcagatactgctgtctagatggatctttgctcactggaaatatcagtataaggacaacaatccatccatctgtgactgctaatggcaaagtcaatcatcatttgttgtttgcacttagcttgagaactctgctcaacct

SEQ ID NO: 83365 - DNA, 371 bp, Homo sapiens
cctgcaaatgttagccaaaatatgacaacatgttgttatttactctgttttcagaactactttttttctggctaaataattttttaaaattggaagagaaatggatagtaaatgaatgatgacttggagggcaagttcatggagctctttcttagttaatagattcctagtctttctgcattacttaattgcgtattaaaagtggaacccttgatgtaccatgtacagcatatatttattctgtagaaaattattaatttttaatggactaagtggctgtttggacaagggaccctgactattaatcaggaggtgagtgattgactgactttcatgttcattaattattcaaggaagttcacctacaaggg

SEQ ID NO: 83366 - DNA, 724 bp, Homo sapiens
gaggaaccacacctgaatttgggttctttgaatgattctttatttggtagtgacaatattaaaatagaatcattgattacaaagaagactgtggatcacacagttgaagaacaacaaacagaaaaagttaaattgatcacagaaaatctcagtaagctccctaatgcagactctgaatgcctttcttttgttggctgttcaacatcaggaacaaattctggaaatggaacaaatggtttattagaaggatcaccaccatccccattctttaagtttcaaggagaaatgattgtaaatgacttgtatgttccatcatcaccaatcctagcacctgtgagaagtcgtagcaagttggtttcaagaccatctcgatcttttctgctaagacatcgacctgtaccagagattccagggtcaacaaaaggagtttctgggagctatttccgtgaaagaagaaatgttgctacctcaactgaaaaatctgtggcatggcaaaattcaaatgaggagaattcatcttccatctttccttatggagagacctttctcttccagagactagaaaattccaagaagcgatctataaagaatgaatttttgacccagggagaagcactcaaaggggaagcagctactgcaacaaactcttttatcatcaaatcaagcatatacgataacagaaaggagaaaataagcgaggacaaggtggaagatatttggatac

SEQ ID NO: 83367 - DNA, 350 bp, Homo sapiens
gctcagagaggttgaaggctctgttcgggatcacacagtgagtcatgttctatctgctaagtgagtacaaaccctacaggtttcaacttccagaatgcaaccttcacaggatccagcctcacaagtagtaaaaatacaagcttgcttcggcaagactgacacatacattcctacaaagcttagaagctgctgtagatagccaagtttgtcctcctgctctggttggtggaatctgactacagtacactctcataaacatcccgaggccaggcagcatcccaagaaacatctggagaaaacagactttaccttgataacatctaccccctgggagctgctctgccctgatg

SEQ ID NO: 83368 - DNA, 211 bp, Homo sapiens
acttctctattatgtaagctagtgaattcccctttttgcttaaactagctgttaatacgtttctgccatactgaaatgacaatacactaactgcagcccaaactataaaaaccaaggtctgcaacagtgggaaactgagtttggttgagtgtgcctgggtctgggtctgtgctatgttcagtctcttttttttttttttttttttgaaacg

SEQ ID NO: 83369 - DNA, 488 bp, Homo sapiens
tgaaagtttcagggcagattctagttttaatgtagtgtgcttagaccctccagtgcacggcagcttatgtatatatgctataaacctttataaaataccgttcaaaagtttcatagtatttattttttcttttttataaaagatggggtcttactatgttgcccaggctagagtgtaatggctattcagaggcacaatcatgactccacagcctggaaattctggcctcaagcaatcctcccatgtcagcctaccaagtagctaggactataggtgtagtaccaccacctctggttttattttgcaaaaactgaatattaagcttttaactttttgtttcagtcaatatctgctgtctccaagaaacgctgaaacaaaaaattaaaagcttaatatttaggagctgggcatgcctgtagttccagctactcatgagtcttaagtgggagaatcacttgaggcctagcattggaggcagcagtgctcta

SEQ ID NO: 83370 - DNA, 421 bp, Homo sapiens
gactgcctatttaaattggttaaggacgtgtaatatggatatgtcctcagtgctaagaagcttgattttctgaaagcttagctctgatacgccacctgtgttttaaactttcggtggctatggctagccctactggtccagaccttgtttttcaatcttgtctgacaggactccttgttcaaatcctttgagccagtgaaacaggagttacttctcctcggggatatatcctgttttcttattcttttgctcacactgtttccagatctgggacatttctatttctgcacgtcaaaatctacctcctcttctaggtgtggttgaaatcagccatcttcttacagttttcctcgatgttctgcttcctccgtgacttgaagtcgtcccttcccttctgaatcgttacaatgtttcttttctg

SEQ ID NO: 83371 - DNA, 401 bp, Homo sapiens
ccactttcttgagtgtttttatccagaatagatgttgatttctgttgcaggttctttcactatctatggagataatatattatttttctccataggtctgttcatatggggtattatatttagtggatttcctcatattgaaagatagtctaattttgaaccaattttgcaaaaattccacttggtcatgttatattattttcttaatgtggtattgatttttgttagtatttctcacattcataaaaaatgttagccaggcatggtggtgtgtacctataccccagctattcaggaggctgagccaggagaattgcttgagcctaggagcttgaggctacagtgggctatgattgtgccactgctctccagcctgggtatcagagcaagaccccgactct

SEQ ID NO: 83372 - DNA, 1180 bp, Homo sapiens
caagtgactcgttacagccaaaagggccaaaggggcaattctcctttaacaagcgagtgggcaacgggttctttaaatctagaaattttcctaagttccggtcctctaggggttgtgcctgacaatgtaaagaagttaaatggccttccaaaatggcggtattcaccatgttaaaaaagatggcctctcattttaattaaaaatccttagaaaagtttgagtatagaaggtgggtattacaatccaaattcaacaaaggcctgtttttgaaaagcatagtgtgcagcttagcatctcaagttacatgtgtgcaaattatggcttcagaggtggaagataaacagtgacgggggaacaaacagacaacaagaaggtttggaagaaatctggtttgagactctgaaccttagcactaaggagattgagtaaggacctccaaagttccccggactcatgaattctgggcccttggcccattctgtgcacagccaaggacttcagtagaccatctgggcagctttcccatggtgctgctccaaccatcagataaatgaccctcccaagcaccatgtcagtgtcgtacaatctaccaaccaaccagtgctgaagagattttagaaccttgtaacatacaatttttaagagcttatatggcagcttcctttttaccttgttttcctttggggcatgatgttttaacctttgctttagaagcacaagctgtaaatctaaaaggcacttttttttagaggtataaagaaaaactagatgtaataaataagatcatggaaggctttatgtgaaaaaagttgaatgttatagtaaaaaaaaaagatatttatgtatgtacagtttgctaaagccaagttttgtttgtattgatttctttgcatttattatagatattataaaatagtttgtctgtgcttttttttccctaaacaaataactctaagtttcattattaagcaggcactgatcagaatgcaacctaaatgatcatttttctgtgcaatgaatgaagctggaacattagtgtatattaaaggaaaaggatggcaagaggcagcatggatttagacatagaagaccccaggtgattcctttttttctcttccttccatagtcaatcaaatctcctgaattcttgtttccggaaacctttcatcctctattctcc

SEQ ID NO: 83373 - DNA, 427 bp, Homo sapiens
tttactacattcactagtttcctatagatcctagtttaagaatgtgaaggaatactggcttttcaagtcaaattttaacctttctttaagttgaatatttaagttgggcttcatcactacaaagaccaatctcatattgccattgttatttcttatgggccaagaattttaacactgttttactattctaaaagatgaaaaaaaatatattaagtgtctttgaaatatgtgatatggcatagtgcattttacatttattgtatgtaaatatacacatgtgtttctaccatgaaaagccatgagaattatgcccaccatagtatggactccagaatcccaacttaatgttttatcagtggctaatcacatagatataaatttattttacttcttcaacaaaagaaaagccagtttccttaattcatgg

SEQ ID NO: 83374 - DNA, 5710 bp, Homo sapiens
  misc_feature (3271)..(3271): n is a, c, g, or t
ccagcaaggccctacttcagctttggcaaagatacaaggactactccaaacagtgtgcttcgacagttcagcagcaggaggatcgaaccaatgagctgttgaaggcagccacaaacaaggacattgccgatgatgaggttgccacatggattcaagattgcaacgacctcctcaaaggactgggcacagttaaagattccctctttgttctccatgagctgggagagcaactgaagcaacaagtggatgcttccgcagcatcagctattcaatcggatcaactctctttgagtcaacacttgtgtgccctggagcaagctctctgcaaacagcagacttcattacaggctggagttcttgattatgaaacctttgccaagagtttagaagctttggaggcctggatagtggaagctgaagaaatactacaagggcaggaccctagccactcatctgacctctccacaatccaggaaaggatggaagaacttaagggacagatgttaaaattcagcagcatggctccagatttagaccgtctaaatgagcttggatataggttacccttgaatgataaggaaatcaaaagaatgcagaatctgaaccgccattggtctctgatctcctctcagactacagaaagattcagcaagttgcagtcatttttgctacaacatcagactttcttggaaaaatgtgaaacatggatggaattcctagttcagacagaacaaaagttagcagtagagatttcaggaaattatcagcaccttttggaacagcagagagcacacgagttgtttcaagccgagatgttcagtcgtcagcagattttgcactcaatcattattgatgggcaacgtcttctagaacaaggtcaagttgatgacagggatgaattcaacctgaaattgacactcctcagtaatcaatggcagggagtgattcgcagggcccagcagaggcgggggatcattgacagccagattcgccagtggcagcgctatagggagatggcagaaaagcttcgtaaatggttggttgaagtgtcctacctccccatgagtggtctcggaagtgttcctataccactgcaacaagcaaggaccctctttgatgaagtgcagttcaaagaaaaagtgtttctgcggcaacaaggcagctacatcctgactgtggaggctggcaagcaactccttctctcggcggacagtggcgctgaggccgccttgcaggccgaactcgctgaaatccaagagaaatggaaatcagccagcatgcggctggaagaacagaagaaaaaactagccttcttgttgaaagactgggaaaaatgtgagaaaggaatagcagattccctggagaaactacgaactttcaaaaagaagctttcgcagtctctcccggatcaccatgaagagctccatgcagaacaaatgcgttgcaaggaattagaaaatgcagttgggagctggacagatgacttgacccagttgagcctgctgaaggacaccctctctgcctatatcagtgctgatgatatctccattcttaatgaacgcgtagagcttctgcaaaggcagtgggaagaactatgccaccagctctccttaaggcggcagcaaataggtgaaagattgaatgaatgggcagtcttcagtgaaaagaacaaggaactctgtgagtggttgactcaaatggaaagcaaagtttctcagaatggagacattctcattgaagaaatgatagagaagctcaagaaggattatcaagaggaaattgctattgctcaagagaacaaaatacagctccaacaaatgggagaacgacttgctaaagccagccatgaaagcaaagcatctgagattgaatacaagctgggaaaggtcaacgaccggtggcagcatctcctggacctcattgcagccagggtgaagaagctgaaggagaccctggtagccgtgcagcagcttgataagaacatgagaagcctgaggacctggctcgctcacatcgagtcagagctggccaagccaatagtctacgattcctgtaactcggaagaaatacagagaaagcttaatgagcagcaggagcttcagagagacatagagaagcacagtacaggtgttgcatctgtcctcaacctgtgtgaagtcctgctgcacgactgtgacgcctgtgccactgatgccgagtgtgactctatacagcaggctacgagaaacctggaccggcggtggagaaacatttgtgctatgtccatggaaaggaggctgaaaatcgaagagacgtggcgattgtggcagaaatttctggatgactattcacgttttgaagattggctgaagtcttcagaaaggacagctgcttttcccagctcttctggggtgatctatacagttgccaaggaagaactaaagaaatttgaggctttccagcgacaggtccacgagtgcctgacgcagctggaactgatcaacaagcagtaccgccgcctggccagggagaaccgcactgattcagcatgtagcctcaaacagatggttcacgaaggcaaccagagatgggacaacctgcaaaagcgtgtcacctccatcttgcgcagactcaagcattttattggccagcgtgaggagtttgagactgcgcgggacagcattctggtctggctcacagagatggatctgcagctcactaatattgaacatttttctgagtgtgatgttcaagctaaaataaagcaactcaaggccttccagcaggaaatttcactgaaccacaataagattgagcagataattgcccaaggagaacagctgatagaaaagagtgagcccttggatgcagcgatcatcgaggaggaactagatgagctccgacggtactgccaggaggtcttcgggcgtgtggaaagataccataagaaactgatccgcctgcctctcccagacgatgagcacgacctctcagacagggagctggagctggaagactctgcagctctgtcggacctgcactggcacgaccgctctgcagacagcctgctttctccacagccttcctccaatctctccctctcgctcgctcagcccctccggagcgagcggtcaggacgagacaccccggctagtgtggactccatccccctggagtgggatcacgactatgacctcagtcgggacctggagtctgcaatgtccagagctctgccctctgaggatgaagaaggtcaggatgacaaagatttctacctccggggagctgttgncttatcaggggaccacagtgccctagagtcacagatccgacaactgggcaaagccctggatgatagccgctttcagatacagcaaaccgaaaatatcattcgcagcaaaactcccacggggccggagctagacaccagctacaaaggctacatgaaactgctgggcgaatgcagtagcagtatagactccgtgaagagactggagcacaaactgaaggaggaagaggagagccttcctggctttgttaacctgcatagtaccgaaacccaaacggctggtgtgattgaccgatgggagcttctccaggcccaggcattgagcaaggagttgaggatgaagcagaacctccagaagtggcagcagtttaactcagacttgaacagcatctgggcctggctgggggacacggaggaggagttggaacagctccagcgtctggaactcagcactgacatccagaccatcgagctccagatcaaaaagctcaaggagctccagaaagctgtggaccaccgcaaagccatcatcctctccatcaatctctgcagccctgagttcacccaggctgacagcaaggagagccgggacctgcaggatcgcttgtcgcagatgaatgggcgctgggaccgagtgtgctctctgctggaggagtggcggggcctgctgcaggatgccctgatgcagtgccagggtttccatgaaatgagccatggtttgcttcttatgctggagaacattgacagaaggaaaaatgaaattgtccctattgattctaaccttgatgcagagatacttcaggaccatcacaaacagcttatgcaaataaagcatgagctgttggaatcccaactcagagtagcctctttgcaagacatgtcttgccaactactggtgaatgctgaaggaacagactgtttagaagccaaagaaaaagtccatgttattggaaatcggctcaaacttctcttgaaggaggtcagtcgtcatatcaaggaactggagaagttattagacgtgtcaagtagtcagcaggatttgtcttcctggtcttctgctgatgaactggacacctcagggtctgtgagtcccacatcaggaaggagcaccccaaacagacagaaaacgccacgaggcaagtgtagtctctcacagcctggaccctctgtcagcagtccacatagcaggtccacaaaaggtggctccgattcctccctttctgagccagggccaggtcggtccggccgcggcttcctgttcagagtcctccgagcagctcttccccttcagcttctcctgctcctcctcatcgggcttgcctgccttgtaccaatgtcagaggaagactacagctgtgccctctccaacaactttgcccggtcattccaccccatgctcagatacacgaatggccctcctccactctgaactaagcagatgccatctgcagaagtgctggtagcataaggaggatcgggtcataagcaatcccaaactaccaacaagaggaccttgatcttggcgaaagccctcggtgtggcagctttagccctcctccagatcacatgtgtgcaaattatggcttcagaggtggaagataaacagtgacgggggaacaaacagacaacaagaaggtttggaagaaatctggtttgagactctgaaccttagcactaaggagattgagtaaggacctccaaagttccccggactcatgaattctgggcccttggcccattctgtgcacagccaaggacttcagtagaccatctgggcagctttcccatggtgctgctccaaccatcagataaatgaccctcccaagcaccatgtcagtgtcgtacaatctaccaaccaaccagtgctgaagagattttagaaccttgtaacatacaatttttaagagcttatatggcagcttcctttttaccttgttttcctttggggcatgatgttttaacctttgctttagaagcacaagctgtaaatctaaaaggcacttttttttagaggtataaagaaaaactagatgtaataaataagatcatggaaggctttatgtgaaaaaagttgaatgttatagtaaaaaaaaaagatatttatgtatgtacagtttgctaaagccaagttttgtttgtattgatttctttgcatttattatagatattataaaatagtttgtctgtgcttttttttccctaaacaaataactctaagtttcattattaagcaggcactgatcagaatgcaacctaaatgatcatttttctgtgcaatgaatgaagctggaacattagtgtatattaaaggaaaaggatggcaagaggcagcatggatttagacatagaagaccccaggtgattcctttttttctcttccttccatagtcaatcaaatctcctgaattcttgtttccggaaacctttcatcctctattctcc

SEQ ID NO: 83375 - DNA, 5651 bp, Homo sapiens
  misc_feature (3271)..(3271): n is a, c, g, or t
ccagcaaggccctacttcagctttggcaaagatacaaggactactccaaacagtgtgcttcgacagttcagcagcaggaggatcgaaccaatgagctgttgaaggcagccacaaacaaggacattgccgatgatgaggttgccacatggattcaagattgcaacgacctcctcaaaggactgggcacagttaaagattccctctttgttctccatgagctgggagagcaactgaagcaacaagtggatgcttccgcagcatcagctattcaatcggatcaactctctttgagtcaacacttgtgtgccctggagcaagctctctgcaaacagcagacttcattacaggctggagttcttgattatgaaacctttgccaagagtttagaagctttggaggcctggatagtggaagctgaagaaatactacaagggcaggaccctagccactcatctgacctctccacaatccaggaaaggatggaagaacttaagggacagatgttaaaattcagcagcatggctccagatttagaccgtctaaatgagcttggatataggttacccttgaatgataaggaaatcaaaagaatgcagaatctgaaccgccattggtctctgatctcctctcagactacagaaagattcagcaagttgcagtcatttttgctacaacatcagactttcttggaaaaatgtgaaacatggatggaattcctagttcagacagaacaaaagttagcagtagagatttcaggaaattatcagcaccttttggaacagcagagagcacacgagttgtttcaagccgagatgttcagtcgtcagcagattttgcactcaatcattattgatgggcaacgtcttctagaacaaggtcaagttgatgacagggatgaattcaacctgaaattgacactcctcagtaatcaatggcagggagtgattcgcagggcccagcagaggcgggggatcattgacagccagattcgccagtggcagcgctatagggagatggcagaaaagcttcgtaaatggttggttgaagtgtcctacctccccatgagtggtctcggaagtgttcctataccactgcaacaagcaaggaccctctttgatgaagtgcagttcaaagaaaaagtgtttctgcggcaacaaggcagctacatcctgactgtggaggctggcaagcaactccttctctcggcggacagtggcgctgaggccgccttgcaggccgaactcgctgaaatccaagagaaatggaaatcagccagcatgcggctggaagaacagaagaaaaaactagccttcttgttgaaagactgggaaaaatgtgagaaaggaatagcagattccctggagaaactacgaactttcaaaaagaagctttcgcagtctctcccggatcaccatgaagagctccatgcagaacaaatgcgttgcaaggaattagaaaatgcagttgggagctggacagatgacttgacccagttgagcctgctgaaggacaccctctctgcctatatcagtgctgatgatatctccattcttaatgaacgcgtagagcttctgcaaaggcagtgggaagaactatgccaccagctctccttaaggcggcagcaaataggtgaaagattgaatgaatgggcagtcttcagtgaaaagaacaaggaactctgtgagtggttgactcaaatggaaagcaaagtttctcagaatggagacattctcattgaagaaatgatagagaagctcaagaaggattatcaagaggaaattgctattgctcaagagaacaaaatacagctccaacaaatgggagaacgacttgctaaagccagccatgaaagcaaagcatctgagattgaatacaagctgggaaaggtcaacgaccggtggcagcatctcctggacctcattgcagccagggtgaagaagctgaaggagaccctggtagccgtgcagcagcttgataagaacatgagaagcctgaggacctggctcgctcacatcgagtcagagctggccaagccaatagtctacgattcctgtaactcggaagaaatacagagaaagcttaatgagcagcaggagcttcagagagacatagagaagcacagtacaggtgttgcatctgtcctcaacctgtgtgaagtcctgctgcacgactgtgacgcctgtgccactgatgccgagtgtgactctatacagcaggctacgagaaacctggaccggcggtggagaaacatttgtgctatgtccatggaaaggaggctgaaaatcgaagagacgtggcgattgtggcagaaatttctggatgactattcacgttttgaagattggctgaagtcttcagaaaggacagctgcttttcccagctcttctggggtgatctatacagttgccaaggaagaactaaagaaatttgaggctttccagcgacaggtccacgagtgcctgacgcagctggaactgatcaacaagcagtaccgccgcctggccagggagaaccgcactgattcagcatgtagcctcaaacagatggttcacgaaggcaaccagagatgggacaacctgcaaaagcgtgtcacctccatcttgcgcagactcaagcattttattggccagcgtgaggagtttgagactgcgcgggacagcattctggtctggctcacagagatggatctgcagctcactaatattgaacatttttctgagtgtgatgttcaagctaaaataaagcaactcaaggccttccagcaggaaatttcactgaaccacaataagattgagcagataattgcccaaggagaacagctgatagaaaagagtgagcccttggatgcagcgatcatcgaggaggaactagatgagctccgacggtactgccaggaggtcttcgggcgtgtggaaagataccataagaaactgatccgcctgcctctcccagacgatgagcacgacctctcagacagggagctggagctggaagactctgcagctctgtcggacctgcactggcacgaccgctctgcagacagcctgctttctccacagccttcctccaatctctccctctcgctcgctcagcccctccggagcgagcggtcaggacgagacaccccggctagtgtggactccatccccctggagtgggatcacgactatgacctcagtcgggacctggagtctgcaatgtccagagctctgccctctgaggatgaagaaggtcaggatgacaaagatttctacctccggggagctgttgncttatcaggggaccacagtgccctagagtcacagatccgacaactgggcaaagccctggatgatagccgctttcagatacagcaaaccgaaaatatcattcgcagcaaaactcccacggggccggagctagacaccagctacaaaggctacatgaaactgctgggcgaatgcagtagcagtatagactccgtgaagagactggagcacaaactgaaggaggaagaggagagccttcctggctttgttaacctgcatagtaccgaaacccaaacggctggtgtgattgaccgatgggagcttctccaggcccaggcattgagcaaggagttgaggatgaagcagaacctccagaagtggcagcagtttaactcagacttgaacagcatctgggcctggctgggggacacggaggaggagttggaacagctccagcgtctggaactcagcactgacatccagaccatcgagctccagatcaaaaagctcaaggagctccagaaagctgtggaccaccgcaaagccatcatcctctccatcaatctctgcagccctgagttcacccaggctgacagcaaggagagccgggacctgcaggatcgcttgtcgcagatgaatgggcgctgggaccgagtgtgctctctgctggaggagtggcggggcctgctgcaggatgccctgatgcagtgccagggtttccatgaaatgagccatggtttgcttcttatgctggagaacattgacagaaggaaaaatgaaattgtccctattgattctaaccttgatgcagagatacttcaggaccatcacaaacagcttatgcaaataaagcatgagctgttggaatcccaactcagagtagcctctttgcaagacatgtcttgccaactactggtgaatgctgaaggaacagactgtttagaagccaaagaaaaagtccatgttattggaaatcggctcaaacttctcttgaaggaggtcagtcgtcatatcaaggaactggagaagttattagacgtgtcaagtagtcagcaggatttgtcttcctggtcttctgctgatgaactggacacctcagggtctgtgagtcccacatcaggaaggagcaccccaaacagacagaaaacggtccacaaaaggtggctccgattcctccctttctgagccagggccaggtcggtccggccgcggcttcctgttcagagtcctccgagcagctcttccccttcagcttctcctgctcctcctcatcgggcttgcctgccttgtaccaatgtcagaggaagactacagctgtgccctctccaacaactttgcccggtcattccaccccatgctcagatacacgaatggccctcctccactctgaactaagcagatgccatctgcagaagtgctggtagcataaggaggatcgggtcataagcaatcccaaactaccaacaagaggaccttgatcttggcgaaagccctcggtgtggcagctttagccctcctccagatcacatgtgtgcaaattatggcttcagaggtggaagataaacagtgacgggggaacaaacagacaacaagaaggtttggaagaaatctggtttgagactctgaaccttagcactaaggagattgagtaaggacctccaaagttccccggactcatgaattctgggcccttggcccattctgtgcacagccaaggacttcagtagaccatctgggcagctttcccatggtgctgctccaaccatcagataaatgaccctcccaagcaccatgtcagtgtcgtacaatctaccaaccaaccagtgctgaagagattttagaaccttgtaacatacaatttttaagagcttatatggcagcttcctttttaccttgttttcctttggggcatgatgttttaacctttgctttagaagcacaagctgtaaatctaaaaggcacttttttttagaggtataaagaaaaactagatgtaataaataagatcatggaaggctttatgtgaaaaaagttgaatgttatagtaaaaaaaaaagatatttatgtatgtacagtttgctaaagccaagttttgtttgtattgatttctttgcatttattatagatattataaaatagtttgtctgtgcttttttttccctaaacaaataactctaagtttcattattaagcaggcactgatcagaatgcaacctaaatgatcatttttctgtgcaatgaatgaagctggaacattagtgtatattaaaggaaaaggatggcaagaggcagcatggatttagacatagaagaccccaggtgattcctttttttctcttccttccatagtcaatcaaatctcctgaattcttgtttccggaaacctttcatcctctattctcc

SEQ ID NO: 83376 - DNA, 1445 bp, Homo sapiens
ggggcagtgtcaatcaggaactgaaagattaagtgtcaatagtcacaggagcctcgtgtcttcgttgaatactggcactcagggtctgtgagtcccacatcaggaaggagcaccccaaacagacagaaaacgccacgaggcaagtgtagtctctcacagcctggaccctctgtcagcagtccacatagcaggtccacaaaaggtggctccgattcctccctttctgagccagggccaggtcggtccggccgcggcttcctgttcagagtcctccgagcagctcttccccttcagcttctcctgctcctcctcatcgggcttgcctgccttgtaccaatgtcagaggaagactacagctgtgccctctccaacaactttgcccggtcattccaccccatgctcagatacacgaatggccctcctccactctgaactaagcagatgccatctgcagaagtgctggtagcataaggaggatcgggtcataagcaatcccaaactaccaacaagaggaccttgatcttggcgaaagccctcggtgtggcagctttagccctcctccagatcacatgtgtgcaaattatggcttcagaggtggaagataaacagtgacgggggaacaaacagacaacaagaaggtttggaagaaatctggtttgagactctgaaccttagcactaaggagattgagtaaggacctccaaagttccccggactcatgaattctgggcccttggcccattctgtgcacagccaaggacttcagtagaccatctgggcagctttcccatggtgctgctccaaccatcagataaatgaccctcccaagcaccatgtcagtgtcgtacaatctaccaaccaaccagtgctgaagagattttagaaccttgtaacatacaatttttaagagcttatatggcagcttcctttttaccttgttttcctttggggcatgatgttttaacctttgctttagaagcacaagctgtaaatctaaaaggcacttttttttagaggtataaagaaaaactagatgtaataaataagatcatggaaggctttatgtgaaaaaagttgaatgttatagtaaaaaaaaaagatatttatgtatgtacagtttgctaaagccaagttttgtttgtattgatttctttgcatttattatagatattataaaatagtttgtctgtgcttttttttccctaaacaaataactctaagtttcattattaagcaggcactgatcagaatgcaacctaaatgatcatttttctgtgcaatgaatgaagctggaacattagtgtatattaaaggaaaaggatggcaagaggcagcatggatttagacatagaagaccccaggtgattcctttttttctcttccttccatagtcaatcaaatctcctgaattcttgtttccggaaacctttcatcctctattctcc

SEQ ID NO: 83377 - DNA, 1310 bp, Homo sapiens
gtaagaggaaagatccgtttttctcatattttccacacaaaaagaggctgaggggcgtccacaaaaggtggctccgattcctccctttctgagccagggccaggtcggtccggccgcggcttcctgttcagagtcctccgagcagctcttccccttcagcttctcctgctcctcctcatcgggcttgcctgccttgtaccaatgtcagaggaagactacagctgtgccctctccaacaactttgcccggtcattccaccccatgctcagatacacgaatggccctcctccactctgaactaagcagatgccatctgcagaagtgctggtagcataaggaggatcgggtcataagcaatcccaaactaccaacaagaggaccttgatcttggcgaaagccctcggtgtggcagctttagccctcctccagatcacatgtgtgcaaattatggcttcagaggtggaagataaacagtgacgggggaacaaacagacaacaagaaggtttggaagaaatctggtttgagactctgaaccttagcactaaggagattgagtaaggacctccaaagttccccggactcatgaattctgggcccttggcccattctgtgcacagccaaggacttcagtagaccatctgggcagctttcccatggtgctgctccaaccatcagataaatgaccctcccaagcaccatgtcagtgtcgtacaatctaccaaccaaccagtgctgaagagattttagaaccttgtaacatacaatttttaagagcttatatggcagcttcctttttaccttgttttcctttggggcatgatgttttaacctttgctttagaagcacaagctgtaaatctaaaaggcacttttttttagaggtataaagaaaaactagatgtaataaataagatcatggaaggctttatgtgaaaaaagttgaatgttatagtaaaaaaaaaagatatttatgtatgtacagtttgctaaagccaagttttgtttgtattgatttctttgcatttattatagatattataaaatagtttgtctgtgcttttttttccctaaacaaataactctaagtttcattattaagcaggcactgatcagaatgcaacctaaatgatcatttttctgtgcaatgaatgaagctggaacattagtgtatattaaaggaaaaggatggcaagaggcagcatggatttagacatagaagaccccaggtgattcctttttttctcttccttccatagtcaatcaaatctcctgaattcttgtttccggaaacctttcatcctctattctcc

SEQ ID NO: 83378 - DNA, 5257 bp, Homo sapiens
  misc_feature (3271)..(3271): n is a, c, g, or t
ccagcaaggccctacttcagctttggcaaagatacaaggactactccaaacagtgtgcttcgacagttcagcagcaggaggatcgaaccaatgagctgttgaaggcagccacaaacaaggacattgccgatgatgaggttgccacatggattcaagattgcaacgacctcctcaaaggactgggcacagttaaagattccctctttgttctccatgagctgggagagcaactgaagcaacaagtggatgcttccgcagcatcagctattcaatcggatcaactctctttgagtcaacacttgtgtgccctggagcaagctctctgcaaacagcagacttcattacaggctggagttcttgattatgaaacctttgccaagagtttagaagctttggaggcctggatagtggaagctgaagaaatactacaagggcaggaccctagccactcatctgacctctccacaatccaggaaaggatggaagaacttaagggacagatgttaaaattcagcagcatggctccagatttagaccgtctaaatgagcttggatataggttacccttgaatgataaggaaatcaaaagaatgcagaatctgaaccgccattggtctctgatctcctctcagactacagaaagattcagcaagttgcagtcatttttgctacaacatcagactttcttggaaaaatgtgaaacatggatggaattcctagttcagacagaacaaaagttagcagtagagatttcaggaaattatcagcaccttttggaacagcagagagcacacgagttgtttcaagccgagatgttcagtcgtcagcagattttgcactcaatcattattgatgggcaacgtcttctagaacaaggtcaagttgatgacagggatgaattcaacctgaaattgacactcctcagtaatcaatggcagggagtgattcgcagggcccagcagaggcgggggatcattgacagccagattcgccagtggcagcgctatagggagatggcagaaaagcttcgtaaatggttggttgaagtgtcctacctccccatgagtggtctcggaagtgttcctataccactgcaacaagcaaggaccctctttgatgaagtgcagttcaaagaaaaagtgtttctgcggcaacaaggcagctacatcctgactgtggaggctggcaagcaactccttctctcggcggacagtggcgctgaggccgccttgcaggccgaactcgctgaaatccaagagaaatggaaatcagccagcatgcggctggaagaacagaagaaaaaactagccttcttgttgaaagactgggaaaaatgtgagaaaggaatagcagattccctggagaaactacgaactttcaaaaagaagctttcgcagtctctcccggatcaccatgaagagctccatgcagaacaaatgcgttgcaaggaattagaaaatgcagttgggagctggacagatgacttgacccagttgagcctgctgaaggacaccctctctgcctatatcagtgctgatgatatctccattcttaatgaacgcgtagagcttctgcaaaggcagtgggaagaactatgccaccagctctccttaaggcggcagcaaataggtgaaagattgaatgaatgggcagtcttcagtgaaaagaacaaggaactctgtgagtggttgactcaaatggaaagcaaagtttctcagaatggagacattctcattgaagaaatgatagagaagctcaagaaggattatcaagaggaaattgctattgctcaagagaacaaaatacagctccaacaaatgggagaacgacttgctaaagccagccatgaaagcaaagcatctgagattgaatacaagctgggaaaggtcaacgaccggtggcagcatctcctggacctcattgcagccagggtgaagaagctgaaggagaccctggtagccgtgcagcagcttgataagaacatgagaagcctgaggacctggctcgctcacatcgagtcagagctggccaagccaatagtctacgattcctgtaactcggaagaaatacagagaaagcttaatgagcagcaggagcttcagagagacatagagaagcacagtacaggtgttgcatctgtcctcaacctgtgtgaagtcctgctgcacgactgtgacgcctgtgccactgatgccgagtgtgactctatacagcaggctacgagaaacctggaccggcggtggagaaacatttgtgctatgtccatggaaaggaggctgaaaatcgaagagacgtggcgattgtggcagaaatttctggatgactattcacgttttgaagattggctgaagtcttcagaaaggacagctgcttttcccagctcttctggggtgatctatacagttgccaaggaagaactaaagaaatttgaggctttccagcgacaggtccacgagtgcctgacgcagctggaactgatcaacaagcagtaccgccgcctggccagggagaaccgcactgattcagcatgtagcctcaaacagatggttcacgaaggcaaccagagatgggacaacctgcaaaagcgtgtcacctccatcttgcgcagactcaagcattttattggccagcgtgaggagtttgagactgcgcgggacagcattctggtctggctcacagagatggatctgcagctcactaatattgaacatttttctgagtgtgatgttcaagctaaaataaagcaactcaaggccttccagcaggaaatttcactgaaccacaataagattgagcagataattgcccaaggagaacagctgatagaaaagagtgagcccttggatgcagcgatcatcgaggaggaactagatgagctccgacggtactgccaggaggtcttcgggcgtgtggaaagataccataagaaactgatccgcctgcctctcccagacgatgagcacgacctctcagacagggagctggagctggaagactctgcagctctgtcggacctgcactggcacgaccgctctgcagacagcctgctttctccacagccttcctccaatctctccctctcgctcgctcagcccctccggagcgagcggtcaggacgagacaccccggctagtgtggactccatccccctggagtgggatcacgactatgacctcagtcgggacctggagtctgcaatgtccagagctctgccctctgaggatgaagaaggtcaggatgacaaagatttctacctccggggagctgttgncttatcaggggaccacagtgccctagagtcacagatccgacaactgggcaaagccctggatgatagccgctttcagatacagcaaaccgaaaatatcattcgcagcaaaactcccacggggccggagctagacaccagctacaaaggctacatgaaactgctgggcgaatgcagtagcagtatagactccgtgaagagactggagcacaaactgaaggaggaagaggagagccttcctggctttgttaacctgcatagtaccgaaacccaaacggctggtgtgattgaccgatgggagcttctccaggcccaggcattgagcaaggagttgaggatgaagcagaacctccagaagtggcagcagtttaactcagacttgaacagcatctgggcctggctgggggacacggaggaggagttggaacagctccagcgtctggaactcagcactgacatccagaccatcgagctccagatcaaaaagctcaaggagctccagaaagctgtggaccaccgcaaagccatcatcctctccatcaatctctgcagccctgagttcacccaggctgacagcaaggagagccgggacctgcaggatcgcttgtcgcagatgaatgggcgctgggaccgagtgtgctctctgctggaggagtggcggggcctgctgcaggatgccctgatgcagtgccagggtttccatgaaatgagccatggtttgcttcttatgctggagaacattgacagaaggaaaaatgaaattgtccctattgattctaaccttgatgcagagatacttcaggaccatcacaaacagcttatgcaaataaagcatgagctgttggaatcccaactcagagtagcctctttgcaagacatgtcttgccaactactggtgaatgctgaaggaacagactgtttagaagccaaagaaaaagtccatgttattggaaatcggctcaaacttctcttgaaggaggtcagtcgtcatatcaaggaactggagaagttattagacgtgtcaagtagtcagcaggatttgtcttcctggtcttctgctgatgaactggacacctcagggtctgtgagtcccacatcaggaaggagcaccccaaacagacagaaaacgaagtgctggtagcataaggaggatcgggtcataagcaatcccaaactaccaacaagaggaccttgatcttggcgaaagccctcggtgtggcagctttagccctcctccagatcacatgtgtgcaaattatggcttcagaggtggaagataaacagtgacgggggaacaaacagacaacaagaaggtttggaagaaatctggtttgagactctgaaccttagcactaaggagattgagtaaggacctccaaagttccccggactcatgaattctgggcccttggcccattctgtgcacagccaaggacttcagtagaccatctgggcagctttcccatggtgctgctccaaccatcagataaatgaccctcccaagcaccatgtcagtgtcgtacaatctaccaaccaaccagtgctgaagagattttagaaccttgtaacatacaatttttaagagcttatatggcagcttcctttttaccttgttttcctttggggcatgatgttttaacctttgctttagaagcacaagctgtaaatctaaaaggcacttttttttagaggtataaagaaaaactagatgtaataaataagatcatggaaggctttatgtgaaaaaagttgaatgttatagtaaaaaaaaaagatattatgattggcacgctgttaagccaagttgttggatgagtctctgcattatatagaatataacataataaaataaaaaaaacctgagggggcccgacccattgcgtatggagcggttcaataactgccgcttacaacccgactggaaacctgggtaccaactaacgctgtacataccctttccaggtggaaacaaaagccgaccatgccttc

SEQ ID NO: 83379 - DNA, 4489 bp, Homo sapiens
  misc_feature (3271)..(3271): n is a, c, g, or t
  misc_feature (4451)..(4451): n is a, c, g, or t
ccagcaaggccctacttcagctttggcaaagatacaaggactactccaaacagtgtgcttcgacagttcagcagcaggaggatcgaaccaatgagctgttgaaggcagccacaaacaaggacattgccgatgatgaggttgccacatggattcaagattgcaacgacctcctcaaaggactgggcacagttaaagattccctctttgttctccatgagctgggagagcaactgaagcaacaagtggatgcttccgcagcatcagctattcaatcggatcaactctctttgagtcaacacttgtgtgccctggagcaagctctctgcaaacagcagacttcattacaggctggagttcttgattatgaaacctttgccaagagtttagaagctttggaggcctggatagtggaagctgaagaaatactacaagggcaggaccctagccactcatctgacctctccacaatccaggaaaggatggaagaacttaagggacagatgttaaaattcagcagcatggctccagatttagaccgtctaaatgagcttggatataggttacccttgaatgataaggaaatcaaaagaatgcagaatctgaaccgccattggtctctgatctcctctcagactacagaaagattcagcaagttgcagtcatttttgctacaacatcagactttcttggaaaaatgtgaaacatggatggaattcctagttcagacagaacaaaagttagcagtagagatttcaggaaattatcagcaccttttggaacagcagagagcacacgagttgtttcaagccgagatgttcagtcgtcagcagattttgcactcaatcattattgatgggcaacgtcttctagaacaaggtcaagttgatgacagggatgaattcaacctgaaattgacactcctcagtaatcaatggcagggagtgattcgcagggcccagcagaggcgggggatcattgacagccagattcgccagtggcagcgctatagggagatggcagaaaagcttcgtaaatggttggttgaagtgtcctacctccccatgagtggtctcggaagtgttcctataccactgcaacaagcaaggaccctctttgatgaagtgcagttcaaagaaaaagtgtttctgcggcaacaaggcagctacatcctgactgtggaggctggcaagcaactccttctctcggcggacagtggcgctgaggccgccttgcaggccgaactcgctgaaatccaagagaaatggaaatcagccagcatgcggctggaagaacagaagaaaaaactagccttcttgttgaaagactgggaaaaatgtgagaaaggaatagcagattccctggagaaactacgaactttcaaaaagaagctttcgcagtctctcccggatcaccatgaagagctccatgcagaacaaatgcgttgcaaggaattagaaaatgcagttgggagctggacagatgacttgacccagttgagcctgctgaaggacaccctctctgcctatatcagtgctgatgatatctccattcttaatgaacgcgtagagcttctgcaaaggcagtgggaagaactatgccaccagctctccttaaggcggcagcaaataggtgaaagattgaatgaatgggcagtcttcagtgaaaagaacaaggaactctgtgagtggttgactcaaatggaaagcaaagtttctcagaatggagacattctcattgaagaaatgatagagaagctcaagaaggattatcaagaggaaattgctattgctcaagagaacaaaatacagctccaacaaatgggagaacgacttgctaaagccagccatgaaagcaaagcatctgagattgaatacaagctgggaaaggtcaacgaccggtggcagcatctcctggacctcattgcagccagggtgaagaagctgaaggagaccctggtagccgtgcagcagcttgataagaacatgagaagcctgaggacctggctcgctcacatcgagtcagagctggccaagccaatagtctacgattcctgtaactcggaagaaatacagagaaagcttaatgagcagcaggagcttcagagagacatagagaagcacagtacaggtgttgcatctgtcctcaacctgtgtgaagtcctgctgcacgactgtgacgcctgtgccactgatgccgagtgtgactctatacagcaggctacgagaaacctggaccggcggtggagaaacatttgtgctatgtccatggaaaggaggctgaaaatcgaagagacgtggcgattgtggcagaaatttctggatgactattcacgttttgaagattggctgaagtcttcagaaaggacagctgcttttcccagctcttctggggtgatctatacagttgccaaggaagaactaaagaaatttgaggctttccagcgacaggtccacgagtgcctgacgcagctggaactgatcaacaagcagtaccgccgcctggccagggagaaccgcactgattcagcatgtagcctcaaacagatggttcacgaaggcaaccagagatgggacaacctgcaaaagcgtgtcacctccatcttgcgcagactcaagcattttattggccagcgtgaggagtttgagactgcgcgggacagcattctggtctggctcacagagatggatctgcagctcactaatattgaacatttttctgagtgtgatgttcaagctaaaataaagcaactcaaggccttccagcaggaaatttcactgaaccacaataagattgagcagataattgcccaaggagaacagctgatagaaaagagtgagcccttggatgcagcgatcatcgaggaggaactagatgagctccgacggtactgccaggaggtcttcgggcgtgtggaaagataccataagaaactgatccgcctgcctctcccagacgatgagcacgacctctcagacagggagctggagctggaagactctgcagctctgtcggacctgcactggcacgaccgctctgcagacagcctgctttctccacagccttcctccaatctctccctctcgctcgctcagcccctccggagcgagcggtcaggacgagacaccccggctagtgtggactccatccccctggagtgggatcacgactatgacctcagtcgggacctggagtctgcaatgtccagagctctgccctctgaggatgaagaaggtcaggatgacaaagatttctacctccggggagctgttgncttatcaggggaccacagtgccctagagtcacagatccgacaactgggcaaagccctggatgatagccgctttcagatacagcaaaccgaaaatatcattcgcagcaaaactcccacggggccggagctagacaccagctacaaaggctacatgaaactgctgggcgaatgcagtagcagtatagactccgtgaagagactggagcacaaactgaaggaggaagaggagagccttcctggctttgttaacctgcatagtaccgaaacccaaacggctggtgtgattgaccgatgggagcttctccaggcccaggcattgagcaaggagttgaggatgaagcagaacctccagaagtggcagcagtttaactcagacttgaacagcatctgggcctggctgggggacacggaggaggagttggaacagctccagcgtctggaactcagcactgacatccagaccatcgagctccagatcaaaaagctcaaggagctccagaaagctgtggaccaccgcaaagccatcatcctctccatcaatctctgcagccctgagttcacccaggctgacagcaaggagagccgggacctgcaggatcgcttgtcgcagatgaatgggcgctgggaccgagtgtgctctctgctggaggagtggcggggcctgctgcaggatgccctgatgcagtgccagggtttccatgaaatgagccatggtttgcttcttatgctggagaacattgacagaaggaaaaatgaaattgtccctattgattctaaccttgatgcagagatacttcaggaccatcacaaacagcttatgcaaataaagcatgagctgttggaatcccaactcagagtagcctctttgcaagacatgtcttgccaactactggtgaatgctgaaggaacagactgtttagaagccaaagaaaaagtccatgttattggaaatcggctcaaacttctcttgaaggaggtcagtcgtcatatcaaggaactggagaagttattagacgtgtcaagtagtcagcaggatttgtcttcctggtcttctgctgatgaactggacacctcagggtctgtgagtcccacatcaggaaggagcaccccaaacagacagaaaacgcagacagcgccacgaggctctttctctgcaagatggttgcagagccattctggnacgaggtggcggccttggggaggcggtggatgactgcc

SEQ ID NO: 83380 - DNA, 4041 bp, Homo sapiens
  misc_feature (3271)..(3271): n is a, c, g, or t
ccagcaaggccctacttcagctttggcaaagatacaaggactactccaaacagtgtgcttcgacagttcagcagcaggaggatcgaaccaatgagctgttgaaggcagccacaaacaaggacattgccgatgatgaggttgccacatggattcaagattgcaacgacctcctcaaaggactgggcacagttaaagattccctctttgttctccatgagctgggagagcaactgaagcaacaagtggatgcttccgcagcatcagctattcaatcggatcaactctctttgagtcaacacttgtgtgccctggagcaagctctctgcaaacagcagacttcattacaggctggagttcttgattatgaaacctttgccaagagtttagaagctttggaggcctggatagtggaagctgaagaaatactacaagggcaggaccctagccactcatctgacctctccacaatccaggaaaggatggaagaacttaagggacagatgttaaaattcagcagcatggctccagatttagaccgtctaaatgagcttggatataggttacccttgaatgataaggaaatcaaaagaatgcagaatctgaaccgccattggtctctgatctcctctcagactacagaaagattcagcaagttgcagtcatttttgctacaacatcagactttcttggaaaaatgtgaaacatggatggaattcctagttcagacagaacaaaagttagcagtagagatttcaggaaattatcagcaccttttggaacagcagagagcacacgagttgtttcaagccgagatgttcagtcgtcagcagattttgcactcaatcattattgatgggcaacgtcttctagaacaaggtcaagttgatgacagggatgaattcaacctgaaattgacactcctcagtaatcaatggcagggagtgattcgcagggcccagcagaggcgggggatcattgacagccagattcgccagtggcagcgctatagggagatggcagaaaagcttcgtaaatggttggttgaagtgtcctacctccccatgagtggtctcggaagtgttcctataccactgcaacaagcaaggaccctctttgatgaagtgcagttcaaagaaaaagtgtttctgcggcaacaaggcagctacatcctgactgtggaggctggcaagcaactccttctctcggcggacagtggcgctgaggccgccttgcaggccgaactcgctgaaatccaagagaaatggaaatcagccagcatgcggctggaagaacagaagaaaaaactagccttcttgttgaaagactgggaaaaatgtgagaaaggaatagcagattccctggagaaactacgaactttcaaaaagaagctttcgcagtctctcccggatcaccatgaagagctccatgcagaacaaatgcgttgcaaggaattagaaaatgcagttgggagctggacagatgacttgacccagttgagcctgctgaaggacaccctctctgcctatatcagtgctgatgatatctccattcttaatgaacgcgtagagcttctgcaaaggcagtgggaagaactatgccaccagctctccttaaggcggcagcaaataggtgaaagattgaatgaatgggcagtcttcagtgaaaagaacaaggaactctgtgagtggttgactcaaatggaaagcaaagtttctcagaatggagacattctcattgaagaaatgatagagaagctcaagaaggattatcaagaggaaattgctattgctcaagagaacaaaatacagctccaacaaatgggagaacgacttgctaaagccagccatgaaagcaaagcatctgagattgaatacaagctgggaaaggtcaacgaccggtggcagcatctcctggacctcattgcagccagggtgaagaagctgaaggagaccctggtagccgtgcagcagcttgataagaacatgagaagcctgaggacctggctcgctcacatcgagtcagagctggccaagccaatagtctacgattcctgtaactcggaagaaatacagagaaagcttaatgagcagcaggagcttcagagagacatagagaagcacagtacaggtgttgcatctgtcctcaacctgtgtgaagtcctgctgcacgactgtgacgcctgtgccactgatgccgagtgtgactctatacagcaggctacgagaaacctggaccggcggtggagaaacatttgtgctatgtccatggaaaggaggctgaaaatcgaagagacgtggcgattgtggcagaaatttctggatgactattcacgttttgaagattggctgaagtcttcagaaaggacagctgcttttcccagctcttctggggtgatctatacagttgccaaggaagaactaaagaaatttgaggctttccagcgacaggtccacgagtgcctgacgcagctggaactgatcaacaagcagtaccgccgcctggccagggagaaccgcactgattcagcatgtagcctcaaacagatggttcacgaaggcaaccagagatgggacaacctgcaaaagcgtgtcacctccatcttgcgcagactcaagcattttattggccagcgtgaggagtttgagactgcgcgggacagcattctggtctggctcacagagatggatctgcagctcactaatattgaacatttttctgagtgtgatgttcaagctaaaataaagcaactcaaggccttccagcaggaaatttcactgaaccacaataagattgagcagataattgcccaaggagaacagctgatagaaaagagtgagcccttggatgcagcgatcatcgaggaggaactagatgagctccgacggtactgccaggaggtcttcgggcgtgtggaaagataccataagaaactgatccgcctgcctctcccagacgatgagcacgacctctcagacagggagctggagctggaagactctgcagctctgtcggacctgcactggcacgaccgctctgcagacagcctgctttctccacagccttcctccaatctctccctctcgctcgctcagcccctccggagcgagcggtcaggacgagacaccccggctagtgtggactccatccccctggagtgggatcacgactatgacctcagtcgggacctggagtctgcaatgtccagagctctgccctctgaggatgaagaaggtcaggatgacaaagatttctacctccggggagctgttgncttatcaggggaccacagtgccctagagtcacagatccgacaactgggcaaagccctggatgatagccgctttcagatacagcaaaccgaaaatatcattcgcagcaaaactcccacggggccggagctagacaccagctacaaaggctacatgaaactgctgggcgaatgcagtagcagtatagactccgtgaagagactggagcacaaactgaaggaggaagaggagagccttcctggctttgttaacctgcatagtaccgaaacccaaacggctggtgtgattgaccgatgggagcttctccaggcccaggcattgagcaaggagttgaggatgaagcagaacctccagaagtggcagcagtttaactcagacttgaacagcatctgggcctggctgggggacacggaggaggagttggaacagctccagcgtctggaactcagcactgacatccagaccatcgagctccagatcaaaaagctcaaggtagctgccccttgcctttcccacggcggacaaacagagagccaccgcgtgaacgaccgtgcagatggcacctctagttcgagctgctcttacacagcagcagaaaagggatctaacaaaaatgagtgagaatgctctcctcacctccagccatcccaaattcctgtattccacaaagatggttttcttttttttcttttctttctttctttctttctttctctctcattccttccttccttcttttttttctttctttctccttctttccttccttcct

SEQ ID NO: 83381 - DNA, 1834 bp, Homo sapiens
  misc_feature (1798)..(1798): n is a, c, g, or t
  misc_feature (1818)..(1818): n is a, c, g, or t
ccagcaaggccctacttcagctttggcaaagatacaaggactactccaaacagtgtgcttcgacagttcagcagcaggaggatcgaaccaatgagctgttgaaggcagccacaaacaaggacattgccgatgatgaggttgccacatggattcaagattgcaacgacctcctcaaaggactgggcacagttaaagattccctctttgttctccatgagctgggagagcaactgaagcaacaagtggatgcttccgcagcatcagctattcaatcggatcaactctctttgagtcaacacttgtgtgccctggagcaagctctctgcaaacagcagacttcattacaggctggagttcttgattatgaaacctttgccaagagtttagaagctttggaggcctggatagtggaagctgaagaaatactacaagggcaggaccctagccactcatctgacctctccacaatccaggaaaggatggaagaacttaagggacagatgttaaaattcagcagcatggctccagatttagaccgtctaaatgagcttggatataggttacccttgaatgataaggaaatcaaaagaatgcagaatctgaaccgccattggtctctgatctcctctcagactacagaaagattcagcaagttgcagtcatttttgctacaacatcagactttcttggaaaaatgtgaaacatggatggaattcctagttcagacagaacaaaagttagcagtagagatttcaggaaattatcagcaccttttggaacagcagagagcacacgagttgtttcaagccgagatgttcagtcgtcagcagattttgcactcaatcattattgatgggcaacgtcttctagaacaaggtcaagttgatgacagggatgaattcaacctgaaattgacactcctcagtaatcaatggcagggagtgattcgcagggcccagcagaggcgggggatcattgacagccagattcgccagtggcagcgctatagggagatggcagaaaagcttcgtaaatggttggttgaagtgtcctacctccccatgagtggtctcggaagtgttcctataccactgcaacaagcaaggaccctctttgatgaagtgcagttcaaagaaaaagtgtttctgcggcaacaaggcagctacatcctgactgtggaggctggcaagcaactccttctctcggcggacagtggcgctgaggccgccttgcaggccgaactcgctgaaatccaagagaaatggaaatcagccagcatgcggctggaagaacagaagaaaaaactagccttcttgttgaaagactgggaaaaatgtgagaaaggaatagcagattccctggagaaactacgaactttcaaaaagaagctttcgcagtctctcccggatcaccatgaagagctccatgcagaacaaatgcgttgcaaggaattagaaaatgcagttgggagctggacagatgacttgacccagttgagcctgctgaaggacaccctctctgcctatatcagtgctgatgatatctccattcttaatgaacgcgtagagcttctgcaaaggcagtgggaagaactatgccaccagctctccttaaggcggcagcaaataggtgaaagattgaatgaatgggcagtcttcagtgaaaagaacaaggaactctgtgagtggttgactcaaatggaaagcaaagtttctcagaatggagacattctcattgaagaaatgatagagaagctcaagaaggatttcaagaggaactggttatgctcaagagacanattccagtttttcctctagnttttctggtcctcctg

SEQ ID NO: 83382 - DNA, 551 bp, Homo sapiens
aaggactactccaaacagtgtgcttcgacagttcagcagcaggaggatcgaaccaatgagctgttgaaggcagccacaaacaaggacattgccgatgatgaggttgccacatggattcaagattgcaacgtatgttcaggagctaccttgttttccccacatgcccttcttagactgcccaagtttagcttttggtctgtgtaagctttggtatgtctttctatgtgagacagttacccaaaaataactgtcttaggatcaaagagcctgcctgattttcagaacacaggtgcacatgcatcagactaagaggtctcctcccattgttttattttttaaaatgagttgttttcccatttttcctagtggaatttagtcaatgtgaaagattgaggctctttgtgttttctagggtggtcaatataagacatgaccatatggggaatagtgttctatctttaaaaaatcttctgttccagatgttgtccatttacattcattaactcctatgtaagcatctacacaatagtttcatctaagatattaatggt

SEQ ID NO: 83383 - DNA, 388 bp, Homo sapiens
catgggtactgatcatttcatttgatttatttttcctttgctgcacttttagtttaattttcattagtagcttgtctttatttgcctggactgaacattcttctttctttaccccctgttcattgcaaacagccacgaggcaagtgtagtctctcacagcctggaccctctgtcagcagtccacatagcaggtacctccttctcctggtttccacactgttctagaaccccaagaggatgatgaaaattgtccatgacttaggttgacctatatctggtctgcctcagggtagttgggaaattactcatttcagtccacaccctttcctcatacattggaagagaagtttctgaatgaaatgttcaagtaaatttcagagcataaaat

SEQ ID NO: 83384 - DNA, 570 bp, Homo sapiens
ccagcaaggccctacttcagctttggcaaagatacaaggactactccaaacagtgtgcttcgacagttcagcagcaggaggatcgaaccaatgagctgttgaaggcagccacaaacaaggacattgccgatgatgaggttgccacatggattcaagattgcaacgacctcctcaaaggactgggcacagttaaagattccctctttgttctccatgagctgggagagcaactgaagcaacaagtggatgcttccgcagcatcagctattcaatcggatcaactctctttgagtcaacacttgtgtgccctggagcaagctctctgcaaacagcagacttcattacaggctggagttcttgattatgaaacctttgccaagagtttagaagctttggaggcctggatagtggaagctgaagaaatactacaagggcaggaccctagccactcatctgacctctccacaatccaggaaaggatggaagaacttaagggacagatgttaaaattcagcagcatggctccagatttagaccgtctaggcgtaatcggtaccgagctcgattcta

SEQ ID NO: 83385 - DNA, 3560 bp, Homo sapiens
  misc_feature (1121)..(1121): n is a, c, g, or t
accgtgtccataccccttcgtgggatacgactaataactcagtcgggacctggagtctgcaatgtacagtgctctgccctctgaggatgaagaaggtcaggatgacaaagatttctacctccggggagctgttggcttatcaggggaccacagtgccctagagtcacagattcgacaactgggcaaagccctggatgatagccgctttcagagacagctgcttttcccagctcttctggggtgatctatacagttgccaaggaagaactaaagaaatttgaggctttccagcgacaggtccacgagtgcctgacgcagctggaactgatcaacaagcagtaccgccgcctggccagggagaaccgcactgattcagcatgtagcctcaaacagatggttcacgaaggcaaccagagatgggacaacctgcaaaagcgtgtcacctccatcttgcgcagactcaagcattttattggccagcgtgaggagtttgagactgcgcgggacagcattctggtctggctcacagagatggatctgcagctcactaatattgaacatttttctgagtgtgatgttcaagctaaaataaagcaactcaaggccttccagcaggaaatttcactgaaccacaataagattgagcagataattgcccaaggagaacagctgatagaaaagagtgagcccttggatgcagcgatcatcgaggaggaactagatgagctccgacggtactgccaggaggtcttcgggcgtgtggaaagataccataagaaactgatccgcctgcctctcccagacgatgagcacgacctctcagacagggagctggagctggaagactctgcagctctgtcggacctgcactggcacgaccgctctgcagacagcctgctttctccacagccttcctccaatctctccctctcgctcgctcagcccctccggagcgagcggtcaggacgagacaccccggctagtgtggactccatccccctggagtgggatcacgactatgacctcagtcgggacctggagtctgcaatgtccagagctctgccctctgaggatgaagaaggtcaggatgacaaagatttctacctccggggagctgttgncttatcaggggaccacagtgccctagagtcacagatccgacaactgggcaaagccctggatgatagccgctttcagatacagcaaaccgaaaatatcattcgcagcaaaactcccacggggccggagctagacaccagctacaaaggctacatgaaactgctgggcgaatgcagtagcagtatagactccgtgaagagactggagcacaaactgaaggaggaagaggagagccttcctggctttgttaacctgcatagtaccgaaacccaaacggctggtgtgattgaccgatgggagcttctccaggcccaggcattgagcaaggagttgaggatgaagcagaacctccagaagtggcagcagtttaactcagacttgaacagcatctgggcctggctgggggacacggaggaggagttggaacagctccagcgtctggaactcagcactgacatccagaccatcgagctccagatcaaaaagctcaaggagctccagaaagctgtggaccaccgcaaagccatcatcctctccatcaatctctgcagccctgagttcacccaggctgacagcaaggagagccgggacctgcaggatcgcttgtcgcagatgaatgggcgctgggaccgagtgtgctctctgctggaggagtggcggggcctgctgcaggatgccctgatgcagtgccagggtttccatgaaatgagccatggtttgcttcttatgctggagaacattgacagaaggaaaaatgaaattgtccctattgattctaaccttgatgcagagatacttcaggaccatcacaaacagcttatgcaaataaagcatgagctgttggaatcccaactcagagtagcctctttgcaagacatgtcttgccaactactggtgaatgctgaaggaacagactgtttagaagccaaagaaaaagtccatgttattggaaatcggctcaaacttctcttgaaggaggtcagtcgtcatatcaaggaactggagaagttattagacgtgtcaagtagtcagcaggatttgtcttcctggtcttctgctgatgaactggacacctcagggtctgtgagtcccacatcaggaaggagcaccccaaacagacagaaaacgccacgaggcaagtgtagtctctcacagcctggaccctctgtcagcagtccacatagcaggtccacaaaaggtggctccgattcctccctttctgagccagggccaggtcggtccggccgcggcttcctgttcagagtcctccgagcagctcttccccttcagcttctcctgctcctcctcatcgggcttgcctgccttgtaccaatgtcagaggaagactacagctgtgccctctccaacaactttgcccggtcattccaccccatgctcagatacacgaatggccctcctccactctgaactaagcagatgccatctgcagaagtgctggtagcataaggaggatcgggtcataagcaatcccaaactaccaacaagaggaccttgatcttggcgaaagccctcggtgtggcagctttagccctcctccagatcacatgtgtgcaaattatggcttcagaggtggaagataaacagtgacgggggaacaaacagacaacaagaaggtttggaagaaatctggtttgagactctgaaccttagcactaaggagattgagtaaggacctccaaagttccccggactcatgaattctgggcccttggcccattctgtgcacagccaaggacttcagtagaccatctgggcagctttcccatggtgctgctccaaccatcagataaatgaccctcccaagcaccatgtcagtgtcgtacaatctaccaaccaaccagtgctgaagagattttagaaccttgtaacatacaatttttaagagcttatatggcagcttcctttttaccttgttttcctttggggcatgatgttttaacctttgctttagaagcacaagctgtaaatctaaaaggcacttttttttagaggtataaagaaaaactagatgtaataaataagatcatggaaggctttatgtgaaaaaagttgaatgttatagtaaaaaaaaaagatatttatgtatgtacagtttgctaaagccaagttttgtttgtattgatttctttgcatttattatagatattataaaatagtttgtctgtgcttttttttccctaaacaaataactctaagtttcattattaagcaggcactgatcagaatgcaacctaaatgatcatttttctgtgcaatgaatgaagctggaacattagtgtatattaaaggaaaaggatggcaagaggcagcatggatttagacatagaagaccccaggtgattcctttttttctcttccttccatagtcaatcaaatctcctgaattcttgtttccggaaacctttcatcctctattctcc

SEQ ID NO: 83386 - DNA, 2098 bp, Homo sapiens
tggaactgcatttttacttcactttgacctctggcatcaagctgtgaatgacgaatcaccccttttttttttcaaatcttgactagatatcagaggatacctagacatacttctgcttcgctatatttaatgttgtgcttttctgtttaaaagattatcttacatctcacttgcatactaatctatattttaattactgtcatatatacattaactaatttgaaccttccaataatactgtggaccaggcatcaaatcaaactgagatcagagacggtcaggggtcttatagaatatttttggcagaggcaggattagaactcaggccgtgagctgctgcatcctttagtgtgtgagctccacgtttgatgctcaggtataatttcccaccaagttaagttgattgcattctgcacttttggagcttttgccaattatcaaaaatgcttagaaaaattaatttgtttttgtatgcatagcaaataaagcatgagctgttggaatcccaactcagagtagcctctttgcaagacatgtcttgccaactactggtgaatgctgaaggaacagactgtttagaagccaaagaaaaagtccatgttattggaaatcggctcaaacttctcttgaaggaggtcagtcgtcatatcaaggaactggagaagttattagacgtgtcaagtagtcagcaggatttgtcttcctggtcttctgctgatgaactggacacctcagggtctgtgagtcccacatcaggaaggagcaccccaaacagacagaaaacgccacgaggcaagtgtagtctctcacagcctggaccctctgtcagcagtccacatagcaggtccacaaaaggtggctccgattcctccctttctgagccagggccaggtcggtccggccgcggcttcctgttcagagtcctccgagcagctcttccccttcagcttctcctgctcctcctcatcgggcttgcctgccttgtaccaatgtcagaggaagactacagctgtgccctctccaacaactttgcccggtcattccaccccatgctcagatacacgaatggccctcctccactctgaactaagcagatgccatctgcagaagtgctggtagcataaggaggatcgggtcataagcaatcccaaactaccaacaagaggaccttgatcttggcgaaagccctcggtgtggcagctttagccctcctccagatcacatgtgtgcaaattatggcttcagaggtggaagataaacagtgacgggggaacaaacagacaacaagaaggtttggaagaaatctggtttgagactctgaaccttagcactaaggagattgagtaaggacctccaaagttccccggactcatgaattctgggcccttggcccattctgtgcacagccaaggacttcagtagaccatctgggcagctttcccatggtgctgctccaaccatcagataaatgaccctcccaagcaccatgtcagtgtcgtacaatctaccaaccaaccagtgctgaagagattttagaaccttgtaacatacaatttttaagagcttatatggcagcttcctttttaccttgttttcctttggggcatgatgttttaacctttgctttagaagcacaagctgtaaatctaaaaggcacttttttttagaggtataaagaaaaactagatgtaataaataagatcatggaaggctttatgtgaaaaaagttgaatgttatagtaaaaaaaaaagatatttatgtatgtacagtttgctaaagccaagttttgtttgtattgatttctttgcatttattatagatattataaaatagtttgtctgtgcttttttttccctaaacaaataactctaagtttcattattaagcaggcactgatcagaatgcaacctaaatgatcatttttctgtgcaatgaatgaagctggaacattagtgtatattaaaggaaaaggatggcaagaggcagcatggatttagacatagaagaccccaggtgattcctttttttctcttccttccatagtcaatcaaatctcctgaattcttgtttccggaaacctttcatcctctattctcc

SEQ ID NO: 83387 - DNA, 3706 bp, Homo sapiens
ccagcaaggccctacttcagctttggcaaagatacaaggactactccaaacagtgtgcttcgacagttcagcagcaggaggatcgaaccaatgagctgttgaaggcagccacaaacaaggacattgccgatgatgaggttgccacatggattcaagattgcaacgacctcctcaaaggactgggcacagttaaagattccctctttgttctccatgagctgggagagcaactgaagcaacaagtggatgcttccgcagcatcagctattcaatcggatcaactctctttgagtcaacacttgtgtgccctggagcaagctctctgcaaacagcagacttcattacaggctggagttcttgattatgaaacctttgccaagagtttagaagctttggaggcctggatagtggaagctgaagaaatactacaagggcaggaccctagccactcatctgacctctccacaatccaggaaaggatggaagaacttaagggacagatgttaaaattcagcagcatggctccagatttagaccgtctaaatgagcttggatataggttacccttgaatgataaggaaatcaaaagaatgcagaatctgaaccgccattggtctctgatctcctctcagactacagaaagattcagcaagttgcagtcatttttgctacaacatcagactttcttggaaaaatgtgaaacatggatggaattcctagttcagacagaacaaaagttagcagtagagatttcaggaaattatcagcaccttttggaacagcagagagcacacgagttgtttcaagccgagatgttcagtcgtcagcagattttgcactcaatcattattgatgggcaacgtcttctagaacaaggtcaagttgatgacagggatgaattcaacctgaaattgacactcctcagtaatcaatggcagggagtgattcgcagggcccagcagaggcgggggatcattgacagccagattcgccagtggcagcgctatagggagatggcagaaaagcttcgtaaatggttggttgaagtgtcctacctccccatgagtggtctcggaagtgttcctataccactgcaacaagcaaggaccctctttgatgaagtgcagttcaaagaaaaagtgtttctgcggcaacaaggcagctacatcctgactgtggaggctggcaagcaactccttctctcggcggacagtggcgctgaggccgccttgcaggccgaactcgctgaaatccaagagaaatggaaatcagccagcatgcggctggaagaacagaagaaaaaactagccttcttgttgaaagactgggaaaaatgtgagaaaggaatagcagattccctggagaaactacgaactttcaaaaagaagctttcgcagtctctcccggatcaccatgaagagctccatgcagaacaaatgcgttgcaaggaattagaaaatgcagttgggagctggacagatgacttgacccagttgagcctgctgaaggacaccctctctgcctatatcagtgctgatgatatctccattcttaatgaacgcgtagagcttctgcaaaggcagtgggaagaactatgccaccagctctccttaaggcggcagcaaataggtgaaagattgaatgaatgggcagtcttcagtgaaaagaacaaggaactctgtgagtggttgactcaaatggaaagcaaagtttctcagaatggagacattctcattgaagaaatgatagagaagctcaagaaggattatcaagaggaaattgctattgctcaagagaacaaaatacagctccaacaaatgggagaacgacttgctaaagccagccatgaaagcaaagcatctgagattgaatacaagctgggaaaggtcaacgaccggtggcagcatctcctggacctcattgcagccagggtgaagaagctgaaggagaccctggtagccgtgcagcagcttgataagaacatgagaagcctgaggacctggctcgctcacatcgagtcagagctggccaagccaatagtctacgattcctgtaactcggaagaaatacagagaaagcttaatgagcagcaggagcttcagagagacatagagaagcacagtacaggtgttgcatctgtcctcaacctgtgtgaagtcctgctgcacgactgtgacgcctgtgccactgatgccgagtgtgactctatacagcaggctacgagaaacctggaccggcggtggagaaacatttgtgctatgtccatggaaaggaggctgaaaatcgaagagacgtggcgattgtggcagaaatttctggatgactattcacgttttgaagattggctgaagtcttcagaaaggacagctgcttttcccagctcttctggggtgatctatacagttgccaaggaagaactaaagaaatttgaggctttccagcgacaggtccacgagtgcctgacgcagctggaactgatcaacaagcagtaccgccgcctggccagggagaaccgcactgattcagcatgtagcctcaaacagatggttcacgaaggcaaccagagatgggacaacctgcaaaagcgtgtcacctccatcttgcgcagactcaagcattttattggccagcgtgaggagtttgagactgcgcgggacagcattctggtctggctcacagagatggatctgcagctcactaatattgaacatttttctgagtgtgatgttcaagctaaaataaagcaactcaaggccttccagcaggaaatttcactgaaccacaataagattgagcagataattgcccaaggagaacagctgataggacggtactgccaggaggtcttcgggcgtgtggaagataaacagtgacgggggaacaaacagacaacaagaaggtttggaagaaatctggtttgagactctgaaccttagcactaaggagattgagtaaggacctccaaagttccccggactcatgaattctgggcccttggcccattctgtgcacagccaaggacttcagtagaccatctgggcagctttcccatggtgctgctccaaccatcagataaatgaccctcccaagcaccatgtcagtgtcgtacaatctaccaaccaaccagtgctgaagagattttagaaccttgtaacatacaatttttaagagcttatatggcagcttcctttttaccttgttttcctttggggcatgatgttttaacctttgctttagaagcacaagctgtaaatctaaaaggcacttttttttagaggtataaagaaaaactagatgtaataaataagatcatggaaggctttatgtgaaaaaagttgaatgttatagtaaaaaaaaaagatatttatgtatgtacagtttgctaaagccaagttttgtttgtattgatttctttgcatttattatagatattataaaatagtttgtctgtgcttttttttccctaaacaaataactctaagtttcattattaagcaggcactgatcagaatgcaacctaaatgatcatttttctgtgcaatgaatgaagctggaacattagtgtatattaaaggaaaaggatggcaagaggcagcatggatttagacatagaagaccccaggtgattcctttttttctcttccttccatagtcaatcaaatctcctgaattcttgtttccggaaacctttcatcctctattctcc

SEQ ID NO: 83388 - DNA, 5176 bp, Homo sapiens
  misc_feature (3271)..(3271): n is a, c, g, or t
ccagcaaggccctacttcagctttggcaaagatacaaggactactccaaacagtgtgcttcgacagttcagcagcaggaggatcgaaccaatgagctgttgaaggcagccacaaacaaggacattgccgatgatgaggttgccacatggattcaagattgcaacgacctcctcaaaggactgggcacagttaaagattccctctttgttctccatgagctgggagagcaactgaagcaacaagtggatgcttccgcagcatcagctattcaatcggatcaactctctttgagtcaacacttgtgtgccctggagcaagctctctgcaaacagcagacttcattacaggctggagttcttgattatgaaacctttgccaagagtttagaagctttggaggcctggatagtggaagctgaagaaatactacaagggcaggaccctagccactcatctgacctctccacaatccaggaaaggatggaagaacttaagggacagatgttaaaattcagcagcatggctccagatttagaccgtctaaatgagcttggatataggttacccttgaatgataaggaaatcaaaagaatgcagaatctgaaccgccattggtctctgatctcctctcagactacagaaagattcagcaagttgcagtcatttttgctacaacatcagactttcttggaaaaatgtgaaacatggatggaattcctagttcagacagaacaaaagttagcagtagagatttcaggaaattatcagcaccttttggaacagcagagagcacacgagttgtttcaagccgagatgttcagtcgtcagcagattttgcactcaatcattattgatgggcaacgtcttctagaacaaggtcaagttgatgacagggatgaattcaacctgaaattgacactcctcagtaatcaatggcagggagtgattcgcagggcccagcagaggcgggggatcattgacagccagattcgccagtggcagcgctatagggagatggcagaaaagcttcgtaaatggttggttgaagtgtcctacctccccatgagtggtctcggaagtgttcctataccactgcaacaagcaaggaccctctttgatgaagtgcagttcaaagaaaaagtgtttctgcggcaacaaggcagctacatcctgactgtggaggctggcaagcaactccttctctcggcggacagtggcgctgaggccgccttgcaggccgaactcgctgaaatccaagagaaatggaaatcagccagcatgcggctggaagaacagaagaaaaaactagccttcttgttgaaagactgggaaaaatgtgagaaaggaatagcagattccctggagaaactacgaactttcaaaaagaagctttcgcagtctctcccggatcaccatgaagagctccatgcagaacaaatgcgttgcaaggaattagaaaatgcagttgggagctggacagatgacttgacccagttgagcctgctgaaggacaccctctctgcctatatcagtgctgatgatatctccattcttaatgaacgcgtagagcttctgcaaaggcagtgggaagaactatgccaccagctctccttaaggcggcagcaaataggtgaaagattgaatgaatgggcagtcttcagtgaaaagaacaaggaactctgtgagtggttgactcaaatggaaagcaaagtttctcagaatggagacattctcattgaagaaatgatagagaagctcaagaaggattatcaagaggaaattgctattgctcaagagaacaaaatacagctccaacaaatgggagaacgacttgctaaagccagccatgaaagcaaagcatctgagattgaatacaagctgggaaaggtcaacgaccggtggcagcatctcctggacctcattgcagccagggtgaagaagctgaaggagaccctggtagccgtgcagcagcttgataagaacatgagaagcctgaggacctggctcgctcacatcgagtcagagctggccaagccaatagtctacgattcctgtaactcggaagaaatacagagaaagcttaatgagcagcaggagcttcagagagacatagagaagcacagtacaggtgttgcatctgtcctcaacctgtgtgaagtcctgctgcacgactgtgacgcctgtgccactgatgccgagtgtgactctatacagcaggctacgagaaacctggaccggcggtggagaaacatttgtgctatgtccatggaaaggaggctgaaaatcgaagagacgtggcgattgtggcagaaatttctggatgactattcacgttttgaagattggctgaagtcttcagaaaggacagctgcttttcccagctcttctggggtgatctatacagttgccaaggaagaactaaagaaatttgaggctttccagcgacaggtccacgagtgcctgacgcagctggaactgatcaacaagcagtaccgccgcctggccagggagaaccgcactgattcagcatgtagcctcaaacagatggttcacgaaggcaaccagagatgggacaacctgcaaaagcgtgtcacctccatcttgcgcagactcaagcattttattggccagcgtgaggagtttgagactgcgcgggacagcattctggtctggctcacagagatggatctgcagctcactaatattgaacatttttctgagtgtgatgttcaagctaaaataaagcaactcaaggccttccagcaggaaatttcactgaaccacaataagattgagcagataattgcccaaggagaacagctgatagaaaagagtgagcccttggatgcagcgatcatcgaggaggaactagatgagctccgacggtactgccaggaggtcttcgggcgtgtggaaagataccataagaaactgatccgcctgcctctcccagacgatgagcacgacctctcagacagggagctggagctggaagactctgcagctctgtcggacctgcactggcacgaccgctctgcagacagcctgctttctccacagccttcctccaatctctccctctcgctcgctcagcccctccggagcgagcggtcaggacgagacaccccggctagtgtggactccatccccctggagtgggatcacgactatgacctcagtcgggacctggagtctgcaatgtccagagctctgccctctgaggatgaagaaggtcaggatgacaaagatttctacctccggggagctgttgncttatcaggggaccacagtgccctagagtcacagatccgacaactgggcaaagccctggatgatagccgctttcagatacagcaaaccgaaaatatcattcgcagcaaaactcccacggggccggagctagacaccagctacaaaggctacatgaaactgctgggcgaatgcagtagcagtatagactccgtgaagagactggagcacaaactgaaggaggaagaggagagccttcctggctttgttaacctgcatagtaccgaaacccaaacggctggtgtgattgaccgatgggagcttctccaggcccaggcattgagcaaggagttgaggatgaagcagaacctccagaagtggcagcagtttaactcagacttgaacagcatctgggcctggctgggggacacggaggaggagttggaacagctccagcgtctggaactcagcactgacatccagaccatcgagctccagatcaaaaagctcaaggagctccagaaagctgtggaccaccgcaaagccatcatcctctccatcaatctctgcagccctgagttcacccaggctgacagcaaggagagccgggacctgcaggatcgcttgtcgcagatgaatgggcgctgggaccgagtgtgctctctgctggaggagtggcggggcctgctgcaggatgccctgatgcagtgccagggtttccatgaaatgagccatggtttgcttcttatgctggagaacattgacagaaggaaaaatgaaattgtccctattgattctaaccttgatgcagagatacttcaggaccatcacaaacagcttatgcaaataaagcatgagctgttggaatcccaactcagagtagcctctttgcaagacatgtcttgccaactactggtgaatgctgaaggaacagactgtttagaagccaaagaaaaagtccatgttattggaaatcggctcaaacttctcttgaaggaggtcagtcgtcatatcaaggaactggagaagttattagacgtgtcaagtagtcagcaggatttgtcttcctggtcttctgctgatgaactggacacctcagggtctgtgagtcccacatcaggaaggagcaccccaaacagacagaaaacgccacgaggcaagtgtagtctctcacagcctggaccctctgtcagcagtccacatagcaggtccacaaaaggtggctccgattcctccctttctgagccagggccaggtcggtccggccgcggcttcctgttcagagtcctccgagcagctcttccccttcagcttctcctgctcctcctcatcgggcttgcctgccttgtaccaatgtcagaggaagactacagctgtgccctctccaacaactttgcccggtcattccaccccatgctcagatacacgaatggccctcctccactctgaactaagcagatgccatctgcagaagtgctggtagcataaggaggatcgggtcataagcaatcccaaactaccaacaagaggaccttgatcttggcgaaagccctcggtgtggcagctttagccctcctccagatcacatgtgtgcaaattatggcttcagaggtggaagataaacagtgacgggggaacaaacagacaacaagaaggtttggaagaaatctggtttgagactctgaaccttagcactaaggagattgagtaaggacctccaaagttccccggactcatgaattctgggcccttggcccattctgtgcacagccaaggacttcagtagaccatctgggcagctttcccatggtgctgctccaaccatcagataaatgaccctcccaagcaccatgtcagtgtcgtacaatctaccaactccaccatgcacgagcaagtgtaatacggcgcccagtcaccaacgattgtat

SEQ ID NO: 83389 - DNA, 3532 bp, Homo sapiens
  misc_feature (3271)..(3271): n is a, c, g, or t
ccagcaaggccctacttcagctttggcaaagatacaaggactactccaaacagtgtgcttcgacagttcagcagcaggaggatcgaaccaatgagctgttgaaggcagccacaaacaaggacattgccgatgatgaggttgccacatggattcaagattgcaacgacctcctcaaaggactgggcacagttaaagattccctctttgttctccatgagctgggagagcaactgaagcaacaagtggatgcttccgcagcatcagctattcaatcggatcaactctctttgagtcaacacttgtgtgccctggagcaagctctctgcaaacagcagacttcattacaggctggagttcttgattatgaaacctttgccaagagtttagaagctttggaggcctggatagtggaagctgaagaaatactacaagggcaggaccctagccactcatctgacctctccacaatccaggaaaggatggaagaacttaagggacagatgttaaaattcagcagcatggctccagatttagaccgtctaaatgagcttggatataggttacccttgaatgataaggaaatcaaaagaatgcagaatctgaaccgccattggtctctgatctcctctcagactacagaaagattcagcaagttgcagtcatttttgctacaacatcagactttcttggaaaaatgtgaaacatggatggaattcctagttcagacagaacaaaagttagcagtagagatttcaggaaattatcagcaccttttggaacagcagagagcacacgagttgtttcaagccgagatgttcagtcgtcagcagattttgcactcaatcattattgatgggcaacgtcttctagaacaaggtcaagttgatgacagggatgaattcaacctgaaattgacactcctcagtaatcaatggcagggagtgattcgcagggcccagcagaggcgggggatcattgacagccagattcgccagtggcagcgctatagggagatggcagaaaagcttcgtaaatggttggttgaagtgtcctacctccccatgagtggtctcggaagtgttcctataccactgcaacaagcaaggaccctctttgatgaagtgcagttcaaagaaaaagtgtttctgcggcaacaaggcagctacatcctgactgtggaggctggcaagcaactccttctctcggcggacagtggcgctgaggccgccttgcaggccgaactcgctgaaatccaagagaaatggaaatcagccagcatgcggctggaagaacagaagaaaaaactagccttcttgttgaaagactgggaaaaatgtgagaaaggaatagcagattccctggagaaactacgaactttcaaaaagaagctttcgcagtctctcccggatcaccatgaagagctccatgcagaacaaatgcgttgcaaggaattagaaaatgcagttgggagctggacagatgacttgacccagttgagcctgctgaaggacaccctctctgcctatatcagtgctgatgatatctccattcttaatgaacgcgtagagcttctgcaaaggcagtgggaagaactatgccaccagctctccttaaggcggcagcaaataggtgaaagattgaatgaatgggcagtcttcagtgaaaagaacaaggaactctgtgagtggttgactcaaatggaaagcaaagtttctcagaatggagacattctcattgaagaaatgatagagaagctcaagaaggattatcaagaggaaattgctattgctcaagagaacaaaatacagctccaacaaatgggagaacgacttgctaaagccagccatgaaagcaaagcatctgagattgaatacaagctgggaaaggtcaacgaccggtggcagcatctcctggacctcattgcagccagggtgaagaagctgaaggagaccctggtagccgtgcagcagcttgataagaacatgagaagcctgaggacctggctcgctcacatcgagtcagagctggccaagccaatagtctacgattcctgtaactcggaagaaatacagagaaagcttaatgagcagcaggagcttcagagagacatagagaagcacagtacaggtgttgcatctgtcctcaacctgtgtgaagtcctgctgcacgactgtgacgcctgtgccactgatgccgagtgtgactctatacagcaggctacgagaaacctggaccggcggtggagaaacatttgtgctatgtccatggaaaggaggctgaaaatcgaagagacgtggcgattgtggcagaaatttctggatgactattcacgttttgaagattggctgaagtcttcagaaaggacagctgcttttcccagctcttctggggtgatctatacagttgccaaggaagaactaaagaaatttgaggctttccagcgacaggtccacgagtgcctgacgcagctggaactgatcaacaagcagtaccgccgcctggccagggagaaccgcactgattcagcatgtagcctcaaacagatggttcacgaaggcaaccagagatgggacaacctgcaaaagcgtgtcacctccatcttgcgcagactcaagcattttattggccagcgtgaggagtttgagactgcgcgggacagcattctggtctggctcacagagatggatctgcagctcactaatattgaacatttttctgagtgtgatgttcaagctaaaataaagcaactcaaggccttccagcaggaaatttcactgaaccacaataagattgagcagataattgcccaaggagaacagctgatagaaaagagtgagcccttggatgcagcgatcatcgaggaggaactagatgagctccgacggtactgccaggaggtcttcgggcgtgtggaaagataccataagaaactgatccgcctgcctctcccagacgatgagcacgacctctcagacagggagctggagctggaagactctgcagctctgtcggacctgcactggcacgaccgctctgcagacagcctgctttctccacagccttcctccaatctctccctctcgctcgctcagcccctccggagcgagcggtcaggacgagacaccccggctagtgtggactccatccccctggagtgggatcacgactatgacctcagtcgggacctggagtctgcaatgtccagagctctgccctctgaggatgaagaaggtcaggatgacaaagatttctacctccggggagctgttgncttatcaggtaggaaagagcctctccagtttgccagcttaaaggaaagtcagagggaattaatattgccctggaaacatgacagctatccagaatcatttgcttccttctttcatgcggggaaattgtacctaagtgaacacttagatatgaatgtgattataaaatgcaaaatttggtgtggccgttgatttattccacgtagatttgtggtagtaggtgacaagcgctttgccaggttctagggatacacagttcctct

SEQ ID NO: 83390 - DNA, 2626 bp, Homo sapiens
cgcttccgcctccagcgcgagccccgccgccgccgagcatggacgaccccgactgcgactccacctgggaggaggacgaggaggatgcggaggacgcggaggacgaggactgcgaggacggcgaggccgccggcgcgagggacgcggacgcaggggacgaggacgaggagtcggaggagccgcgggcggcgcggcccagctcgttccagtccagaatgacagggtccagaaactggcgagccacgagggacatgtgtaggtatcggcacaactatccggatctggtggaacgagactgcaatggggacacgccaaacctgagtttctacagaaatgagatccgcttcctgcccaacggctgtttcattgaggacattcttcagaactggacggacaactatgacctccttgaggacaatcactcctacatccagtggctgtttcctctgcgagaaccaggagtgaactggcatgccaagcccctcacgctcagggaggtcgaggtgtttaaaagctcccaggagatccaggagcggcttgtccgggcctacgagctcatgctgggcttctacgggatccggctggaggaccgaggcacgggcacggtgggccgagcacagaactaccagaagcgcttccagaacctgaactggcgcagccacaacaacctccgcatcacacgcatcctcaagtcgctgggtgagctgggcctcgagcacttccaggcgccgctggtccgcttcttcctggaggagacgctggtgcggcgggagctgccgggggtgcggcagagtgccctggactacttcatgttcgccgtgcgctgccgacaccagcgccgccagctggtgcacttcgcctgggagcacttccggccccgctgcaagttcgtctgggggccccaagacaagctgcggaggttcaagcccagctctctgccccatccgctcgagggctccaggaaggtggaggaggaaggaagccccggggaccccgaccacgaggccagcacccaggtcggacctgtgggccagagcatagcaagggtgggggcagggtggacgaggggccccagccacggagcgtggagccccaggatgcgggacccctggagaggagccagggggatgaggcagggggccacggggaagataggccggagcccttaagccccaaagagagcaagaagaggaagctggagctgagccggcgggagcagccgcccacagagccaggccctcagagtgcctcagaggtggagaagatcgctctgaatttggaggggtgtgccctcagccagggcagcctcaggacggggacccaggaagtgggcggtcaggaccctggggaggcagtgcagccctgccgccaacccctgggagccagggtggccgacaaggtgaggaagcggaggaaggtggatgagggtgctggggacagtgctgcggtggccagtggtggtgcccagaccttggcccttgccgggtcccctgccccatcggggcaccccaaggctggacacagtgagaacggggttgaggaggacacagaaggtcgaacggggcccaaagaaggtacccctgggagcccatcggagaccccaggccccagcccagcaggacctgcaggggacgagccagccgagagcccatcggagaccccaggcccccgcccagcaggacctgcaggggacgagccagccgagagcccatcggagaccccaggcccccgcccggcaggacctgcaggggacgagccagccgagagcccatcggagaccccaggccccagcccggcaggacctacaagggatgagccagccgagagcccatcggagaccccaggcccccgcccggcaggacctgcaggggacgagccagccgagagcccatcggagaccccaggcccccgcccggcaggacctgcaggggacgagccagccgagagcccatcggagaccccaggccccagcccggcaggacctacaagggatgagccagccaaggcgggggaggcagcagagttgcaggacgcagaggtggagtcttctgccaagtctgggaagccttaaggaaaggagtgcccgtcggcgtcttggtcctcctgtccctgctgcaggggctggggcctccggagctgctgcgggctcccctcaggctctgcttcgtgacccgtgacccatgacccacagtgctggcctcctgtggggccactatagcagccaccagaagccgcgaggccctcagggaagcccaaggcctgcagaagcctcctggcctggctgtgtcttccccacccagctctcccctgcgcccctgtctttgtaaattgacccttctggagtggggggcggcgggcagggctgcttttcttagtctgataccaagcaaggccttttctgaataaattcatttgactttgaaaaaaaaaaaaaaaaaaaaaaactctcagagggccctcatatgccggggccgccggaaaaacagaggtgtcctgaacttgggcccttgcgccatacgctggtcccctggcccaagtttccgtggtccccggcgggaacaactttcgcgggtcccccttatacgggcgccgattaaattcagtaaccccgtgtacccggttatgg

SEQ ID NO: 83391 - DNA, 2422 bp, Homo sapiens
cgcttccgcctccagcgcgagccccgccgccgccgagcatggacgaccccgactgcgactccacctgggaggaggacgaggaggatgcggaggacgcggaggacgaggactgcgaggacggcgaggccgccggcgcgagggacgcggacgcaggggacgaggacgaggagtcggaggagccgcgggcggcgcggcccagctcgttccagtccagaatgacagggtccagaaactggcgagccacgagggacatgtgtaggtatcggcacaactatccggatctggtggaacgagactgcaatggggacacgccaaacctgagtttctacagaaatgagatccgcttcctgcccaacggctgtttcattgaggacattcttcagaactggacggacaactatgacctccttgaggacaatcactcctacatccagtggctgtttcctctgcgagaaccaggagtgaactggcatgccaagcccctcacgctcagggaggtcgaggtgtttaaaagctcccaggagatccaggagcggcttgtccgggcctacgagctcatgctgggcttctacgggatccggctggaggaccgaggcacgggcacggtgggccgagcacagaactaccagaagcgcttccagaacctgaactggcgcagccacaacaacctccgcatcacacgcatcctcaagtcgctgggtgagctgggcctcgagcacttccaggcgccgctggtccgcttcttcctggaggagacgctggtgcggcgggagctgccgggggtgcggcagagtgccctggactacttcatgttcgccgtgcgctgccgacaccagcgccgccagctggtgcacttcgcctgggagcacttccggccccgctgcaagttcgtctgggggccccaagacaagctgcggaggttcaagcccagctctctgccccatccgctcgagggctccaggaaggtggaggaggaaggaagccccggggaccccgaccacgaggccagcacccaggtcggacctgtgggccagagcatagcaagggtgggggcagggtggacgaggggccccagccacggagcgtggagccccaggatgcgggacccctggagaggagccagggggatgaggcagggggccacggggaagataggccggagcccttaagccccaaagagagcaagaagaggaagctggagctgagccggcgggagcagccgcccacagagccaggccctcagagtgcctcagaggtggagaagatcgctctgaatttggaggggtgtgccctcagccagggcagcctcaggacggggacccaggaagtgggcggtcaggaccctggggaggcagtgcagccctgccgccaacccctgggagccagggtggccgacaaggtgaggaagcggaggaaggtggatgagggtgctggggacagtgctgcggtggccagtggtggtgcccagaccttggcccttgccgggtcccctgccccatcggggcaccccaaggctggacacagtgagaacggggttgaggaggacacagaaggtcgaacggggcccaaagaaggtacccctgggagcccatcggagaccccaggccccagcccagcaggacctgcaggggacgagccagccgagagcccatcggagaccccaggcccccgcccagcaggacctgcaggggacgagccagccgagagcccatcggagaccccaggcccccgcccggcaggacctgcaggggacgagccagccgagagcccatcggagaccccaggccccagcccggcaggacctacaagggatgagccagccgagagcccatcggagaccccaggcccccgcccggcaggacctgcaggggacgagccagccgagagcccatcggagaccccaggcccccgcccggcaggacctgcaggggacgagccagccgagagcccatcggagaccccaggccccagcccggcaggacctacaagggatgagccagccaaggcgggggaggcagcagagttgcaggacgcagaggtggagtcttctgccaagtctgggaagccttaaggaaaggagtgcccgtcggcgtcttggtcctcctgtccctgctgcaggggctggggcctccggagctgctgcgggctcccctcaggctctgcttcgtgacccgtgacccatgacccacagtgctggcctcctgtggggccactatagcagccaccagaagccgcgaggccctcagggaagcccaaggcctgcagaagcctcctggcctggctgtgtcttccccacccagctctcccctgcgcccctgtctttgtaaattgacccttctggagtggggggcggcgggcagggctgcttttcttagtctgataccaagcaaggccttttctgaataaattcatttgactttga

SEQ ID NO: 83392 - DNA, 4611 bp, Homo sapiens
tgtcgccgggagggcagcggccaggcaggctgggcaggggggtggggtctggctctgtcccacaggacggtgtgacccctgggtgggctcttgacgggctttcctcactggagttcctcaggccgctctcctgaagcggtgctcagaggccctgaccatcctgccaggcgcccgtgacccctgacctcttccctctgcctcctgctgtggcttctgtccacaagcccctccccttcccctttggacccctcaggcctccccagctgcctgcgctggaccctggcggggctgtttcactttttcctgggcagtgtcatgtatgcacctgtgggctgactgtgtggccacatccagtcaggacccagcctccagaactgacccagggaggctcccgctggccccaggaaggagaagtagaaactgatgatcaggcggggcgagagaaccacaccagcggccctgttgagaaatcaggccgagaggtcggtggcggtggctcaggcctgtaatcccagcactttcggaggcctgggcagtcggatcaccagaggtcaggagtccaagattagcctggccaacatggtgaaactgttgtctctactaaaaatacaacattagccaggcgtgatgggcacctgtaatcccagttcctccagagattgaagcaggagaatcgcttaaacctgggaggtggaggttgcagtgagtggagattgcctgggaggtggaggttgcagtgagtggagattgcctgggaggtggagattgcatgaagctccatctcgaggggaaaaaaataagaaagaaaaatcaggcagagaggcaacgccaggtcccagctggagctcagcggggagccaggggatacagtggctgaccgggcctcctaaccccccttctagcactcccccaggatcctgggtcccaattgttgccctggacaaatacgcccattcctgccctacccaccgagtgaggctcagccccaggccccccaccctcatcacaaggtcagggctgtgtcccagcatcctcatcactaggtacttccggccctttgctcagccccatgatgcttggcctgcagagatgggggctgaagggcttggggcatcaaggggacctgacatcttgctgagaagccatcactagacagggctggaggctggagactcagggcctgccctcaccgtggccagtgaggcgtggggttgggcagggaaggggcattcattcattagaccctgccagaagcacctgggtccccttctggggctacaggtggtgaggccactgcccccaagaacacagcctggtgactttagtgtacaaagcagggggagtctccaggggcacagaacagaggctaaagccagggtggaggtggccagcaggcctaggaggaggagagggtcagggccacaccccaggggaggtgcatgtcagccaggggccaccctaaggtggaagccaggagtcccaaaggggcctagagaaggagcagccccccacctggctaccgcagccctctctggttctgtgcagggtattgggatgcgttactgaggcccaaatctgccccactgggaacccccaaaaaagagccagggcaggagaatgagagggaggagccatgaaacccccgccctttaaagacagctctgtggcagctggcccaggccctgcagccctcaccacgttgggactcacttgggggtctcccatgggggtcctaatcccatctcttttcttcccagtccagaatgacagggtccagaaactggcgagccacgagggacatgtgtaggtatcggcacaactatccggtacgtacctgcccctgccccgggacacagaaccctcccgccagctgctcttctcaggcagaatgtcccaggttctactggaaggctggcctggcttgctgtgccagggccacagttctgggcaggaccctgcctggggcacagcctggtatagattcagagccctgcccttcccctctcgcgggagaccgggggcatccccctacttttctgagcttcagcacaccgtcgccttgcaaacatggccatagtgccagcctcgtgatgcacacgtgtggggtccgtgataccgcccacacagcaccccacccccatgccagccctgtctcctgcaggttgtcctcagccattaccctccacacccctgaatcacggaaacccctgtgctgccttcagggtgctgaggaggggacctgccaggcctggcctggctggcgaaatggggaaggggggtccctggggcttggaggcagctgctgtcctctgaatggcccccacctgcagagtgaggagccaggcgggctcttggggtattgggccagcctggaggtttgcagatgcgcctccccgaaagacacggagggccccagggcagcttgtgtctgatggatccctgctgtcccctttctctggctcttcaggatctggtggaacgagactgcaatggggacacgccaaacctgagtttctacagaaatgagatccgcttcctgcccaacggctgtttcattgaggacattcttcagaactggacggacaactatgacctccttgaggacaatcactcctacatccagtggctgtttcctctgcgagaaccaggagtgaactggcatgccaagcccctcacgctcagggaggtcgaggtgtttaaaagctcccaggagatccaggagcggcttgtccgggcctacgagctcatgctgggcttctacgggatccggctggaggaccgaggcacgggcacggtgggccgagcacagaactaccagaagcgcttccagaacctgaactggcgcagccacaacaacctccgcatcacacgcatcctcaagtcgctgggtgagctgggcctcgagcacttccaggcgccgctggtccgcttcttcctggaggagacgctggtgcggcgggagctgccgggggtgcggcagagtgccctggactacttcatgttcgccgtgcgctgccgacaccagcgccgccagctggtgcacttcgcctgggagcacttccggccccgctgcaagttcgtctgggggccccaagacaagctgcggaggttcaagcccagctctctgccccatccgctcgagggctccaggaaggtggaggaggaaggaagccccggggaccccgaccacgaggccagcacccaggtcggacctgtgggccagagcatagcaagggtgggggcagggtggacgaggggccccagccacggagcgtggagccccaggatgcgggacccctggagaggagccagggggatgaggcagggggccacggggaagataggccggagcccttaagccccaaagagagcaagaagaggaagctggagctgagccggcgggagcagccgcccacagagccaggccctcagagtgcctcagaggtggagaagatcgctctgaatttggaggggtgtgccctcagccagggcagcctcaggacggggacccaggaagtgggcggtcaggaccctggggaggcagtgcagccctgccgccaacccctgggagccagggtggccgacaaggtgaggaagcggaggaaggtggatgagggtgctggggacagtgctgcggtggccagtggtggtgcccagaccttggcccttgccgggtcccctgccccatcggggcaccccaaggctggacacagtgagaacggggttgaggaggacacagaaggtcgaacggggcccaaagaaggtacccctgggagcccatcggagaccccaggccccagcccagcaggacctgcaggggacgagccagccgagagcccatcggagaccccaggcccccgcccagcaggacctgcaggggacgagccagccgagagcccatcggagaccccaggcccccgcccggcaggacctgcaggggacgagccagccgagagcccatcggagaccccaggccccagcccggcaggacctacaagggatgagccagccgagagcccatcggagaccccaggcccccgcccggcaggacctgcaggggacgagccagccgagagcccatcggagaccccaggcccccgcccggcaggacctgcaggggacgagccagccgagagcccatcggagaccccaggccccagcccggcaggacctacaagggatgagccagccaaggcgggggaggcagcagagttgcaggacgcagaggtggagtcttctgccaagtctgggaagccttaaggaaaggagtgcccgtcggcgtcttggtcctcctgtccctgctgcaggggctggggcctccggagctgctgcgggctcccctcaggctctgcttcgtgacccgtgacccatgacccacagtgctggcctcctgtggggccactatagcagccaccagaagccgcgaggccctcagggaagcccaaggcctgcagaagcctcctggcctggctgtgtcttccccacccagctctcccctgcgcccctgtctttgtaaattgacccttctggagtggggggcggcgggcagggctgcttttcttagtctgataccaagcaaggccttttctgaataaattcatttgactttga

SEQ ID NO: 83393 - DNA, 1215 bp, Homo sapiens
tagaattcagcggccgctgaattctagcccccgactgcgactccacctgggaggaggacgaggaggatgcggaggacgcggaggacgaggactgcgaggacggcgaggccgccggcgcgagggacgcggacgcaggggacgaggacgaggagtcggaggagccgcgggcggcgcggcccagctcgttccagtccagaatgacagggtccagaaactggcgagccacgagggacatgtgtaggtatcggcacaactatccggatctggtggaacgagactgcaatggggacacgccaaacctgagtttctacagaaatgagatccgcttcctgcccaacggctgtttcattgaggacattcttcagaactggacggacaactatgacctccttgaggacaatcactcctacatccagtggctgtttcctctgcgagaaccaggagtgaactggcatgccaagcccctcacgctcagggaggtcgaggtgtttaaaagctcccaggagatccaggagcggcttgtccgggcctacgagctcatgctgggcttctacgggatccggctggaggaccgaggcacgggcacggtgggccgagcacagaactaccagaagcgcttccagaacctgaactggcgcagccacaacaacctccgcatcacacgcatcctcaagtcgctgggtgagctgggcctcgagcacttccaggcgccgctggtccgcttcttcctggaggagacgctggtgcggcgggagctgccgggggtgcggcagagtgccctggactacttcatgttcgccgtgcgctgccgacaccagcgccgccagctggtgcacttcgcctgggagcacttccggccccgctgcaagttcgtctgggggccccaagacaagctgcggaggttcaagcccagctctctgccccatccgctcgagggctccaggaaggtggaggaggaaggacctgcaggggacgagccagccgagagcccatcggagaccccaggccccagcccggcaggacctacaagggatgagccagccaaggcgggggaggcaaagcctcctggcctggctgtgtcttccccacccagctctcccctgcgcccctgtctttgtaaattgacccttctggagtggggggcggcgggcagggctgcttttcttagtctgataccaagcaaggccttttctgaataaattcatttgactttga

SEQ ID NO: 83394 - DNA, 2630 bp, Homo sapiens
cgcttccgcctccagcgcgagccccgccgccgccgagcatggacgaccccgactgcgactccacctgggaggaggacgaggaggatgcggaggacgcggaggacgaggactgcgaggacggcgaggccgccggcgcgagggacgcggacgcaggggacgaggacgaggagtcggaggagccgcgggcggcgcggcccagctcgttccagtccagaatgacagggtccagaaactggcgagccacgagggacatgtgtaggtatcggcacaactatccggatctggtggaacgagactgcaatggggacacgccaaacctgagtttctacagaaatgagatccgcttcctgcccaacggctgtttcattgaggacattcttcagaactggacggacaactatgacctccttgaggacaatcactcctacatccagtggctgtttcctctgcgagaaccaggagtgaactggcatgccaagcccctcacgctcagggaggtcgaggtgtttaaaagctcccaggagatccaggagcggcttgtccgggcctacgagctcatgctgggcttctacgggatccggctggaggaccgaggcacgggcacggtgggccgagcacagaactaccagaagcgcttccagaacctgaactggcgcagccacaacaacctccgcatcacacgcatcctcaagtcgctgggtgagctgggcctcgagcacttccaggcgccgctggtccgcttcttcctggaggagacgctggtgcggcgggagctgccgggggtgcggcagagtgccctggactacttcatgttcgccgtgcgctgccgacaccagcgccgccagctggtgcacttcgcctgggagcacttccggccccgctgcaagttcgtctgggggccccaagacaagctgcggaggttcaagcccagctctctgccccatccgctcgagggctccaggaaggtggaggaggaaggaagccccggggaccccgaccacgaggccagcacccaggtcggacctgtgggccagagcatagcaagggtgggggcagggtggacgaggggccccagccacggagcgtggagccccaggatgcgggacccctggagaggagccagggggatgaggcagggggccacggggaagataggccggagcccttaagccccaaagagagcaagaagaggaagctggagctgagccggcgggagcagccgcccacagagccaggccctcagagtgcctcagaggtggagaagatcgctctgaatttggaggggtgtgccctcagccagggcagcctcaggacggggacccaggaagtgggcggtcaggaccctggggaggcagtgcagccctgccgccaacccctgggagccagggtggccgacaaggtgaggaagcggaggaaggtggatgagggtgctggggacagtgctgcggtggccagtggtggtgcccagaccttggcccttgccgggtcccctgccccatcggggcaccccaaggctggacacagtgagaacggggttgaggaggacacagaaggtcgaacggggcccaaagaaggtacccctgggagcccatcggagaccccaggccccagcccagcaggacctgcaggggacgagccagccgagagcccatcggagaccccaggcccccgcccagcaggacctgcaggggacgagccagccgagagcccatcggagaccccaggcccccgcccggcaggacctgcaggggacgagccagccgagagcccatcggagaccccaggccccagcccggcaggacctacaagggatgagccagccgagagcccatcggagaccccaggcccccgcccggcaggacctgcaggggacgagccagccgagagcccatcggagaccccaggcccccgcccggcaggacctgcaggggacgagccagccgagagcccatcggagaccccaggccccagcccggcaggacctacaagggatgagccagccaaggcgggggaggcagcagagttgcaggacgcagaggtggagtcttctgccaagtctgggaagccttaaggaaaggagtgcccgtcggcgtcttggtcctcctgtccctgctgcaggggctggggcctccggagctgctgcgggctcccctcaggctctgcttcgtgacccgtgacccatgacccacagtgctggcctcctgtggggccactatagcagccaccagaagccgcgaggccctcagggaagcccaaggcctgcagaagcctcctggcctggctgtgtcttccccacccagctctcccctgcgcccctgtctttgtaaattgacccttctggagtggggggcggcgggcagggctgcttttcttagtctgataccaagcaaggccttttctgaataaattcatttgactttgaaaacaacacaaacccaacaaaaacacctcggagggcaccaaagtccgcgcgccgcaaaagcggctcaccgacaacggcccactgggccaaaagacgatcccgtgacccgaagttcctgggccccagggtgcacaactcggccggacaccccatataagagacccacacacaatccgaaacccccggtaacggataaaacaaggacaac

SEQ ID NO: 83395 - DNA, 2478 bp, Homo sapiens
ggggtcagaagatatttatgaggtgccgtgactcgggttaatttcatgacgggggctcgggttcgttgtactatgtggaccctcgagcttgaccaattcacaccccgactgcgactccacctgggaggaggacgaggaggatgcggaggacgcggaggacgaggactgcgaggacggcgaggccgccggcgcgagggacgcggacgcaggggacgaggacgaggagtcggaggagccgcgggcggcgcggcccagctcgttccagtccagaatgacagggtccagaaactggcgagccacgagggacatgtgtaggtatcggcacaactatccggatctggtggaacgagactgcaatggggacacgccaaacctgagtttctacagaaatgagatccgcttcctgcccaacggctgtttcattgaggacattcttcagaactggacggacaactatgacctccttgaggacaatcactcctacatccagtggctgtttcctctgcgagaaccaggagtgaactggcatgccaagcccctcacgctcagggaggtcgaggtgtttaaaagctcccaggagatccaggagcggcttgtccgggcctacgagctcatgctgggcttctacgggatccggctggaggaccgaggcacgggcacggtgggccgagcacagaactaccagaagcgcttccagaacctgaactggcgcagccacaacaacctccgcatcacacgcatcctcaagtcgctgggtgagctgggcctcgagcacttccaggcgccgctggtccgcttcttcctggaggagacgctggtgcggcgggagctgccgggggtgcggcagagtgccctggactacttcatgttcgccgtgcgctgccgacaccagcgccgccagctggtgcacttcgcctgggagcacttccggccccgctgcaagttcgtctgggggccccaagacaagctgcggaggttcaagcccagctctctgccccatccgctcgagggctccaggaaggtggaggaggaaggaagccccggggaccccgaccacgaggccagcacccaggtcggacctgtgggccagagcatagcaagggtgggggcagggtggacgaggggccccagccacggagcgtggagccccaggatgcgggacccctggagaggagccagggggatgaggcagggggccacggggaagataggccggagcccttaagccccaaagagagcaagaagaggaagctggagctgagccggcgggagcagccgcccacagagccaggccctcagagtgcctcagaggtggagaagatcgctctgaatttggaggggtgtgccctcagccagggcagcctcaggacggggacccaggaagtgggcggtcaggaccctggggaggcagtgcagccctgccgccaacccctgggagccagggtggccgacaaggtgaggaagcggaggaaggtggatgagggtgctggggacagtgctgcggtggccagtggtggtgcccagaccttggcccttgccgggtcccctgccccatcggggcaccccaaggctggacacagtgagaacggggttgaggaggacacagaaggtcgaacggggcccaaagaaggtacccctgggagcccatcggagaccccaggccccagcccagcaggacctgcaggggacgagccagccgagagcccatcggagaccccaggcccccgcccagcaggacctgcaggggacgagccagccgagagcccatcggagaccccaggcccccgcccggcaggacctgcaggggacgagccagccgagagcccatcggagaccccaggccccagcccggcaggacctacaagggatgagccagccgagagcccatcggagaccccaggcccccgcccggcaggacctgcaggggacgagccagccgagagcccatcggagaccccaggcccccgcccggcaggacctgcaggggacgagccagccgagagcccatcggagaccccaggccccagcccggcaggacctacaagggatgagccagccaaggcgggggaggcagcagagttgcaggacgcagaggtggagtcttctgccaagtctgggaagccttaaggaaaggagtgcccgtcggcgtcttggtcctcctgtccctgctgcaggggctggggcctccggagctgctgcgggctcccctcaggctctgcttcgtgacccgtgacccatgacccacagtgctggcctcctgtggggccactatagcagccaccagaagccgcgaggccctcagggaagcccaaggcctgcagaagcctcctggcctggctgtgtcttccccacccagctctcccctgcgcccctgtctttgtaaattgacccttctggagtggggggcggcgggcagggctgcttttcttagtctgataccaagcaaggccttttctgaataaattcatttgactttga

SEQ ID NO: 83396 - DNA, 2456 bp, Homo sapiens
cgcggtttgtatttcagtgatggggagctggcgtttagttgaagattcctgtgttgctaggtctagtccattgttacaagccccgactgcgactccacctgggaggaggacgaggaggatgcggaggacgcggaggacgaggactgcgaggacggcgaggccgccggcgcgagggacgcggacgcaggggacgaggacgaggagtcggaggagccgcgggcggcgcggcccagctcgttccagtccagaatgacagggtccagaaactggcgagccacgagggacatgtgtaggtatcggcacaactatccggatctggtggaacgagactgcaatggggacacgccaaacctgagtttctacagaaatgagatccgcttcctgcccaacggctgtttcattgaggacattcttcagaactggacggacaactatgacctccttgaggacaatcactcctacatccagtggctgtttcctctgcgagaaccaggagtgaactggcatgccaagcccctcacgctcagggaggtcgaggtgtttaaaagctcccaggagatccaggagcggcttgtccgggcctacgagctcatgctgggcttctacgggatccggctggaggaccgaggcacgggcacggtgggccgagcacagaactaccagaagcgcttccagaacctgaactggcgcagccacaacaacctccgcatcacacgcatcctcaagtcgctgggtgagctgggcctcgagcacttccaggcgccgctggtccgcttcttcctggaggagacgctggtgcggcgggagctgccgggggtgcggcagagtgccctggactacttcatgttcgccgtgcgctgccgacaccagcgccgccagctggtgcacttcgcctgggagcacttccggccccgctgcaagttcgtctgggggccccaagacaagctgcggaggttcaagcccagctctctgccccatccgctcgagggctccaggaaggtggaggaggaaggaagccccggggaccccgaccacgaggccagcacccaggtcggacctgtgggccagagcatagcaagggtgggggcagggtggacgaggggccccagccacggagcgtggagccccaggatgcgggacccctggagaggagccagggggatgaggcagggggccacggggaagataggccggagcccttaagccccaaagagagcaagaagaggaagctggagctgagccggcgggagcagccgcccacagagccaggccctcagagtgcctcagaggtggagaagatcgctctgaatttggaggggtgtgccctcagccagggcagcctcaggacggggacccaggaagtgggcggtcaggaccctggggaggcagtgcagccctgccgccaacccctgggagccagggtggccgacaaggtgaggaagcggaggaaggtggatgagggtgctggggacagtgctgcggtggccagtggtggtgcccagaccttggcccttgccgggtcccctgccccatcggggcaccccaaggctggacacagtgagaacggggttgaggaggacacagaaggtcgaacggggcccaaagaaggtacccctgggagcccatcggagaccccaggccccagcccagcaggacctgcaggggacgagccagccgagagcccatcggagaccccaggcccccgcccagcaggacctgcaggggacgagccagccgagagcccatcggagaccccaggcccccgcccggcaggacctgcaggggacgagccagccgagagcccatcggagaccccaggccccagcccggcaggacctacaagggatgagccagccgagagcccatcggagaccccaggcccccgcccggcaggacctgcaggggacgagccagccgagagcccatcggagaccccaggcccccgcccggcaggacctgcaggggacgagccagccgagagcccatcggagaccccaggccccagcccggcaggacctacaagggatgagccagccaaggcgggggaggcagcagagttgcaggacgcagaggtggagtcttctgccaagtctgggaagccttaaggaaaggagtgcccgtcggcgtcttggtcctcctgtccctgctgcaggggctggggcctccggagctgctgcgggctcccctcaggctctgcttcgtgacccgtgacccatgacccacagtgctggcctcctgtggggccactatagcagccaccagaagccgcgaggccctcagggaagcccaaggcctgcagaagcctcctggcctggctgtgtcttccccacccagctctcccctgcgcccctgtctttgtaaattgacccttctggagtggggggcggcgggcagggctgcttttcttagtctgataccaagcaaggccttttctgaataaattcatttgactttga

SEQ ID NO: 83397 - DNA, 2194 bp, Homo sapiens
gtctggggtagatctagaggatcccgttggcgtgagggtcaaactatccggatctggtggaacgagactgcaatggggacacgccaaacctgagtttctacagaaatgagatccgcttcctgcccaacggctgtttcattgaggacattcttcagaactggacggacaactatgacctccttgaggacaatcactcctacatccagtggctgtttcctctgcgagaaccaggagtgaactggcatgccaagcccctcacgctcagggaggtcgaggtgtttaaaagctcccaggagatccaggagcggcttgtccgggcctacgagctcatgctgggcttctacgggatccggctggaggaccgaggcacgggcacggtgggccgagcacagaactaccagaagcgcttccagaacctgaactggcgcagccacaacaacctccgcatcacacgcatcctcaagtcgctgggtgagctgggcctcgagcacttccaggcgccgctggtccgcttcttcctggaggagacgctggtgcggcgggagctgccgggggtgcggcagagtgccctggactacttcatgttcgccgtgcgctgccgacaccagcgccgccagctggtgcacttcgcctgggagcacttccggccccgctgcaagttcgtctgggggccccaagacaagctgcggaggttcaagcccagctctctgccccatccgctcgagggctccaggaaggtggaggaggaaggaagccccggggaccccgaccacgaggccagcacccaggtcggacctgtgggccagagcatagcaagggtgggggcagggtggacgaggggccccagccacggagcgtggagccccaggatgcgggacccctggagaggagccagggggatgaggcagggggccacggggaagataggccggagcccttaagccccaaagagagcaagaagaggaagctggagctgagccggcgggagcagccgcccacagagccaggccctcagagtgcctcagaggtggagaagatcgctctgaatttggaggggtgtgccctcagccagggcagcctcaggacggggacccaggaagtgggcggtcaggaccctggggaggcagtgcagccctgccgccaacccctgggagccagggtggccgacaaggtgaggaagcggaggaaggtggatgagggtgctggggacagtgctgcggtggccagtggtggtgcccagaccttggcccttgccgggtcccctgccccatcggggcaccccaaggctggacacagtgagaacggggttgaggaggacacagaaggtcgaacggggcccaaagaaggtacccctgggagcccatcggagaccccaggccccagcccagcaggacctgcaggggacgagccagccgagagcccatcggagaccccaggcccccgcccagcaggacctgcaggggacgagccagccgagagcccatcggagaccccaggcccccgcccggcaggacctgcaggggacgagccagccgagagcccatcggagaccccaggccccagcccggcaggacctacaagggatgagccagccgagagcccatcggagaccccaggcccccgcccggcaggacctgcaggggacgagccagccgagagcccatcggagaccccaggcccccgcccggcaggacctgcaggggacgagccagccgagagcccatcggagaccccaggccccagcccggcaggacctacaagggatgagccagccaaggcgggggaggcagcagagttgcaggacgcagaggtggagtcttctgccaagtctgggaagccttaaggaaaggagtgcccgtcggcgtcttggtcctcctgtccctgctgcaggggctggggcctccggagctgctgcgggctcccctcaggctctgcttcgtgacccgtgacccatgacccacagtgctggcctcctgtggggccactatagcagccaccagaagccgcgaggccctcagggaagcccaaggcctgcagaagcctcctggcctggctgtgtcttccccacccagctctcccctgcgcccctgtctttgtaaattgacccttctggagtggggggcggcgggcagggctgcttttcttagtctgataccaagcaaggccttttctgaataaattcatttgactttga

SEQ ID NO: 83398 - DNA, 1463 bp, Homo sapiens
cgcttccgcctccagcgcgagccccgccgccgccgagcatggacgaccccgactgcgactccacctgggaggaggacgaggaggatgcggaggacgcggaggacgaggactgcgaggacggcgaggccgccggcgcgagggacgcggacgcaggggacgaggacgaggagtcggaggagccgcgggcggcgcggcccagctcgttccagtccagaatgacagggtccagaaactggcgagccacgagggacatgtgtaggtatcggcacaactatccggatctggtggaacgagactgcaatggggacacgccaaacctgagtttctacagaaatgagatccgcttcctgcccaacggctgtttcattgaggacattcttcagaactggacggacaactatgacctccttgaggacaatcactcctacatccagtggctgtttcctctgcgagaaccaggagtgaactggcatgccaagcccctcacgctcagggaggtcgaggtgtttaaaagctcccaggagatccaggagcggcttgtccgggcctacgagctcatgctgggcttctacgggatccggctggaggaccgaggcacgggcacggtgggccgagcacagaactaccagaagcgcttccagaacctgaactggcgcagccacaacaacctccgcatcacacgcatcctcaagtcgctgggtgagctgggcctcgagcacttccaggcgccgctggtccgcttcttcctggaggagacgctggtgcggcgggagctgccgggggtgcggcagagtgccctggactacttcatgttcgccgtgcgctgccgacaccagcgccgccagctggtgcacttcgcctgggagcacttccggccccgctgcaagttcgtctgggggccccaagacaagctgcggaggttcaagcccagctctctgccccatccgctcgagggctccaggaaggtggaggaggaaggaagccccggggaccccgaccacgaggccagcacccaggtcggacctgtgggccagagcatagcaagggtgggggcagggtggacgaggggccccagccacggagcgtggagccccaggatgcgggacccctggagaggagccagggggatgaggcagggggccacggggaagataggccggagcccttaagccccaaagagagcaagaagaggaagctggagctgagccggcgggagcagccgcccacagagccaggccctcagagtgcctcagaggtggagaagatcgctctgaatttggaggggtgtgccctcagccagggcagcctcaggacggggacccaggaagtgggcggtcaggaccctgggctgcgcccctgtctttgtaaattgacccttctggagtggggggcggcgggcagggctgcttttcttagtctgataccaagcaaggccttttctgaataaattcatttgactttga

SEQ ID NO: 83399 - DNA, 955 bp, Homo sapiens
  misc_feature (922)..(922): n is a, c, g, or t
cgcttccgcctccagcgcgagccccgccgccgccgagcatggacgaccccgactgcgactccacctgggaggaggacgaggaggatgcggaggacgcggaggacgaggactgcgaggacggcgaggccgccggcgcgagggacgcggacgcaggggacgaggacgaggagtcggaggagccgcgggcggcgcggcccagctcgttccagtccagaatgacagggtccagaaactggcgagccacgagggacatgtgtaggtatcggcacaactatccggatctggtggaacgagactgcaatggggacacgccaaacctgagtttctacagaaatgagatccgcttcctgcccaacggctgtttcattgaggacattcttcagaactggacggacaactatgacctccttgaggacaatcactcctacatccagtggctgtttcctctgcgagaaccaggagtgaactggcatgccaagcccctcacgctcagggaggtcgaggtgtttaaaagctcccaggagatccaggagcggcttgtccgggcctacgagctcatgctgggcttctacgggatccggctggaggaccgaggcacgggcacggtgggccgagcacagaactaccagaagcgcttccagaacctgaactggcgcagccacaacaacctccgcatcacacgcatcctcaagtcgctgggtgagctgggcctcgagcacttccaggcgccgctggtccgcttcttcctggaggagacgctggtgcggcgggagctgccgggggtgcggcagagtgccctggactacttcatgttcgccgtgcgctgccgacaccagcgccgccagctggtgcacttcgcctgggagcacttccggccccgctgcaagttcgtctgggggcccctaacacgtgggagcatggnttggcctcataacgggatggtctagagtacctg

SEQ ID NO: 83400 - DNA, 2344 bp, Homo sapiens
tagaattcagcggccgctgaattctagcccccgactgcgactccacctgggaggaggacgaggaggatgcggaggacgcggaggacgaggactgcgaggacggcgaggccgccggcgcgagggacgcggacgcaggggacgaggacgaggagtcggaggagccgcgggcggcgcggcccagctcgttccagtccagaatgacagggtccagaaactggcgagccacgagggacatgtgtaggtatcggcacaactatccggatctggtggaacgagactgcaatggggacacgccaaacctgagtttctacagaaatgagatccgcttcctgcccaacggctgtttcattgaggacattcttcagaactggacggacaactatgacctccttgaggacaatcactcctacatccagtggctgtttcctctgcgagaaccaggagtgaactggcatgccaagcccctcacgctcagggaggtcgaggtgtttaaaagctcccaggagatccaggagcggcttgtccgggcctacgagctcatgctgggcttctacgggatccggctggaggaccgaggcacgggcacggtgggccgagcacagaactaccagaagcgcttccagaacctgaactggcgcagccacaacaacctccgcatcacacgcatcctcaagtcgctgggtgagctgggcctcgagcacttccaggcgccgctggtccgcttcttcctggaggagacgctggtgcggcgggagctgccgggggtgcggcagagtgccctggactacttcatgttcgccgtgcgctgccgacaccagcgccgccagctggtgcacttcgcctgggagcacttccggccccgctgcaagttcgtctgggggccccaagacaagctgcggaggttcaagcccagctctctgccccatccgctcgagggctccaggaaggtggaggaggaaggaagccccggggaccccgaccacgaggccagcacccaggtcggacctgtgggccagagcatagcaagggtgggggcagggtggacgaggggccccagccacggagcgtggagccccaggatgcgggacccctggagaggagccagggggatgaggcagggggccacggggaagataggccggagcccttaagccccaaagagagcaagaagaggaagctggagctgagccggcgggagcagccgcccacagagccaggccctcagagtgcctcagaggtggagaagatcgctctgaatttggaggggtgtgccctcagccagggcagcctcaggacggggacccaggaagtgggcggtcaggaccctggggaggcagtgcagccctgccgccaacccctgggagccagggtggccgacaaggtgaggaagcggaggaaggtggatgagggtgctggggacagtgctgcggtggccagtggtggtgcccagaccttggcccttgccgggtcccctgccccatcggggcaccccaaggctggacacagtgagaacggggttgaggaggacacagaaggtcgaacggggcccaaagaaggtacccctgggagcccatcggagaccccaggccccagcccagcaggacctgcaggggacgagccagccgagagcccatcggagaccccaggcccccgcccagcaggacctgcaggggacgagccagccgagagcccatcggagaccccaggccccagcccggcaggacctacaagggatgagccagccgagagcccatcggagaccccaggcccccgcccggcaggacctgcaggggacgagccagccgagagcccatcggagaccccaggcccccgcccggcaggacctgcaggggacgagccagccgagagcccatcggagaccccaggccccagcccggcaggacctacaagggatgagccagccaaggcgggggaggcagcagagttgcaggacgcagaggtggagtcttctgccaagtctgggaagccttaaggaaaggagtgcccgtcggcgtcttggtcctcctgtccctgctgcaggggctggggcctccggagctgctgcgggctcccctcaggctctgcttcgtgacccgtgacccatgacccacagtgctggcctcctgtggggccactatagcagccaccagaagccgcgaggccctcagggaagcccaaggcctgcagaagcctcctggcctggctgtgtcttccccacccagctctcccctgcgcccctgtctttgtaaattgacccttctggagtggggggcggcgggcagggctgcttttcttagtctgataccaagcaaggccttttctgaataaattcatttgactttga

SEQ ID NO: 83401 - DNA, 2404 bp, Homo sapiens
tagaattcagcggccgctgaattctagcccccgactgcgactccacctgggaggaggacgaggaggatgcggaggacgcggaggacgaggactgcgaggacggcgaggccgccggcgcgagggacgcggacgcaggggacgaggacgaggagtcggaggagccgcgggcggcgcggcccagctcgttccagtccagaatgacagggtccagaaactggcgagccacgagggacatgtgtaggtatcggcacaactatccggatctggtggaacgagactgcaatggggacacgccaaacctgagtttctacagaaatgagatccgcttcctgcccaacggctgtttcattgaggacattcttcagaactggacggacaactatgacctccttgaggacaatcactcctacatccagtggctgtttcctctgcgagaaccaggagtgaactggcatgccaagcccctcacgctcagggaggtcgaggtgtttaaaagctcccaggagatccaggagcggcttgtccgggcctacgagctcatgctgggcttctacgggatccggctggaggaccgaggcacgggcacggtgggccgagcacagaactaccagaagcgcttccagaacctgaactggcgcagccacaacaacctccgcatcacacgcatcctcaagtcgctgggtgagctgggcctcgagcacttccaggcgccgctggtccgcttcttcctggaggagacgctggtgcggcgggagctgccgggggtgcggcagagtgccctggactacttcatgttcgccgtgcgctgccgacaccagcgccgccagctggtgcacttcgcctgggagcacttccggccccgctgcaagttcgtctgggggccccaagacaagctgcggaggttcaagcccagctctctgccccatccgctcgagggctccaggaaggtggaggaggaaggaagccccggggaccccgaccacgaggccagcacccaggtcggacctgtgggccagagcatagcaagggtgggggcagggtggacgaggggccccagccacggagcgtggagccccaggatgcgggacccctggagaggagccagggggatgaggcagggggccacggggaagataggccggagcccttaagccccaaagagagcaagaagaggaagctggagctgagccggcgggagcagccgcccacagagccaggccctcagagtgcctcagaggtggagaagatcgctctgaatttggaggggtgtgccctcagccagggcagcctcaggacggggacccaggaagtgggcggtcaggaccctggggaggcagtgcagccctgccgccaacccctgggagccagggtggccgacaaggtgaggaagcggaggaaggtggatgagggtgctggggacagtgctgcggtggccagtggtggtgcccagaccttggcccttgccgggtcccctgccccatcggggcaccccaaggctggacacagtgagaacggggttgaggaggacacagaaggtcgaacggggcccaaagaaggtacccctgggagcccatcggagaccccaggccccagcccagcaggacctgcaggggacgagccagccgagagcccatcggagaccccaggcccccgcccagcaggacctgcaggggacgagccagccgagagcccatcggagaccccaggcccccgcccggcaggacctgcaggggacgagccagccgagagcccatcggagaccccaggccccagcccggcaggacctacaagggatgagccagccgagagcccatcggagaccccaggcccccgcccggcaggacctgcaggggacgagccagccgagagcccatcggagaccccaggcccccgcccggcaggacctgcaggggacgagccagccgagagcccatcggagaccccaggccccagcccggcaggacctacaagggatgagccagccaaggcgggggaggcagcagagttgcaggacgcagaggtggagtcttctgccaagtctgggaagccttaaggaaaggagtgcccgtcggcgtcttggtcctcctgtccctgctgcaggggctggggcctccggagctgctgcgggctcccctcaggctctgcttcgtgacccgtgacccatgacccacagtgctggcctcctgtggggccactatagcagccaccagaagccgcgaggccctcagggaagcccaaggcctgcagaagcctcctggcctggctgtgtcttccccacccagctctcccctgcgcccctgtctttgtaaattgacccttctggagtggggggcggcgggcagggctgcttttcttagtctgataccaagcaaggccttttctgaataaattcatttgactttga

SEQ ID NO: 83402 - DNA, 1652 bp, Homo sapiens
tagaattcagcggccgctgaattctagcccccgactgcgactccacctgggaggaggacgaggaggatgcggaggacgcggaggacgaggactgcgaggacggcgaggccgccggcgcgagggacgcggacgcaggggacgaggacgaggagtcggaggagccgcgggcggcgcggcccagctcgttccagtccagaatgacagggtccagaaactggcgagccacgagggacatgtgtaggtatcggcacaactatccggatctggtggaacgagactgcaatggggacacgccaaacctgagtttctacagaaatgagatccgcttcctgcccaacggctgtttcattgaggacattcttcagaactggacggacaactatgacctccttgaggacaatcactcctacatccagtggctgtttcctctgcgagaaccaggagtgaactggcatgccaagcccctcacgctcagggaggtcgaggtgtttaaaagctcccaggagatccaggagcggcttgtccgggcctacgagctcatgctgggcttctacgggatccggctggaggaccgaggcacgggcacggtgggccgagcacagaactaccagaagcgcttccagaacctgaactggcgcagccacaacaacctccgcatcacacgcatcctcaagtcgctgggtgagctgggcctcgagcacttccaggcgccgctggtccgcttcttcctggaggagacgctggtgcggcgggagctgccgggggtgcggcagagtgccctggactacttcatgttcgccgtgcgctgccgacaccagcgccgccagctggtgcacttcgcctgggagcacttccggccccgctgcaagttcgtctgggggccccaagacaagctgcggaggttcaagcccagctctctgccccatccgctcgagggctccaggaaggtggaggaggaaggaagccccggggaccccgaccacgaggccagcacccaggtcggacctgtgggccagagcatagcaagggtgggggcagggtggacgaggggccccagccacggagcgtggagccccaggatgcgggacccctggagaggagccagggggatgaggcagggggccacggggaagataggccggagcccttaagccccaaagagagcaagaagaggaagctggagctgagccggcgggagcagccgcccacagagccaggccctcagagtgcctcagaggtggagaagatcgctctgaatttggaggggtgtgccctcagccagggcagcctcaggacggggacccaggaagtgggcggtcaggaccctgggctcctgtccctgctgcaggggctggggcctccggagctgctgcgggctcccctcaggctctgcttcgtgacccgtgacccatgacccacagtgctggcctcctgtggggccactatagcagccaccagaagccgcgaggccctcagggaagcccaaggcctgcagaagcctcctggcctggctgtgtcttccccacccagctctcccctgcgcccctgtctttgtaaattgacccttctggagtggggggcggcgggcagggctgcttttcttagtctgataccaagcaaggccttttctgaataaattcatttgactttga

SEQ ID NO: 83403 - DNA, 2443 bp, Homo sapiens
ggaggaagagtataggtcggtcctggtgttatttcgtgcgagggcccggatgtcgtcgtactatgtgccccgactgcgactccacctgggaggaggacgaggaggatgcggaggacgcggaggacgaggactgcgaggacggcgaggccgccggcgcgagggacgcggacgcaggggacgaggacgaggagtcggaggagccgcgggcggcgcggcccagctcgttccagtccagaatgacagggtccagaaactggcgagccacgagggacatgtgtaggtatcggcacaactatccggatctggtggaacgagactgcaatggggacacgccaaacctgagtttctacagaaatgagatccgcttcctgcccaacggctgtttcattgaggacattcttcagaactggacggacaactatgacctccttgaggacaatcactcctacatccagtggctgtttcctctgcgagaaccaggagtgaactggcatgccaagcccctcacgctcagggaggtcgaggtgtttaaaagctcccaggagatccaggagcggcttgtccgggcctacgagctcatgctgggcttctacgggatccggctggaggaccgaggcacgggcacggtgggccgagcacagaactaccagaagcgcttccagaacctgaactggcgcagccacaacaacctccgcatcacacgcatcctcaagtcgctgggtgagctgggcctcgagcacttccaggcgccgctggtccgcttcttcctggaggagacgctggtgcggcgggagctgccgggggtgcggcagagtgccctggactacttcatgttcgccgtgcgctgccgacaccagcgccgccagctggtgcacttcgcctgggagcacttccggccccgctgcaagttcgtctgggggccccaagacaagctgcggaggttcaagcccagctctctgccccatccgctcgagggctccaggaaggtggaggaggaaggaagccccggggaccccgaccacgaggccagcacccaggtcggacctgtgggccagagcatagcaagggtgggggcagggtggacgaggggccccagccacggagcgtggagccccaggatgcgggacccctggagaggagccagggggatgaggcagggggccacggggaagataggccggagcccttaagccccaaagagagcaagaagaggaagctggagctgagccggcgggagcagccgcccacagagccaggccctcagagtgcctcagaggtggagaagatcgctctgaatttggaggggtgtgccctcagccagggcagcctcaggacggggacccaggaagtgggcggtcaggaccctggggaggcagtgcagccctgccgccaacccctgggagccagggtggccgacaaggtgaggaagcggaggaaggtggatgagggtgctggggacagtgctgcggtggccagtggtggtgcccagaccttggcccttgccgggtcccctgccccatcggggcaccccaaggctggacacagtgagaacggggttgaggaggacacagaaggtcgaacggggcccaaagaaggtacccctgggagcccatcggagaccccaggccccagcccagcaggacctgcaggggacgagccagccgagagcccatcggagaccccaggcccccgcccagcaggacctgcaggggacgagccagccgagagcccatcggagaccccaggcccccgcccggcaggacctgcaggggacgagccagccgagagcccatcggagaccccaggccccagcccggcaggacctacaagggatgagccagccgagagcccatcggagaccccaggcccccgcccggcaggacctgcaggggacgagccagccgagagcccatcggagaccccaggcccccgcccggcaggacctgcaggggacgagccagccgagagcccatcggagaccccaggccccagcccggcaggacctacaagggatgagccagccaaggcgggggaggcagcagagttgcaggacgcagaggtggagtcttctgccaagtctgggaagccttaaggaaaggagtgcccgtcggcgtcttggtcctcctgtccctgctgcaggggctggggcctccggagctgctgcgggctcccctcaggctctgcttcgtgacccgtgacccatgacccacagtgctggcctcctgtggggccactatagcagccaccagaagccgcgaggccctcagggaagcccaaggcctgcagaagcctcctggcctggctgtgtcttccccacccagctctcccctgcgcccctgtctttgtaaattgacccttctggagtggggggcggcgggcagggctgcttttcttagtctgataccaagcaaggccttttctgaataaattcatttgactttga

SEQ ID NO: 83404 - DNA, 2456 bp, Homo sapiens
  misc_feature (56)..(56): n is a, c, g, or t
aacgaatatgtatgagtgcgtcgctcggtttaatttatgacgaggggcgcgttcantgataaatcccttgtgctagtccgccccgactgcgactccacctgggaggaggacgaggaggatgcggaggacgcggaggacgaggactgcgaggacggcgaggccgccggcgcgagggacgcggacgcaggggacgaggacgaggagtcggaggagccgcgggcggcgcggcccagctcgttccagtccagaatgacagggtccagaaactggcgagccacgagggacatgtgtaggtatcggcacaactatccggatctggtggaacgagactgcaatggggacacgccaaacctgagtttctacagaaatgagatccgcttcctgcccaacggctgtttcattgaggacattcttcagaactggacggacaactatgacctccttgaggacaatcactcctacatccagtggctgtttcctctgcgagaaccaggagtgaactggcatgccaagcccctcacgctcagggaggtcgaggtgtttaaaagctcccaggagatccaggagcggcttgtccgggcctacgagctcatgctgggcttctacgggatccggctggaggaccgaggcacgggcacggtgggccgagcacagaactaccagaagcgcttccagaacctgaactggcgcagccacaacaacctccgcatcacacgcatcctcaagtcgctgggtgagctgggcctcgagcacttccaggcgccgctggtccgcttcttcctggaggagacgctggtgcggcgggagctgccgggggtgcggcagagtgccctggactacttcatgttcgccgtgcgctgccgacaccagcgccgccagctggtgcacttcgcctgggagcacttccggccccgctgcaagttcgtctgggggccccaagacaagctgcggaggttcaagcccagctctctgccccatccgctcgagggctccaggaaggtggaggaggaaggaagccccggggaccccgaccacgaggccagcacccaggtcggacctgtgggccagagcatagcaagggtgggggcagggtggacgaggggccccagccacggagcgtggagccccaggatgcgggacccctggagaggagccagggggatgaggcagggggccacggggaagataggccggagcccttaagccccaaagagagcaagaagaggaagctggagctgagccggcgggagcagccgcccacagagccaggccctcagagtgcctcagaggtggagaagatcgctctgaatttggaggggtgtgccctcagccagggcagcctcaggacggggacccaggaagtgggcggtcaggaccctggggaggcagtgcagccctgccgccaacccctgggagccagggtggccgacaaggtgaggaagcggaggaaggtggatgagggtgctggggacagtgctgcggtggccagtggtggtgcccagaccttggcccttgccgggtcccctgccccatcggggcaccccaaggctggacacagtgagaacggggttgaggaggacacagaaggtcgaacggggcccaaagaaggtacccctgggagcccatcggagaccccaggccccagcccagcaggacctgcaggggacgagccagccgagagcccatcggagaccccaggcccccgcccagcaggacctgcaggggacgagccagccgagagcccatcggagaccccaggcccccgcccggcaggacctgcaggggacgagccagccgagagcccatcggagaccccaggccccagcccggcaggacctacaagggatgagccagccgagagcccatcggagaccccaggcccccgcccggcaggacctgcaggggacgagccagccgagagcccatcggagaccccaggcccccgcccggcaggacctgcaggggacgagccagccgagagcccatcggagaccccaggccccagcccggcaggacctacaagggatgagccagccaaggcgggggaggcagcagagttgcaggacgcagaggtggagtcttctgccaagtctgggaagccttaaggaaaggagtgcccgtcggcgtcttggtcctcctgtccctgctgcaggggctggggcctccggagctgctgcgggctcccctcaggctctgcttcgtgacccgtgacccatgacccacagtgctggcctcctgtggggccactatagcagccaccagaagccgcgaggccctcagggaagcccaaggcctgcagaagcctcctggcctggctgtgtcttccccacccagctctcccctgcgcccctgtctttgtaaattgacccttctggagtggggggcggcgggcagggctgcttttcttagtctgataccaagcaaggccttttctgaataaattcatttgactttga

SEQ ID NO: 83405 - DNA, 3970 bp, Homo sapiens
tgtcgccgggagggcagcggccaggcaggctgggcaggggggtggggtctggctctgtcccacaggacggtgtgacccctgggtgggctcttgacgggctttcctcactggagttcctcaggccgctctcctgaagcggtgctcagaggccctgaccatcctgccaggcgcccgtgacccctgacctcttccctctgcctcctgctgtggcttctgtccacaagcccctccccttcccctttggacccctcaggcctccccagctgcctgcgctggaccctggcggggctgtttcactttttcctgggcagtgtcatgtatgcacctgtgggctgactgtgtggccacatccagtcaggacccagcctccagaactgacccagggaggctcccgctggccccaggaaggagaagtagaaactgatgatcaggcggggcgagagaaccacaccagcggccctgttgagaaatcaggccgagaggtcggtggcggtggctcaggcctgtaatcccagcactttcggaggcctgggcagtcggatcaccagaggtcaggagtccaagattagcctggccaacatggtgaaactgttgtctctactaaaaatacaacattagccaggcgtgatgggcacctgtaatcccagttcctccagagattgaagcaggagaatcgcttaaacctgggaggtggaggttgcagtgagtggagattgcctgggaggtggaggttgcagtgagtggagattgcctgggaggtggagattgcatgaagctccatctcgaggggaaaaaaataagaaagaaaaatcaggcagagaggcaacgccaggtcccagctggagctcagcggggagccaggggatacagtggctgaccgggcctcctaaccccccttctagcactcccccaggatcctgggtcccaattgttgccctggacaaatacgcccattcctgccctacccaccgagtgaggctcagccccaggccccccaccctcatcacaaggtcagggctgtgtcccagcatcctcatcactaggtacttccggccctttgctcagccccatgatgcttggcctgcagagatgggggctgaagggcttggggcatcaaggggacctgacatcttgctgagaagccatcactagacagggctggaggctggagactcagggcctgccctcaccgtggccagtgaggcgtggggttgggcagggaaggggcattcattcattagaccctgccagaagcacctgggtccccttctggggctacaggtggtgaggccactgcccccaagaacacagcctggtgactttagtgtacaaagcagggggagtctccaggggcacagaacagaggctaaagccagggtggaggtggccagcaggcctaggaggaggagagggtcagggccacaccccaggggaggtgcatgtcagccaggggccaccctaaggtggaagccaggagtcccaaaggggcctagagaaggagcagccccccacctggctaccgcagccctctctggttctgtgcagggtattgggatgcgttactgaggcccaaatctgccccactgggaacccccaaaaaagagccagggcaggagaatgagagggaggagccatgaaacccccgccctttaaagacagctctgtggcagctggcccaggccctgcagccctcaccacgttgggactcacttgggggtctcccatgggggtcctaatcccatctcttttcttcccagtccagaatgacagggtccagaaactggcgagccacgagggacatgtgtaggtatcggcacaactatccggatctggtggaacgagactgcaatggggacacgccaaacctgagtttctacagaaatgagatccgcttcctgcccaacggctgtttcattgaggacattcttcagaactggacggacaactatgacctccttgaggacaatcactcctacatccagtggctgtttcctctgcgagaaccaggagtgaactggcatgccaagcccctcacgctcagggaggtcgaggtgtttaaaagctcccaggagatccaggagcggcttgtccgggcctacgagctcatgctgggcttctacgggatccggctggaggaccgaggcacgggcacggtgggccgagcacagaactaccagaagcgcttccagaacctgaactggcgcagccacaacaacctccgcatcacacgcatcctcaagtcgctgggtgagctgggcctcgagcacttccaggcgccgctggtccgcttcttcctggaggagacgctggtgcggcgggagctgccgggggtgcggcagagtgccctggactacttcatgttcgccgtgcgctgccgacaccagcgccgccagctggtgcacttcgcctgggagcacttccggccccgctgcaagttcgtctgggggccccaagacaagctgcggaggttcaagcccagctctctgccccatccgctcgagggctccaggaaggtggaggaggaaggaagccccggggaccccgaccacgaggccagcacccaggtcggacctgtgggccagagcatagcaagggtgggggcagggtggacgaggggccccagccacggagcgtggagccccaggatgcgggacccctggagaggagccagggggatgaggcagggggccacggggaagataggccggagcccttaagccccaaagagagcaagaagaggaagctggagctgagccggcgggagcagccgcccacagagccaggccctcagagtgcctcagaggtggagaagatcgctctgaatttggaggggtgtgccctcagccagggcagcctcaggacggggacccaggaagtgggcggtcaggaccctggggaggcagtgcagccctgccgccaacccctgggagccagggtggccgacaaggtgaggaagcggaggaaggtggatgagggtgctggggacagtgctgcggtggccagtggtggtgcccagaccttggcccttgccgggtcccctgccccatcggggcaccccaaggctggacacagtgagaacggggttgaggaggacacagaaggtcgaacggggcccaaagaaggtacccctgggagcccatcggagaccccaggccccagcccagcaggacctgcaggggacgagccagccgagagcccatcggagaccccaggcccccgcccagcaggacctgcaggggacgagccagccgagagcccatcggagaccccaggcccccgcccggcaggacctgcaggggacgagccagccgagagcccatcggagaccccaggccccagcccggcaggacctacaagggatgagccagccgagagcccatcggagaccccaggcccccgcccggcaggacctgcaggggacgagccagccgagagcccatcggagaccccaggcccccgcccggcaggacctgcaggggacgagccagccgagagcccatcggagaccccaggccccagcccggcaggacctacaagggatgagccagccaaggcgggggaggcagcagagttgcaggacgcagaggtggagtcttctgccaagtctgggaagccttaaggaaaggagtgcccgtcggcgtcttggtcctcctgtccctgctgcaggggctggggcctccggagctgctgcgggctcccctcaggctctgcttcgtgacccgtgacccatgacccacagtgctggcctcctgtggggccactatagcagccaccagaagccgcgaggccctcagggaagcccaaggcctgcagaagcctcctggcctggctgtgtcttccccacccagctctcccctgcgcccctgtctttgtaaattgacccttctggagtggggggcggcgggcagggctgcttttcttagtctgataccaagcaaggccttttctgaataaattcatttgactttga

SEQ ID NO: 83406 - DNA, 2547 bp, Homo sapiens
cgcttccgcctccagcgcgagccccgccgccgccgagcatggacgaccccgactgcgactccacctgggaggaggacgaggaggatgcggaggacgcggaggacgaggactgcgaggacggcgaggccgccggcgcgagggacgcggacgcaggggacgaggacgagtgcagctcggcagggagcccgtgggctggctgctggtcccaatgcttcggttcgcagtctccatgatattgagcaggggttccatgacatgctgggcgacgcgcacgagggggacctatgtgttacgcgtattcagggcagcgaagcataatccggggaatcatgggtgggaccgtgaggatcgtgcaatgtggggtggacgacgtctaaaaagccatgagtttttctacgagaggaatgagatccagggttcccgtgccgcaaggggtgctgttgtcaattcgagggaccttttcgtatcagcagagctgggagcgggaccaaactattgaggctcctttgaggggactagttcactccttacattccagttggttgtttcctctgcgagacccgtggagtgcaactggtgttgccattgcccctcacggctcagggggggtcgagggtgttagaagatggtgtttaaaagctcccaggagatccaggagcggcttgtccgggcctacgagctcatgctgggcttctacgggatccggctggaggaccgaggcacgggcacggtgggccgagcacagaactaccagaagcgcttccagaacctgaactggcgcagccacaacaacctccgcatcacacgcatcctcaagtcgctgggtgagctgggcctcgagcacttccaggcgccgctggtccgcttcttcctggaggagacgctggtgcggcgggagctgccgggggtgcggcagagtgccctggactacttcatgttcgccgtgcgctgccgacaccagcgccgccagctggtgcacttcgcctgggagcacttccggccccgctgcaagttcgtctgggggccccaagacaagctgcggaggttcaagcccagctctctgccccatccgctcgagggctccaggaaggtggaggaggaaggaagccccggggaccccgaccacgaggccagcacccaggtcggacctgtgggccagagcatagcaagggtgggggcagggtggacgaggggccccagccacggagcgtggagccccaggatgcgggacccctggagaggagccagggggatgaggcagggggccacggggaagataggccggagcccttaagccccaaagagagcaagaagaggaagctggagctgagccggcgggagcagccgcccacagagccaggccctcagagtgcctcagaggtggagaagatcgctctgaatttggaggggtgtgccctcagccagggcagcctcaggacggggacccaggaagtgggcggtcaggaccctggggaggcagtgcagccctgccgccaacccctgggagccagggtggccgacaaggtgaggaagcggaggaaggtggatgagggtgctggggacagtgctgcggtggccagtggtggtgcccagaccttggcccttgccgggtcccctgccccatcggggcaccccaaggctggacacagtgagaacggggttgaggaggacacagaaggtcgaacggggcccaaagaaggtacccctgggagcccatcggagaccccaggccccagcccagcaggacctgcaggggacgagccagccgagagcccatcggagaccccaggcccccgcccagcaggacctgcaggggacgagccagccgagagcccatcggagaccccaggcccccgcccggcaggacctgcaggggacgagccagccgagagcccatcggagaccccaggccccagcccggcaggacctacaagggatgagccagccgagagcccatcggagaccccaggcccccgcccggcaggacctgcaggggacgagccagccgagagcccatcggagaccccaggcccccgcccggcaggacctgcaggggacgagccagccgagagcccatcggagaccccaggccccagcccggcaggacctacaagggatgagccagccaaggcgggggaggcagcagagttgcaggacgcagaggtggagtcttctgccaagtctgggaagccttaaggaaaggagtgcccgtcggcgtcttggtcctcctgtccctgctgcaggggctggggcctccggagctgctgcgggctcccctcaggctctgcttcgtgacccgtgacccatgacccacagtgctggcctcctgtggggccactatagcagccaccagaagccgcgaggccctcagggaagcccaaggcctgcagaagcctcctggcctggctgtgtcttccccacccagctctcccctgcgcccctgtctttgtaaattgacccttctggagtggggggcggcgggcagggctgcttttcttagtctgataccaagcaaggccttttctgaataaattcatttgactttga

SEQ ID NO: 83407 - DNA, 1219 bp, Homo sapiens
cccgccgcccgcccgcccgcccgcccgcccgcccgccgcccgcccgcccgcccgcccgcccgcccgccgcccgcccgcccgcccgcccgcccgcccgccgcccgcccgcccgcccgcccgcccgcccgccgcccgcccgcccgcccgcccgcccgcccgccgcccgcccgcccgcccgcccgcccgcccgccgcccgcccgcccgcccgcccgcccgcccgccgcccgcccgcccgcccgcccgcccgcccgccgcccgcccgcccgcccgcccgcccgcccgccgcccgcccgcccgcccgcccgcccgcccgccgcccgcccgcccgcccgcccgcccgcccgccgcccgcccgcccgcccgcccgcccgcccgccgcccgcccgcccgcccgcccgcccgcccgccgcccgcccgcccgcccgcccgcccgcccgccgcccgcccgcccgcccgcccgcccgcccgccgcccgcccgcccgcccgcccgcccgcccgccgcccgcccgcccgcccgcccgcccgcccgccgcccgcccgcccgcccgcccgcccgcccgccgcccgcccgcccgcccgcccgcccgcccgccgcccgcccgcccgcccgcccgcccgcccgccgcccgcccgcccgcccgcccgcccgcccgccgcccgcccgcccgcccgcccgcccgcccgcccccgcccgcccaggcccccgcccggcaggacctgcaggggacgagccagccgagagcccatcggagaccccaggccccagcccggcaggacctacaagggatgagccagccaaggcgggggaggcagcagagttgcaggacgcagaggtggagtcttctgccaagtctgggaagccttaaggaaaggagtgcccgtcggcgtcttggtcctcctgtccctgctgcaggggctggggcctccggagctgctgcgggctcccctcaggctctgcttcgtgacccgtgacccatgacccacagtgctggcctcctgtggggccactatagcagccaccagaagccgcgaggccctcagggaagcccaaggcctgcagaagcctcctggcctggctgtgtcttccccacccagctctcccctgcgcccctgtctttgtaaattgacccttctggagtggggggcggcgggcagggctgcttttcttagtctgataccaagcaaggccttttctgaataaattcatttgactttga

SEQ ID NO: 83408 - DNA, 730 bp, Homo sapiens
aaaaatctattcagttcctgggtttagatagcagagtatggccacgagcgatacctgtgtagttttgtcaggtaaaaagacagttcgacagcagagggcatggtgatgacggcactcgtgccccagtctcagtgggaaggctggccctctctggctcatgccaggtgactggcatgcggcctcttttccccttcatcctggagcctcccttcccatctctcctgtactggatcttatgcgtattagaggacatcttcctgtccttcctgggaaaggagcgtgaggcctcatatgtctgaagatgtctttactagggcccagcacggtggcttacgcctgtaatcccagcactttgggatgctgaggtgggaggatcacttgagcccaggagttcaagatcagcctgggcaacatagtgagaccccatctctatttaagaaaaaaaaaagaccccgggcgtggtggctcatgcctgtaatcccagcactttgggaggctaaggcgggcggatcaccaggtcaggagctcgagaccatcctggctaacatggtgaaaccccgtctctactagaaatacaaaaaattagccgggtgtggtggtgggcacctgtagtaccagctacttgggaggctgaggcaggagaatggcatgaacccgggaggtggaggttgcagtgagccgagatcccaccactgtactccagcctgggcgacagagcaagactccgtct

SEQ ID NO: 83409 - DNA, 327 bp, Homo sapiens
atggcaatgtcacactatgaaaatgaatagcccctattgcttagcatacctaaaaagagaagtgttgacattgaattttccaaaatcatagacaataatgtatgtaggaatatattactgtgtatcttagagtctgtgaactttcaattgatttttgatggtttctggttatccttaactaaatggtaaaaataatttcatcggtattatacatgaatttattatcagttgaaattaaaaaattgctttctggaaaagtaatgactattttatatataaattgacaggaataagattatctcttgtcattttgaaaatttctttcaa

SEQ ID NO: 83410 - DNA, 1198 bp, Homo sapiens
gcggccgcagccgctgccccgggccgggcgcccgcggcggcaccatgagtccccgctcgtgcctgcgttcgctgcgcctcctcgtcttcgccgtcttctcagccgccgcgagcaactggctgtacctggccaagctgtcgtcggtggggagcatctcagaggaggagacgtgcgagaaactcaagggcctgatccagaggcaggtgcagatgtgcaagcggaacctggaagtcatggactcggtgcgccgcggtgcccagctggccattgaggagtgccagtaccagttccggaaccggcgctggaactgctccacactcgactccttgcccgtcttcggcaaggtggtgacgcaagggactcgggaggcggccttcgtgtacgccatctcttcggcaggtgtggcctttgcagtgacgcgggcgtgcagcagtggggagctggagaagtgcggctgtgacaggacagtgcatggggtcagcccacagggcttccagtggtcaggatgctctgacaacatcgcctacggtgtggccttctcacagtcgtttgtggatgtgcgggagagaagcaagggggcctcgtccagcagagccctcatgaacctccacaacaatgaggccggcaggaaggccatcctgacacacatgcgggtggaatgcaagtgccacggggtgtcaggctcctgtgaggtaaagacgtgctggcgagccgtgccgcccttccgccaggtgggtcacgcactgaaggagaagtttgatggtgccactgaggtggagccacgccgcgtgggctcctccagggcactggtgccacgcaacgcacagttcaagccgcacacagatgaggacctggtgtacttggagcctagccccgacttctgtgagcaggacatgcgcagcggcgtgctgggcacgaggggccgcacatgcaacaagacgtccaaggccatcgacggctgtgagctgctgtgctgtggccgcggcttccacacggcgcaggtggagctggctgaacgctgcagctgcaaattccactggtgctgcttcgtcaagtgccggcagtgccagcggctcgtggagttgcacacgtgccgatgaccgcctgcctagccctgcgccggcaaccacctagtggcccagggaaggccgataatttaaacagtctcccaccacctaccccaagagatactggttgt

SEQ ID NO: 83411 - DNA, 534 bp, Homo sapiens
gcggccgcagccgctgccccgggccgggcgcccgcggcggcaccatgagtccccgctcgtgcctgcgttcgctgcgcctcctcgtcttcgccgtcttctcagccgccgcgagcaactggctgtacctggccaagctgtcgtcggtggggagcatctcagaggaggagacgtgcgagaaactcaagggcctgatccagaggcaggtgcagatgtgcaagcggaacctggaagtcatggactcggtgcgccgcggtgcccagctggccattgaggagtgccagtaccagttccggaaccggcgctggaactgctccacactcgactccttgcccgtcttcggcaaggtggtgacgcaaggtggcaaagcctggcatggaggagacagtggatgtcatctactgacagaaagcaggtcaggggagaggactcaaaggcgcaaggaaggaggtagcctggggcaatgctggcctgaagccatcgtgggtactcaggaccccatgagaagccctccttacctttgggggaggaaccaag

SEQ ID NO: 83412 - DNA, 921 bp, Homo sapiens
gcacgtgtgcaactccacgagccgctggaactgctccacactcgactccttgcccgtcttcggcaaggtggtgacgcaagggactcgggaggcggccttcgtgtacgccatctcttcggcaggtgtggcctttgcagtgacgcgggcgtgcagcagtggggagctggagaagtgcggctgtgacaggacagtgcatggggtcagcccacagggcttccagtggtcaggatgctctgacaacatcgcctacggtgtggccttctcacagtcgtttgtggatgtgcgggagagaagcaagggggcctcgtccagcagagccctcatgaacctccacaacaatgaggccggcaggaaggccatcctgacacacatgcgggtggaatgcaagtgccacggggtgtcaggctcctgtgaggtaaagacgtgctggcgagccgtgccgcccttccgccaggtgggtcacgcactgaaggagaagtttgatggtgccactgaggtggagccacgccgcgtgggctcctccagggcactggtgccacgcaacgcacagttcaagccgcacacagatgaggacctggtgtacttggagcctagccccgacttctgtgagcaggacatgcgcagcggcgtgctgggcacgaggggccgcacatgcaacaagacgtccaaggccatcgacggctgtgagctgctgtgctgtggccgcggcttccacacggcgcaggtggagctggctgaacgctgcagctgcaaattccactggtgctgcttcgtcaagtgccggcagtgccagcggctcgtggagttgcacacgtgccgatgaccgcctgcctagccctgcgccggcaaccacctagtggcccagggaaggccgataatttaaacagtctcccaccacctaccccaagagatactggttgt

SEQ ID NO: 83413 - DNA, 386 bp, Homo sapiens
tcacacaaatgattccaaatttgatttcgctttcttatagatattcttgaaagaaaatgactaattactatctgatttgtatcttgttttccttcacgtacaaatagtagacatcttttcattctccaacattatatgcccaagctaaattctaactaaaatcttcagtctcccctcacccccgtaatttcaacttttattttagattcagggggtacacatgcagattcattacatcagtgtattttgtgatgcttgggttttgggatacagatgatcccatcacccaggtggtgagcatagtacccataggtattttttcagtctgtacctgcctccctccattcccctcgtagtccccagtgtctattgttcccacttctatg

SEQ ID NO: 83414 - DNA, 3163 bp, Homo sapiens
gtaatgcagagataataaaacttcttaggtccataggtcttataataatttaataacctaaacatggtatacaaattcctccaaacccaataacataattatagtttcaaaaagttccccaaactttcaagttagattttattgctttgatgagtggctttaaatatgaaaagtcttgcctgtgaagggcaatccttttcccgtggactgggatctatagaaatacagaaatgtgcccaggggttcatctccctaataaccatcattcacatttctcaacctccctaataaccagccaccatgtgagaaggatccacagttactgtttatgactataattaactagtacctgggactggtcagtggagttggttgcaacctgatgctaaggatgtcaaagttgtctcggcctctgttcccagccagtaagtaattccctggcctcgggccataccccctaatcttggtcagctgattatgacaggcagacagcacagtaaataacactatatattaagaaaacccaaagcatatgtatcaatggtatatacccaacagcatcctaggaatggagagtctgtagcaagggcctccaatgtgaaggtcaacacagtcactgtgatgcgtgtatttccattttgtaaagcatgatctctggtggtcatttttatcttcctaacttattggaaaagtctcctgttttgggggcccgcccctggtcacagccagactgactcagtttccctgggaggtcccgctcgagcccgtccttcccctccctctgcccgcccccagccctcgccccaccctcggcgcccgcacatctgcctgctcagctccagacggcgcccggacccccgggcgcgggatccagccaggtgggagccccgcagatgaggtctctgaaggtgtgcctgaaccagtgccagcctgccctgtctgcagcatcggcctgatggggtggtgactgatccctcagggctccggagccatgtggcccaacggcagttccctggggccctgtttccggcccacaaacattaccctggaggagagacggctgatcgcctcgccctggttcgccgcctccttctgcgtggtgggcctggcctccaacctgctggccctgagcgtgctggcgggcgcgcggcaggggggttcgcacacgcgctcctccttcctcaccttcctctgcggcctcgtcctcaccgacttcctggggctgctggtgaccggtaccatcgtggtgtcccagcacgccgcgctcttcgagtggcacgccgtggaccctggctgccgtctctgtcgcttcatgggcgtcgtcatgatcttcttcggcctgtccccgctgctgctgggggccgccatggcctcagagcgctacctgggtatcacccggcccttctcgcgcccggcggtcgcctcgcagcgccgcgcctgggccaccgtggggctggtgtgggcggccgcgctggcgctgggcctgctgcccctgctgggcgtgggtcgctacaccgtgcaatacccggggtcctggtgcttcctgacgctgggcgccgagtccggggacgtggccttcgggctgctcttctccatgctgggcggcctctcggtcgggctgtccttcctgctgaacacggtcagcgtggccaccctgtgccacgtctaccacgggcaggaggcggcccagcagcgtccccgggactccgaggtggagatgatggctcagctcctggggatcatggtggtggccagcgtgtgttggctgccccttctggtcttcattgcccagacagtgctgcgaaacccgcctgccatgagccccgccgggcagctgtcccgcaccacggagaaggagctgctcatctacttgcgcgtggccacctggaaccagatcctggacccctgggtgtatatcctgttccgccgcgccgtgctccggcgtctccagcctcgcctcagcacccggcccaggtcgctgtccctccagccccagctcacgcagcgctccgggctgcagtaggaagtggacagagcgcccctcccgcgcctttccgcggagcccttggcccctcggacagcccatctgcctgttctgaggattcaggggctgggggtgctggatggacagtgggcatcagcagcagggttttgggttgaccccaatccaacccggggacccccaactcctccctgatccttttaccaagcactctcccttcctcggcccctttttcccatccagagctcccaccccttctctgcgtccctcccaaccccaggaagggcatgcagacattggaagagggtcttgcattgctatttttttttttagacggagtcttgctctgtcccccaggctggagtgcagtggcgcaatctcagctcactgcaacctccacctcccgggttcaagcgattctcctgcctcagcctcctgagtagctgggactataggcgcgcgccaccacgcccggctaatttttgtatttttagtagagacggggtttcaccgtgttggccaggctggtcttgaactcctgacctcaggtgattcaccagcctcagcctcccaaagtgctgggatcacaggcatgaaccaccacacctggccattttttttttttttttagacggagtctcactctgtggcccagcctggagtacagtggcacgatctcggctcactgcaacctccgcctcccgggttcaagcgattctcgtgcctcagcctcccgagcagctgggattacaggcgtaagccactgcgcccggccttgcatgctctttgaccctgaatttgacctacttgctggggtacagttgcttccttttgaacctccaacagggaaggctctgtccagaaaggattgaatgtgaaacgggggcacccccttttcttgccaaaatatatctctgcctttggttttattttcctttgggtccagaagttttcaatctctggagtttgtgcattgggcctcacccggagcagacgagggcagggctgggaaggatggggagggacatagaggattcggttcctcccccaccttgtttcttgagtgtttcctaatcacttgatgggtggtaccacctagaattcttccagcagcctgtaatgggagggctacaggttagccctggaacctgcaatcaaacc

SEQ ID NO: 83415 - DNA, 1340 bp, Homo sapiens
ccacccgtcccagctcggcttagcccccgcggacccctccaggccgcgaccccagggcgtcctgtgccgccacgccctccatctgtgtgggtcctctgctgggcccgcccctggtcacagccagactgactcagtttccctgggaggtcccgctcgagcccgtccttcccctcccctcgccccaccctcggcgcccgcacatctgcctgctcagctccagacggcgcccggacccccgggcgcgggatccagccaggtgggagccccgcagatgaggtctctgaaggtgtgcctgaaccagtgccagcctgccctgtctgcagcatcggcctgatggggtggtgactgatccctcagggctccggagccatgtggcccaacggcagttccctggggccctgtttccggcccacaaacattaccctggaggagagacggctgatcgcctcgccctggttcgccgcctccttctgcgtggtgggcctggcctccaacctgctggccctgagcgtgctggcgggcgcgcggcaggggggttcgcacacgcgctcctccttcctcaccttcctctgcggcctcgtcctcaccgacttcctggggctgctggtgaccggtaccatcgtggtgtcccagcacgccgcgctcttcgagtggcacgccgtggaccctggctgccgtctctgtcgcttcatgggcgtcgtcatgatcttcttcggcctgtccccgctgctgctgggggccgccatggcctcagagcgctacctgggtatcacccggcccttctcgcgcccggcggtcgcctcgcagcgccgcgcctgggccaccgtggggctggtgtgggcggccgcgctggcgctgggcctgctgcccctgctgggcgtgggtcgctacaccgtgcaatacccggggtcctggtgcttcctgacgctgggcgccgagtccggggacgtggccttcgggctgctcttctccatgctgggcggcctctcggtcgggctgtccttcctgctgaacacggtcagcgtggccaccctgtgccacgtctaccacgggcaggaggcggcccagcagcgtccccgggactccgaggtggagatgatggctcagctcctggggatcatggtggtggccagcgtgtgttggctgccccttctgctttgcccaccccatgctgtaactccccggacccagtttccgtctcccgactggactgtgagcctatgagggtgcgccctgggagttcctcagctgctgttgctgcttcattcagcctacaggacctactgctcaggaaatgatttgattgattgattgatttaatttatttagagatggagtct

SEQ ID NO: 83416 - DNA, 1882 bp, Homo sapiens
ccacccgtcccagctcggcttagcccccgcggacccctccaggccgcgaccccagggcgtcctgtgccgccacgccctccatctgtgtgggtcctctgctgggcccgcccctggtcacagccagactgactcagtttccctgggaggtcccgctcgagcccgtccttcccctcccctcgccccaccctcggcgcccgcacatctgcctgctcagctccagacggcgcccggacccccgggcgcgggatccagccaggtgggagccccgcagatgaggtctctgaaggtgtgcctgaaccagtgccagcctgccctgtctgcagcatcggcctgatggggtggtgactgatccctcagggctccggagccatgtggcccaacggcagttccctggggccctgtttccggcccacaaacattaccctggaggagagacggctgatcgcctcgccctggttcgccgcctccttctgcgtggtgggcctggcctccaacctgctggccctgagcgtgctggcgggcgcgcggcaggggggttcgcacacgcgctcctccttcctcaccttcctctgcggcctcgtcctcaccgacttcctggggctgctggtgaccggtaccatcgtggtgtcccagcacgccgcgctcttcgagtggcacgccgtggaccctggctgccgtctctgtcgcttcatgggcgtcgtcatgatcttcttcggcctgtccccgctgctgctgggggccgccatggcctcagagcgctacctgggtatcacccggcccttctcgcgcccggcggtcgcctcgcagcgccgcgcctgggccaccgtggggctggtgtgggcggccgcgctggcgctgggcctgctgcccctgctgggcgtgggtcgctacaccgtgcaatacccggggtcctggtgcttcctgacgctgggcgccgagtccggggacgtggccttcgggctgctcttctccatgctgggcggcctctcggtcgggctgtccttcctgctgaacacggtcagcgtggccaccctgtgccacgtctaccacgggcaggaggcggcccagcagcgtccccgggactccgaggtggagatgatggctcagctcctggggatcatggtggtggccagcgtgtgttggctgccccttctggtcttcattgcccagacagtgctgcgaaacccgcctgccatgagccccgccgggcagctgtcccgcaccacggagaaggagctgctcatctacttgcgcgtggccacctggaaccagatcctggacccctgggtgtatatcctgttccgccgcgccgtgctccggcgtctccagcctcgcctcagcacccggcccagacggagtctcactctgtggcccagcctggagtacagtggcacgatctcggctcactgcaacctccgcctcccgggttcaagcgattctcgtgcctcagcctcccgagcagctgggattacaggcgtaagccactgcgcccggccttgcatgctctttgaccctgaatttgacctacttgctggggtacagttgcttccttttgaacctccaacagggaaggctctgtccagaaaggattgaatgtgaaacgggggcacccccttttcttgccaaaatatatctctgcctttggttttattttcctttgggtccagaagttttcaatctctggagtttgtgcattgggcctcacccggagcagacgagggcagggctgggaaggatggggagggacatagaggattcggttcctcccccaccttgtttcttgagtgtttcctaatcacttgatgggtggtaccacctagaattcttccagcagcctgtaatgggagggctacaggttagccctggaacctgcaatcaaacc

SEQ ID NO: 83417 - DNA, 380 bp, Homo sapiens
tttccttttaagaacatgacctggaagttgaaaacatcttattccattagccagaatcaatcacataattaattttctacaaggcaggctgggaaatgtaatctttagggaggcagccatgtgcctagctaaggcttctgttactatagaggagagagaaatggatcctggggagacagctaggagcctctgctacaccggaatagtgacatttgcccttcagtgttcctgtactgctgtggctttcaggcaaattcaaacttgacacctttttttttctttttcttattaatacagtatttgtctttcctctatcaaaccctgagccaaccatgttccccaggccatctggggaggtgcaggaaaagaaacatacaggg

SEQ ID NO: 83418 - DNA, 2769 bp, Homo sapiens
ggccttgtgggtaacgcggggccgccaggtgacagctaatggcggcggccgcctgaggcgggcgggcggtatagagcgggcggcaggaggcaagcagcgaaaccttcccggccgccgctcccgtcccgacggcggcttccccaaggcggcaggactcggcgcgccatggacaggccggcggcggcggcggcggcgggctgcgagggcggcgggggcccgaacccggggccggcgggcggcaggaggcctcctcgggccgcggggggcgccaccgccggctcccggcagcccagcgtggagaccctggacagtcccacaggatcacatgttgaatggtgtaaacagcttatagctgctacaatttctagtcagatttcaggttcagtgacatcagaaaatgtgtccagagattacaaggctctaagggatggaaataagctggcacagatggaagaggctccacttttcccaggagaatcaattaaagccattgtgaaagatgtcatgtatatctgcccatttatgggagcagtgagtggaaccctgacagtgacggactttaagctgtacttcaaaaatgtcgagagggacccgcattttatccttgatgttccccttggagtgatcagcagagtggagaagattggagcacagagccatggagacaattcctgtggtatagagatagtgtgcaaggatatgaggaacttgcggcttgcttataaacaggaagaacagagtaaactagggatatttgaaaacctcaacaaacatgcatttcctctttctaacggacaggcactatttgcattcagctataaagaaaaatttccaattaatggctggaaagtttatgatccagtatctgaatataagagacagggcttgccaaatgagagttggaaaatatccaaaataaacagtaattatgagttctgtgacacctaccctgccatcattgttgtgccaactagtgtaaaagatgatgacctttcaaaagtggcagcttttcgagcaaaaggcagagtccctgtgttgtcatggattcatccggaaagtcaagcaacgattacccgttgcagccagccacttgtgggtcccaatgataagcgctgcaaagaggatgaaaaatacttgcaaacaataatggatgctaacgcacagtcacacaagcttatcatctttgatgctcgacaaaacagtgtcgctgataccaacaagacaaagggtggaggatatgaaagtgaaagtgcttacccaaatgcagaacttgtgttcttggagatccacaacattcatgtcatgcgagagtcactacgcaaattaaaagagattgtgtacccttcgatcgatgaggcgcggtggctctccaatgtggatgggacgcattggctggaatatataaggatgctgcttgctggggcagtaagaattgctgataaaatagaatctgggaaaacatctgtggtggtgcattgcagcgacggttgggaccgaacagcccagctcacatctctggctatgctaatgttggacagttactacaggaccattaaaggatttgaaactctcgtagaaaaggagtggataagctttggacacaggtttgcactgcgagtgggccatggtaatgacaaccatgcggatgctgaccgatctcccatatttctgcagtttgttgattgtgtttggcaaatgacaaggcagtttccttcagcattcgagtttaatgagctattcttgattacaattttggatcacctttatagctgtctttttgggacctttttgtgcaactgtgaacagcagcgattcaaagaggatgtatatacaaagacgatatctttatggtcgtatatcaatagccagctagacgagttttctaatcccttctttgtgaattatgaaaaccacgtgttatatcctgttgctagtctgagtcatttggaattgtgggtaaattattatgtacgatggaatccacggatgagacctcagatgcccattcaccagaatctcaaggagctgctggccgtcagggcggagctgcagaagcgtgtggagggtctacagcgggaggtggccacgcgcgccgtctcatcctcatctgagcggggctcctcgccctcccactccgccacctccgtccacacctcggtctgatgggcgagaaatatgtaatcccctggctgactaggactgttaaacatagtgtggactggatgatgccttcgacaaaccagagaagccaagttggggggagctggtgcctggagtgggccctgtgcacctcacctggcggaggctgggggggctctgtcagcaggaccctagaggagactctcattcgattttaaagaagcacaacgggtcattttcctttgtatgttcctagcgcagaactgtttctaaaacaacttgaagtatagttttgttatctaagcaatttttgttttaagtaagtaagtgtactagaatgcgaagccgttatggttcaggtttttaaaaactggtacagtattgtatttgtctcatctgttgcactgtatttcaatcatctgtaattaaaatgatcatatgtttgctccctggtcttttttaagtaagtaagtaagtatcttagtagatttttcctttgaggaaaatcggtaataaaataacatggattgaatgtttactgtgcgtcaagcacagttaatatatgatgatgtaaagtaactaactttatgtgatttaattcattcagtaaattgtaaatgtatcatgagt

SEQ ID NO: 83419 - DNA, 2067 bp, Homo sapiens
tttgcatgtattttcataagggatgttaatctgtggttttctcttcttgtgatgtctttgtctagctttggtatcaggatacagctagcctcatggaatgaactaggaagtatgccctcctcttctagtttttggatgacccatcatctcttacctcacctacagcaggaaccttgaaattggacttctgcctcacaccctgcaatctcatctccacattatgaccagagtgatcttcttttttaaaaaaaacttattgttactatttcaattgataaatgaattgtatatatttatggtgtacaacgtggtattttgattgtgtacacattgtggaatggctaaatcaagctaattaacacaccattttttgtggtgagaacacttaaaatctactctcagcagttttcagatacagactacattgttattgactgtagtcaccatgttgtacagagtgatcttctcagtggacaactctgtgcacatccctcagagccgcaaggcagtgatatccaggttcctgaacagggtctccaaagccctccacccacgggtcctttccttcctgtctcgccacatcttccaggtccatgtctcagctatgtgaggttcttttcagttccttaagcacatcccactgttagctcagagatatgttgcagtcctaactccaagtacctataaatgtggccttatttcacaatagggtctttgtaaatgtaattaagttaggatgtggtcatattgaattggggggtgggggttaagccaaatgactgtgtccttagaagaagaggagaagagacagacacagacaaaggaaagaaggtcaggtggaaatggaggcagagatcagaatgatgtgtgtataagccaagaacacctgggactatcggaacctggggcagccaaggaaggatcctcccctagagtgttcggaggaagcatggcactgccgataccttgaattcagacttccagcctccagaactaggagagaataaacttctgttgttttaagccactgagtttgtggttctttttccagcagccctaggaaactcatacaaggatataggaggtttatttgcagatgagtttgttgcttctttagtggtctgtatctcatagcactagaaagaatagaaaagttaattccagataatgtgatgtatttgttttgtttttcgtagacaaagggtggaggatatgaaagtgaaagtgcttacccaaatgcagaacttgtgttcttggagatccacaacattcatgtcatgcgagagtcactacgcaaattaaaagagattgtgtacccttcgatcgatgaggcgcggtggctctccaatgtggatgggacgcattggctggaatatataaggatgctgcttgctggggcagtaagaattgctgataaaatagaatctgggaaaacatctgtggtggtgcattgcagcgacggttgggaccgaacagcccagctcacatctctggctatgctaatgttggacagttactacaggaccattaaaggatttgaaactctcgtagaaaaggagtggataagctttggacacaggtttgcactgcgagtgggccatggtaatgacaaccatgcggatgctgaccgatctcccatatttctgcagtttgttgattgtgtttggcaaatgacaaggcagtttccttcagcattcgagtttaatgagctattcttgattacaattttggatcacctttatagctgtctttttgggacctttttgtgcaactgtgaacagcagcgattcaaagaggcatggggggctgggacccagcgagcccgtggctctctcaggagtagatgagtgctagaccctggacctcctgactccgagttcatgtagtctccgctgcaccaactccaaaaccgtgggattctgcttttcatcctctgtggtgttggccagatcatacttgaaggccttggaaatggagtctgctgattagccaaaaagcccactttaggtagcaagctaacacttttttacatcaaagtagtaaagaagcagttaccaaacttctcag

SEQ ID NO: 83420 - DNA, 4357 bp, Homo sapiens
ggccttgtgggtaacgcggggccgccaggtgacagctaatggcggcggccgcctgaggcgggcgggcggtatagagcgggcggcaggaggcaagcagcgaaaccttcccggccgccgctcccgtcccgacggcggcttccccaaggcggcaggactcggcgcgccatggacaggccggcggcggcggcggcggcgggctgcgagggcggcgggggcccgaacccggggccggcgggcggcaggaggcctcctcgggccgcggggggcgccaccgccggctcccggcagcccagcgtggagaccctggacagtcccacaggatcacatgttgaatggtgtaaacagcttatagctgctacaatttctagtcagatttcaggttcagtgacatcagaaaatgtgtccagagattacaaggctctaagggatggaaataagctggcacagatggaagaggctccacttttcccaggagaatcaattaaagccattgtgaaagatgtcatgtatatctgcccatttatgggagcagtgagtggaaccctgacagtgacggactttaagctgtacttcaaaaatgtcgagagggacccgcattttatccttgatgttccccttggagtgatcagcagagtggagaagattggagcacagagccatggagacaattcctgtggtatagagatagtgtgcaaggatatgaggaacttgcggcttgcttataaacaggaagaacagagtaaactagggatatttgaaaacctcaacaaacatgcatttcctctttctaacggacaggcactatttgcattcagctataaagaaaaatttccaattaatggctggaaagtttatgatccagtatctgaatataagagacagggcttgccaaatgagagttggaaaatatccaaaataaacagtaattatgagttctgtgacacctaccctgccatcattgttgtgccaactagtgtaaaagatgatgacctttcaaaagtggcagcttttcgagcaaaaggcagagtccctgtgttgtcatggattcatccggaaagtcaagcaacgattacccgttgcagccagccacttgtgggtcccaatgataagcgctgcaaagaggatgaaaaatacttgcaaacaataatggatgctaacgcacagtcacacaagcttatcatctttgatgctcgacaaaacagtgtcgctgataccaacaagacaaagggtggaggatatgaaagtgaaagtgcttacccaaatgcagaacttgtgttcttggagatccacaacattcatgtcatgcgagagtcactacgcaaattaaaagagattgtgtacccttcgatcgatgaggcgcggtggctctccaatgtggatgggacgcattggctggaatatataaggatgctgcttgctggggcagtaagaattgctgataaaatagaatctgggaaaacatctgtggtggtgcattgcagcgacggttgggaccgaacagcccagctcacatctctggctatgctaatgttggacagttactacaggaccattaaaggatttgaaactctcgtagaaaaggagtggataagctttggacacaggtttgcactgcgagtgggccatggtaatgacaaccatgcggatgctgaccgatctcccatatttctgcagtttgttgattgtgtttggcaaatgacaaggcagtttccttcagcattcgagtttaatgagctattcttgattacaattttggatcacctttatagctgtctttttgggacctttttgtgcaactgtgaacagcagcgattcaaagaggatgtatatacaaagacgatatctttatggtcgtatatcaatagccagctagacgagttttctaatcccttctttgtgaattatgaaaaccacgtgttatatcctgttgctagtctgagtcatttggaattgtgggtaaattattatgtacgatggaatccacggatgagacctcagatgcccattcaccagaatctcaaggagctgctggccgtcagggcggagctgcagaagcgtgtggagggtctacagcgggaggtggccacgcgcgccgtctcatcctcatctgagcggggctcctcgccctcccactccgccacctccgtccacacctcggtctgatgggcgaggtcagcctgctgctccactgtctcccggtggctcaggaaagggacctggcgatcactgttatggctgtagcttgtgatcttgtcttttaggattaggcccagggaccatttgtgtggctaggtgacagctcccactgttggcaaccgttaccctcctgtcagcggtttcacaggggagccgtctgtcacgcccaccctgtgaagcaacttctggcattcaggcagcttgggagaaactaagtgaacggaatgcagtactgaggttcaagaaagctgtacgccatttctttccaacttaaatccttcagtaacaacaaacaccactcacttcaagatgcattgccagccccgtggcttccctcagctcttggccacaacttgaaaactgtcttgaatgaagtacttggggagaagacaggccactgccctctgttccacagttttcttcatgcacggggtcctcctgttaacaattactgttgtgtacatataaggtatttttagagaagagaaacaggcctttattttcctatgtccttttttacgtttagaatagtcacccgaggggggatcagctcaactgtactgtgggagaaattcttttccaacaaacctcatgctcgtttttctgtggtgcaatttcaagggcaacgtgttctgtcctcacctcactctggtactcgcctcttggggcggctcagcccattcatggggatggcaccaagcggccatgctcagtcttccagccccgctgagggtaaaccgaggcctctggcagctgtgcacaggtgctggcctctggctccttcaaggagcactgcctgtcactcgctcctgggctgtctagccatgtctcccacccccactttaccgcagccagctgctgggatcaaagcaagtctgttcttatgttatttgcctgtatgaaatcatttctcattttatcacaattccttcaactcagcttactcgcgtggctgcctgttcatatttgaaagcagccaccgtgctgtggctttggtttggaaaagcatagcacgcacttcccttggttttcccttcccagagccgaccgcagctggtcagccctctcttcccgctcctgaacctttacttactgactttgagctctgtgactccgtcggttctcgcaggaattaactaacttaccaattggttcaatccacttgagcgccatagctctgagctcctctgtgtgacatgccacagatgactattgcacacctgggtcctgccccagcaggccatgcccctcccatgtgccgtgcctgttgctgcagctgcccccccaccccgccactggctgcaggaattcagcctttagaggcagaggcagctgcagcggcccctgaggtcaaaccccagtgtgactgcatagcagtgttagctggttggtttcaaactactggattccaggcaaaggcctacagattgaccttattatttttgaaaatatgttaagggttttttcatagagagagaaagaatggatttttttttaactgggaacctcctgattcttacggaaaattatccttctataagaagataccagagagatttattcaaggtaatttgataacctaaaatcaattctccattttttatcatatgtgggatttgttgctaagtcgtgttcaacaatagcttttatgttcctaacatatctgaaagcttatttatgaatggatatactggattattgatatactgattttttttttaatggggacatttgccattttcttcccagaaatatgtaatcccctggctgactaggactgttaaacatagtgtggactggatgatgccttcgacaaaccagagaagccaagttggggggagctggtgcctggagtgggccctgtgcacctcacctggcggaggctgggggggctctgtcagcaggaccctagaggagactctcattcgattttaaagaagcacaacgggtcattttcctttgtatgttcctagcgcagaactgtttctaaaacaacttgaagtatagttttgttatctaagcaatttttgttttaagtaagtaagtgtactagaatgcgaagccgttatggttcaggtttttaaaaactggtacagtattgtatttgtctcatctgttgcactgtatttcaatcatctgtaattaaaatgatcatatgttt

SEQ ID NO: 83421 - DNA, 4339 bp, Homo sapiens
tgaaataagtctttttccatttcattgatgtggttctaggttttgtcttctgtaaaaagagtttcctttggagatgcattaggagacaatctttagttttcattagttttaagtagcagtaattcatgaaacagtagcccagggttttcagagtttaattaatgttttgaatatgattaatttatcacccagggaaaatgttaactacctaggaaaaatgacagaatataacttcttatgaggccctttacttaaaacctcattaagtagcaaatcagaattttgttttaaaaaattgaaatttattagaagactatgcatctctctatattgaaagtcataattgatataatcctataaaatacaaaattcctggaaaactggaatcacaaatatatatttggaaaactcgtgttaagttttatggaagcacaagtctatggcagtagttgctactttggcctttttctttcagtgaaagatgtcatgtatatctgcccatttatgggagcagtgagtggaaccctgacagtgacggactttaagctgtacttcaaaaatgtcgagagggacccgcattttatccttgatgttccccttggagtgatcagcagagtggagaagattggagcacagagccatggagacaattcctgtggtatagagatagtgtgcaaggatatgaggaacttgcggcttgcttataaacaggaagaacagagtaaactagggatatttgaaaacctcaacaaacatgcatttcctctttctaacggacaggcactatttgcattcagctataaagaaaaatttccaattaatggctggaaagtttatgatccagtatctgaatataagagacagggcttgccaaatgagagttggaaaatatccaaaataaacagtaattatgagttctgtgacacctaccctgccatcattgttgtgccaactagtgtaaaagatgatgacctttcaaaagtggcagcttttcgagcaaaaggcagagtccctgtgttgtcatggattcatccggaaagtcaagcaacgattacccgttgcagccagccacttgtgggtcccaatgataagcgctgcaaagaggatgaaaaatacttgcaaacaataatggatgctaacgcacagtcacacaagcttatcatctttgatgctcgacaaaacagtgtcgctgataccaacaagacaaagggtggaggatatgaaagtgaaagtgcttacccaaatgcagaacttgtgttcttggagatccacaacattcatgtcatgcgagagtcactacgcaaattaaaagagattgtgtacccttcgatcgatgaggcgcggtggctctccaatgtggatgggacgcattggctggaatatataaggatgctgcttgctggggcagtaagaattgctgataaaatagaatctgggaaaacatctgtggtggtgcattgcagcgacggttgggaccgaacagcccagctcacatctctggctatgctaatgttggacagttactacaggaccattaaaggatttgaaactctcgtagaaaaggagtggataagctttggacacaggtttgcactgcgagtgggccatggtaatgacaaccatgcggatgctgaccgatctcccatatttctgcagtttgttgattgtgtttggcaaatgacaaggcagtttccttcagcattcgagtttaatgagctattcttgattacaattttggatcacctttatagctgtctttttgggacctttttgtgcaactgtgaacagcagcgattcaaagaggatgtatatacaaagacgatatctttatggtcgtatatcaatagccagctagacgagttttctaatcccttctttgtgaattatgaaaaccacgtgttatatcctgttgctagtctgagtcatttggaattgtgggtaaattattatgtacgatggaatccacggatgagacctcagatgcccattcaccagaatctcaaggagctgctggccgtcagggcggagctgcagaagcgtgtggagggtctacagcgggaggtggccacgcgcgccgtctcatcctcatctgagcggggctcctcgccctcccactccgccacctccgtccacacctcggtctgatgggcgaggtcagcctgctgctccactgtctcccggtggctcaggaaagggacctggcgatcactgttatggctgtagcttgtgatcttgtcttttaggattaggcccagggaccatttgtgtggctaggtgacagctcccactgttggcaaccgttaccctcctgtcagcggtttcacaggggagccgtctgtcacgcccaccctgtgaagcaacttctggcattcaggcagcttgggagaaactaagtgaacggaatgcagtactgaggttcaagaaagctgtacgccatttctttccaacttaaatccttcagtaacaacaaacaccactcacttcaagatgcattgccagccccgtggcttccctcagctcttggccacaacttgaaaactgtcttgaatgaagtacttggggagaagacaggccactgccctctgttccacagttttcttcatgcacggggtcctcctgttaacaattactgttgtgtacatataaggtatttttagagaagagaaacaggcctttattttcctatgtccttttttacgtttagaatagtcacccgaggggggatcagctcaactgtactgtgggagaaattcttttccaacaaacctcatgctcgtttttctgtggtgcaatttcaagggcaacgtgttctgtcctcacctcactctggtactcgcctcttggggcggctcagcccattcatggggatggcaccaagcggccatgctcagtcttccagccccgctgagggtaaaccgaggcctctggcagctgtgcacaggtgctggcctctggctccttcaaggagcactgcctgtcactcgctcctgggctgtctagccatgtctcccacccccactttaccgcagccagctgctgggatcaaagcaagtctgttcttatgttatttgcctgtatgaaatcatttctcattttatcacaattccttcaactcagcttactcgcgtggctgcctgttcatatttgaaagcagccaccgtgctgtggctttggtttggaaaagcatagcacgcacttcccttggttttcccttcccagagccgaccgcagctggtcagccctctcttcccgctcctgaacctttacttactgactttgagctctgtgactccgtcggttctcgcaggaattaactaacttaccaattggttcaatccacttgagcgccatagctctgagctcctctgtgtgacatgccacagatgactattgcacacctgggtcctgccccagcaggccatgcccctcccatgtgccgtgcctgttgctgcagctgcccccccaccccgccactggctgcaggaattcagcctttagaggcagaggcagctgcagcggcccctgaggtcaaaccccagtgtgactgcatagcagtgttagctggttggtttcaaactactggattccaggcaaaggcctacagattgaccttattatttttgaaaatatgttaagggttttttcatagagagagaaagaatggatttttttttaactgggaacctcctgattcttacggaaaattatccttctataagaagataccagagagatttattcaaggtaatttgataacctaaaatcaattctccattttttatcatatgtgggatttgttgctaagtcgtgttcaacaatagcttttatgttcctaacatatctgaaagcttatttatgaatggatatactggattattgatatactgattttttttttaatggggacatttgccattttcttcccagaaatatgtaatcccctggctgactaggactgttaaacatagtgtggactggatgatgccttcgacaaaccagagaagccaagttggggggagctggtgcctggagtgggccctgtgcacctcacctggcggaggctgggggggctctgtcagcaggaccctagaggagactctcattcgattttaaagaagcacaacgggtcattttcctttgtatgttcctagcgcagaactgtttctaaaacaacttgaagtatagttttgttatctaagcaatttttgttttaagtaagtaagtgtactagaatgcgaagccgttatggttcaggtttttaaaaactggtacagtattgtatttgtctcatctgttgcactgtatttcaatcatctgtaattaaaatgatcatatgttt

SEQ ID NO: 83422 - DNA, 3971 bp, Homo sapiens
ccagaggagtctctcgaatcgacggtttctctgaatgagaatgtcatattccagaatgtgactttatataaaatgtacagcattctaatatactgaaaagatatttaatcagtatattagcttaactagtagtattactgaatgcaccagactgcattgactcacctggctattgaggcacttttctctttgattcccccaggacccgcattttatccttgatgttccccttggagtgatcagcagagtggagaagattggagcacagagccatggagacaattcctgtggtatagagatagtgtgcaaggatatgaggaacttgcggcttgcttataaacaggaagaacagagtaaactagggatatttgaaaacctcaacaaacatgcatttcctctttctaacggacaggcactatttgcattcagctataaagaaaaatttccaattaatggctggaaagtttatgatccagtatctgaatataagagacagggcttgccaaatgagagttggaaaatatccaaaataaacagtaattatgagttctgtgacacctaccctgccatcattgttgtgccaactagtgtaaaagatgatgacctttcaaaagtggcagcttttcgagcaaaaggcagagtccctgtgttgtcatggattcatccggaaagtcaagcaacgattacccgttgcagccagccacttgtgggtcccaatgataagcgctgcaaagaggatgaaaaatacttgcaaacaataatggatgctaacgcacagtcacacaagcttatcatctttgatgctcgacaaaacagtgtcgctgataccaacaagacaaagggtggaggatatgaaagtgaaagtgcttacccaaatgcagaacttgtgttcttggagatccacaacattcatgtcatgcgagagtcactacgcaaattaaaagagattgtgtacccttcgatcgatgaggcgcggtggctctccaatgtggatgggacgcattggctggaatatataaggatgctgcttgctggggcagtaagaattgctgataaaatagaatctgggaaaacatctgtggtggtgcattgcagcgacggttgggaccgaacagcccagctcacatctctggctatgctaatgttggacagttactacaggaccattaaaggatttgaaactctcgtagaaaaggagtggataagctttggacacaggtttgcactgcgagtgggccatggtaatgacaaccatgcggatgctgaccgatctcccatatttctgcagtttgttgattgtgtttggcaaatgacaaggcagtttccttcagcattcgagtttaatgagctattcttgattacaattttggatcacctttatagctgtctttttgggacctttttgtgcaactgtgaacagcagcgattcaaagaggatgtatatacaaagacgatatctttatggtcgtatatcaatagccagctagacgagttttctaatcccttctttgtgaattatgaaaaccacgtgttatatcctgttgctagtctgagtcatttggaattgtgggtaaattattatgtacgatggaatccacggatgagacctcagatgcccattcaccagaatctcaaggagctgctggccgtcagggcggagctgcagaagcgtgtggagggtctacagcgggaggtggccacgcgcgccgtctcatcctcatctgagcggggctcctcgccctcccactccgccacctccgtccacacctcggtctgatgggcgaggtcagcctgctgctccactgtctcccggtggctcaggaaagggacctggcgatcactgttatggctgtagcttgtgatcttgtcttttaggattaggcccagggaccatttgtgtggctaggtgacagctcccactgttggcaaccgttaccctcctgtcagcggtttcacaggggagccgtctgtcacgcccaccctgtgaagcaacttctggcattcaggcagcttgggagaaactaagtgaacggaatgcagtactgaggttcaagaaagctgtacgccatttctttccaacttaaatccttcagtaacaacaaacaccactcacttcaagatgcattgccagccccgtggcttccctcagctcttggccacaacttgaaaactgtcttgaatgaagtacttggggagaagacaggccactgccctctgttccacagttttcttcatgcacggggtcctcctgttaacaattactgttgtgtacatataaggtatttttagagaagagaaacaggcctttattttcctatgtccttttttacgtttagaatagtcacccgaggggggatcagctcaactgtactgtgggagaaattcttttccaacaaacctcatgctcgtttttctgtggtgcaatttcaagggcaacgtgttctgtcctcacctcactctggtactcgcctcttggggcggctcagcccattcatggggatggcaccaagcggccatgctcagtcttccagccccgctgagggtaaaccgaggcctctggcagctgtgcacaggtgctggcctctggctccttcaaggagcactgcctgtcactcgctcctgggctgtctagccatgtctcccacccccactttaccgcagccagctgctgggatcaaagcaagtctgttcttatgttatttgcctgtatgaaatcatttctcattttatcacaattccttcaactcagcttactcgcgtggctgcctgttcatatttgaaagcagccaccgtgctgtggctttggtttggaaaagcatagcacgcacttcccttggttttcccttcccagagccgaccgcagctggtcagccctctcttcccgctcctgaacctttacttactgactttgagctctgtgactccgtcggttctcgcaggaattaactaacttaccaattggttcaatccacttgagcgccatagctctgagctcctctgtgtgacatgccacagatgactattgcacacctgggtcctgccccagcaggccatgcccctcccatgtgccgtgcctgttgctgcagctgcccccccaccccgccactggctgcaggaattcagcctttagaggcagaggcagctgcagcggcccctgaggtcaaaccccagtgtgactgcatagcagtgttagctggttggtttcaaactactggattccaggcaaaggcctacagattgaccttattatttttgaaaatatgttaagggttttttcatagagagagaaagaatggatttttttttaactgggaacctcctgattcttacggaaaattatccttctataagaagataccagagagatttattcaaggtaatttgataacctaaaatcaattctccattttttatcatatgtgggatttgttgctaagtcgtgttcaacaatagcttttatgttcctaacatatctgaaagcttatttatgaatggatatactggattattgatatactgattttttttttaatggggacatttgccattttcttcccagaaatatgtaatcccctggctgactaggactgttaaacatagtgtggactggatgatgccttcgacaaaccagagaagccaagttggggggagctggtgcctggagtgggccctgtgcacctcacctggcggaggctgggggggctctgtcagcaggaccctagaggagactctcattcgattttaaagaagcacaacgggtcattttcctttgtatgttcctagcgcagaactgtttctaaaacaacttgaagtatagttttgttatctaagcaatttttgttttaagtaagtaagtgtactagaatgcgaagccgttatggttcaggtttttaaaaactggtacagtattgtatttgtctcatctgttgcactgtatttcaatcatctgtaattaaaatgatcatatgttt

SEQ ID NO: 83423 - DNA, 3989 bp, Homo sapiens
taccttagtaaatgcaattttcgaacaggcccccatcttcaactggtatagcatcttccacaccctgtagccttcaaacatcacctgttaaaatactgcccatgaaagatgtcatgtatatctgcccatttatgggagcagtgagtggaaccctgacagtgacggactttaagctgtacttcaaaaatgtcgagagggacccgcattttatccttgatgttccccttggagtgatcagcagagtggagaagattggagcacagagccatggagacaattcctgtggtatagagatagtgtgcaaggatatgaggaacttgcggcttgcttataaacaggaagaacagagtaaactagggatatttgaaaacctcaacaaacatgcatttcctctttctaacggacaggcactatttgcattcagctataaagaaaaatttccaattaatggctggaaagtttatgatccagtatctgaatataagagacagggcttgccaaatgagagttggaaaatatccaaaataaacagtaattatgagttctgtgacacctaccctgccatcattgttgtgccaactagtgtaaaagatgatgacctttcaaaagtggcagcttttcgagcaaaaggcagagtccctgtgttgtcatggattcatccggaaagtcaagcaacgattacccgttgcagccagccacttgtgggtcccaatgataagcgctgcaaagaggatgaaaaatacttgcaaacaataatggatgctaacgcacagtcacacaagcttatcatctttgatgctcgacaaaacagtgtcgctgataccaacaagacaaagggtggaggatatgaaagtgaaagtgcttacccaaatgcagaacttgtgttcttggagatccacaacattcatgtcatgcgagagtcactacgcaaattaaaagagattgtgtacccttcgatcgatgaggcgcggtggctctccaatgtggatgggacgcattggctggaatatataaggatgctgcttgctggggcagtaagaattgctgataaaatagaatctgggaaaacatctgtggtggtgcattgcagcgacggttgggaccgaacagcccagctcacatctctggctatgctaatgttggacagttactacaggaccattaaaggatttgaaactctcgtagaaaaggagtggataagctttggacacaggtttgcactgcgagtgggccatggtaatgacaaccatgcggatgctgaccgatctcccatatttctgcagtttgttgattgtgtttggcaaatgacaaggcagtttccttcagcattcgagtttaatgagctattcttgattacaattttggatcacctttatagctgtctttttgggacctttttgtgcaactgtgaacagcagcgattcaaagaggatgtatatacaaagacgatatctttatggtcgtatatcaatagccagctagacgagttttctaatcccttctttgtgaattatgaaaaccacgtgttatatcctgttgctagtctgagtcatttggaattgtgggtaaattattatgtacgatggaatccacggatgagacctcagatgcccattcaccagaatctcaaggagctgctggccgtcagggcggagctgcagaagcgtgtggagggtctacagcgggaggtggccacgcgcgccgtctcatcctcatctgagcggggctcctcgccctcccactccgccacctccgtccacacctcggtctgatgggcgaggtcagcctgctgctccactgtctcccggtggctcaggaaagggacctggcgatcactgttatggctgtagcttgtgatcttgtcttttaggattaggcccagggaccatttgtgtggctaggtgacagctcccactgttggcaaccgttaccctcctgtcagcggtttcacaggggagccgtctgtcacgcccaccctgtgaagcaacttctggcattcaggcagcttgggagaaactaagtgaacggaatgcagtactgaggttcaagaaagctgtacgccatttctttccaacttaaatccttcagtaacaacaaacaccactcacttcaagatgcattgccagccccgtggcttccctcagctcttggccacaacttgaaaactgtcttgaatgaagtacttggggagaagacaggccactgccctctgttccacagttttcttcatgcacggggtcctcctgttaacaattactgttgtgtacatataaggtatttttagagaagagaaacaggcctttattttcctatgtccttttttacgtttagaatagtcacccgaggggggatcagctcaactgtactgtgggagaaattcttttccaacaaacctcatgctcgtttttctgtggtgcaatttcaagggcaacgtgttctgtcctcacctcactctggtactcgcctcttggggcggctcagcccattcatggggatggcaccaagcggccatgctcagtcttccagccccgctgagggtaaaccgaggcctctggcagctgtgcacaggtgctggcctctggctccttcaaggagcactgcctgtcactcgctcctgggctgtctagccatgtctcccacccccactttaccgcagccagctgctgggatcaaagcaagtctgttcttatgttatttgcctgtatgaaatcatttctcattttatcacaattccttcaactcagcttactcgcgtggctgcctgttcatatttgaaagcagccaccgtgctgtggctttggtttggaaaagcatagcacgcacttcccttggttttcccttcccagagccgaccgcagctggtcagccctctcttcccgctcctgaacctttacttactgactttgagctctgtgactccgtcggttctcgcaggaattaactaacttaccaattggttcaatccacttgagcgccatagctctgagctcctctgtgtgacatgccacagatgactattgcacacctgggtcctgccccagcaggccatgcccctcccatgtgccgtgcctgttgctgcagctgcccccccaccccgccactggctgcaggaattcagcctttagaggcagaggcagctgcagcggcccctgaggtcaaaccccagtgtgactgcatagcagtgttagctggttggtttcaaactactggattccaggcaaaggcctacagattgaccttattatttttgaaaatatgttaagggttttttcatagagagagaaagaatggatttttttttaactgggaacctcctgattcttacggaaaattatccttctataagaagataccagagagatttattcaaggtaatttgataacctaaaatcaattctccattttttatcatatgtgggatttgttgctaagtcgtgttcaacaatagcttttatgttcctaacatatctgaaagcttatttatgaatggatatactggattattgatatactgattttttttttaatggggacatttgccattttcttcccagaaatatgtaatcccctggctgactaggactgttaaacatagtgtggactggatgatgccttcgacaaaccagagaagccaagttggggggagctggtgcctggagtgggccctgtgcacctcacctggcggaggctgggggggctctgtcagcaggaccctagaggagactctcattcgattttaaagaagcacaacgggtcattttcctttgtatgttcctagcgcagaactgtttctaaaacaacttgaagtatagttttgttatctaagcaatttttgttttaagtaagtaagtgtactagaatgcgaagccgttatggttcaggtttttaaaaactggtacagtattgtatttgtctcatctgttgcactgtatttcaatcatctgtaattaaaatgatcatatgtttaaaaaaaaatgaaaagatcttat

SEQ ID NO: 83424 - DNA, 4152 bp, Homo sapiens
taccttagtaaatgcaattttcgaacaggcccccatcttcaactggtatagcatcttccacaccctgtagccttcaaacatcacctgttaaaatactgcccatgaaagatgtcatgtatatctgcccatttatgggagcagtgagtggaaccctgacagtgacggactttaagctgtacttcaaaaatgtcgagagggacccgcattttatccttgatgttccccttggagtgatcagcagagtggagaagattggagcacagagccatggagacaattcctgtggtatagagatagtgtgcaaggatatgaggaacttgcggcttgcttataaacaggaagaacagagtaaactagggatatttgaaaacctcaacaaacatgcatttcctctttctaacggacaggcactatttgcattcagctataaagaaaaatttccaattaatggctggaaagtttatgatccagtatctgaatataagagacagggcttgccaaatgagagttggaaaatatccaaaataaacagtaattatgagttctgtgacacctaccctgccatcattgttgtgccaactagtgtaaaagatgatgacctttcaaaagtggcagcttttcgagcaaaaggcagagtccctgtgttgtcatggattcatccggaaagtcaagcaacgattacccgttgcagccagccacttgtgggtcccaatgataagcgctgcaaagaggatgaaaaatacttgcaaacaataatggatgctaacgcacagtcacacaagcttatcatctttgatgctcgacaaaacagtgtcgctgataccaacaagacaaagggtggaggatatgaaagtgaaagtgcttacccaaatgcagaacttgtgttcttggagatccacaacattcatgtcatgcgagagtcactacgcaaattaaaagagattgtgtacccttcgatcgatgaggcgcggtggctctccaatgtggatgggacgcattggctggaatatataaggatgctgcttgctggggcagtaagaattgctgataaaatagaatctgggaaaacatctgtggtggtgcattgcagcgacggttgggaccgaacagcccagctcacatctctggctatgctaatgttggacagttactacaggaccattaaaggatttgaaactctcgtagaaaaggagtggataagctttggacacaggtttgcactgcgagtgggccatggtaatgacaaccatgcggatgctgaccgatctcccatatttctgcagtttgttgattgtgtttggcaaatgacaaggcagtttccttcagcattcgagtttaatgagctattcttgattacaattttggatcacctttatagctgtctttttgggacctttttgtgcaactgtgaacagcagcgattcaaagaggatgtatatacaaagacgatatctttatggtcgtatatcaatagccagctagacgagttttctaatcccttctttgtgaattatgaaaaccacgtgttatatcctgttgctagtctgagtcatttggaattgtgggtaaattattatgtacgatggaatccacggatgagacctcagatgcccattcaccagaatctcaaggagctgctggccgtcagggcggagctgcagaagcgtgtggagggtctacagcgggaggtggccacgcgcgccgtctcatcctcatctgagcggggctcctcgccctcccactccgccacctccgtccacacctcggtctgatgggcgaggtcagcctgctgctccactgtctcccggtggctcaggaaagggacctggcgatcactgttatggctgtagcttgtgatcttgtcttttaggattaggcccagggaccatttgtgtggctaggtgacagctcccactgttggcaaccgttaccctcctgtcagcggtttcacaggggagccgtctgtcacgcccaccctgtgaagcaacttctggcattcaggcagcttgggagaaactaagtgaacggaatgcagtactgaggttcaagaaagctgtacgccatttctttccaacttaaatccttcagtaacaacaaacaccactcacttcaagatgcattgccagccccgtggcttccctcagctcttggccacaacttgaaaactgtcttgaatgaagtacttggggagaagacaggccactgccctctgttccacagttttcttcatgcacggggtcctcctgttaacaattactgttgtgtacatataaggtatttttagagaagagaaacaggcctttattttcctatgtccttttttacgtttagaatagtcacccgaggggggatcagctcaactgtactgtgggagaaattcttttccaacaaacctcatgctcgtttttctgtggtgcaatttcaagggcaacgtgttctgtcctcacctcactctggtactcgcctcttggggcggctcagcccattcatggggatggcaccaagcggccatgctcagtcttccagccccgctgagggtaaaccgaggcctctggcagctgtgcacaggtgctggcctctggctccttcaaggagcactgcctgtcactcgctcctgggctgtctagccatgtctcccacccccactttaccgcagccagctgctgggatcaaagcaagtctgttcttatgttatttgcctgtatgaaatcatttctcattttatcacaattccttcaactcagcttactcgcgtggctgcctgttcatatttgaaagcagccaccgtgctgtggctttggtttggaaaagcatagcacgcacttcccttggttttcccttcccagagccgaccgcagctggtcagccctctcttcccgctcctgaacctttacttactgactttgagctctgtgactccgtcggttctcgcaggaattaactaacttaccaattggttcaatccacttgagcgccatagctctgagctcctctgtgtgacatgccacagatgactattgcacacctgggtcctgccccagcaggccatgcccctcccatgtgccgtgcctgttgctgcagctgcccccccaccccgccactggctgcaggaattcagcctttagaggcagaggcagctgcagcggcccctgaggtcaaaccccagtgtgactgcatagcagtgttagctggttggtttcaaactactggattccaggcaaaggcctacagattgaccttattatttttgaaaatatgttaagggttttttcatagagagagaaagaatggatttttttttaactgggaacctcctgattcttacggaaaattatccttctataagaagataccagagagatttattcaaggtaatttgataacctaaaatcaattctccattttttatcatatgtgggatttgttgctaagtcgtgttcaacaatagcttttatgttcctaacatatctgaaagcttatttatgaatggatatactggattattgatatactgattttttttttaatggggacatttgccattttcttcccagaaatatgtaatcccctggctgactaggactgttaaacatagtgtggactggatgatgccttcgacaaaccagagaagccaagttggggggagctggtgcctggagtgggccctgtgcacctcacctggcggaggctgggggggctctgtcagcaggaccctagaggagactctcattcgattttaaagaagcacaacgggtcattttcctttgtatgttcctagcgcagaactgtttctaaaacaacttgaagtatagttttgttatctaagcaatttttgttttaagtaagtaagtgtactagaatgcgaagccgttatggttcaggtttttaaaaactggtacagtattgtatttgtctcatctgttgcactgtatttcaatcatctgtaattaaaatgatcatatgtttgctccctggtcttttttaagtaagtaagtaagtatcttagtagatttttcctttgaggaaaatcggtaataaaataacatggattgaatgtttactgtgcgtcaagcacagttaatatatgatgatgtaaagtaactaactttatgtgatttaattcattcagtaaattgtaaatgtatcatgagt

SEQ ID NO: 83425 - DNA, 2435 bp, Homo sapiens
ggccttgtgggtaacgcggggccgccaggtgacagctaatggcggcggccgcctgaggcgggcgggcggtatagagcgggcggcaggaggcaagcagcgaaaccttcccggccgccgctcccgtcccgacggcggcttccccaaggcggcaggactcggcgcgccatggacaggccggcggcggcggcggcggcgggctgcgagggcggcgggggcccgaacccggggccggcgggcggcaggaggcctcctcgggccgcggggggcgccaccgccggctcccggcagcccagcgtggagaccctggacagtcccacaggatcacatgttgaatggtgtaaacagcttatagctgctacaatttctagtcagatttcaggttcagtgacatcagaaaatgtgtccagagattacaaggctctaagggatggaaataagctggcacagatggaagaggctccacttttcccaggagaatcaattaaagccattgtgaaagatgtcatgtatatctgcccatttatgggagcagtgagtggaaccctgacagtgacggactttaagctgtacttcaaaaatgtcgagagggacccgcattttatccttgatgttccccttggagtgatcagcagagtggagaagattggagcacagagccatggagacaattcctgtggtatagagatagtgtgcaaggatatgaggaacttgcggcttgcttataaacaggaagaacagagtaaactagggatatttgaaaacctcaacaaacatgcatttcctctttctaacggacaggcactatttgcattcagctataaagaaaaatttccaattaatggctggaaagtttatgatccagtatctgaatataagagacagggcttgccaaatgagagttggaaaatatccaaaataaacagtaattatgagttctgtgacacctaccctgccatcattgttgtgccaactagtgtaaaagatgatgacctttcaaaagtggcagcttttcgagcaaaaggcagagtccctgtgttgtcatggattcatccggaaagtcaagcaacgattacccgttgcagccagccacttgtgggtcccaatgataagcgctgcaaagaggatgaaaaatacttgcaaacaataatggatgctaacgcacagtcacacaagcttatcatctttgatgctcgacaaaacagtgtcgctgataccaacaagatgctgcttgctggggcagtaagaattgctgataaaatagaatctgggaaaacatctgtggtggtgcattgcagcgacggttgggaccgaacagcccagctcacatctctggctatgctaatgttggacagttactacaggaccattaaaggatttgaaactctcgtagaaaaggagtggataagctttggacacaggtttgcactgcgagtgggccatggtaatgacaaccatgcggatgctgaccgatctcccatatttctgcagtttgttgattgtgtttggcaaatgacaaggcagtttccttcagcattcgagtttaatgagctattcttgattacaattttggatcacctttatagctgtctttttgggacctttttgtgcaactgtgaacagcagcgattcaaagaggcatggggggctgggacccagcgagcccgtggctctctcaggagtagatgagtgctagaccctggacctcctgactccgagttcatgtagtctccgctgcaccaactccaaaaccgtgggattctgcttttcatcctctgtggtgttggccagatcatacttgaaggccttggaaatggagtctgctgattagccaaaaagcccactttaggatgtatatacaaagacgatatctttatggtcgtatatcaatagccagctagacgagttttctaatcccttctttgtgaattatgaaaaccacgtgttatatcctgttgctagtctgagtcatttggaattgtgggtaaattattatgtacgatggaatccacggatgagacctcagaaatatgtaatcccctggctgactaggactgttaaacatagtgtggactggatgatgccttcgacaaaccagagaagccaagttggggggagctggtgcctggagtgggccctgtgcacctcacctggcggaggctgggggggctctgtcagcaggaccctagaggagactctcattcgattttaaagaagcacaacgggtcattttcctttgtatgttcctagcgcagaactgtttctaaaacaacttgaagtatagttttgttatctaagcaatttttgttttaagtaagtaagtgtactagaatgcgaagccgttatggttcaggtttttaaaaactggtacagtattgtatttgtctcatctgttgcactgtatttcaatcatctgtaattaaaatgatcatatgttt

SEQ ID NO: 83426 - DNA, 1047 bp, Homo sapiens
ggccttgtgggtaacgcggggccgccaggtgacagctaatggcggcggccgcctgaggcgggcgggcggtatagagcgggcggcaggaggcaagcagcgaaaccttcccggccgccgctcccgtcccgacggcggcttccccaaggcggcaggactcggcgcgccatggacaggccggcggcggcggcggcggcgggctgcgagggcggcgggggcccgaacccggggccggcgggcggcaggaggcctcctcgggccgcggggggcgccaccgccggctcccggcagcccagcgtggagaccctggacagtcccacaggatcacatgttgaatggtgtaaacagcttatagctgctacaatttctagtcagatttcaggttcagtgacatcagaaaatgtgtccagagattacaaggctctaagggatggaaataagctggcacagatggaagaggctccacttttcccaggagaatcaattaaagccattgtgaaagatgtcatgtatatctgcccatttatgggagcagtgagtggaaccctgacagtgacggactttaagctgtacttcaaaaatgtcgagagggacccgcattttatccttgatgttccccttggagtgatcagcagagtggagaagattggagcacagagccatggagacaattcctgtggtatagagatagtgtgcaaggatatgaggaacttgcggcttgcttataaacaggaagaacagagtaaactagggatatttgaaaacctcaacaaacatgcatttcctctttctaacggacaggcactatttgcattcagctataaagaaaaatttccaattaatggctggaaagtttatgatccagtatctgaatataagagacagggcttgccaaatgagagttggaaaatatcctctgtggtgttggccagatcatacttgaaggccttggaaatggagtctgctgattagccaaaaagcccactttaggtagcaagctaacacttttttacatcaaagtagtaaagaagcagttaccaaacttctcag

SEQ ID NO: 83427 - DNA, 2980 bp, Homo sapiens
ggccttgtgggtaacgcggggccgccaggtgacagctaatggcggcggccgcctgaggcgggcgggcggtatagagcgggcggcaggaggcaagcagcgaaaccttcccggccgccgctcccgtcccgacggcggcttccccaaggcggcaggactcggcgcgccatggacaggccggcggcggcggcggcggcgggctgcgagggcggcgggggcccgaacccggggccggcgggcggcaggaggcctcctcgggccgcggggggcgccaccgccggctcccggcagcccagcgtggagaccctggacagtcccacaggatcacatgttgaatggtgtaaacagcttatagctgctacaatttctagtcagatttcaggttcagtgacatcagaaaatgtgtccagagattacaaggctctaagggatggaaataagctggcacagatggaagaggctccacttttcccaggagaatcaattaaagccattgtgaaagatgtcatgtatatctgcccatttatgggagcagtgagtggaaccctgacagtgacggactttaagctgtacttcaaaaatgtcgagagggacccgcattttatccttgatgttccccttggagtgatcagcagagtggagaagattggagcacagagccatggagacaattcctgtggtatagagatagtgtgcaaggatatgaggaacttgcggcttgcttataaacaggaagaacagagtaaactagggatatttgaaaacctcaacaaacatgcatttcctctttctaacggacaggcactatttgcattcagctataaagaaaaatttccaattaatggctggaaagtttatgatccagtatctgaatataagagacagggcttgccaaatgagagttggaaaatatccaaaataaacagtaattatgagttctgtgacacctaccctgccatcattgttgtgccaactagtgtaaaagatgatgacctttcaaaagtggcagcttttcgagcaaaaggcagagtccctgtgttgtcatggattcatccggaaagtcaagcaacgattacccgttgcagccagccacttgtgggtcccaatgataagcgctgcaaagaggatgaaaaatacttgcaaacaataatggatgctaacgcacagtcacacaagcttatcatctttgatgctcgacaaaacagtgtcgctgataccaacaagacaaagggtggaggatatgaaagtgaaagtgcttacccaaatgcagaacttgtgttcttggagatccacaacattcatgtcatgcgagagtcactacgcaaattaaaagagattgtgtacccttcgatcgatgaggcgcggtggctctccaatgtggatgggacgcattggctggaatatataaggatgctgcttgctggggcagtaagaattgctgataaaatagaatctgggaaaacatctgtggtggtgcattgcagcgacggttgggaccgaacagcccagctcacatctctggctatgctaatgttggacagttactacaggaccattaaaggatttgaaactctcgtagaaaaggagtggataagctttggacacaggtttgcactgcgagtgggccatggtaatgacaaccatgcggatgctgaccgatctcccatatttctgcagtttgttgattgtgtttggcaaatgacaaggcagtttccttcagcattcgagtttaatgagctattcttgattacaattttggatcacctttatagctgtctttttgggacctttttgtgcaactgtgaacagcagcgattcaaagaggcatggggggctgggacccagcgagcccgtggctctctcaggagtagatgagtgctagaccctggacctcctgactccgagttcatgtagtctccgctgcaccaactccaaaaccgtgggattctgcttttcatcctctgtggtgttggccagatcatacttgaaggccttggaaatggagtctgctgattagccaaaaagcccactttaggatgtatatacaaagacgatatctttatggtcgtatatcaatagccagctagacgagttttctaatcccttctttgtgaattatgaaaaccacgtgttatatcctgttgctagtctgagtcatttggaattgtgggtaaattattatgtacgatggaatccacggatgagacctcagatgcccattcaccagaatctcaaggagctgctggccgtcagggcggagctgcagaagcgtgtggagggtctacagcgggaggtggccacgcgcgccgtctcatcctcatctgagcggggctcctcgccctcccactccgccacctccgtccacacctcggtctgatgggcgagaaatatgtaatcccctggctgactaggactgttaaacatagtgtggactggatgatgccttcgacaaaccagagaagccaagttggggggagctggtgcctggagtgggccctgtgcacctcacctggcggaggctgggggggctctgtcagcaggaccctagaggagactctcattcgattttaaagaagcacaacgggtcattttcctttgtatgttcctagcgcagaactgtttctaaaacaacttgaagtatagttttgttatctaagcaatttttgttttaagtaagtaagtgtactagaatgcgaagccgttatggttcaggtttttaaaaactggtacagtattgtatttgtctcatctgttgcactgtatttcaatcatctgtaattaaaatgatcatatgtttgctccctggtcttttttaagtaagtaagtaagtatcttagtagatttttcctttgaggaaaatcggtaataaaataacatggattgaatgtttactgtgcgtcaagcacagttaatatatgatgatgtaaagtaactaactttatgtgatttaattcattcagtaaattgtaaatgtatcatgagt

SEQ ID NO: 83428 - DNA, 3966 bp, Homo sapiens
taccttagtaaatgcaattttcgaacaggcccccatcttcaactggtatagcatcttccacaccctgtagccttcaaacatcacctgttaaaatactgcccatgaaagatgtcatgtatatctgcccatttatgggagcagtgagtggaaccctgacagtgacggactttaagctgtacttcaaaaatgtcgagagggacccgcattttatccttgatgttccccttggagtgatcagcagagtggagaagattggagcacagagccatggagacaattcctgtggtatagagatagtgtgcaaggatatgaggaacttgcggcttgcttataaacaggaagaacagagtaaactagggatatttgaaaacctcaacaaacatgcatttcctctttctaacggacaggcactatttgcattcagctataaagaaaaatttccaattaatggctggaaagtttatgatccagtatctgaatataagagacagggcttgccaaatgagagttggaaaatatccaaaataaacagtaattatgagttctgtgacacctaccctgccatcattgttgtgccaactagtgtaaaagatgatgacctttcaaaagtggcagcttttcgagcaaaaggcagagtccctgtgttgtcatggattcatccggaaagtcaagcaacgattacccgttgcagccagccacttgtgggtcccaatgataagcgctgcaaagaggatgaaaaatacttgcaaacaataatggatgctaacgcacagtcacacaagcttatcatctttgatgctcgacaaaacagtgtcgctgataccaacaagacaaagggtggaggatatgaaagtgaaagtgcttacccaaatgcagaacttgtgttcttggagatccacaacattcatgtcatgcgagagtcactacgcaaattaaaagagattgtgtacccttcgatcgatgaggcgcggtggctctccaatgtggatgggacgcattggctggaatatataaggatgctgcttgctggggcagtaagaattgctgataaaatagaatctgggaaaacatctgtggtggtgcattgcagcgacggttgggaccgaacagcccagctcacatctctggctatgctaatgttggacagttactacaggaccattaaaggatttgaaactctcgtagaaaaggagtggataagctttggacacaggtttgcactgcgagtgggccatggtaatgacaaccatgcggatgctgaccgatctcccatatttctgcagtttgttgattgtgtttggcaaatgacaaggcagtttccttcagcattcgagtttaatgagctattcttgattacaattttggatcacctttatagctgtctttttgggacctttttgtgcaactgtgaacagcagcgattcaaagaggatgtatatacaaagacgatatctttatggtcgtatatcaatagccagctagacgagttttctaatcccttctttgtgaattatgaaaaccacgtgttatatcctgttgctagtctgagtcatttggaattgtgggtaaattattatgtacgatggaatccacggatgagacctcagatgcccattcaccagaatctcaaggagctgctggccgtcagggcggagctgcagaagcgtgtggagggtctacagcgggaggtggccacgcgcgccgtctcatcctcatctgagcggggctcctcgccctcccactccgccacctccgtccacacctcggtctgatgggcgaggtcagcctgctgctccactgtctcccggtggctcaggaaagggacctggcgatcactgttatggctgtagcttgtgatcttgtcttttaggattaggcccagggaccatttgtgtggctaggtgacagctcccactgttggcaaccgttaccctcctgtcagcggtttcacaggggagccgtctgtcacgcccaccctgtgaagcaacttctggcattcaggcagcttgggagaaactaagtgaacggaatgcagtactgaggttcaagaaagctgtacgccatttctttccaacttaaatccttcagtaacaacaaacaccactcacttcaagatgcattgccagccccgtggcttccctcagctcttggccacaacttgaaaactgtcttgaatgaagtacttggggagaagacaggccactgccctctgttccacagttttcttcatgcacggggtcctcctgttaacaattactgttgtgtacatataaggtatttttagagaagagaaacaggcctttattttcctatgtccttttttacgtttagaatagtcacccgaggggggatcagctcaactgtactgtgggagaaattcttttccaacaaacctcatgctcgtttttctgtggtgcaatttcaagggcaacgtgttctgtcctcacctcactctggtactcgcctcttggggcggctcagcccattcatggggatggcaccaagcggccatgctcagtcttccagccccgctgagggtaaaccgaggcctctggcagctgtgcacaggtgctggcctctggctccttcaaggagcactgcctgtcactcgctcctgggctgtctagccatgtctcccacccccactttaccgcagccagctgctgggatcaaagcaagtctgttcttatgttatttgcctgtatgaaatcatttctcattttatcacaattccttcaactcagcttactcgcgtggctgcctgttcatatttgaaagcagccaccgtgctgtggctttggtttggaaaagcatagcacgcacttcccttggttttcccttcccagagccgaccgcagctggtcagccctctcttcccgctcctgaacctttacttactgactttgagctctgtgactccgtcggttctcgcaggaattaactaacttaccaattggttcaatccacttgagcgccatagctctgagctcctctgtgtgacatgccacagatgactattgcacacctgggtcctgccccagcaggccatgcccctcccatgtgccgtgcctgttgctgcagctgcccccccaccccgccactggctgcaggaattcagcctttagaggcagaggcagctgcagcggcccctgaggtcaaaccccagtgtgactgcatagcagtgttagctggttggtttcaaactactggattccaggcaaaggcctacagattgaccttattatttttgaaaatatgttaagggttttttcatagagagagaaagaatggatttttttttaactgggaacctcctgattcttacggaaaattatccttctataagaagataccagagagatttattcaaggtaatttgataacctaaaatcaattctccattttttatcatatgtgggatttgttgctaagtcgtgttcaacaatagcttttatgttcctaacatatctgaaagcttatttatgaatggatatactggattattgatatactgattttttttttaatggggacatttgccattttcttcccagaaatatgtaatcccctggctgactaggactgttaaacatagtgtggactggatgatgccttcgacaaaccagagaagccaagttggggggagctggtgcctggagtgggccctgtgcacctcacctggcggaggctgggggggctctgtcagcaggaccctagaggagactctcattcgattttaaagaagcacaacgggtcattttcctttgtatgttcctagcgcagaactgtttctaaaacaacttgaagtatagttttgttatctaagcaatttttgttttaagtaagtaagtgtactagaatgcgaagccgttatggttcaggtttttaaaaactggtacagtattgtatttgtctcatctgttgcactgtatttcaatcatctgtaattaaaatgatcatatgttt

SEQ ID NO: 83429 - DNA, 5488 bp, Homo sapiens
ggccttgtgggtaacgcggggccgccaggtgacagctaatggcggcggccgcctgaggcgggcgggcggtatagagcgggcggcaggaggcaagcagcgaaaccttcccggccgccgctcccgtcccgacggcggcttccccaaggcggcaggactcggcgcgccatggacaggccggcggcggcggcggcggcgggctgcgagggcggcgggggcccgaacccggggccggcgggcggcaggaggcctcctcgggccgcggggggcgccaccgccggctcccggcagcccagcgtggagaccctggacagtcccacaggatcacatgttgaatggtgtaaacagcttatagctgctacaatttctagtcagatttcaggttcagtgacatcagaaaatgtgtccagagattacaaggctctaagggatggaaataagctggcacagatggaagaggctccacttttcccaggagaatcaattaaagccattgtgaaagatgtcatgtatatctgcccatttatgggagcagtgagtggaaccctgacagtgacggactttaagctgtacttcaaaaatgtcgagagggacccgcattttatccttgatgttccccttggagtgatcagcagagtggagaagattggagcacagagccatggagacaattcctgtggtatagagatagtgtgcaaggatatgaggaacttgcggcttgcttataaacaggaagaacagagtaaactagggatatttgaaaacctcaacaaacatgcatttcctctttctaacggacaggcactatttgcattcagctataaagaaaaatttccaattaatggctggaaagtttatgatccagtatctgaatataagagacagggcttgccaaatgagagttggaaaatatccaaaataaacagtaattatgagttctgtgacacctaccctgccatcattgttgtgccaactagtgtaaaagatgatgacctttcaaaagtggcagcttttcgagcaaaaggcagagtccctgtgttgtcatggattcatccggaaagtcaagcaacgattacccgttgcagccagccacttgtgggtcccaatgataagcgctgcaaagaggatgaaaaatacttgcaaacaataatggatgctaacgcacagtcacacaagcttatcatctttgatgctcgacaaaacagtgtcgctgataccaacaagctttggtatcaggatacagctagcctcatggaatgaactaggaagtatgccctcctcttctagtttttggatgacccatcatctcttacctcacctacagcaggaaccttgaaattggacttctgcctcacaccctgcaatctcatctccacattatgaccagagtgatcttcttttttaaaaaaaacttattgttactatttcaattgataaatgaattgtatatatttatggtgtacaacgtggtattttgattgtgtacacattgtggaatggctaaatcaagctaattaacacaccattttttgtggtgagaacacttaaaatctactctcagcagttttcagatacagactacattgttattgactgtagtcaccatgttgtacagagtgatcttctcagtggacaactctgtgcacatccctcagagccgcaaggcagtgatatccaggttcctgaacagggtctccaaagccctccacccacgggtcctttccttcctgtctcgccacatcttccaggtccatgtctcagctatgtgaggttcttttcagttccttaagcacatcccactgttagctcagagatatgttgcagtcctaactccaagtacctataaatgtggccttatttcacaatagggtctttgtaaatgtaattaagttaggatgtggtcatattgaattggggggtgggggttaagccaaatgactgtgtccttagaagaagaggagaagagacagacacagacaaaggaaagaaggtcaggtggaaatggaggcagagatcagaatgatgtgtgtataagccaagaacacctgggactatcggaacctggggcagccaaggaaggatcctcccctagagtgttcggaggaagcatggcactgccgataccttgaattcagacttccagcctccagaactaggagagaataaacttctgttgttttaagccactgagtttgtggttctttttccagcagccctaggaaactcatacaaggatataggaggtttatttgcagatgagtttgttgcttctttagtggtctgtatctcatagcactagaaagaatagaaaagttaattccagataatgtgatgtatttgttttgtttttcgtagacaaagggtggaggatatgaaagtgaaagtgcttacccaaatgcagaacttgtgttcttggagatccacaacattcatgtcatgcgagagtcactacgcaaattaaaagagattgtgtacccttcgatcgatgaggcgcggtggctctccaatgtggatgggacgcattggctggaatatataaggatgctgcttgctggggcagtaagaattgctgataaaatagaatctgggaaaacatctgtggtggtgcattgcagcgacggttgggaccgaacagcccagctcacatctctggctatgctaatgttggacagttactacaggaccattaaaggatttgaaactctcgtagaaaaggagtggataagctttggacacaggtttgcactgcgagtgggccatggtaatgacaaccatgcggatgctgaccgatctcccatatttctgcagtttgttgattgtgtttggcaaatgacaaggcagtttccttcagcattcgagtttaatgagctattcttgattacaattttggatcacctttatagctgtctttttgggacctttttgtgcaactgtgaacagcagcgattcaaagaggatgtatatacaaagacgatatctttatggtcgtatatcaatagccagctagacgagttttctaatcccttctttgtgaattatgaaaaccacgtgttatatcctgttgctagtctgagtcatttggaattgtgggtaaattattatgtacgatggaatccacggatgagacctcagatgcccattcaccagaatctcaaggagctgctggccgtcagggcggagctgcagaagcgtgtggagggtctacagcgggaggtggccacgcgcgccgtctcatcctcatctgagcggggctcctcgccctcccactccgccacctccgtccacacctcggtctgatgggcgaggtcagcctgctgctccactgtctcccggtggctcaggaaagggacctggcgatcactgttatggctgtagcttgtgatcttgtcttttaggattaggcccagggaccatttgtgtggctaggtgacagctcccactgttggcaaccgttaccctcctgtcagcggtttcacaggggagccgtctgtcacgcccaccctgtgaagcaacttctggcattcaggcagcttgggagaaactaagtgaacggaatgcagtactgaggttcaagaaagctgtacgccatttctttccaacttaaatccttcagtaacaacaaacaccactcacttcaagatgcattgccagccccgtggcttccctcagctcttggccacaacttgaaaactgtcttgaatgaagtacttggggagaagacaggccactgccctctgttccacagttttcttcatgcacggggtcctcctgttaacaattactgttgtgtacatataaggtatttttagagaagagaaacaggcctttattttcctatgtccttttttacgtttagaatagtcacccgaggggggatcagctcaactgtactgtgggagaaattcttttccaacaaacctcatgctcgtttttctgtggtgcaatttcaagggcaacgtgttctgtcctcacctcactctggtactcgcctcttggggcggctcagcccattcatggggatggcaccaagcggccatgctcagtcttccagccccgctgagggtaaaccgaggcctctggcagctgtgcacaggtgctggcctctggctccttcaaggagcactgcctgtcactcgctcctgggctgtctagccatgtctcccacccccactttaccgcagccagctgctgggatcaaagcaagtctgttcttatgttatttgcctgtatgaaatcatttctcattttatcacaattccttcaactcagcttactcgcgtggctgcctgttcatatttgaaagcagccaccgtgctgtggctttggtttggaaaagcatagcacgcacttcccttggttttcccttcccagagccgaccgcagctggtcagccctctcttcccgctcctgaacctttacttactgactttgagctctgtgactccgtcggttctcgcaggaattaactaacttaccaattggttcaatccacttgagcgccatagctctgagctcctctgtgtgacatgccacagatgactattgcacacctgggtcctgccccagcaggccatgcccctcccatgtgccgtgcctgttgctgcagctgcccccccaccccgccactggctgcaggaattcagcctttagaggcagaggcagctgcagcggcccctgaggtcaaaccccagtgtgactgcatagcagtgttagctggttggtttcaaactactggattccaggcaaaggcctacagattgaccttattatttttgaaaatatgttaagggttttttcatagagagagaaagaatggatttttttttaactgggaacctcctgattcttacggaaaattatccttctataagaagataccagagagatttattcaaggtaatttgataacctaaaatcaattctccattttttatcatatgtgggatttgttgctaagtcgtgttcaacaatagcttttatgttcctaacatatctgaaagcttatttatgaatggatatactggattattgatatactgattttttttttaatggggacatttgccattttcttcccagaaatatgtaatcccctggctgactaggactgttaaacatagtgtggactggatgatgccttcgacaaaccagagaagccaagttggggggagctggtgcctggagtgggccctgtgcacctcacctggcggaggctgggggggctctgtcagcaggaccctagaggagactctcattcgattttaaagaagcacaacgggtcattttcctttgtatgttcctagcgcagaactgtttctaaaacaacttgaagtatagttttgttatctaagcaatttttgttttaagtaagtaagtgtactagaatgcgaagccgttatggttcaggtttttaaaaactggtacagtattgtatttgtctcatctgttgcactgtatttcaatcatctgtaattaaaatgatcatatgttt

SEQ ID NO: 83430 - DNA, 4382 bp, Homo sapiens
ggccttgtgggtaacgcggggccgccaggtgacagctaatggcggcggccgcctgaggcgggcgggcggtatagagcgggcggcaggaggcaagcagcgaaaccttcccggccgccgctcccgtcccgacggcggcttccccaaggcggcaggactcggcgcgccatggacaggccggcggcggcggcggcggcgggctgcgagggcggcgggggcccgaacccggggccggcgggcggcaggaggcctcctcgggccgcggggggcgccaccgccggctcccggcagcccagcgtggagaccctggacagtcccacaggatcacatgttgaatggtgtaaacagcttatagctgctacaatttctagtcagatttcaggttcagtgacatcagaaaatgtgtccagagattacaaggctctaagggatggaaataagctggcacagatggaagaggctccacttttcccaggagaatcaattaaagccattgtgaaagatgtcatgtatatctgcccatttatgggagcagtgagtggaaccctgacagtgacggactttaagctgtacttcaaaaatgtcgagagggacccgcattttatccttgatgttccccttggagtgatcagcagagtggagaagattggagcacagagccatggagacaattcctgtggtatagagatagtgtgcaaggatatgaggaacttgcggcttgcttataaacaggaagaacagagtaaactagggatatttgaaaacctcaacaaacatgcatttcctctttctaacggacaggcactatttgcattcagctataaagaaaaatttccaattaatggctggaaagtttatgatccagtatctgaatataagagacagggcttgccaaatgagagttggaaaatatccaaaataaacagtaattatgagttctgtgacacctaccctgccatcattgttgtgccaactagtgtaaaagatgatgacctttcaaaagtggcagcttttcgagcaaaaggcagagtccctgtgttgtcatggattcatccggaaagtcaagcaacgattacccgttgcagccagccacttgtgggtcccaatgataagcgctgcaaagaggatgaaaaatacttgcaaacaataatggatgctaacgcacagtcacacaagcttatcatctttgatgctcgacaaaacagtgtcgctgataccaacaagatgctgcttgctggggcagtaagaattgctgataaaatagaatctgggaaaacatctgtggtggtgcattgcagcgacggttgggaccgaacagcccagctcacatctctggctatgctaatgttggacagttactacaggaccattaaaggatttgaaactctcgtagaaaaggagtggataagctttggacacaggtttgcactgcgagtgggccatggtaatgacaaccatgcggatgctgaccgatctcccatatttctgcagtttgttgattgtgtttggcaaatgacaaggcagtttccttcagcattcgagtttaatgagctattcttgattacaattttggatcacctttatagctgtctttttgggacctttttgtgcaactgtgaacagcagcgattcaaagaggcatggggggctgggacccagcgagcccgtggctctctcaggagtagatgagtgctagaccctggacctcctgactccgagttcatgtagtctccgctgcaccaactccaaaaccgtgggattctgcttttcatcctctgtggtgttggccagatcatacttgaaggccttggaaatggagtctgctgattagccaaaaagcccactttaggatgtatatacaaagacgatatctttatggtcgtatatcaatagccagctagacgagttttctaatcccttctttgtgaattatgaaaaccacgtgttatatcctgttgctagtctgagtcatttggaattgtgggtaaattattatgtacgatggaatccacggatgagacctcagatgcccattcaccagaatctcaaggagctgctggccgtcagggcggagctgcagaagcgtgtggagggtctacagcgggaggtggccacgcgcgccgtctcatcctcatctgagcggggctcctcgccctcccactccgccacctccgtccacacctcggtctgatgggcgaggtcagcctgctgctccactgtctcccggtggctcaggaaagggacctggcgatcactgttatggctgtagcttgtgatcttgtcttttaggattaggcccagggaccatttgtgtggctaggtgacagctcccactgttggcaaccgttaccctcctgtcagcggtttcacaggggagccgtctgtcacgcccaccctgtgaagcaacttctggcattcaggcagcttgggagaaactaagtgaacggaatgcagtactgaggttcaagaaagctgtacgccatttctttccaacttaaatccttcagtaacaacaaacaccactcacttcaagatgcattgccagccccgtggcttccctcagctcttggccacaacttgaaaactgtcttgaatgaagtacttggggagaagacaggccactgccctctgttccacagttttcttcatgcacggggtcctcctgttaacaattactgttgtgtacatataaggtatttttagagaagagaaacaggcctttattttcctatgtccttttttacgtttagaatagtcacccgaggggggatcagctcaactgtactgtgggagaaattcttttccaacaaacctcatgctcgtttttctgtggtgcaatttcaagggcaacgtgttctgtcctcacctcactctggtactcgcctcttggggcggctcagcccattcatggggatggcaccaagcggccatgctcagtcttccagccccgctgagggtaaaccgaggcctctggcagctgtgcacaggtgctggcctctggctccttcaaggagcactgcctgtcactcgctcctgggctgtctagccatgtctcccacccccactttaccgcagccagctgctgggatcaaagcaagtctgttcttatgttatttgcctgtatgaaatcatttctcattttatcacaattccttcaactcagcttactcgcgtggctgcctgttcatatttgaaagcagccaccgtgctgtggctttggtttggaaaagcatagcacgcacttcccttggttttcccttcccagagccgaccgcagctggtcagccctctcttcccgctcctgaacctttacttactgactttgagctctgtgactccgtcggttctcgcaggaattaactaacttaccaattggttcaatccacttgagcgccatagctctgagctcctctgtgtgacatgccacagatgactattgcacacctgggtcctgccccagcaggccatgcccctcccatgtgccgtgcctgttgctgcagctgcccccccaccccgccactggctgcaggaattcagcctttagaggcagaggcagctgcagcggcccctgaggtcaaaccccagtgtgactgcatagcagtgttagctggttggtttcaaactactggattccaggcaaaggcctacagattgaccttattatttttgaaaatatgttaagggttttttcatagagagagaaagaatggatttttttttaactgggaacctcctgattcttacggaaaattatccttctataagaagataccagagagatttattcaaggtaatttgataacctaaaatcaattctccattttttatcatatgtgggatttgttgctaagtcgtgttcaacaatagcttttatgttcctaacatatctgaaagcttatttatgaatggatatactggattattgatatactgattttttttttaatggggacatttgccattttcttcccagaaatatgtaatcccctggctgactaggactgttaaacatagtgtggactggatgatgccttcgacaaaccagagaagccaagttggggggagctggtgcctggagtgggccctgtgcacctcacctggcggaggctgggggggctctgtcagcaggaccctagaggagactctcattcgattttaaagaagcacaacgggtcattttcctttgtatgttcctagcgcagaactgtttctaaaacaacttgaagtatagttttgttatctaagcaatttttgttttaagtaagtaagtgtactagaatgcgaagccgttatggttcaggtttttaaaaactggtacagtattgtatttgtctcatctgttgcactgtatttcaatcatctgtaattaaaatgatcatatgttt

SEQ ID NO: 83431 - DNA, 4332 bp, Homo sapiens
tttgcatgtattttcataagggatgttaatctgtggttttctcttcttgtgatgtctttgtctagctttggtatcaggatacagctagcctcatggaatgaactaggaagtatgccctcctcttctagtttttggatgacccatcatctcttacctcacctacagcaggaaccttgaaattggacttctgcctcacaccctgcaatctcatctccacattatgaccagagtgatcttcttttttaaaaaaaacttattgttactatttcaattgataaatgaattgtatatatttatggtgtacaacgtggtattttgattgtgtacacattgtggaatggctaaatcaagctaattaacacaccattttttgtggtgagaacacttaaaatctactctcagcagttttcagatacagactacattgttattgactgtagtcaccatgttgtacagagtgatcttctcagtggacaactctgtgcacatccctcagagccgcaaggcagtgatatccaggttcctgaacagggtctccaaagccctccacccacgggtcctttccttcctgtctcgccacatcttccaggtccatgtctcagctatgtgaggttcttttcagttccttaagcacatcccactgttagctcagagatatgttgcagtcctaactccaagtacctataaatgtggccttatttcacaatagggtctttgtaaatgtaattaagttaggatgtggtcatattgaattggggggtgggggttaagccaaatgactgtgtccttagaagaagaggagaagagacagacacagacaaaggaaagaaggtcaggtggaaatggaggcagagatcagaatgatgtgtgtataagccaagaacacctgggactatcggaacctggggcagccaaggaaggatcctcccctagagtgttcggaggaagcatggcactgccgataccttgaattcagacttccagcctccagaactaggagagaataaacttctgttgttttaagccactgagtttgtggttctttttccagcagccctaggaaactcatacaaggatataggaggtttatttgcagatgagtttgttgcttctttagtggtctgtatctcatagcactagaaagaatagaaaagttaattccagataatgtgatgtatttgttttgtttttcgtagacaaagggtggaggatatgaaagtgaaagtgcttacccaaatgcagaacttgtgttcttggagatccacaacattcatgtcatgcgagagtcactacgcaaattaaaagagattgtgtacccttcgatcgatgaggcgcggtggctctccaatgtggatgggacgcattggctggaatatataaggatgctgcttgctggggcagtaagaattgctgataaaatagaatctgggaaaacatctgtggtggtgcattgcagcgacggttgggaccgaacagcccagctcacatctctggctatgctaatgttggacagttactacaggaccattaaaggatttgaaactctcgtagaaaaggagtggataagctttggacacaggtttgcactgcgagtgggccatggtaatgacaaccatgcggatgctgaccgatctcccatatttctgcagtttgttgattgtgtttggcaaatgacaaggcagtttccttcagcattcgagtttaatgagctattcttgattacaattttggatcacctttatagctgtctttttgggacctttttgtgcaactgtgaacagcagcgattcaaagaggatgtatatacaaagacgatatctttatggtcgtatatcaatagccagctagacgagttttctaatcccttctttgtgaattatgaaaaccacgtgttatatcctgttgctagtctgagtcatttggaattgtgggtaaattattatgtacgatggaatccacggatgagacctcagatgcccattcaccagaatctcaaggagctgctggccgtcagggcggagctgcagaagcgtgtggagggtctacagcgggaggtggccacgcgcgccgtctcatcctcatctgagcggggctcctcgccctcccactccgccacctccgtccacacctcggtctgatgggcgaggtcagcctgctgctccactgtctcccggtggctcaggaaagggacctggcgatcactgttatggctgtagcttgtgatcttgtcttttaggattaggcccagggaccatttgtgtggctaggtgacagctcccactgttggcaaccgttaccctcctgtcagcggtttcacaggggagccgtctgtcacgcccaccctgtgaagcaacttctggcattcaggcagcttgggagaaactaagtgaacggaatgcagtactgaggttcaagaaagctgtacgccatttctttccaacttaaatccttcagtaacaacaaacaccactcacttcaagatgcattgccagccccgtggcttccctcagctcttggccacaacttgaaaactgtcttgaatgaagtacttggggagaagacaggccactgccctctgttccacagttttcttcatgcacggggtcctcctgttaacaattactgttgtgtacatataaggtatttttagagaagagaaacaggcctttattttcctatgtccttttttacgtttagaatagtcacccgaggggggatcagctcaactgtactgtgggagaaattcttttccaacaaacctcatgctcgtttttctgtggtgcaatttcaagggcaacgtgttctgtcctcacctcactctggtactcgcctcttggggcggctcagcccattcatggggatggcaccaagcggccatgctcagtcttccagccccgctgagggtaaaccgaggcctctggcagctgtgcacaggtgctggcctctggctccttcaaggagcactgcctgtcactcgctcctgggctgtctagccatgtctcccacccccactttaccgcagccagctgctgggatcaaagcaagtctgttcttatgttatttgcctgtatgaaatcatttctcattttatcacaattccttcaactcagcttactcgcgtggctgcctgttcatatttgaaagcagccaccgtgctgtggctttggtttggaaaagcatagcacgcacttcccttggttttcccttcccagagccgaccgcagctggtcagccctctcttcccgctcctgaacctttacttactgactttgagctctgtgactccgtcggttctcgcaggaattaactaacttaccaattggttcaatccacttgagcgccatagctctgagctcctctgtgtgacatgccacagatgactattgcacacctgggtcctgccccagcaggccatgcccctcccatgtgccgtgcctgttgctgcagctgcccccccaccccgccactggctgcaggaattcagcctttagaggcagaggcagctgcagcggcccctgaggtcaaaccccagtgtgactgcatagcagtgttagctggttggtttcaaactactggattccaggcaaaggcctacagattgaccttattatttttgaaaatatgttaagggttttttcatagagagagaaagaatggatttttttttaactgggaacctcctgattcttacggaaaattatccttctataagaagataccagagagatttattcaaggtaatttgataacctaaaatcaattctccattttttatcatatgtgggatttgttgctaagtcgtgttcaacaatagcttttatgttcctaacatatctgaaagcttatttatgaatggatatactggattattgatatactgattttttttttaatggggacatttgccattttcttcccagaaatatgtaatcccctggctgactaggactgttaaacatagtgtggactggatgatgccttcgacaaaccagagaagccaagttggggggagctggtgcctggagtgggccctgtgcacctcacctggcggaggctgggggggctctgtcagcaggaccctagaggagactctcattcgattttaaagaagcacaacgggtcattttcctttgtatgttcctagcgcagaactgtttctaaaacaacttgaagtatagttttgttatctaagcaatttttgttttaagtaagtaagtgtactagaatgcgaagccgttatggttcaggtttttaaaaactggtacagtattgtatttgtctcatctgttgcactgtatttcaatcatctgtaattaaaatgatcatatgttt

SEQ ID NO: 83432 - DNA, 3972 bp, Homo sapiens
taccttagtaaatgcaattttcgaacaggcccccatcttcaactggtatagcatcttccacaccctgtagccttcaaacatcacctgttaaaatactgcccatgaaagatgtcatgtatatctgcccatttatgggagcagtgagtggaaccctgacagtgacggactttaagctgtacttcaaaaatgtcgagagggacccgcattttatccttgatgttccccttggagtgatcagcagagtggagaagattggagcacagagccatggagacaattcctgtggtatagagatagtgtgcaaggatatgaggaacttgcggcttgcttataaacaggaagaacagagtaaactagggatatttgaaaacctcaacaaacatgcatttcctctttctaacggacaggcactatttgcattcagctataaagaaaaatttccaattaatggctggaaagtttatgatccagtatctgaatataagagacagggcttgccaaatgagagttggaaaatatccaaaataaacagtaattatgagttctgtgacacctaccctgccatcattgttgtgccaactagtgtaaaagatgatgacctttcaaaagtggcagcttttcgagcaaaaggcagagtccctgtgttgtcatggattcatccggaaagtcaagcaacgattacccgttgcagccagccacttgtgggtcccaatgataagcgctgcaaagaggatgaaaaatacttgcaaacaataatggatgctaacgcacagtcacacaagcttatcatctttgatgctcgacaaaacagtgtcgctgataccaacaagacaaagggtggaggatatgaaagtgaaagtgcttacccaaatgcagaacttgtgttcttggagatccacaacattcatgtcatgcgagagtcactacgcaaattaaaagagattgtgtacccttcgatcgatgaggcgcggtggctctccaatgtggatgggacgcattggctggaatatataaggatgctgcttgctggggcagtaagaattgctgataaaatagaatctgggaaaacatctgtggtggtgcattgcagcgacggttgggaccgaacagcccagctcacatctctggctatgctaatgttggacagttactacaggaccattaaaggatttgaaactctcgtagaaaaggagtggataagctttggacacaggtttgcactgcgagtgggccatggtaatgacaaccatgcggatgctgaccgatctcccatatttctgcagtttgttgattgtgtttggcaaatgacaaggcagtttccttcagcattcgagtttaatgagctattcttgattacaattttggatcacctttatagctgtctttttgggacctttttgtgcaactgtgaacagcagcgattcaaagaggatgtatatacaaagacgatatctttatggtcgtatatcaatagccagctagacgagttttctaatcccttctttgtgaattatgaaaaccacgtgttatatcctgttgctagtctgagtcatttggaattgtgggtaaattattatgtacgatggaatccacggatgagacctcagatgcccattcaccagaatctcaaggagctgctggccgtcagggcggagctgcagaagcgtgtggagggtctacagcgggaggtggccacgcgcgccgtctcatcctcatctgagcggggctcctcgccctcccactccgccacctccgtccacacctcggtctgatgggcgaggtcagcctgctgctccactgtctcccggtggctcaggaaagggacctggcgatcactgttatggctgtagcttgtgatcttgtcttttaggattaggcccagggaccatttgtgtggctaggtgacagctcccactgttggcaaccgttaccctcctgtcagcggtttcacaggggagccgtctgtcacgcccaccctgtgaagcaacttctggcattcaggcagcttgggagaaactaagtgaacggaatgcagtactgaggttcaagaaagctgtacgccatttctttccaacttaaatccttcagtaacaacaaacaccactcacttcaagatgcattgccagccccgtggcttccctcagctcttggccacaacttgaaaactgtcttgaatgaagtacttggggagaagacaggccactgccctctgttccacagttttcttcatgcacggggtcctcctgttaacaattactgttgtgtacatataaggtatttttagagaagagaaacaggcctttattttcctatgtccttttttacgtttagaatagtcacccgaggggggatcagctcaactgtactgtgggagaaattcttttccaacaaacctcatgctcgtttttctgtggtgcaatttcaagggcaacgtgttctgtcctcacctcactctggtactcgcctcttggggcggctcagcccattcatggggatggcaccaagcggccatgctcagtcttccagccccgctgagggtaaaccgaggcctctggcagctgtgcacaggtgctggcctctggctccttcaaggagcactgcctgtcactcgctcctgggctgtctagccatgtctcccacccccactttaccgcagccagctgctgggatcaaagcaagtctgttcttatgttatttgcctgtatgaaatcatttctcattttatcacaattccttcaactcagcttactcgcgtggctgcctgttcatatttgaaagcagccaccgtgctgtggctttggtttggaaaagcatagcacgcacttcccttggttttcccttcccagagccgaccgcagctggtcagccctctcttcccgctcctgaacctttacttactgactttgagctctgtgactccgtcggttctcgcaggaattaactaacttaccaattggttcaatccacttgagcgccatagctctgagctcctctgtgtgacatgccacagatgactattgcacacctgggtcctgccccagcaggccatgcccctcccatgtgccgtgcctgttgctgcagctgcccccccaccccgccactggctgcaggaattcagcctttagaggcagaggcagctgcagcggcccctgaggtcaaaccccagtgtgactgcatagcagtgttagctggttggtttcaaactactggattccaggcaaaggcctacagattgaccttattatttttgaaaatatgttaagggttttttcatagagagagaaagaatggatttttttttaactgggaacctcctgattcttacggaaaattatccttctataagaagataccagagagatttattcaaggtaatttgataacctaaaatcaattctccattttttatcatatgtgggatttgttgctaagtcgtgttcaacaatagcttttatgttcctaacatatctgaaagcttatttatgaatggatatactggattattgatatactgattttttttttaatggggacatttgccattttcttcccagaaatatgtaatcccctggctgactaggactgttaaacatagtgtggactggatgatgccttcgacaaaccagagaagccaagttggggggagctggtgcctggagtgggccctgtgcacctcacctggcggaggctgggggggctctgtcagcaggaccctagaggagactctcattcgattttaaagaagcacaacgggtcattttcctttgtatgttcctagcgcagaactgtttctaaaacaacttgaagtatagttttgttatctaagcaatttttgttttaagtaagtaagtgtactagaatgcgaagccgttatggttcaggtttttaaaaactggtacagtattgtatttgtctcatctgttgcatacacgtcatatcgtagtacagtccgttggttgtggccgttttgtc

SEQ ID NO: 83433 - DNA, 794 bp, Homo sapiens
ccaacagcatttccatgtggaaacgctgtggtaggaggatggcctgataatgcagctttgtctctgctccctccagatgcccattcaccagaatctcaaggagctgctggccgtcagggcggagctgcagaagcgtgtggagggtctacagcgggaggtggccacgcgcgccgtctcatcctcatctgagcggggctcctcgccctcccactccgccacctccgtccacacctcggtctgatgggcgaggtcagcctgctgctccactgtctcccggtggctcaggaaagggacctggcgatcactgttatggctgtagcttgtgatcttgtcttttaggattaggcccagggaccatttgtgtggctaggtgacagctcccactgttggcaaccgttaccctcctgtcagcggtttcacaggggagccgtctgtcacgcccaccctgtgaagcaacttctggcattcaggcagcttgggagaaactaagtgaacggaatgcagtactgaggttcaagaaagctgtacgccatttctttccaacttaaatccttcagtaacaacaaacaccactcacttcaagatgcattgccagccccgtggcttccctcagctcttggccacaacttgaaaactgtcttgaatgaagtacttggggagaagacaggccactgccctctgttccacagttttcttcatgcacggggtcctcctgttaacaattactgttgtgtacatataaggtatttttagagaagagaaacaggcctttattttcctatgtccttttttac

SEQ ID NO: 83434 - DNA, 850 bp, Homo sapiens
ctttcgggttctaggcagccgtgggcgctgcgacccttctctcactgtcagaggggcgggagctctcggcctgcgccgcctccgctgcctgcttggtcgcgggcttgccgggaatggtgacagcccgggccccctcttggccaaagaagtcctcgaaagcgttcggcgcacgggctttgtccagctttttaaaccgtaacaaggaccggggccgggcgcggtggctcacgcctgtaatcccagcattttgggaagtcgaggcggacggattacttgaggtcatgagttcgagaccagcctggccaacacgatggagtcttgctcccatgctggagtgcagtggcgtgatctcggctgactgtaacctccgcctcccgggttcaagtgattctcctgcctcagcctccggagtagctgggattacagcaaagatatccagacgctgtatgcaggaagaactgaatttcagaggacaccgtttgatcttcaacacctggcagtttacaaaacagagacggggtgtcgccatgttgcccaggctggtctcgaactctggagctcaagcgatctgcctgcctcggcctttcaaagtgctgagactacagcctgaagaggagagggggaatcctggtgagaagcatttggaattcaagctcagagaagaagacacggagtcccagctgagaactcaaactggtagaaggaagattatttttccttctctataggtgcttggaggtaacgaggggaaaggagttgaaaggaaggtgacatttcaggtattgatgggacagcacgtgcgaggcctagaggactgaaagttcttgatgggatctgtcagaagaaaaca

SEQ ID NO: 83435 - DNA, 207 bp, Homo sapiens
aaaagcaaattaaaacaaaaaagagatgccacttttcaataactggcaaaaattataaagagtaaccatatctgcgccaggcacggtggctcatgcctgtaatctcagcactttgggaggccaagggaggcagacaactttgagctcaggagttcgagaccagcctggacaacatggtgaaccccatctctacaagaattacaaaaa

SEQ ID NO: 83436 - DNA, 3883 bp, Homo sapiens
caacaaaatacatacatatatatatatttcaggttaactagaaaaatcttctgaataagatcttccctctttgcccgtggaaaatctgaacaatctttgagccatctagaggggaaagaaaagactttgttctgtgtgtttcaagaaattcaccatgtcagcaatatgaaggatgttatggaaggcgtgcttggcattcaattcctgcagaaaccggaaatcttccatgccctgcaatgtgctcatcaaactctcagcatatggacggccagctgtggcccatatcttggtcactctgaagcacaatatttatgaagctatagaacgttaagacctctttcacagcctctccttcctacaaagactcctccaaatcttaaaatgaagcaggaaaacgagcctaagaggactttcataccgacaacatctgaaaggactagaatgttcacaccacgatctggatttcttaattttttgtttttgtttttgttgttctctagttctacgggtttgattatttagtcatgtgaaaaatattgattactcacacatagatcaagagagacacggctcctgccttcatggagcttttaggggaaaatgaagtggctcttgcagctagagttgactcagaagccgaaattcctagaaatcaggtttctactgctaggcaattgaagtataaactattttataaacactgtcttctttcatcttcacaccaacatgcagaaaagtttctaatctcagatcagggatgtgcaacaaattccatttcaaaggaatgacctgcaaaactcctaaatattccaagcaaatgcccttaaccctgtctgttatctgctttccttgaacagaaattctacatgaccataaaacctcgaagatgggtatggcacagttcatgccctgtaatcctagcactttgggagggtgaggcaggaggatggctcaagcccaggagtttgagaccagtgtgggcaacagagtgagaaccatctctaccccaaaaaaaaattaaaaattagccaagcatggtgatgatataggagttaaggagaaatcatttaggcaaatagcaagggtaggaagtcctcagtgaggttttctgtttaatgaaaagcagcccccaaaatcattttcttttctaacaaagaacagcctgtaaaatcgagctgcagacatagacaagcaagctggaagcttccacgggtgaatgctggcagctgtgccaataggaaaaagctacctagactaggcatgtccaaaatggcggctccaagttcccttctctttgccagccatgtgtacagtaaaaagcaggcaacatagtgtcagccaaagctcatttgcataataagattagggtggggtggccagctcacataggggtaggccctaggtaaatcagacaccgccttctcaagcctgtctataaaatctggtacactatgacgagggtcagatttcccattcagacgcccctctcccatgcaagagaaagagctgttctcctttctctttcttttgcctattaaacctctgctcctggccaggcacagtggctcacgcctataatcccagcactttgggaggctgaggtggtcagatcacctaaggtcaggagttcaagaccagcctggtcaacatggtgaaatcttgtctctagtaaaaatacaaaaatatatgaaatctcacatagatgataatactaagttccaaaagcaactcaacctggtagattctaattttttttgaggcagggtcttgctttgtcacccatgctggagtacaatggcacaaacactgctcactgcagcctcgacctcccaaggcctaagcaatcctcctgcctcagtccccctccaagtagctgaaactacaggtgtgtaccaccacacctggctaatttttgtattttttgtagagacgtgggtctcactatgctgcccaggctcaggtcttaatctcctgagctcaggcaatccgcaggcctcagcctccctaagtgcggggattacaggcttgagccactgcacctagcctctatttgttttacaaaagagaaattgagatcctgaatgttaagtgacttgcctgaggccatcccactaacaggagccagggttaggattcaaaccccatccaactggtcccagagctggagcttcttgcactgccctacactacctaccatctccatcctctgggcacctttttataagaaccaaaacattacagagcattgctttgtcaactcagctgggaacatttcccagtgcaactcacatttttcactgctctgtgcctgtctgtataagctcaatgagtattgatttaggggctttggagaactttgaatgctaccccccaagtaaccattattggcaacctggtacctctacttttagccatttctccttctctataaacagtgcagaagtaacccacttggtaacaggcatccttgccaagcctccaccactaggtcagtgtaagaattaaagaaagaggaaagaaacacgaaaagtggcttgatggttaagacaggtttattttagagaaaacacacctgagaggggctgctggctgaattaggttagagtcttttctacagactaagagtgtttaaggatttagggtgggagagtttcttagaggcttggactgcttctgtgtttttttgttgtgcttatatgggagggagagtggtgtgtttgcttttatacatttttctgcagctgtaggcataccccccaagtctgcttttagcttccctattttagtgcacctggagggaaaggaatgtgcttattaaggcccactgttttactggggcccattgtatgagggtgaagtttggcagttacccaagagacttttcctccaccttcctctgtgcccgagctgttttatctgcattttactgtctgctttttttggctgcttatagtttttaaaaaagtaatttccttaaatccagaaggctaaaaatgaagctgaaacttaaagtggcggtgtttgtccaaaataacggggctcctgctctgccagtcagtaccctcaagtcactcctgatcctcaacctccatgcctaaggctggttcaagagaccacataatatctgccttttattacatacatgatgggtgcatgggattctgcgtgccctttgcttgatatagactgctaaggtgagatggggaatatcagagtcagctgctgcttgaggaagcagaacacacagctggaggcttggaacatgtgggtccctatgagtgtagagcccatatccccatagagtctacctagagcaggggtcgccaaatgttttcttaaagagcctgatagtgtatatgttaggctttgtgagccaggtatttacagcaactcaattctaccactgtggtatgaaaacagctatagacaatcataaatgaatgatcatggctatgttttaataaaactttacagacactgaacttgaacttccattgtgatatgaaaacagctatagacaatcataaatgaatgatcatggctatgttttaataaaactttatggacactgagcttgaacttcatatatcagtcatgggacacaaaatatcattcttctttttatttgttttcacccatttgaaaaatgtaaaaactattcttagctgtacagaaacagatggtgggtcagatttgactcactgcccatagtttccagaccatgatgttcaggttcatggaagcacttcactctacactaatttattcatccattcatcacatatgtgatgagcagatacagacacacctcagagatattgcaggctccactccagatcaccacaataatgtgaatattgcaataaagcaagtcatacacatt

SEQ ID NO: 83437 - DNA, 587 bp, Homo sapiens
cgggcagatcatgaggtcaggagatcaagactatcctggctaacatggtgaaaccctgtctctactaaaaatacaaaaattagccaggcgtggtggtgggtgcctgtactcgggaggctgagacaggagaatcgctcgaacccgggaggcagaggtggcagtgagctgagattgcaccgccacactccagcctgggcaacagagcaagaccctgtctgaaaaaaaaaaaaaaagagataacaggtttcaaaatctattcaacaaatcttctgtggttttctgaaggtgaatttagttctctttctggtgactctctggattttgaaaaacagactctcctccctcaatagtgaagtgtccaccctccggaacacaaggtaagatggagaagggggtgataaccacacagacatgtatggttcccaagagccaagccatgtgcctcagcagccactgaggtcccttctcagggtcttttgaagggacccagaaaaaacagacgcagccatccttctatggcagccatcacagattcagtggtatcctgttgagaccccatgcaacatgttttgtccatgtctaatctc

SEQ ID NO: 83438 - DNA, 6775 bp, Homo sapiens
agcggggggtgtctgctctgtgcagtgaagcttctcttcttggcacctgcctggcatcggaagagggccccttctccctccctgggcttttatgtggacactgtaatgcctcagttttctttctttctttttgtttttgacacagggtctcactctatcacccaagctggagtgcagtggcaccatcttagctcaccgcagcctcaaactccccagctcgggtgattcttcctgcctcagcctcctgagtagtagcagctgggaccacagacgtctgccaccaagcccagctgcaccgccagttccggggagggccctgggccagcggctgtccgccccccctcctttataaagtcctggcctcgggacagcccgcacagctgcccagcctgcggagacgggacagccctgtcccactcactctttcccctgctgctcctgccggcagctcagctggaaccatgggaggccgcgtctttctcgtctttctcgcattctgtgtctggctgactctgccgggagctgaaacccaggactccaggggctgtgcccggtggtgccctcaggactcctcgtgtgtcaatgccaccgcctgtcgctgcaatccagggttcagctctttttctgagatcatcaccacccccatggagacttgtgacgacatcaacgagtgtgcaacactgtcgaaagtgtcatgcggaaaattctcggactgctggaacacagaggggagctacgactgcgtgtgcagcccaggatatgagcctgtttctggggcaaaaacattcaagaatgagagcgagaacacgtgtcaagatgtggacgaatgtcagcagaacccaaggctctgtaaaagctacggcacctgcgtcaacaccctcggcagctacacgtgccagtgcctgcctggcttcaagctcaaacctgaggacccgaagctctgcacagatgtgaatgaatgcacctccggacaaaacccatgccacagctccacccactgcctcaacaacgtgggcagctatcagtgccgctgccgcccgggctggcaaccgattccggggtcccccaatggcccaaacaataccgtctgtgaagatgtggacgagtgcagctccgggcagcatcagtgtgacagctccaccgtctgcttcaacaccgtgggttcatacagctgccgctgccgcccaggctggaagcccagacacggaatcccgaataaccaaaaggacactgtctgtgaagatatgactttctccacctggaccccgccccctggagtccacagccagacgctttcccgattcttcgacaaagtccaggacctgggcagagactacaagccaggcttggccaataacaccatccagagcatcttacaggcgctggatgagctgctggaggcccctggggacctggagaccctgccccgcttacagcagcactgtgtggccagtcacctgctggatggcctagaggatgtcctcagaggcctgagcaagaacctttccaatgggctgttgaacttcagttatcctgcaggcacagaattgtccctggaggtgcagaagcaagtagacaggagtgtcaccttgagacagaatcaggcagtgatgcagctcgactggaatcaggcacagaaatctggtgacccaggcccttctgtggtgggccttgtctccattccagggatgggcaagttgctggctgaggcccctctggtcctggaacctgagaagcagatgcttctgcatgagacacaccagggcttgctgcaggacggctcccccatcctgctctcagatgtgatctctgcctttctgagcaacaacgacacccaaaacctcagctccccagttaccttcaccttctcccaccgttcagtgatcccgagacagaaggtgctctgtgtcttctgggagcatggccagaatggatgtggtcactgggccaccacaggctgcagcacaataggcaccagagacaccagcaccatctgccgttgcacccacctgagcagctttgccgtcctcatggcccactacgatgtgcaggaggaggatcccgtgctgactgtcatcacctacatggggctgagcgtctctctgctgtgcctcctcctggcggccctcacttttctcctgtgtaaagccatccagaacaccagcacctcactgcatctgcagctctcgctctgcctcttcctggcccacctcctcttcctcgtggcaattgatcaaaccggacacaaggtgctgtgctccatcatcgccggtaccttgcactatctctacctggccaccttcacctggatgctgctggaggccctgtacctcttcctcactgcacggaacctgacggtggtcaactactcaagcatcaacagattcatgaagaagctcatgttccctgtgggctacggagtcccagctgtgacagtggccatttctgcagcctccaggcctcacctttatggaacaccttcccgctgctggctccaaccagaaaagggatttatatggggcttccttggacctgtctgcgccatcttctctgtgaatttagttctctttctggtgactctctggattttgaaaaacagactctcctccctcaatagtgaagtgtccaccctccggaacacaaggatgctggcatttaaagcgacagctcagctgttcatcctgggctgcacgtggtgtctgggcatcttgcaggtgggtccggctgcccgggtcatggcctacctcttcaccatcatcaacagcctgcagggtgtcttcatcttcctggtgtactgcctcctcagccagcaggtccgggagcaatatgggaaatggtccaaagggatcaggaaattgaaaactgagtctgagatgcacacactctccagcagtgctaaggctgacacctccaaacccagcacggttaactagaaaaatcttctgaataagatcttccctctttgcccgtggaaaatctgaacaatctttgagccatctagaggggaaagaaaagactttgttctgtgtgtttcaagaaattcaccatgtcagcaatatgaaggatgttatggaaggcgtgcttggcattcaattcctgcagaaaccggaaatcttccatgccctgcaatgtgctcatcaaactctcagcatatggacggccagctgtggcccatatcttggtcactctgaagcacaatatttatgaagctatagaacgttaagacctctttcacagcctctccttcctacaaagactcctccaaatcttaaaatgaagcaggaaaacgagcctaagaggactttcataccgacaacatctgaaaggactagaatgttcacaccacgatctggatttcttaattttttgtttttgtttttgttgttctctagttctacgggtttgattatttagtcatgtgaaaaatattgattactcacacatagatcaagagagacacggctcctgccttcatggagcttttaggggaaaatgaagtggctcttgcagctagagttgactcagaagccgaaattcctagaaatcaggtttctactgctaggcaattgaagtataaactattttataaacactgtcttctttcatcttcacaccaacatgcagaaaagtttctaatctcagatcagggatgtgcaacaaattccatttcaaaggaatgacctgcaaaactcctaaatattccaagcaaatgcccttaaccctgtctgttatctgctttccttgaacagaaattctacatgaccataaaacctcgaagatgggtatggcacagttcatgccctgtaatcctagcactttgggagggtgaggcaggaggatggctcaagcccaggagtttgagaccagtgtgggcaacagagtgagaaccatctctaccccaaaaaaaaattaaaaattagccaagcatggtgatgatataggagttaaggagaaatcatttaggcaaatagcaagggtaggaagtcctcagtgaggttttctgtttaatgaaaagcagcccccaaaatcattttcttttctaacaaagaacagcctgtaaaatcgagctgcagacatagacaagcaagctggaagcttccacgggtgaatgctggcagctgtgccaataggaaaaagctacctagactaggcatgtccaaaatggcggctccaagttcccttctctttgccagccatgtgtacagtaaaaagcaggcaacatagtgtcagccaaagctcatttgcataataagattagggtggggtggccagctcacataggggtaggccctaggtaaatcagacaccgccttctcaagcctgtctataaaatctggtacactatgacgagggtcagatttcccattcagacgcccctctcccatgcaagagaaagagctgttctcctttctctttcttttgcctattaaacctctgctcctggccaggcacagtggctcacgcctataatcccagcactttgggaggctgaggtggtcagatcacctaaggtcaggagttcaagaccagcctggtcaacatggtgaaatcttgtctctagtaaaaatacaaaaatatatgaaatctcacatagatgataatactaagttccaaaagcaactcaacctggtagattctaattttttttgaggcagggtcttgctttgtcacccatgctggagtacaatggcacaaacactgctcactgcagcctcgacctcccaaggcctaagcaatcctcctgcctcagtccccctccaagtagctgaaactacaggtgtgtaccaccacacctggctaatttttgtattttttgtagagacgtgggtctcactatgctgcccaggctcaggtcttaatctcctgagctcaggcaatccgcaggcctcagcctccctaagtgcggggattacaggcttgagccactgcacctagcctctatttgttttacaaaagagaaattgagatcctgaatgttaagtgacttgcctgaggccatcccactaacaggagccagggttaggattcaaaccccatccaactggtcccagagctggagcttcttgcactgccctacactacctaccatctccatcctctgggcacctttttataagaaccaaaacattacagagcattgctttgtcaactcagctgggaacatttcccagtgcaactcacatttttcactgctctgtgcctgtctgtataagctcaatgagtattgatttaggggctttggagaactttgaatgctaccccccaagtaaccattattggcaacctggtacctctacttttagccatttctccttctctataaacagtgcagaagtaacccacttggtaacaggcatccttgccaagcctccaccactaggtcagtgtaagaattaaagaaagaggaaagaaacacgaaaagtggcttgatggttaagacaggtttattttagagaaaacacacctgagaggggctgctggctgaattaggttagagtcttttctacagactaagagtgtttaaggatttagggtgggagagtttcttagaggcttggactgcttctgtgtttttttgttgtgcttatatgggagggagagtggtgtgtttgcttttatacatttttctgcagctgtaggcataccccccaagtctgcttttagcttccctattttagtgcacctggagggaaaggaatgtgcttattaaggcccactgttttactggggcccattgtatgagggtgaagtttggcagttacccaagagacttttcctccaccttcctctgtgcccgagctgttttatctgcattttactgtctgctttttttggctgcttatagtttttaaaaaagtaatttccttaaatccagaaggctaaaaatgaagctgaaacttaaagtggcggtgtttgtccaaaataacggggctcctgctctgccagtcagtaccctcaagtcactcctgatcctcaacctccatgcctaaggctggttcaagagaccacataatatctgccttttattacatacatgatgggtgcatgggattctgcgtgccctttgcttgatatagactgctaaggtgagatggggaatatcagagtcagctgctgcttgaggaagcagaacacacagctggaggcttggaacatgtgggtccctatgagtgtagagcccatatccccatagagtctacctagagcaggggtcgccaaatgttttcttaaagagcctgatagtgtatatgttaggctttgtgagccaggtatttacagcaactcaattctaccactgtggtatgaaaacagctatagacaatcataaatgaatgatcatggctatgttttaataaaactttacagacactgaacttgaacttccattgtgatatgaaaacagctatagacaatcataaatgaatgatcatggctatgttttaataaaactttatggacactgagcttgaacttcatatatcagtcatgggacacaaaatatcattcttctttttatttgttttcacccatttgaaaaatgtaaaaactattcttagctgtacagaaacagatggtgggtcagatttgactcactgcccatagtttccagaccatgatgttcaggttcatggaagcacttcactctacactaatttattcatccattcatcacatatgtgatgagcagatacagacacacctcagagatattgcaggctccactccagatcaccacaataatgtgaatattgcaataaagcaagtcatacacatt

SEQ ID NO: 83439 - DNA, 6230 bp, Homo sapiens
agcggggggtgtctgctctgtgcagtgaagcttctcttcttggcacctgcctggcatcggaagagggccccttctccctccctgggcttttatgtggacactgtaatgcctcagttttctttctttctttttgtttttgacacagggtctcactctatcacccaagctggagtgcagtggcaccatcttagctcaccgcagcctcaaactccccagctcgggtgattcttcctgcctcagcctcctgagtagtagcagctgggaccacagacgtctgccaccaagcccagctgcaccgccagttccggggagggccctgggccagcggctgtccgccccccctcctttataaagtcctggcctcgggacagcccgcacagctgcccagcctgcggagacgggacagccctgtcccactcactctttcccctgctgctcctgccggcagctcagctggaaccatgggaggccgcgtctttctcgtctttctcgcattctgtgtctggctgactctgccgggagctgaaacccaggactccaggggctgtgcccggtggtgccctcaggactcctcgtgtgtcaatgccaccgcctgtcgctgcaatccagggttcagctctttttctgagatcatcaccacccccatggagacttgtgacgacatcaacgagtgtgcaacactgtcgaaagtgtcatgcggaaaattctcggactgctggaacacagaggggagctacgactgcgtgtgcagcccaggatatgagcctgtttctggggcaaaaacattcaagaatgagagcgagaacacgtgtcaagatgtggacgaatgtcagcagaacccaaggctctgtaaaagctacggcacctgcgtcaacaccctcggcagctacacgtgccagtgcctgcctggcttcaagctcaaacctgaggacccgaagctctgcacagatgtggacgagtgcagctccgggcagcatcagtgtgacagctccaccgtctgcttcaacaccgtgggttcatacagctgccgctgccgcccaggctggaagcccagacacggaatcccgaataaccaaaaggacactgtctgtgaagatatgactttctccacctggaccccgccccctggagtccacagccagacgctttcccgattcttcgacaaagtccaggacctgggcagagactacaagccaggcttggccaataacaccatccagagcatcttacaggcgctggatgagctgctggaggcccctggggacctggagaccctgccccgcttacagcagcactgtgtggccagtcacctgctggatggcctagaggatgtcctcagaggcctgagcaagaacctttccaatgggctgttgaacttcagttatcctgcaggcacagaattgtccctggaggtgcagaagcaagtagacaggagtgtcaccttgagacagaatcaggcagtgatgcagctcgactggaatcaggcacagaaatctggtgacccaggaggaggatcccgtgctgactgtcatcacctacatggggctgagcgtctctctgctgtgcctcctcctggcggccctcacttttctcctgtgtaaagccatccagaacaccagcacctcactgcatctgcagctctcgctctgcctcttcctggcccacctcctcttcctcgtggcaattgatcaaaccggacacaaggtgctgtgctccatcatcgccggtaccttgcactatctctacctggccaccttcacctggatgctgctggaggccctgtacctcttcctcactgcacggaacctgacggtggtcaactactcaagcatcaacagattcatgaagaagctcatgttccctgtgggctacggagtcccagctgtgacagtggccatttctgcagcctccaggcctcacctttatggaacaccttcccgctgctggctccaaccagaaaagggatttatatggggcttccttggacctgtctgcgccatcttctctgtgaatttagttctctttctggtgactctctggattttgaaaaacagactctcctccctcaatagtgaagtgtccaccctccggaacacaaggatgctggcatttaaagcgacagctcagctgttcatcctgggctgcacgtggtgtctgggcatcttgcaggtgggtccggctgcccgggtcatggcctacctcttcaccatcatcaacagcctgcagggtgtcttcatcttcctggtgtactgcctcctcagccagcaggtccgggagcaatatgggaaatggtccaaagggatcaggaaattgaaaactgagtctgagatgcacacactctccagcagtgctaaggctgacacctccaaacccagcacggttaactagaaaaatcttctgaataagatcttccctctttgcccgtggaaaatctgaacaatctttgagccatctagaggggaaagaaaagactttgttctgtgtgtttcaagaaattcaccatgtcagcaatatgaaggatgttatggaaggcgtgcttggcattcaattcctgcagaaaccggaaatcttccatgccctgcaatgtgctcatcaaactctcagcatatggacggccagctgtggcccatatcttggtcactctgaagcacaatatttatgaagctatagaacgttaagacctctttcacagcctctccttcctacaaagactcctccaaatcttaaaatgaagcaggaaaacgagcctaagaggactttcataccgacaacatctgaaaggactagaatgttcacaccacgatctggatttcttaattttttgtttttgtttttgttgttctctagttctacgggtttgattatttagtcatgtgaaaaatattgattactcacacatagatcaagagagacacggctcctgccttcatggagcttttaggggaaaatgaagtggctcttgcagctagagttgactcagaagccgaaattcctagaaatcaggtttctactgctaggcaattgaagtataaactattttataaacactgtcttctttcatcttcacaccaacatgcagaaaagtttctaatctcagatcagggatgtgcaacaaattccatttcaaaggaatgacctgcaaaactcctaaatattccaagcaaatgcccttaaccctgtctgttatctgctttccttgaacagaaattctacatgaccataaaacctcgaagatgggtatggcacagttcatgccctgtaatcctagcactttgggagggtgaggcaggaggatggctcaagcccaggagtttgagaccagtgtgggcaacagagtgagaaccatctctaccccaaaaaaaaattaaaaattagccaagcatggtgatgatataggagttaaggagaaatcatttaggcaaatagcaagggtaggaagtcctcagtgaggttttctgtttaatgaaaagcagcccccaaaatcattttcttttctaacaaagaacagcctgtaaaatcgagctgcagacatagacaagcaagctggaagcttccacgggtgaatgctggcagctgtgccaataggaaaaagctacctagactaggcatgtccaaaatggcggctccaagttcccttctctttgccagccatgtgtacagtaaaaagcaggcaacatagtgtcagccaaagctcatttgcataataagattagggtggggtggccagctcacataggggtaggccctaggtaaatcagacaccgccttctcaagcctgtctataaaatctggtacactatgacgagggtcagatttcccattcagacgcccctctcccatgcaagagaaagagctgttctcctttctctttcttttgcctattaaacctctgctcctggccaggcacagtggctcacgcctataatcccagcactttgggaggctgaggtggtcagatcacctaaggtcaggagttcaagaccagcctggtcaacatggtgaaatcttgtctctagtaaaaatacaaaaatatatgaaatctcacatagatgataatactaagttccaaaagcaactcaacctggtagattctaattttttttgaggcagggtcttgctttgtcacccatgctggagtacaatggcacaaacactgctcactgcagcctcgacctcccaaggcctaagcaatcctcctgcctcagtccccctccaagtagctgaaactacaggtgtgtaccaccacacctggctaatttttgtattttttgtagagacgtgggtctcactatgctgcccaggctcaggtcttaatctcctgagctcaggcaatccgcaggcctcagcctccctaagtgcggggattacaggcttgagccactgcacctagcctctatttgttttacaaaagagaaattgagatcctgaatgttaagtgacttgcctgaggccatcccactaacaggagccagggttaggattcaaaccccatccaactggtcccagagctggagcttcttgcactgccctacactacctaccatctccatcctctgggcacctttttataagaaccaaaacattacagagcattgctttgtcaactcagctgggaacatttcccagtgcaactcacatttttcactgctctgtgcctgtctgtataagctcaatgagtattgatttaggggctttggagaactttgaatgctaccccccaagtaaccattattggcaacctggtacctctacttttagccatttctccttctctataaacagtgcagaagtaacccacttggtaacaggcatccttgccaagcctccaccactaggtcagtgtaagaattaaagaaagaggaaagaaacacgaaaagtggcttgatggttaagacaggtttattttagagaaaacacacctgagaggggctgctggctgaattaggttagagtcttttctacagactaagagtgtttaaggatttagggtgggagagtttcttagaggcttggactgcttctgtgtttttttgttgtgcttatatgggagggagagtggtgtgtttgcttttatacatttttctgcagctgtaggcataccccccaagtctgcttttagcttccctattttagtgcacctggagggaaaggaatgtgcttattaaggcccactgttttactggggcccattgtatgagggtgaagtttggcagttacccaagagacttttcctccaccttcctctgtgcccgagctgttttatctgcattttactgtctgctttttttggctgcttatagtttttaaaaaagtaatttccttaaatccagaaggctaaaaatgaagctgaaacttaaagtggcggtgtttgtccaaaataacggggctcctgctctgccagtcagtaccctcaagtcactcctgatcctcaacctccatgcctaaggctggttcaagagaccacataatatctgccttttattacatacatgatgggtgcatgggattctgcgtgccctttgcttgatatagactgctaaggtgagatggggaatatcagagtcagctgctgcttgaggaagcagaacacacagctggaggcttggaacatgtgggtccctatgagtgtagagcccatatccccatagagtctacctagagcaggggtcgccaaatgttttcttaaagagcctgatagtgtatatgttaggctttgtgagccaggtatttacagcaactcaattctaccactgtggtatgaaaacagctatagacaatcataaatgaatgatcatggctatgttttaataaaactttacagacactgaacttgaacttccattgtgatatgaaaacagctatagacaatcataaatgaatgatcatggctatgttttaataaaactttatggacactgagcttgaacttcatatatcagtcatgggacacaaaatatcattcttctttttatttgttttcacccatttgaaaaatgtaaaaactattcttagctgtacagaaacagatggtgggtcagatttgactcactgcccatagtttccagaccatgatgttcaggttcatggaagcacttcactctacactaatttattcatccattcatcacatatgtgatgagcagatacagacacacctcagagatattgcaggctccactccagatcaccacaataatgtgaatattgcaataaagcaagtcatacacatt

SEQ ID NO: 83440 - DNA, 6595 bp, Homo sapiens
agcggggggtgtctgctctgtgcagtgaagcttctcttcttggcacctgcctggcatcggaagagggccccttctccctccctgggcttttatgtggacactgtaatgcctcagttttctttctttctttttgtttttgacacagggtctcactctatcacccaagctggagtgcagtggcaccatcttagctcaccgcagcctcaaactccccagctcgggtgattcttcctgcctcagcctcctgagtagtagcagctgggaccacagacgtctgccaccaagcccagctgcaccgccagttccggggagggccctgggccagcggctgtccgccccccctcctttataaagtcctggcctcgggacagcccgcacagctgcccagcctgcggagacgggacagccctgtcccactcactctttcccctgctgctcctgccggcagctcagctggaaccatgggaggccgcgtctttctcgtctttctcgcattctgtgtctggctgactctgccgggagctgaaacccaggactccaggggctgtgcccggtggtgccctcaggactcctcgtgtgtcaatgccaccgcctgtcgctgcaatccagggttcagctctttttctgagatcatcaccacccccatggagacttgtgacgacatcaacgagtgtgcaacactgtcgaaagtgtcatgcggaaaattctcggactgctggaacacagaggggagctacgactgcgtgtgcagcccaggatatgagcctgtttctggggcaaaaacattcaagaatgagagcgagaacacgtgtcaagatgtggacgaatgtcagcagaacccaaggctctgtaaaagctacggcacctgcgtcaacaccctcggcagctacacgtgccagtgcctgcctggcttcaagctcaaacctgaggacccgaagctctgcacagatgtggacgagtgcagctccgggcagcatcagtgtgacagctccaccgtctgcttcaacaccgtgggttcatacagctgccgctgccgcccaggctggaagcccagacacggaatcccgaataaccaaaaggacactgtctgtgaagatatgactttctccacctggaccccgccccctggagtccacagccagacgctttcccgattcttcgacaaagtccaggacctgggcagagactacaagccaggcttggccaataacaccatccagagcatcttacaggcgctggatgagctgctggaggcccctggggacctggagaccctgccccgcttacagcagcactgtgtggccagtcacctgctggatggcctagaggatgtcctcagaggcctgagcaagaacctttccaatgggctgttgaacttcagttatcctgcaggcacagaattgtccctggaggtgcagaagcaagtagacaggagtgtcaccttgagacagaatcaggcagtgatgcagctcgactggaatcaggcacagaaatctggtgacccagggatgggcaagttgctggctgaggcccctctggtcctggaacctgagaagcagatgcttctgcatgagacacaccagggcttgctgcaggacggctcccccatcctgctctcagatgtgatctctgcctttctgagcaacaacgacacccaaaacctcagctccccagttaccttcaccttctcccaccgttcagtgatcccgagacagaaggtgctctgtgtcttctgggagcatggccagaatggatgtggtcactgggccaccacaggctgcagcacaataggcaccagagacaccagcaccatctgccgttgcacccacctgagcagctttgccgtcctcatggcccactacgatgtgcaggaggaggatcccgtgctgactgtcatcacctacatggggctgagcgtctctctgctgtgcctcctcctggcggccctcacttttctcctgtgtaaagccatccagaacaccagcacctcactgcatctgcagctctcgctctgcctcttcctggcccacctcctcttcctcgtggcaattgatcaaaccggacacaaggtgctgtgctccatcatcgccggtaccttgcactatctctacctggccaccttcacctggatgctgctggaggccctgtacctcttcctcactgcacggaacctgacggtggtcaactactcaagcatcaacagattcatgaagaagctcatgttccctgtgggctacggagtcccagctgtgacagtggccatttctgcagcctccaggcctcacctttatggaacaccttcccgctgctggctccaaccagaaaagggatttatatggggcttccttggacctgtctgcgccatcttctctgtgaatttagttctctttctggtgactctctggattttgaaaaacagactctcctccctcaatagtgaagtgtccaccctccggaacacaaggatgctggcatttaaagcgacagctcagctgttcatcctgggctgcacgtggtgtctgggcatcttgcaggtgggtccggctgcccgggtcatggcctacctcttcaccatcatcaacagcctgcagggtgtcttcatcttcctggtgtactgcctcctcagccagcaggtccgggagcaatatgggaaatggtccaaagggatcaggaaattgaaaactgagtctgagatgcacacactctccagcagtgctaaggctgacacctccaaacccagcacggttaactagaaaaatcttctgaataagatcttccctctttgcccgtggaaaatctgaacaatctttgagccatctagaggggaaagaaaagactttgttctgtgtgtttcaagaaattcaccatgtcagcaatatgaaggatgttatggaaggcgtgcttggcattcaattcctgcagaaaccggaaatcttccatgccctgcaatgtgctcatcaaactctcagcatatggacggccagctgtggcccatatcttggtcactctgaagcacaatatttatgaagctatagaacgttaagacctctttcacagcctctccttcctacaaagactcctccaaatcttaaaatgaagcaggaaaacgagcctaagaggactttcataccgacaacatctgaaaggactagaatgttcacaccacgatctggatttcttaattttttgtttttgtttttgttgttctctagttctacgggtttgattatttagtcatgtgaaaaatattgattactcacacatagatcaagagagacacggctcctgccttcatggagcttttaggggaaaatgaagtggctcttgcagctagagttgactcagaagccgaaattcctagaaatcaggtttctactgctaggcaattgaagtataaactattttataaacactgtcttctttcatcttcacaccaacatgcagaaaagtttctaatctcagatcagggatgtgcaacaaattccatttcaaaggaatgacctgcaaaactcctaaatattccaagcaaatgcccttaaccctgtctgttatctgctttccttgaacagaaattctacatgaccataaaacctcgaagatgggtatggcacagttcatgccctgtaatcctagcactttgggagggtgaggcaggaggatggctcaagcccaggagtttgagaccagtgtgggcaacagagtgagaaccatctctaccccaaaaaaaaattaaaaattagccaagcatggtgatgatataggagttaaggagaaatcatttaggcaaatagcaagggtaggaagtcctcagtgaggttttctgtttaatgaaaagcagcccccaaaatcattttcttttctaacaaagaacagcctgtaaaatcgagctgcagacatagacaagcaagctggaagcttccacgggtgaatgctggcagctgtgccaataggaaaaagctacctagactaggcatgtccaaaatggcggctccaagttcccttctctttgccagccatgtgtacagtaaaaagcaggcaacatagtgtcagccaaagctcatttgcataataagattagggtggggtggccagctcacataggggtaggccctaggtaaatcagacaccgccttctcaagcctgtctataaaatctggtacactatgacgagggtcagatttcccattcagacgcccctctcccatgcaagagaaagagctgttctcctttctctttcttttgcctattaaacctctgctcctggccaggcacagtggctcacgcctataatcccagcactttgggaggctgaggtggtcagatcacctaaggtcaggagttcaagaccagcctggtcaacatggtgaaatcttgtctctagtaaaaatacaaaaatatatgaaatctcacatagatgataatactaagttccaaaagcaactcaacctggtagattctaattttttttgaggcagggtcttgctttgtcacccatgctggagtacaatggcacaaacactgctcactgcagcctcgacctcccaaggcctaagcaatcctcctgcctcagtccccctccaagtagctgaaactacaggtgtgtaccaccacacctggctaatttttgtattttttgtagagacgtgggtctcactatgctgcccaggctcaggtcttaatctcctgagctcaggcaatccgcaggcctcagcctccctaagtgcggggattacaggcttgagccactgcacctagcctctatttgttttacaaaagagaaattgagatcctgaatgttaagtgacttgcctgaggccatcccactaacaggagccagggttaggattcaaaccccatccaactggtcccagagctggagcttcttgcactgccctacactacctaccatctccatcctctgggcacctttttataagaaccaaaacattacagagcattgctttgtcaactcagctgggaacatttcccagtgcaactcacatttttcactgctctgtgcctgtctgtataagctcaatgagtattgatttaggggctttggagaactttgaatgctaccccccaagtaaccattattggcaacctggtacctctacttttagccatttctccttctctataaacagtgcagaagtaacccacttggtaacaggcatccttgccaagcctccaccactaggtcagtgtaagaattaaagaaagaggaaagaaacacgaaaagtggcttgatggttaagacaggtttattttagagaaaacacacctgagaggggctgctggctgaattaggttagagtcttttctacagactaagagtgtttaaggatttagggtgggagagtttcttagaggcttggactgcttctgtgtttttttgttgtgcttatatgggagggagagtggtgtgtttgcttttatacatttttctgcagctgtaggcataccccccaagtctgcttttagcttccctattttagtgcacctggagggaaaggaatgtgcttattaaggcccactgttttactggggcccattgtatgagggtgaagtttggcagttacccaagagacttttcctccaccttcctctgtgcccgagctgttttatctgcattttactgtctgctttttttggctgcttatagtttttaaaaaagtaatttccttaaatccagaaggctaaaaatgaagctgaaacttaaagtggcggtgtttgtccaaaataacggggctcctgctctgccagtcagtaccctcaagtcactcctgatcctcaacctccatgcctaaggctggttcaagagaccacataatatctgccttttattacatacatgatgggtgcatgggattctgcgtgccctttgcttgatatagactgctaaggtgagatggggaatatcagagtcagctgctgcttgaggaagcagaacacacagctggaggcttggaacatgtgggtccctatgagtgtagagcccatatccccatagagtctacctagagcaggggtcgccaaatgttttcttaaagagcctgatagtgtatatgttaggctttgtgagccaggtatttacagcaactcaattctaccactgtggtatgaaaacagctatagacaatcataaatgaatgatcatggctatgttttaataaaactttacagacactgaacttgaacttccattgtgatatgaaaacagctatagacaatcataaatgaatgatcatggctatgttttaataaaactttatggacactgagcttgaacttcatatatcagtcatgggacacaaaatatcattcttctttttatttgttttcacccatttgaaaaatgtaaaaactattcttagctgtacagaaacagatggtgggtcagatttgactcactgcccatagtttccagaccatgatgttcaggttcatggaagcacttcactctacactaatttattcatccattcatcacatatgtgatgagcagatacagacacacctcagagatattgcaggctccactccagatcaccacaataatgtgaatattgcaataaagcaagtcatacacatt

SEQ ID NO: 83441 - DNA, 4190 bp, Homo sapiens
  misc_feature (22)..(23): n is a, c, g, or t
  misc_feature (71)..(71): n is a, c, g, or t
ttaaagcataactgtatttttnnttttagggccttattgatgttttgccgttccaatgtatgcattttttnactcaataaacttgtcttaattttaaatatggggcttccttggacctgtctgcgccatcttctctgtgaatttagttctctttctggtgactctctggattttgaaaaacagactctcctccctcaatagtgaagtgtccaccctccggaacacaaggtccgggagcaatatgggaaatggtccaaagggatcaggaaattgaaaactgagtctgagatgcacacactctccagcagtgctaaggctgacacctccaaacccagcacggttaactagaaaaatcttctgaataagatcttccctctttgcccgtggaaaatctgaacaatctttgagccatctagaggggaaagaaaagactttgttctgtgtgtttcaagaaattcaccatgtcagcaatatgaaggatgttatggaaggcgtgcttggcattcaattcctgcagaaaccggaaatcttccatgccctgcaatgtgctcatcaaactctcagcatatggacggccagctgtggcccatatcttggtcactctgaagcacaatatttatgaagctatagaacgttaagacctctttcacagcctctccttcctacaaagactcctccaaatcttaaaatgaagcaggaaaacgagcctaagaggactttcataccgacaacatctgaaaggactagaatgttcacaccacgatctggatttcttaattttttgtttttgtttttgttgttctctagttctacgggtttgattatttagtcatgtgaaaaatattgattactcacacatagatcaagagagacacggctcctgccttcatggagcttttaggggaaaatgaagtggctcttgcagctagagttgactcagaagccgaaattcctagaaatcaggtttctactgctaggcaattgaagtataaactattttataaacactgtcttctttcatcttcacaccaacatgcagaaaagtttctaatctcagatcagggatgtgcaacaaattccatttcaaaggaatgacctgcaaaactcctaaatattccaagcaaatgcccttaaccctgtctgttatctgctttccttgaacagaaattctacatgaccataaaacctcgaagatgggtatggcacagttcatgccctgtaatcctagcactttgggagggtgaggcaggaggatggctcaagcccaggagtttgagaccagtgtgggcaacagagtgagaaccatctctaccccaaaaaaaaattaaaaattagccaagcatggtgatgatataggagttaaggagaaatcatttaggcaaatagcaagggtaggaagtcctcagtgaggttttctgtttaatgaaaagcagcccccaaaatcattttcttttctaacaaagaacagcctgtaaaatcgagctgcagacatagacaagcaagctggaagcttccacgggtgaatgctggcagctgtgccaataggaaaaagctacctagactaggcatgtccaaaatggcggctccaagttcccttctctttgccagccatgtgtacagtaaaaagcaggcaacatagtgtcagccaaagctcatttgcataataagattagggtggggtggccagctcacataggggtaggccctaggtaaatcagacaccgccttctcaagcctgtctataaaatctggtacactatgacgagggtcagatttcccattcagacgcccctctcccatgcaagagaaagagctgttctcctttctctttcttttgcctattaaacctctgctcctggccaggcacagtggctcacgcctataatcccagcactttgggaggctgaggtggtcagatcacctaaggtcaggagttcaagaccagcctggtcaacatggtgaaatcttgtctctagtaaaaatacaaaaatatatgaaatctcacatagatgataatactaagttccaaaagcaactcaacctggtagattctaattttttttgaggcagggtcttgctttgtcacccatgctggagtacaatggcacaaacactgctcactgcagcctcgacctcccaaggcctaagcaatcctcctgcctcagtccccctccaagtagctgaaactacaggtgtgtaccaccacacctggctaatttttgtattttttgtagagacgtgggtctcactatgctgcccaggctcaggtcttaatctcctgagctcaggcaatccgcaggcctcagcctccctaagtgcggggattacaggcttgagccactgcacctagcctctatttgttttacaaaagagaaattgagatcctgaatgttaagtgacttgcctgaggccatcccactaacaggagccagggttaggattcaaaccccatccaactggtcccagagctggagcttcttgcactgccctacactacctaccatctccatcctctgggcacctttttataagaaccaaaacattacagagcattgctttgtcaactcagctgggaacatttcccagtgcaactcacatttttcactgctctgtgcctgtctgtataagctcaatgagtattgatttaggggctttggagaactttgaatgctaccccccaagtaaccattattggcaacctggtacctctacttttagccatttctccttctctataaacagtgcagaagtaacccacttggtaacaggcatccttgccaagcctccaccactaggtcagtgtaagaattaaagaaagaggaaagaaacacgaaaagtggcttgatggttaagacaggtttattttagagaaaacacacctgagaggggctgctggctgaattaggttagagtcttttctacagactaagagtgtttaaggatttagggtgggagagtttcttagaggcttggactgcttctgtgtttttttgttgtgcttatatgggagggagagtggtgtgtttgcttttatacatttttctgcagctgtaggcataccccccaagtctgcttttagcttccctattttagtgcacctggagggaaaggaatgtgcttattaaggcccactgttttactggggcccattgtatgagggtgaagtttggcagttacccaagagacttttcctccaccttcctctgtgcccgagctgttttatctgcattttactgtctgctttttttggctgcttatagtttttaaaaaagtaatttccttaaatccagaaggctaaaaatgaagctgaaacttaaagtggcggtgtttgtccaaaataacggggctcctgctctgccagtcagtaccctcaagtcactcctgatcctcaacctccatgcctaaggctggttcaagagaccacataatatctgccttttattacatacatgatgggtgcatgggattctgcgtgccctttgcttgatatagactgctaaggtgagatggggaatatcagagtcagctgctgcttgaggaagcagaacacacagctggaggcttggaacatgtgggtccctatgagtgtagagcccatatccccatagagtctacctagagcaggggtcgccaaatgttttcttaaagagcctgatagtgtatatgttaggctttgtgagccaggtatttacagcaactcaattctaccactgtggtatgaaaacagctatagacaatcataaatgaatgatcatggctatgttttaataaaactttacagacactgaacttgaacttccattgtgatatgaaaacagctatagacaatcataaatgaatgatcatggctatgttttaataaaactttatggacactgagcttgaacttcatatatcagtcatgggacacaaaatatcattcttctttttatttgttttcacccatttgaaaaatgtaaaaactattcttagctgtacagaaacagatggtgggtcagatttgactcactgcccatagtttccagaccatgatgttcaggttcatggaagcacttcactctacactaatttattcatccattcatcacatatgtgatgagcagatacagacacacctcagagatattgcaggctccactccagatcaccacaataatgtgaatattgcaataaagcaagtcatacacatt

SEQ ID NO: 83442 - DNA, 585 bp, Homo sapiens
gaggatcccgtgctgactgtcatcacctacatggggctgagcgtctctctgctgtgcctcctcctggcggccctcacttttctcctgtgtaaagccatccagaacaccagcacctcactgcatctgcagctctcgctctgcctcttcctggcccacctcctcttcctcgtggcaattgatcaaaccggacacaaggtattgacagcggtgttccagagggctcccttccttgacgcaggacacgctggctcatggaatgatgcggcatttgattccttaatataatagcccggctgggcgtggtggctcatgcctgtaatcccagcactttgggagactgaggtgggcggatcacctcaggtcgggagtttgagaccagcctgaccaacatggagaaaccccgtctctactaaaaatacaaaattagccaggcatggtggcgcatacctgtaatcccagttactcaggaggctgaggcaagagaatctcttgaacccaggaggtggaggttgtggtaagccgagatcgcaccattgcatgccagcctgggcaacaagagtgaaattccgtctcaaaaaaaaaaaa

SEQ ID NO: 83443 - DNA, 658 bp, Homo sapiens
ccgtggagtagattaggcgtaggtagaagtagaggttaaggagggtgatggtggctgtgaggtgggggaatgtggttctcccttgagaaatgggttccagagagctcgaagctgagcagctttgccgtcctcatggcccactacgatgtgcaggaggaggatcccgtgctgactgtcatcacctacatggggctgagcgtctctctgctgtgcctcctcctggcggccctcacttttctcctgtgtaaagccatccagaacaccagcacctcactgcatctgcagctctcgctctgcctcttcctggcccacctcctcttcctcgtggcaattgatcaaaccggacacaaggtgctgtgctccatcatcgccggtaccttgcactatctctacctggccaccttcacctggatgctgctggaggccctgtacctcttcctcactgcacggaacctgacggtggtcaactactcaagcatcaacagattcatgaagaagctcatgttccctgtgggctacccagtgaacaactgagagcccaggcacatattgagccgccgtcccaggcactccaccatttaaggaacaccttcccagcgacttggccgagcagtcagcacctcccagagtgtcacatcctaagccccacactgcatcc

SEQ ID NO: 83444 - DNA, 6541 bp, Homo sapiens
agcggggggtgtctgctctgtgcagtgaagcttctcttcttggcacctgcctggcatcggaagagggccccttctccctccctgggcttttatgtggacactgtaatgcctcagttttctttctttctttttgtttttgacacagggtctcactctatcacccaagctggagtgcagtggcaccatcttagctcaccgcagcctcaaactccccagctcgggtgattcttcctgcctcagcctcctgagtagtagcagctgggaccacagacgtctgccaccaagcccagctgcaccgccagttccggggagggccctgggccagcggctgtccgccccccctcctttataaagtcctggcctcgggacagcccgcacagctgcccagcctgcggagacgggacagccctgtcccactcactctttcccctgctgctcctgccggcagctcagctggaaccatgggaggccgcgtctttctcgtctttctcgcattctgtgtctggctgactctgccgggagctgaaacccaggactccaggggctgtgcccggtggtgccctcaggactcctcgtgtgtcaatgccaccgcctgtcgctgcaatccagggttcagctctttttctgagatcatcaccacccccatggagacttgtgacgacatcaacgagtgtgcaacactgtcgaaagtgtcatgcggaaaattctcggactgctggaacacagaggggagctacgactgcgtgtgcagcccaggatatgagcctgtttctggggcaaaaacattcaagaatgagagcgagaacacgtgtcaagatgtggacgaatgtcagcagaacccaaggctctgtaaaagctacggcacctgcgtcaacaccctcggcagctacacgtgccagtgcctgcctggcttcaagctcaaacctgaggacccgaagctctgcacagatgtggacgagtgcagctccgggcagcatcagtgtgacagctccaccgtctgcttcaacaccgtgggttcatacagctgccgctgccgcccaggctggaagcccagacacggaatcccgaataaccaaaaggacactgtctgtgaagatatgactttctccacctggaccccgccccctggagtccacagccagacgctttcccgattcttcgacaaagtccaggacctgggcagagactacaagccaggcttggccaataacaccatccagagcatcttacaggcgctggatgagctgctggaggcccctggggacctggagaccctgccccgcttacagcagcactgtgtggccagtcacctgctggatggcctagaggatgtcctcagaggcctgagcaagaacctttccaatgggctgttgaacttcagttatcctgcaggcacagaattgtccctggaggtgcagaagcaagtagacaggagtgtcaccttgagacagaatcaggcagtgatgcagctcgactggaatcaggcacagaaatctggtgacccagggatgggcaagttgctggctgaggcccctctggtcctggaacctgagaagcagatgcttctgcatgagacacaccagggcttgctgcaggacggctcccccatcctgctctcagatgtgatctctgcctttctgagcaacaacgacacccaaaacctcagctccccagttaccttcaccttctcccaccgttcagtgatcccgagacagaaggtgctctgtgtcttctgggagcatggccagaatggatgtggtcactgggccaccacaggctgcagcacaataggcaccagagacaccagcaccatctgccgttgcacccacctgagcagctttgccgtcctcatggcccactacgatgtgcaggaggaggatcccgtgctgactgtcatcacctacatggggctgagcgtctctctgctgtgcctcctcctggcggccctcacttttctcctgtgtaaagccatccagaacaccagcacctcactgcatctgcagctctcgctctgcctcttcctggcccacctcctcttcctcgtggcaattgatcaaaccggacacaaggtgctgtgctccatcatcgccggtaccttgcactatctctacctggccaccttcacctggatgctgctggaggccctgtacctcttcctcactgcacggaacctgacggtggtcaactactcaagcatcaacagattcatgaagaagctcatgttccctgtgggctacggagtcccagctgtgacagtggccatttctgcagcctccaggcctcacctttatggaacaccttcccgctgctggctccaaccagaaaagggatttatatggggcttccttggacctgtctgcgccatcttctctgtgaatttagttctctttctggtgactctctggattttgaaaaacagactctcctccctcaatagtgaagtgtccaccctccggaacacaaggatgctggcatttaaagcgacagctcagctgttcatcctgggctgcacgtggtgtctgggcatcttgcaggtgggtccggctgcccgggtcatggcctacctcttcaccatcatcaacagcctgcagggtgtcttcatcttcctggtgtactgcctcctcagccagcaggtccgggagcaatatgggaaatggtccaaagggatcaggaaattgaaaactgagtctgagatgcacacactctccagcagtgctaaggctgacacctccaaacccagcacggttaactagaaaaatcttctgaataagatcttccctctttgcccgtggaaaatctgaacaatctttgagccatctagaggggaaagatgttatggaaggcgtgcttggcattcaattcctgcagaaaccggaaatcttccatgccctgcaatgtgctcatcaaactctcagcatatggacggccagctgtggcccatatcttggtcactctgaagcacaatatttatgaagctatagaacgttaagacctctttcacagcctctccttcctacaaagactcctccaaatcttaaaatgaagcaggaaaacgagcctaagaggactttcataccgacaacatctgaaaggactagaatgttcacaccacgatctggatttcttaattttttgtttttgtttttgttgttctctagttctacgggtttgattatttagtcatgtgaaaaatattgattactcacacatagatcaagagagacacggctcctgccttcatggagcttttaggggaaaatgaagtggctcttgcagctagagttgactcagaagccgaaattcctagaaatcaggtttctactgctaggcaattgaagtataaactattttataaacactgtcttctttcatcttcacaccaacatgcagaaaagtttctaatctcagatcagggatgtgcaacaaattccatttcaaaggaatgacctgcaaaactcctaaatattccaagcaaatgcccttaaccctgtctgttatctgctttccttgaacagaaattctacatgaccataaaacctcgaagatgggtatggcacagttcatgccctgtaatcctagcactttgggagggtgaggcaggaggatggctcaagcccaggagtttgagaccagtgtgggcaacagagtgagaaccatctctaccccaaaaaaaaattaaaaattagccaagcatggtgatgatataggagttaaggagaaatcatttaggcaaatagcaagggtaggaagtcctcagtgaggttttctgtttaatgaaaagcagcccccaaaatcattttcttttctaacaaagaacagcctgtaaaatcgagctgcagacatagacaagcaagctggaagcttccacgggtgaatgctggcagctgtgccaataggaaaaagctacctagactaggcatgtccaaaatggcggctccaagttcccttctctttgccagccatgtgtacagtaaaaagcaggcaacatagtgtcagccaaagctcatttgcataataagattagggtggggtggccagctcacataggggtaggccctaggtaaatcagacaccgccttctcaagcctgtctataaaatctggtacactatgacgagggtcagatttcccattcagacgcccctctcccatgcaagagaaagagctgttctcctttctctttcttttgcctattaaacctctgctcctggccaggcacagtggctcacgcctataatcccagcactttgggaggctgaggtggtcagatcacctaaggtcaggagttcaagaccagcctggtcaacatggtgaaatcttgtctctagtaaaaatacaaaaatatatgaaatctcacatagatgataatactaagttccaaaagcaactcaacctggtagattctaattttttttgaggcagggtcttgctttgtcacccatgctggagtacaatggcacaaacactgctcactgcagcctcgacctcccaaggcctaagcaatcctcctgcctcagtccccctccaagtagctgaaactacaggtgtgtaccaccacacctggctaatttttgtattttttgtagagacgtgggtctcactatgctgcccaggctcaggtcttaatctcctgagctcaggcaatccgcaggcctcagcctccctaagtgcggggattacaggcttgagccactgcacctagcctctatttgttttacaaaagagaaattgagatcctgaatgttaagtgacttgcctgaggccatcccactaacaggagccagggttaggattcaaaccccatccaactggtcccagagctggagcttcttgcactgccctacactacctaccatctccatcctctgggcacctttttataagaaccaaaacattacagagcattgctttgtcaactcagctgggaacatttcccagtgcaactcacatttttcactgctctgtgcctgtctgtataagctcaatgagtattgatttaggggctttggagaactttgaatgctaccccccaagtaaccattattggcaacctggtacctctacttttagccatttctccttctctataaacagtgcagaagtaacccacttggtaacaggcatccttgccaagcctccaccactaggtcagtgtaagaattaaagaaagaggaaagaaacacgaaaagtggcttgatggttaagacaggtttattttagagaaaacacacctgagaggggctgctggctgaattaggttagagtcttttctacagactaagagtgtttaaggatttagggtgggagagtttcttagaggcttggactgcttctgtgtttttttgttgtgcttatatgggagggagagtggtgtgtttgcttttatacatttttctgcagctgtaggcataccccccaagtctgcttttagcttccctattttagtgcacctggagggaaaggaatgtgcttattaaggcccactgttttactggggcccattgtatgagggtgaagtttggcagttacccaagagacttttcctccaccttcctctgtgcccgagctgttttatctgcattttactgtctgctttttttggctgcttatagtttttaaaaaagtaatttccttaaatccagaaggctaaaaatgaagctgaaacttaaagtggcggtgtttgtccaaaataacggggctcctgctctgccagtcagtaccctcaagtcactcctgatcctcaacctccatgcctaaggctggttcaagagaccacataatatctgccttttattacatacatgatgggtgcatgggattctgcgtgccctttgcttgatatagactgctaaggtgagatggggaatatcagagtcagctgctgcttgaggaagcagaacacacagctggaggcttggaacatgtgggtccctatgagtgtagagcccatatccccatagagtctacctagagcaggggtcgccaaatgttttcttaaagagcctgatagtgtatatgttaggctttgtgagccaggtatttacagcaactcaattctaccactgtggtatgaaaacagctatagacaatcataaatgaatgatcatggctatgttttaataaaactttacagacactgaacttgaacttccattgtgatatgaaaacagctatagacaatcataaatgaatgatcatggctatgttttaataaaactttatggacactgagcttgaacttcatatatcagtcatgggacacaaaatatcattcttctttttatttgttttcacccatttgaaaaatgtaaaaactattcttagctgtacagaaacagatggtgggtcagatttgactcactgcccatagtttccagaccatgatgttcaggttcatggaagcacttcactctacactaatttattcatccattcatcacatatgtgatgagcagatacagacacacctcagagatattgcaggctccactccagatcaccacaataatgtgaatattgcaataaagcaagtcatacacatt

SEQ ID NO: 83445 - DNA, 3045 bp, Homo sapiens
agcggggggtgtctgctctgtgcagtgaagcttctcttcttggcacctgcctggcatcggaagagggccccttctccctccctgggcttttatgtggacactgtaatgcctcagttttctttctttctttttgtttttgacacagggtctcactctatcacccaagctggagtgcagtggcaccatcttagctcaccgcagcctcaaactccccagctcgggtgattcttcctgcctcagcctcctgagtagtagcagctgggaccacagacgtctgccaccaagcccagctgcaccgccagttccggggagggccctgggccagcggctgtccgccccccctcctttataaagtcctggcctcgggacagcccgcacagctgcccagcctgcggagacgggacagccctgtcccactcactctttcccctgctgctcctgccggcagctcagctggaaccatgggaggccgcgtctttctcgtctttctcgcattctgtgtctggctgactctgccgggagctgaaacccaggactccaggggctgtgcccggtggtgccctcaggactcctcgtgtgtcaatgccaccgcctgtcgctgcaatccagggttcagctctttttctgagatcatcaccacccccatggagacttgtgacgacatcaacgagtgtgcaacactgtcgaaagtgtcatgcggaaaattctcggactgctggaacacagaggggagctacgactgcgtgtgcagcccaggatatgagcctgtttctggggcaaaaacattcaagaatgagagcgagaacacgtgtcaagatgtggacgaatgtcagcagaacccaaggctctgtaaaagctacggcacctgcgtcaacaccctcggcagctacacgtgccagtgcctgcctggcttcaagctcaaacctgaggacccgaagctctgcacagatgtggacgagtgcagctccgggcagcatcagtgtgacagctccaccgtctgcttcaacaccgtgggttcatacagctgccgctgccgcccaggctggaagcccagacacggaatcccgaataaccaaaaggacactgtctgtgaagatatgactttctccacctggaccccgccccctggagtccacagccagacgctttcccgattcttcgacaaagtccaggacctgggcagagactacaagccaggcttggccaataacaccatccagagcatcttacaggcgctggatgagctgctggaggcccctggggacctggagaccctgccccgcttacagcagcactgtgtggccagtcacctgctggatggcctagaggatgtcctcagaggcctgagcaagaacctttccaatgggctgttgaacttcagttatcctgcaggcacagaattgtccctggaggtgcagaagcaagtagacaggagtgtcaccttgagacagaatcaggcagtgatgcagctcgactggaatcaggcacagaaatctggtgacccagggatgggcaagttgctggctgaggcccctctggtcctggaacctgagaagcagatgcttctgcatgagacacaccagggcttgctgcaggacggctcccccatcctgctctcagatgtgatctctgcctttctgagcaacaacgacacccaaaacctcagctccccagttaccttcaccttctcccaccgttcagtgatcccgagacagaaggtgctctgtgtcttctgggagcatggccagaatggatgtggtcactgggccaccacaggctgcagcacaataggcaccagagacaccagcaccatctgccgttgcacccacctgagcagctttgccgtcctcatggcccactacgatgtgcaggaggaggatcccgtgctgactgtcatcacctacatggggctgagcgtctctctgctgtgcctcctcctggcggccctcacttttctcctgtgtaaagccatccagaacaccagcacctcactgcatctgcagctctcgctctgcctcttcctggcccacctcctcttcctcgtggcaattgatcaaaccggacacaaggtgctgtgctccatcatcgccggtaccttgcactatctctacctggccaccttcacctggatgctgctggaggccctgtacctcttcctcactgcacggaacctgacggtggtcaactactcaagcatcaacagattcatgaagaagctcatgttccctgtgggctacggagtcccagctgtgacagtggccatttctgcagcctccaggcctcacctttatggaacaccttcccgctgctggctccaaccagaaaagggatttatatggggcttccttggacctgtctgcgccatcttctctgtgaatttagttctctttctggtgactctctggattttgaaaaacagactctcctccctcaatagtgaagtgtccaccctccggaacacaaggatgctggcatttaaagcgacagctcagctgttcatcctgggctgcacgtggtgtctgggcatcttgcaggtgggtccggctgcccgggtcatggcctacctcttcaccatcatcaacagcctgcagggtgtcttcatcttcctggtgtactgcctcctcagccagcaggtccgggagcaatatgggaaatggtccaaagggatcaggaaattgaaaactgagtctgagatgcacacactctccagcagtgctaaggctgacacctccaaacccagcacggtaagatcacgcattgctccagagcacttcactaaccgacccacctgaggagcatgtgcctatcacacaaggaaacctgggaatacagcaggcaatgccctagaaaggctcgcatctgagtacgccttgactcattaaccattagcaatgatctcagtttaaatgtttttttttaatcagtcatagcctgtcatcccggcatcactgtcatcccagcatttgggaggcctaggcaagaggatcacctgaggccaggagtgcaagatgaccctgggcaacatagcaagatcccatctctaca

SEQ ID NO: 83446 - DNA, 4552 bp, Homo sapiens
gggagccccgaccgtcacgagcgtcgaagagacaaagccgcgtcagggggcccggccggggcgggggagcccggggcttgttggtgccccagcccgcgcggagggcccttcggacccgcgcgccgccgctgccgccgccgccgcctcgcaacaggtccgggcggcctcgctctccgctcccctcccccgcatccgcgaccctccggggcacctcagctcggccggggccgcagtctggccacccgcttccatgcggttcgggtccaagatgatgccgatgtttcttaccgtgtatctcagtaacaatgagcagcacttcacagaagttccagttactccagaaacaatatgcagagacgtggtggatctgtgcaaagaacccggcgagagtgattgccatttggctgaagtgtggtgtggctctgtagagatagagtttcatcatgttggccaggatggtctcgatctcctgaccttgtgatccgcctgcctcggcctcccaaagtgctggattacaggtgtgagccaccacgatcagcctctagtgtttaaaaaagaacgtccagttgcggataatgagcgaatgtttgatgttcttcaacgatttggaagtcagaggaacgaagttcgcttcttccttcgtcatgaacgcccccctggcagggacattgtgagtggaccaagatctcaggatccaagtttaaaaagaaatggtgtaaaagttcctggtgaatatcgaagaaaggagaacggtgttaatagtcctaggatggatctgactcttgctgaacttcaggaaatggcatctcgccagcagcaacagattgaagcccagcaacaattgctggcaactaaggaacagcgcttaaagtttttgaaacaacaagatcagcgacaacagcaacaagttgctgagcaggagaaacttaaaaggctaaaagaaatagctgagaatcaggaagctaagctaaaaaaagtgagagcacttaaaggccacgtggaacagaagagactaagcaatgggaaacttgtggaggaaattgaacagatgaataatttgttccagcaaaaacagagggagctcgtcctggctgtgtcaaaagtagaagaactgaccaggcagctagagatgctcaagaacggcaggatcgacagccaccatgacaatcagtctgcagtggctgagcttgatcgcctctataaggagctgcagctaagaaacaaattgaatcaagagcagaatgccaagctacaacaacagagggagtgtttgaataagcgtaattcagaagtggcagtcatggataagcgtgttaatgagctgagggaccggctgtggaagaagaaggcagctctacagcaaaaagaaaatctaccagtttcatctgatggaaatcttccccagcaagccgcgtcagccccaagccgtgtggctgcagtaggtccctatatccagtcgtctactatgcctcggatgccctcaaggcctgaattgctggtgaagccagccctgccggatggttccttggtcattcaggcttcagaggggccgatgaaaatacagacactgcccaacatgagatctggggctgcttcacaaactaaaggctctaaaatccatccagttggccctgattggagtccttcaaatgcagatcttttcccaagccaaggctctgcttctgtacctcaaagcactgggaatgctctggatcaagttgatgatggagaggttccgctgagggagaaagagaagaaagtgcgtccgttctcaatgtttgatgcagtagaccagtccaatgccccaccttcctttggtactctgaggaagaaccagagcagtgaagatatcttgcgggatgctcaggttgcaaataaaaatgtggctaaagtaccacctcctgttcctacaaaaccaaaacagattaatttgccttattttggacaaactaatcagccaccttcagacattaagccagacggaagttctcagcagttgtcaacagttgttccgtccatgggaactaaaccaaaaccagcagggcagcagccgagagtgctgctatctcccagcataccttcggttggccaagaccagaccctttctccaggttctaagcaagaaagtccacctgctgctgccgtccggccctttactccccagccttccaaagacaccttacttccacccttcagaaaaccccagaccgtggcagcaagttcaatatattccatgtatacgcaacagcaggcgccaggaaaaaacttccagcaggctgtgcagagcgcgttgaccaagactcataccagagggccacacttttcaagtgtatatggtaagcctgtaattgctgctgcccagaatcaacagcagcacccagagaacatttattccaatagccagggcaagcctggcagtccagaacctgaaacagagcctgtttcttcagttcaggagaaccatgaaaacgaaagaattcctcggccactcagcccaactaaattactgcctttcttatctaatccttaccgaaaccagagtgatgctgacctagaagccttacgaaagaaactgtctaacgcaccaaggcctctaaagaaacgtagttctattacagagccagagggtcctaatgggccaaatattcagaagcttttatatcagaggaccaccatagcggccatggagaccatctctgtcccatcatacccatccaagtcagcttctgtgactgccagctcagaaagcccagtagaaatccagaatccatatttacatgtggagcccgaaaaggaggtggtctctctggttcctgaatcattgtccccagaggatgtggggaatgccagtacagagaacagtgacatgccagctccttctccaggccttgattatgagcctgagggagtcccagacaacagcccaaatctccagaataacccagaagaaccaaatccagaggctccacatgtgcttgatgtgtacctggaggagtaccctccatacccacccccaccatacccatctggggagcctgaagggcccggagaagactcggtgagcatgcgcccgcctgaaatcaccgggcaggtctctctgcctcctggtaaaaggacaaacttgcgtaaaactggctcagagcgtatcgctcatggaatgagggtgaaattcaacccccttgctttactgctagattcgtctttggagggagaatttgaccttgtacagagaattatttatgaggttgatgacccaagcctccccaatgatgaaggcatcacggctcttcacaatgctgtgtgtgcaggccacacagaaatcgttaagttcctggtacagtttggtgtaaatgtaaatgctgctgatagtgatggatggactccattacattgtgctgcctcatgtaacaacgtccaagtgtgtaagtttttggtggagtcaggagccgctgtgtttgccatgacctacagtgacatgcagactgctgcagataagtgcgaggaaatggaggaaggctacactcagtgctcccaatttctttatggagttcaggagaagatgggcataatgaataaaggagtcatttatgcgctttgggattatgaacctcagaatgatgatgagctgcccatgaaagaaggagactgcatgacaatcatccacagggaagacgaagatgaaatcgaatggtggtgggcgcgccttaatgataaggagggatatgttccacgtaacttgctgggactgtacccaagaattaaaccaagacaaaggagcttggcctgaaacttccacacagaattttagtcaatgaagaattaatctctgttaagaagaagtaatacgattatttttggcaaaaatttcacaagacttattttaatgacaatgtagcttgaaagcgatgaagaatgtctctagaagagaatgaaggattgaagaattcaccattagaggacatttagcgtgatgaaataaagcatctacgtcagcaggccatactgtgttggggcaaaggtgtcccgtgtagcactcagataagtatacagcgacaatcctgttttctacaagaatcctgtctagtaaataggatcatttattgggcagttgggaaatcagctctctgtcctgttgagtgttttcagcagctgctcctaaaccagtcctcctgccagaaaggaccagtgccgtcacatcgctgtctctgattgtccccggcaccagcaggcccttggggggctcacctgaaggctcgaaggcactgcacacttgtatattgtcagtgaagaactgttagttggttgtcagtgaacaataactttattatatgagtttttgtagcatcttaagaattatacatatgtttgaaatattgaaactaagctacggtaccagtaattagatgtagaatcttgtttgtaggctgaattttaatctgtatttattgtcttttgtatctcagaaattagaaacttgctacagacttacccgtaatatttgtcaagatcatagctgactttaaaaacagttgtaataaactttttgatgcta

SEQ ID NO: 83447 - DNA, 4420 bp, Homo sapiens
gggagccccgaccgtcacgagcgtcgaagagacaaagccgcgtcagggggcccggccggggcgggggagcccggggcttgttggtgccccagcccgcgcggagggcccttcggacccgcgcgccgccgctgccgccgccgccgcctcgcaacaggtccgggcggcctcgctctccgctcccctcccccgcatccgcgaccctccggggcacctcagctcggccggggccgcagtctggccacccgcttccatgcggttcgggtccaagatgatgccgatgtttcttaccgtgtatctcagtaacaatgagcagcacttcacagaagttccagttactccagaaacaatatgcagagacgtggtggatctgtgcaaagaacccggcgagagtgattgccatttggctgaagtgtggtgtggctctgaacgtccagttgcggataatgagcgaatgtttgatgttcttcaacgatttggaagtcagaggaacgaagttcgcttcttccttcgtcatgaacgcccccctggcagggacattgtgagtggaccaagatctcaggatccaagtttaaaaagaaatggtgtaaaagttcctggtgaatatcgaagaaaggagaacggtgttaatagtcctaggatggatctgactcttgctgaacttcaggaaatggcatctcgccagcagcaacagattgaagcccagcaacaattgctggcaactaaggaacagcgcttaaagtttttgaaacaacaagatcagcgacaacagcaacaagttgctgagcaggagaaacttaaaaggctaaaagaaatagctgagaatcaggaagctaagctaaaaaaagtgagagcacttaaaggccacgtggaacagaagagactaagcaatgggaaacttgtggaggaaattgaacagatgaataatttgttccagcaaaaacagagggagctcgtcctggctgtgtcaaaagtagaagaactgaccaggcagctagagatgctcaagaacggcaggatcgacagccaccatgacaatcagtctgcagtggctgagcttgatcgcctctataaggagctgcagctaagaaacaaattgaatcaagagcagaatgccaagctacaacaacagagggagtgtttgaataagcgtaattcagaagtggcagtcatggataagcgtgttaatgagctgagggaccggctgtggaagaagaaggcagctctacagcaaaaagaaaatctaccagtttcatctgatggaaatcttccccagcaagccgcgtcagccccaagccgtgtggctgcagtaggtccctatatccagtcgtctactatgcctcggatgccctcaaggcctgaattgctggtgaagccagccctgccggatggttccttggtcattcaggcttcagaggggccgatgaaaatacagacactgcccaacatgagatctggggctgcttcacaaactaaaggctctaaaatccatccagttggccctgattggagtccttcaaatgcagatcttttcccaagccaaggctctgcttctgtacctcaaagcactgggaatgctctggatcaagttgatgatggagaggttccgctgagggagaaagagaagaaagtgcgtccgttctcaatgtttgatgcagtagaccagtccaatgccccaccttcctttggtactctgaggaagaaccagagcagtgaagatatcttgcgggatgctcaggttgcaaataaaaatgtggctaaagtaccacctcctgttcctacaaaaccaaaacagattaatttgccttattttggacaaactaatcagccaccttcagacattaagccagacggaagttctcagcagttgtcaacagttgttccgtccatgggaactaaaccaaaaccagcagggcagcagccgagagtgctgctatctcccagcataccttcggttggccaagaccagaccctttctccaggttctaagcaagaaagtccacctgctgctgccgtccggccctttactccccagccttccaaagacaccttacttccacccttcagaaaaccccagaccgtggcagcaagttcaatatattccatgtatacgcaacagcaggcgccaggaaaaaacttccagcaggctgtgcagagcgcgttgaccaagactcataccagagggccacacttttcaagtgtatatggtaagcctgtaattgctgctgcccagaatcaacagcagcacccagagaacatttattccaatagccagggcaagcctggcagtccagaacctgaaacagagcctgtttcttcagttcaggagaaccatgaaaacgaaagaattcctcggccactcagcccaactaaattactgcctttcttatctaatccttaccgaaaccagagtgatgctgacctagaagccttacgaaagaaactgtctaacgcaccaaggcctctaaagaaacgtagttctattacagagccagagggtcctaatgggccaaatattcagaagcttttatatcagaggaccaccatagcggccatggagaccatctctgtcccatcatacccatccaagtcagcttctgtgactgccagctcagaaagcccagtagaaatccagaatccatatttacatgtggagcccgaaaaggaggtggtctctctggttcctgaatcattgtccccagaggatgtggggaatgccagtacagagaacagtgacatgccagctccttctccaggccttgattatgagcctgagggagtcccagacaacagcccaaatctccagaataacccagaagaaccaaatccagaggctccacatgtgcttgatgtgtacctggaggagtaccctccatacccacccccaccatacccatctggggagcctgaagggcccggagaagactcggtgagcatgcgcccgcctgaaatcaccgggcaggtctctctgcctcctggtaaaaggacaaacttgcgtaaaactggctcagagcgtatcgctcatggaatgagggtgaaattcaacccccttgctttactgctagattcgtctttggagggagaatttgaccttgtacagagaattatttatgaggttgatgacccaagcctccccaatgatgaaggcatcacggctcttcacaatgctgtgtgtgcaggccacacagaaatcgttaagttcctggtacagtttggtgtaaatgtaaatgctgctgatagtgatggatggactccattacattgtgctgcctcatgtaacaacgtccaagtgtgtaagtttttggtggagtcaggagccgctgtgtttgccatgacctacagtgacatgcagactgctgcagataagtgcgaggaaatggaggaaggctacactcagtgctcccaatttctttatggagttcaggagaagatgggcataatgaataaaggagtcatttatgcgctttgggattatgaacctcagaatgatgatgagctgcccatgaaagaaggagactgcatgacaatcatccacagggaagacgaagatgaaatcgaatggtggtgggcgcgccttaatgataaggagggatatgttccacgtaacttgctgggactgtacccaagaattaaaccaagacaaaggagcttggcctgaaacttccacacagaattttagtcaatgaagaattaatctctgttaagaagaagtaatacgattatttttggcaaaaatttcacaagacttattttaatgacaatgtagcttgaaagcgatgaagaatgtctctagaagagaatgaaggattgaagaattcaccattagaggacatttagcgtgatgaaataaagcatctacgtcagcaggccatactgtgttggggcaaaggtgtcccgtgtagcactcagataagtatacagcgacaatcctgttttctacaagaatcctgtctagtaaataggatcatttattgggcagttgggaaatcagctctctgtcctgttgagtgttttcagcagctgctcctaaaccagtcctcctgccagaaaggaccagtgccgtcacatcgctgtctctgattgtccccggcaccagcaggcccttggggggctcacctgaaggctcgaaggcactgcacacttgtatattgtcagtgaagaactgttagttggttgtcagtgaacaataactttattatatgagtttttgtagcatcttaagaattatacatatgtttgaaatattgaaactaagctacggtaccagtaattagatgtagaatcttgtttgtaggctgaattttaatctgtatttattgtcttttgtatctcagaaattagaaacttgctacagacttacccgtaatatttgtcaagatcatagctgactttaaaaacagttgtaataaactttttgatgcta

SEQ ID NO: 83448 - DNA, 609 bp, Homo sapiens
gggagccccgaccgtcacgagcgtcgaagagacaaagccgcgtcagggggcccggccggggcgggggagcccggggcttgttggtgccccagcccgcgcggagggcccttcggacccgcgcgccgccgctgccgccgccgccgcctcgcaacaggtccgggcggcctcgctctccgctcccctcccccgcatccgcgaccctccggggcacctcagctcggccggggccgcagtctggccacccgcttccatgcggttcgggtccaagatgatgccgatgtttcttaccgtgtatctcagtaacaatgagcagcacttcacagaagttccagttactccagaaacaatatgcagagacgtggtggatctgtgcaaagaacccggcgagagtgattgccatttggctgaagtgtggtgtggctctgaacgtccagttgcggataatgagcgaatgtttgatgttcttcaacgatttggaagtcagaggaacgaagttcgcttcttccttcgtcatgaacgcccccctggcagggacattggtaggtagtgctctgtgaatcgtgacagatatttaagcttttattttgtgctgggagtagtaggtggcac

SEQ ID NO: 83449 - DNA, 4063 bp, Homo sapiens
catgtttctccggggagaaactggagaatagcacgtccggcagaaatagtgttcctgatccagctttgaacgtccagttgcggataatgagcgaatgtttgatgttcttcaacgatttggaagtcagaggaacgaagttcgcttcttccttcgtcatgaacgcccccctggcagggacattgtgagtggaccaagatctcaggatccaagtttaaaaagaaatggtgtaaaagttcctggtgaatatcgaagaaaggagaacggtgttaatagtcctaggatggatctgactcttgctgaacttcaggaaatggcatctcgccagcagcaacagattgaagcccagcaacaattgctggcaactaaggaacagcgcttaaagtttttgaaacaacaagatcagcgacaacagcaacaagttgctgagcaggagaaacttaaaaggctaaaagaaatagctgagaatcaggaagctaagctaaaaaaagtgagagcacttaaaggccacgtggaacagaagagactaagcaatgggaaacttgtggaggaaattgaacagatgaataatttgttccagcaaaaacagagggagctcgtcctggctgtgtcaaaagtagaagaactgaccaggcagctagagatgctcaagaacggcaggatcgacagccaccatgacaatcagtctgcagtggctgagcttgatcgcctctataaggagctgcagctaagaaacaaattgaatcaagagcagaatgccaagctacaacaacagagggagtgtttgaataagcgtaattcagaagtggcagtcatggataagcgtgttaatgagctgagggaccggctgtggaagaagaaggcagctctacagcaaaaagaaaatctaccagtttcatctgatggaaatcttccccagcaagccgcgtcagccccaagccgtgtggctgcagtaggtccctatatccagtcgtctactatgcctcggatgccctcaaggcctgaattgctggtgaagccagccctgccggatggttccttggtcattcaggcttcagaggggccgatgaaaatacagacactgcccaacatgagatctggggctgcttcacaaactaaaggctctaaaatccatccagttggccctgattggagtccttcaaatgcagatcttttcccaagccaaggctctgcttctgtacctcaaagcactgggaatgctctggatcaagttgatgatggagaggttccgctgagggagaaagagaagaaagtgcgtccgttctcaatgtttgatgcagtagaccagtccaatgccccaccttcctttggtactctgaggaagaaccagagcagtgaagatatcttgcgggatgctcaggttgcaaataaaaatgtggctaaagtaccacctcctgttcctacaaaaccaaaacagattaatttgccttattttggacaaactaatcagccaccttcagacattaagccagacggaagttctcagcagttgtcaacagttgttccgtccatgggaactaaaccaaaaccagcagggcagcagccgagagtgctgctatctcccagcataccttcggttggccaagaccagaccctttctccaggttctaagcaagaaagtccacctgctgctgccgtccggccctttactccccagccttccaaagacaccttacttccacccttcagaaaaccccagaccgtggcagcaagttcaatatattccatgtatacgcaacagcaggcgccaggaaaaaacttccagcaggctgtgcagagcgcgttgaccaagactcataccagagggccacacttttcaagtgtatatggtaagcctgtaattgctgctgcccagaatcaacagcagcacccagagaacatttattccaatagccagggcaagcctggcagtccagaacctgaaacagagcctgtttcttcagttcaggagaaccatgaaaacgaaagaattcctcggccactcagcccaactaaattactgcctttcttatctaatccttaccgaaaccagagtgatgctgacctagaagccttacgaaagaaactgtctaacgcaccaaggcctctaaagaaacgtagttctattacagagccagagggtcctaatgggccaaatattcagaagcttttatatcagaggaccaccatagcggccatggagaccatctctgtcccatcatacccatccaagtcagcttctgtgactgccagctcagaaagcccagtagaaatccagaatccatatttacatgtggagcccgaaaaggaggtggtctctctggttcctgaatcattgtccccagaggatgtggggaatgccagtacagagaacagtgacatgccagctccttctccaggccttgattatgagcctgagggagtcccagacaacagcccaaatctccagaataacccagaagaaccaaatccagaggctccacatgtgcttgatgtgtacctggaggagtaccctccatacccacccccaccatacccatctggggagcctgaagggcccggagaagactcggtgagcatgcgcccgcctgaaatcaccgggcaggtctctctgcctcctggtaaaaggacaaacttgcgtaaaactggctcagagcgtatcgctcatggaatgagggtgaaattcaacccccttgctttactgctagattcgtctttggagggagaatttgaccttgtacagagaattatttatgaggttgatgacccaagcctccccaatgatgaaggcatcacggctcttcacaatgctgtgtgtgcaggccacacagaaatcgttaagttcctggtacagtttggtgtaaatgtaaatgctgctgatagtgatggatggactccattacattgtgctgcctcatgtaacaacgtccaagtgtgtaagtttttggtggagtcaggagccgctgtgtttgccatgacctacagtgacatgcagactgctgcagataagtgcgaggaaatggaggaaggctacactcagtgctcccaatttctttatggagttcaggagaagatgggcataatgaataaaggagtcatttatgcgctttgggattatgaacctcagaatgatgatgagctgcccatgaaagaaggagactgcatgacaatcatccacagggaagacgaagatgaaatcgaatggtggtgggcgcgccttaatgataaggagggatatgttccacgtaacttgctgggactgtacccaagaattaaaccaagacaaaggagcttggcctgaaacttccacacagaattttagtcaatgaagaattaatctctgttaagaagaagtaatacgattatttttggcaaaaatttcacaagacttattttaatgacaatgtagcttgaaagcgatgaagaatgtctctagaagagaatgaaggattgaagaattcaccattagaggacatttagcgtgatgaaataaagcatctacgtcagcaggccatactgtgttggggcaaaggtgtcccgtgtagcactcagataagtatacagcgacaatcctgttttctacaagaatcctgtctagtaaataggatcatttattgggcagttgggaaatcagctctctgtcctgttgagtgttttcagcagctgctcctaaaccagtcctcctgccagaaaggaccagtgccgtcacatcgctgtctctgattgtccccggcaccagcaggcccttggggggctcacctgaaggctcgaaggcactgcacacttgtatattgtcagtgaagaactgttagttggttgtcagtgaacaataactttattatatgagtttttgtagcatcttaagaattatacatatgtttgaaatattgaaactaagctacggtaccagtaattagatgtagaatcttgtttgtaggctgaattttaatctgtatttattgtcttttgtatctcagaaattagaaacttgctacagacttacccgtaatatttgtcaagatcatagctgactttaaaaacagttgtaataaactttttgatgcta

SEQ ID NO: 83450 - DNA, 3369 bp, Homo sapiens
agaaaacagatgctgtttatggatccttaaaagacaatccgctgcttttttactttttaatgttattacctgtgtagctctgtttgtctctaatacttgtaataaagtgtgggtgagagttcattggggagtgtttattttggaatgttttttgtagactctatggctagattctgaaactgctcattttaaaaagtttcatctgatggaaatcttccccagcaagccgcgtcagccccaagccgtgtggctgcagtaggtccctatatccagtcgtctactatgcctcggatgccctcaaggcctgaattgctggtgaagccagccctgccggatggttccttggtcattcaggcttcagaggggccgatgaaaatacagacactgcccaacatgagatctggggctgcttcacaaactaaaggctctaaaatccatccagttggccctgattggagtccttcaaatgcagatcttttcccaagccaaggctctgcttctgtacctcaaagcactgggaatgctctggatcaagttgatgatggagaggttccgctgagggagaaagagaagaaagtgcgtccgttctcaatgtttgatgcagtagaccagtccaatgccccaccttcctttggtactctgaggaagaaccagagcagtgaagatatcttgcgggatgctcaggttgcaaataaaaatgtggctaaagtaccacctcctgttcctacaaaaccaaaacagattaatttgccttattttggacaaactaatcagccaccttcagacattaagccagacggaagttctcagcagttgtcaacagttgttccgtccatgggaactaaaccaaaaccagcagggcagcagccgagagtgctgctatctcccagcataccttcggttggccaagaccagaccctttctccaggttctaagcaagaaagtccacctgctgctgccgtccggccctttactccccagccttccaaagacaccttacttccacccttcagaaaaccccagaccgtggcagcaagttcaatatattccatgtatacgcaacagcaggcgccaggaaaaaacttccagcaggctgtgcagagcgcgttgaccaagactcataccagagggccacacttttcaagtgtatatggtaagcctgtaattgctgctgcccagaatcaacagcagcacccagagaacatttattccaatagccagggcaagcctggcagtccagaacctgaaacagagcctgtttcttcagttcaggagaaccatgaaaacgaaagaattcctcggccactcagcccaactaaattactgcctttcttatctaatccttaccgaaaccagagtgatgctgacctagaagccttacgaaagaaactgtctaacgcaccaaggcctctaaagaaacgtagttctattacagagccagagggtcctaatgggccaaatattcagaagcttttatatcagaggaccaccatagcggccatggagaccatctctgtcccatcatacccatccaagtcagcttctgtgactgccagctcagaaagcccagtagaaatccagaatccatatttacatgtggagcccgaaaaggaggtggtctctctggttcctgaatcattgtccccagaggatgtggggaatgccagtacagagaacagtgacatgccagctccttctccaggccttgattatgagcctgagggagtcccagacaacagcccaaatctccagaataacccagaagaaccaaatccagaggctccacatgtgcttgatgtgtacctggaggagtaccctccatacccacccccaccatacccatctggggagcctgaagggcccggagaagactcggtgagcatgcgcccgcctgaaatcaccgggcaggtctctctgcctcctggtaaaaggacaaacttgcgtaaaactggctcagagcgtatcgctcatggaatgagggtgaaattcaacccccttgctttactgctagattcgtctttggagggagaatttgaccttgtacagagaattatttatgaggttgatgacccaagcctccccaatgatgaaggcatcacggctcttcacaatgctgtgtgtgcaggccacacagaaatcgttaagttcctggtacagtttggtgtaaatgtaaatgctgctgatagtgatggatggactccattacattgtgctgcctcatgtaacaacgtccaagtgtgtaagtttttggtggagtcaggagccgctgtgtttgccatgacctacagtgacatgcagactgctgcagataagtgcgaggaaatggaggaaggctacactcagtgctcccaatttctttatggagttcaggagaagatgggcataatgaataaaggagtcatttatgcgctttgggattatgaacctcagaatgatgatgagctgcccatgaaagaaggagactgcatgacaatcatccacagggaagacgaagatgaaatcgaatggtggtgggcgcgccttaatgataaggagggatatgttccacgtaacttgctgggactgtacccaagaattaaaccaagacaaaggagcttggcctgaaacttccacacagaattttagtcaatgaagaattaatctctgttaagaagaagtaatacgattatttttggcaaaaatttcacaagacttattttaatgacaatgtagcttgaaagcgatgaagaatgtctctagaagagaatgaaggattgaagaattcaccattagaggacatttagcgtgatgaaataaagcatctacgtcagcaggccatactgtgttggggcaaaggtgtcccgtgtagcactcagataagtatacagcgacaatcctgttttctacaagaatcctgtctagtaaataggatcatttattgggcagttgggaaatcagctctctgtcctgttgagtgttttcagcagctgctcctaaaccagtcctcctgccagaaaggaccagtgccgtcacatcgctgtctctgattgtccccggcaccagcaggcccttggggggctcacctgaaggctcgaaggcactgcacacttgtatattgtcagtgaagaactgttagttggttgtcagtgaacaataactttattatatgagtttttgtagcatcttaagaattatacatatgtttgaaatattgaaactaagctacggtaccagtaattagatgtagaatcttgtttgtaggctgaattttaatctgtatttattgtcttttgtatctcagaaattagaaacttgctacagacttacccgtaatatttgtcaagatcatagctgactttaaaaacagttgtaataaactttttgatgcta

SEQ ID NO: 83451 - DNA, 4618 bp, Homo sapiens
gggagccccgaccgtcacgagcgtcgaagagacaaagccgcgtcagggggcccggccggggcgggggagcccggggcttgttggtgccccagcccgcgcggagggcccttcggacccgcgcgccgccgctgccgccgccgccgcctcgcaacaggtccgggcggcctcgctctccgctcccctcccccgcatccgcgaccctccggggcacctcagctcggccggggccgcagtctggccacccgcttccatgcggttcgggtccaagatgatgccgatgtttcttaccgtgtatctcagtaacaatgagcagcacttcacagaagttccagttactccagaaacaatatgcagagacgtggtggatctgtgcaaagaacccggcgagagtgattgccatttggctgaagtgtggtgtggctctgaacgtccagttgcggataatgagcgaatgtttgatgttcttcaacgatttggaagtcagaggaacgaagttcgcttcttccttcgtcatgaacgcccccctggcagggacattgtgagtggaccaagatctcaggatccaagtttaaaaagaaatggtgtaaaagttcctggtgaatatcgaagaaaggagaacggtgttaatagtcctaggatggatctgactcttgctgaacttcaggaaatggcatctcgccagcagcaacagattgaagcccagcaacaattgctggcaactaaggaacagcgcttaaagtttttgaaacaacaagatcagcgacaacagcaacaagttgctgagcaggagaaacttaaaaggctaaaagaaatagctgagaatcaggaagctaagctaaaaaaagtgagagcacttaaaggccacgtggaacagaagagactaagcaatgggaaacttgtggaggaaattgaacagatgaataatttgttccagcaaaaacagagggagctcgtcctggctgtgtcaaaagtagaagaactgaccaggcagctagagatgctcaagaacggcaggatcgacagccaccatgacaatcagtctgcagtggctgagcttgatcgcctctataaggagctgcagctaagaaacaaattgaatcaagagcagaatgccaagctacaacaacagagggagtgtttgaataagcgtaattcagaagtggcagtcatggataagcgtgttaatgagctgagggaccggctgtggaagaagaaggcagctctacagcaaaaagaaaatctaccagtttcatctgatggaaatcttccccagcaagccgcgtcagccccaagccgtgtggctgcagtaggtccctatatccagtcgtctactatgcctcggatgccctcaaggcctgaattgctggtgaagccagccctgccggatggttccttggtcattcaggcttcagaggggccgatgaaaatacagacactgcccaacatgagatctggggctgcttcacaaactaaaggctctaaaatccatccagttggccctgattggagtccttcaaatgcagatcttttcccaagccaaggctctgcttctgtacctcaaagcactgggaatgctctggatcaagttgatgatggagaggttccgctgagggagaaagagaagaaagtgcgtccgttctcaatgtttgatgcagtagaccagtccaatgccccaccttcctttggtactctgaggaagaaccagagcagtgaagatatcttgcgggatgctcaggttgcaaataaaaatgtggctaaagtaccacctcctgttcctacaaaaccaaaacagattaatttgccttattttggacaaactaatcagccaccttcagacattaagccagacggaagttctcagcagttgtcaacagttgttccgtccatgggaactaaaccaaaaccagcagggcagcagccgagagtgctgctatctcccagcataccttcggttggccaagaccagaccctttctccaggttctaagcaagaaagtccacctgctgctgccgtccggccctttactccccagccttccaaagacaccttacttccacccttcagaaaaccccagaccgtggcagcaagttcaatatattccatgtatacgcaacagcaggcgccaggaaaaaacttccagcaggctgtgcagagcgcgttgaccaagactcataccagagggccacacttttcaagtgtatatggtaagcctgtaattgctgctgcccagaatcaacagcagcacccagagaacatttattccaatagccagggcaagcctggcagtccagaacctgaaacagagcctgtttcttcagttcaggagaaccatgaaaacgaaagaattcctcggccactcagcccaactaaattactgcctttcttatctaatccttaccgaaaccagagtgatgctgacctagaagccttacgaaagaaactgtctaacgcaccaaggcctctaaagaaacgtagttctattacagagccagagggtcctaatgggccaaatattcagaagcttttatatcagaggaccaccatagcggccatggagaccatctctgtcccatcatacccatccaagtcagcttctgtgactgccagctcagaaagcccagtagaaatccagaatccatatttacatgtggagcccgaaaaggaggtggtctctctggttcctgaatcattgtccccagaggatgtggggaatgccagtacagagaacagtgacatgccagctccttctccaggccttgattatgagcctgagggagtcccagacaacagcccaaatctccagaataacccagaagaaccaaatccagaggctccacatgtgcttgatgtgtacctggaggagtaccctccatacccacccccaccatacccatctggggagcctgaagggcccggagaagactcggtgagcatgcgcccgcctgaaatcaccgggcaggtctctctgcctcctggtaaaaggacaaacttgcgtaaaactggctcagagcgtatcgctcatggaatgagggtgaaattcaacccccttgctttactgctagattcgtctttggagggagaatttgaccttgtacagagaattatttatgaggttgatgacccaagcctccccaatgatgaaggcatcacggctcttcacaatgctgtgtgtgcaggccacacagaaatcgttaagttcctggtacagtttggtgtaaatgtaaatgctgctgatagtgatggatggactccattacattgtgctgcctcatgtaacaacgtccaagtgtgtaagtttttggtggagtcaggagccgctgtgtttgccatgacctacagtgacatgcagactgctgcagataagtgcgaggaaatggaggaaggctacactcagtgctcccaatttctttatggagttcaggagaagatgggcataatgaataaaggagtcatttatgcgctttgggattatgaacctcagaatgatgatgagctgcccatgaaagaaggagactgcatgacaatcatccacagggaagacgaagatgaaatcgaatggtggtgggcgcgccttaatgataaggagggatatgttccacgtaacttgctgggactgtacccaagaattaaaccaagacaaaggagcttggcctgaaacttccacacagaattttagtcaatgaagaattaatctctgttaagaagaagtaatacgattatttttggcaaaaatttcacaagacttattttaatgacaatgtagcttgaaagcgatgaagaatgtctctagaagagaatgaaggattgaagaattcaccattagaggacatttagcgtgatgaaataaagcatctacgtcagcaggccatactgtgttggggcaaaggtgtcccgtgtagcactcagataagtatacagcgacaatcctgttttctacaagaatcctgtctagtaaataggatcatttattgggcagttgggaaatcagctctctgtcctgttgagtgttttcagcagctgctcctaaaccagtcctcctgccagaaaggaccagtgccgtcacatcgctgtctctgattgtccccggcaccagcaggcccttggggggctcacctgaaggctcgaaggcactgcacacttgtatattgtcagtgaagaactgttagttggttgtcagtgaacaataactttattatatgagtttttgtagcatcttaagaattatacatatgtttgaaatattgaaactaagctacggtaccagtaattagatgtagaatcttgtttgtaggctgaattttaatctgtatttattgtcttttgtatctcagaaattagaaacttgctacagacttacccgtaatatttgtcaagatcatagctgactttaaaaacagttgtaataaactttttgatgctagctgtttactggtttttgtttttgatgtcataaatagaccttgtttaatagtcacaagccgttgggatatcatacccagctgaaaaagaacaaactgcttaacataagtatatgtatcgtaataagagttttttaccagctaagtgattcaatgtaagtggtttttaaaataaaatactgtagagatcaaaaaaaaaa

SEQ ID NO: 83452 - DNA, 2620 bp, Homo sapiens
gggagccccgaccgtcacgagcgtcgaagagacaaagccgcgtcagggggcccggccggggcgggggagcccggggcttgttggtgccccagcccgcgcggagggcccttcggacccgcgcgccgccgctgccgccgccgccgcctcgcaacaggtccgggcggcctcgctctccgctcccctcccccgcatccgcgaccctccggggcacctcagctcggccggggccgcagtctggccacccgcttccatgcggttcgggtccaagatgatgccgatgtttcttaccgtgtatctcagtaacaatgagcagcacttcacagaagttccagttactccagaaacaatatgcagagacgtggtggatctgtgcaaagaacccggcgagagtgattgccatttggctgaagtgtggtgtggctctgaacgtccagttgcggataatgagcgaatgtttgatgttcttcaacgatttggaagtcagaggaacgaagttcgcttcttccttcgtcatgaacgcccccctggcagggacattgtgagtggaccaagatctcaggatccaagtttaaaaagaaatggtgtaaaagttcctggtgaatatcgaagaaaggagaacggtgttaatagtcctaggatggatctgactcttgctgaacttcaggaaatggcatctcgccagcagcaacagattgaagcccagcaacaattgctggcaactaaggaacagcgcttaaagtttttgaaacaacaagatcagcgacaacagcaacaagttgctgagcaggagaaacttaaaaggctaaaagaaatagctgagaatcaggaagctaagctaaaaaaagtgagagcacttaaaggccacgtggtctctctggttcctgaatcattgtccccagaggatgtggggaatgccagtacagagaacagtgacatgccagctccttctccaggccttgattatgagcctgagggagtcccagacaacagcccaaatctccagaataacccagaagaaccaaatccagaggctccacatgtgcttgatgtgtacctggaggagtaccctccatacccacccccaccatacccatctggggagcctgaagggcccggagaagactcggtgagcatgcgcccgcctgaaatcaccgggcaggtctctctgcctcctggtaaaaggacaaacttgcgtaaaactggctcagagcgtatcgctcatggaatgagggtgaaattcaacccccttgctttactgctagattcgtctttggagggagaatttgaccttgtacagagaattatttatgaggttgatgacccaagcctccccaatgatgaaggcatcacggctcttcacaatgctgtgtgtgcaggccacacagaaatcgttaagttcctggtacagtttggtgtaaatgtaaatgctgctgatagtgatggatggactccattacattgtgctgcctcatgtaacaacgtccaagtgtgtaagtttttggtggagtcaggagccgctgtgtttgccatgacctacagtgacatgcagactgctgcagataagtgcgaggaaatggaggaaggctacactcagtgctcccaatttctttatggagttcaggagaagatgggcataatgaataaaggagtcatttatgcgctttgggattatgaacctcagaatgatgatgagctgcccatgaaagaaggagactgcatgacaatcatccacagggaagacgaagatgaaatcgaatggtggtgggcgcgccttaatgataaggagggatatgttccacgtaacttgctgggactgtacccaagaattaaaccaagacaaaggagcttggcctgaaacttccacacagaattttagtcaatgaagaattaatctctgttaagaagaagtaatacgattatttttggcaaaaatttcacaagacttattttaatgacaatgtagcttgaaagcgatgaagaatgtctctagaagagaatgaaggattgaagaattcaccattagaggacatttagcgtgatgaaataaagcatctacgtcagcaggccatactgtgttggggcaaaggtgtcccgtgtagcactcagataagtatacagcgacaatcctgttttctacaagaatcctgtctagtaaataggatcatttattgggcagttgggaaatcagctctctgtcctgttgagtgttttcagcagctgctcctaaaccagtcctcctgccagaaaggaccagtgccgtcacatcgctgtctctgattgtccccggcaccagcaggcccttggggggctcacctgaaggctcgaaggcactgcacacttgtatattgtcagtgaagaactgttagttggttgtcagtgaacaataactttattatatgagtttttgtagcatcttaagaattatacatatgtttgaaatattgaaactaagctacggtaccagtaattagatgtagaatcttgtttgtaggctgaattttaatctgtatttattgtcttttgtatctcagaaattagaaacttgctacagacttacccgtaatatttgtcaagatcatagctgactttaaaaacagttgtaataaactttttgatgcta

SEQ ID NO: 83453 - DNA, 4366 bp, Homo sapiens
gggagccccgaccgtcacgagcgtcgaagagacaaagccgcgtcagggggcccggccggggcgggggagcccggggcttgttggtgccccagcccgcgcggagggcccttcggacccgcgcgccgccgctgccgccgccgccgcctcgcaacaggtccgggcggcctcgctctccgctcccctcccccgcatccgcgaccctccggggcacctcagctcggccggggccgcagtctggccacccgcttccatgcggttcgggtccaagatgatgccgatgtttcttaccgtgtatctcagtaacaatgagcagcacttcacagaagttccagttactccagaaacaatatgcagagacgtggtggatctgtgcaaagaacccggcgagagtgattgccatttggctgaagtgtggtgtggctctgaacgtccagttgcggataatgagcgaatgtttgatgttcttcaacgatttggaagtcagaggaacgaagttcgcttcttccttcgtcatgaacgcccccctggcagggacattgtgagtggaccaagatctcaggatccaagtttaaaaagaaatggtgtaaaagttcctggtgaatatcgaagaaaggagaacggtgttaatagtcctaggatggatctgactcttgctgaacttcaggaaatggcatctcgccagcagcaacagattgaagcccagcaacaattgctggcaactaaggaacagcgcttaaagtttttgaaacaacaagatcagcgacaacagcaacaagttgctgagcaggagaaacttaaaaggctaaaagaaatagctgagaatcaggaagctaagctaaaaaaagtgagagcacttaaaggccacgtggaacagaagagactaagcaatgggaaacttgtggaggaaattgaacagatgaataatttgttccagcaaaaacagagggagctcgtcctggctgtgtcaaaagtagaagaactgaccaggcagctagagatgctcaagaacggcaggatcgacagccaccatgacaatcagtctgcagtggctgagcttgatcgcctctataaggagctgcagctaagaaacaaattgaatcaagagcagaatgccaagctacaacaacagagggagtgtttgaataagcgtaattcagaagtggcagtcatggataagcgtgttaatgagctgagggaccggctgtggaagaagaaggcagctctacagcaaaaagaaaatctaccagtttcatctgatggaaatcttccccagcaagccgcgtcagccccaagccgtgtggctgcagtaggtccctatatccagtcgtctactatgcctcggatgccctcaaggcctgaattgctggtgaagccagccctgccggatggttccttggtcattcaggcttcagaggggccgatgaaaatacagacactgcccaacatgagatctggggctgcttcacaaactaaaggctctaaaatccatccagttggccctgattggagtccttcaaatgcagatcttttcccaagccaaggctctgcttctgtacctcaaagcactgggaatgctctggatcaagttgatgatggagaggttccgctgagggagaaagagaagaaagtgcgtccgttctcaatgtttgatgcagtagaccagtccaatgccccaccttcctttggtactctgaggaagaaccagagcagtgaagatatcttgcgggatgctcaggttgcaaataaaaatgtggctaaagtaccacctcctgttcctacaaaaccaaaacagattaatttgccttattttggacaaactaatcagccaccttcagacattaagccagacggaagttctcagcagttgtcaacagttgttccgtccatgggaactaaaccaaaaccagcagggcagcagccgagagtgctgctatctcccagcataccttcggttggccaagaccagaccctttctccaggttctaagcaagaaagtccacctgctgctgccgtccggccctttactccccagccttccaaagacaccttacttccacccttcagaaaaccccagaccgtggcagcaagttcaatatattccatgtatacgcaacagcaggcgccaggaaaaaacttccagcaggctgtgcagagcgcgttgaccaagactcataccagagggccacacttttcaagtgtatatggtaagcctgtaattgctgctgcccagaatcaacagcagcacccagagaacatttattccaatagccagggcaagcctggcagtccagaacctgaaacagagcctgtttcttcagttcaggagaaccatgaaaacgaaagaattcctcggccactcagcccaactaaattactgcctttcttatctaatccttaccgaaaccagagtgatgctgacctagaagccttacgaaagaaactgtctaacgcaccaaggcctctaaagaaacgtagttctattacagagccagagggtcctaatgggccaaatattcagaagcttttatatcagaggaccaccatagcggccatggagaccatctctgtcccatcatacccatccaagtcagcttctgtgactgccagctcagaaagcccagtagaaatccagaatccatatttacatgtggagcccgaaaaggaggtggtctctctggttcctgaatcattgtccccagaggatgtggggaatgccagtacagagaacagtgacatgccagctccttctccaggccttgattatgagcctgagggagtcccagacaacagcccaaatctccagaataacccagaagaaccaaatccagaggctccacatgtgcttgatgtgtacctggaggagtaccctccatacccacccccaccatacccatctggggagcctgaagggcccggagaagactcggtgagcatgcgcccgcctgaaatcaccgggcaggtctctctgcctcctggtaaaaggacaaacttgcgtaaaactggctcagagcgtatcgctcatggaatgagggtgaaattcaacccccttgctttactgctagattcgtctttggagggagaatttgaccttgtacagagaattatttatgaggttgatgacccaagcctccccaatgatgaaggcatcacggctcttcacaatgctgtgtgtgcaggccacacagaaatcgttaagttcctggtacagtttggtgtaaatgtaaatgctgctgatagtgatggatggactccattacattgtgctgcctcatgtaacaacgtccaagtgtgtaagtttttggtggagtcaggagccgctgtgtttgccatgacctacagtgacatgcagactgctgcagataagtgcgaggaaatggaggaaggctacactcagtgctcccaatttctttatggagttcaggagaagatgggcataatgaataaaggagtcatttatgcgctttgggattatgaacctcagaatgatgatgagctgcccatgaaagaaggagactgcatgacaatcatccacagggaagacgaagatgaaatcgaatggtggtgggcgcgccttaatgataaggagggatatgttccacgtaacttgctgggactgtacccaagaattaaaccaagacaaaggagcttggcctgaaacttccacacagaattttagtcaatgaagaattaatctctgttaagaagaagtaatacgattatttttggcagtctctagaagagaatgaaggattgaagaattcaccattagaggacatttagcgtgatgaaataaagcatctacgtcagcaggccatactgtgttggggcaaaggtgtcccgtgtagcactcagataagtatacagcgacaatcctgttttctacaagaatcctgtctagtaaataggatcatttattgggcagttgggaaatcagctctctgtcctgttgagtgttttcagcagctgctcctaaaccagtcctcctgccagaaaggaccagtgccgtcacatcgctgtctctgattgtccccggcaccagcaggcccttggggggctcacctgaaggctcgaaggcactgcacacttgtatattgtcagtgaagaactgttagttggttgtcagtgaacaataactttattatatgagtttttgtagcatcttaagaattatacatatgtttgaaatattgaaactaagctacggtaccagtaattagatgtagaatcttgtttgtaggctgaattttaatctgtatttattgtcttttgtatctcagaaattagaaacttgctacagacttacccgtaatatttgtcaagatcatagctgactttaaaaacagttgtaataaactttttgatgcta

SEQ ID NO: 83454 - DNA, 1041 bp, Homo sapiens
agtcagactcatagagagatccccatccgaatatgagttcaggagaagatgggcataatgaataaaggagtcatttatgcgctttgggattatgaacctcagaatgatgatgagctgcccatgaaagaaggagactgcatgacaatcatccacagggaagacgaagatgaaatcgaatggtggtgggcgcgccttaatgataaggagggatatgttccacgtaacttgctgggactgtacccaagaattaaaccaagacaaaggagcttggcctgaaacttccacacagaattttagtcaatgaagaattaatctctgttaagaagaagtaatacgattatttttggcaaaaatttcacaagacttattttaatgacaatgtagcttgaaagcgatgaagaatgtctctagaagagaatgaaggattgaagaattcaccattagaggacatttagcgtgatgaaataaagcatctacgtcagcaggccatactgtgttggggcaaaggtgtcccgtgtagcactcagataagtatacagcgacaatcctgttttctacaagaatcctgtctagtaaataggatcatttattgggcagttgggaaatcagctctctgtcctgttgagtgttttcagcagctgctcctaaaccagtcctcctgccagaaaggaccagtgccgtcacatcgctgtctctgattgtccccggcaccagcaggcccttggggggctcacctgaaggctcgaaggcactgcacacttgtatattgtcagtgaagaactgttagttggttgtcagtgaacaataactttattatatgagtttttgtagcatcttaagaattatacatatgtttgaaatattgaaactaagctacggtaccagtaattagatgtagaatcttgtttgtaggctgaattttaatctgtatttattgtcttttgtatctcagaaattagaaacttgctacagacttacccgtaatatttgtcaagatcatagctgactttaaaaacagttgtaataaactttttgatgcta

SEQ ID NO: 83455 - DNA, 698 bp, Homo sapiens
cagcgctaacccaattccattccagcgtcatgacaatgtagcttgaaagcgatgaagaatgtctctagaagagaatgaaggattgaagaattcaccattagaggacatttagcgtgatgaaataaagcatctacgtcagcaggccatactgtgttggggcaaaggtgtcccgtgtagcactcagataagtatacagcgacaatcctgttttctacaagaatcctgtctagtaaataggatcatttattgggcagttgggaaatcagctctctgtcctgttgagtgttttcagcagctgctcctaaaccagtcctcctgccagaaaggaccagtgccgtcacatcgctgtctctgattgtccccggcaccagcaggcccttggggggctcacctgaaggctcgaaggcactgcacacttgtatattgtcagtgaagaactgttagttggttgtcagtgaacaataactttattatatgagtttttgtagcatcttaagaattatacatatgtttgaaatattgaaactaagctacggtaccagtaattagatgtagaatcttgtttgtaggctgaattttaatctgtatttattgtcttttgtatctcagaaattagaaacttgctacagacttacccgtaatatttgtcaagatcatagctgactttaaaaacagttgtaataaactttttgatgcta

SEQ ID NO: 83456 - DNA, 1655 bp, Homo sapiens
gggagccccgaccgtcacgagcgtcgaagagacaaagccgcgtcagggggcccggccggggcgggggagcccggggcttgttggtgccccagcccgcgcggagggcccttcggacccgcgcgccgccgctgccgccgccgccgcctcgcaacaggtccgggcggcctcgctctccgctcccctcccccgcatccgcgaccctccggggcacctcagctcggccggggccgcagtctggccacccgcttccatgcggttcgggtccaagatgatgccgatgtttcttaccgtgtatctcagtaacaatgagcagcacttcacagaagttccagttactccagaaacaatatgcagagacgtggtggatctgtgcaaagaacccggcgagagtgattgccatttggctgaagtgtggtgtggctctgaacgtccagttgcggataatgagcgaatgtttgatgttcttcaacgatttggaagtcagaggaacgaagttcgcttcttccttcgtcatgaacgcccccctggcagggacattgtgagtggaccaagatctcaggatccaagtttaaaaagaaatggtgtaaaagttcctggtgaatatcgaagaaaggagaacggtgttaatagtcctaggatggatctgactcttgctgaacttcaggaaatggcatctcgccagcagcaacagattgaagcccagcaacaattgctggcaactaaggaacagcgcttaaagtttttgaaacaacaagatcagcgacaacagcaacaagttgctgagcaggagaaacttaaaaggctaaaagaaatagctgagaatcaggaagctaagctaaaaaaagtgagagcacttaaaggccacgtggaacagaagagactaagcaatgggaaacttgtggaggaaattgaacagatgaataatttgttccagcaaaaacagagggagctcgtcctggctgtgtcaaaagtagaagaactgaccaggcagctagagatgctcaagaacggcaggatcgacagccaccatgacaatcagtctgcagtggctgagcttgatcgcctctataaggagctgcagctaagaaacaaattgaatcaagagcagaatgccaagctacaacaacagagggagtgtttgaataagcgtaattcagaagtggcagtcatggataagcgtgttaatgagctgagggaccggctgtggaagaagaaggcagctctacagcaaaaagaaaatctaccagtttcatctgatggaaatcttccccagcaagccgcgtcagccccaagccgtgtggctgcagtaggtccctatatccagtcgtctactatgcctcggatgccctcaaggcctgaattgctggtgaagccagccctgccggatggttccttggtcattcaggcttcagaggggccgatgaaaatacagacactgcccaacatgagatctggggctgcttcacaaactaaaggtaaaaagtcctgcacagcctagttcttcctgtccccactattctttctcccaagtttgagtttaaaaaaaatctctctttgtattcattattcatgtttgaattctaaaaatccttttatattctttgctggtgtaatgagacgtttaaaaaattaaaattgataccctggttgtacaa

SEQ ID NO: 83457 - DNA, 307 bp, Homo sapiens
gtaaggttcttaacgttcataggtgacgtgcttaagttctataccagaacttaagccatccctcagcagacagcaaaataactaatccctattttgactgacgctaagggtttttaactgtggcttctgttctttactgggagtttaaaagagtgcttgctaaatgtctgctcctacagtagtaggcactaaagataatagatgaataaagtgtggtctcaagtctggaggggcttatcggtgagggagaaccaaatataatgggtcattacagtgcagaaggaaggtgtgtgtcttcactgtaggt

SEQ ID NO: 83458 - DNA, 474 bp, Homo sapiens
actcagtgctcccaatttctttatggtatgtgacaagtagaactaaatgtattgattactgcattcatttattctgtatctccagggtataattcaataagtatttttgtttggaaaaaatcttgtgttatccatagtcttgggccttgaaaatacaacagccttggtcacagataatacagcttctgtttgtatgcttagaaacagctattgtcagggacttcttcaattacaaaagacagtgttgcagcatctgacctagtggtgttaatgactttgaccatcaaaagaccctctattaaggctttagtacttatagattgatggtgtatccttgcaaataagtaaacagacccccctctcctaacaacatgatcaagagaagtgaaggatcagtttaagaacccaaatggtccaagttttcctaaaaatcaaacttgtcataaagtgaaataaaggcaacatatattttgg

SEQ ID NO: 83459 - DNA, 392 bp, Homo sapiens
gggaggagggaaaaagatgaccagcccagtgaggttactcataggcatcttcttcagaatcattactcagtgtgccctcagaaaacagatgctgtttatggatccttaaaagacaatccgctgcttttttactttttaatgttattacctgtgtagctctgtttgtctctaatacttgtaataaagtgtgggtgagagttcattggggagtgtttattttggaatgttttttgtagactctatggctagattctgaaactgctcattttaaaaagtaagaaaatgtcacatcttagtttctaagtctgatcacctgagatgatttttaatactaaaggacctgtgcttctttcctaaggtttcatctgatggaaatcttccccagcaagccg

SEQ ID NO: 83460 - DNA, 407 bp, Homo sapiens
gaatgtctctagaagagaatgaaggattgaagaattcaccattagaggacatttagcgtgatgaaataaagcatctacgtcagcaggccatactgtgttggggcaaaggtgtcccgtgtagcactcagataagtatacagcgacaatcctgttttctacaagaatcctgtctagtaaataggatcatttattgggcagttgggaaatcagctctctgtcctgttgagtgttttcagcagctgctcctaaaccagtcctcctgccagaaaggaccagtgccgtcacatcgctgtctctgattgtccccggcaccagcaggcccttggggggctcacctgaaggctcgaaggcactgcacacttgtatattgtcagtgaagaactgttagttggttgtcagtgaacaaa

SEQ ID NO: 83461 - DNA, 539 bp, Homo sapiens
aatgaattttaaaaataggtagcacacggaagttattgtataattcattcaggtgtccatcgctaagcccccaccacaaacagaaactgggataatcaggttaactcggcactctcagcatgccccccaaatatcaaaaatatctttctgaagctattccctctgcatgtggacaaattccaagtgctttcttcattcttagcacaaagaatgttctaatattctgaggcaagtaaaaataccacaattccaaaattttgtctctggatgtataactagccagcaacaaattaatgtagagttttgcatgctctcttgtgtttttacactttttcatgggctatttgtcaacatttactcctagctcctgaaccgccccaagttctgcaggagctccagcctgtcactgtgcagtctggcaagcctgcccgcttctgtgccatgatatccggaagaccacagcccaaaatttcctggtacaaggaagagcagctgctttccactggcttcaagtgcaaatttcttcatgatgggcaaga

SEQ ID NO: 83462 - DNA, 483 bp, Homo sapiens
aggcaacgtgtcaactgcaaaactctttgtagaaggcagagatgttcgcatccgaagtattaaaaaggaggttcaggtcattgagaaacagcgtgctgttgttgaatttgaggtcaatgaagacgatgttgatgcccactggtataaagatggcattgaaatcaatttccaagttcaagaacgacacaaatatgtagtggaaagaagaatccaccgaatgtttatctctgagaccagacagagcgatgcaggagaatacacctttgtggcaggaaggaacaggagttctgtcactctctatgtcaatgctcctgaaccgccccaagttctgcaggagctccagcctgtcactgtgcagtctggcaagcctgcccgcttctgtgccatgatatccggaagaccacagcccaaaatttcctggtacaaggaagagcagctgctttccactggcttcaagtgcaaatttcttcatgatgggcaaga

SEQ ID NO: 83463 - DNA, 1053 bp, Homo sapiens
ttggtgacacattgctggtcagccaatcagaggctggtattaaggggaaaacagaaataatttctgtcccctgaattctctaagatttgtgaaagaaaaaatagtatcccccctaaaaaaaaaacaaaagaaaacctgaccccagagagatgctgcaaaaatttccgaaagtaaaacctgggccactcactggaacatagtgcagtgtctcctgagaggttagtcattgagcagttaagtgagcaggctggggtgggagaatctctcacgtgattggatgacctgacttgacacataagtcagacacatctgttttttaatcatcactgctacaccctgggttcgtcaccttgaaaagatttgttcacttatattgatttcaatttcttaaactgtaaattgcattttattagtagagcttgaaaggttcaaaaacatttacaaagggcataaaagtggtgggtttcaaaaaatattaatatctaatcatatatttcgtatgttaaaaattcttacttacctttttctttcccagagagagtttaggaattttctcaggtgtgttttctgtaggtgatttcaaacagaattccaaggctcagcttttagaatgctaccaaggaaaataatagggaaaatctccttcgattttggctgtagaaaatgaatacatttccacgaggaaatattgtagataattggtgagttacataaatttataaaacattagttcctctttctgcagggtaaatttctgagagtgaatatctctgttctgtatcctgttatcttgatttctgagtttcatactaaatttcatgagatgaaacttggtacctcctagaagtttttccctatgactaattgtttactacattatttttaatagaaataatacaataataaatttattatctgaaagaaatagatacttttgctactcgggaggctgaggaggcaggacaatcgcttgaacccgggaggcagagtttgcattgagccaagactgtgccattgcactacagcctgggtgacaaagtgagactctgtctc

SEQ ID NO: 83464 - DNA, 709 bp, Homo sapiens
ctttcagacgatttcctaaagtacctggcaaagaattctgcaactttgttcagtgccagcgattatgaagtggctcctcctgagtaccatcggaaagctgtgtgagaggcactctcactcacttatgtttggatctccgtaaacacatttttgttcttagtctatctcttgtacaaacgatgtgctttgaagatgttagtgtataacaattgatgtgtgttttctgtaggtgatttcaaacagaattccaaggctcagcttttagaatgctaccaaggaaaataatagggaaaatctccttcgattttggctgtagaaaatgaatacatttccacgaggaaatattgtagataattggtgagttacataaatttataaaacattagttcctctttctgcagggtaaatttctgagagtgaatatctctgttctgtatcctgttatcttgatttctgagtttcatactaaatttcatgagatgaaacttggtacctcctagaagtttttccctatgactaattgtttactacattatttttaatagaaataatacaataataaatttattatctgaaagaaatagatacttttgctactcgggaggctgaggaggcaggacaatcgcttgaacccgggaggcagagtttgcattgagccaagactgtgccattgcactacagcctgggtgacaaagtgagactctgtctc

SEQ ID NO: 83465 - DNA, 589 bp, Homo sapiens
tgggatgtttcttatatccctgcacaccatagataaatacggtcatatgggtatcacccatttcagctcttccagaaggagaaatgtttttacttatttatttttgagacagggtctcactctgtcacccagatagaaattcgaggtaaccagaaatttagttaccctttctgcacccccccaagtgtatgaagccaaaatgctctccagcagaggcaacagcctttatttccttgaagccctggcctacagttcatctcttccagaaagattctcttaacgaatctcactccatccccatctgacttgtattttttgcattcctttagccagtacccaatagtcagttgggggttaattttttatatgtttttacttacttcacgcagttttcccatttgcaaattttttgtttgtttttgtttttgttttgaggcagaatctcactcactctgtcgcccaggctggagtgcaatggcgcagtcttggctcactgcaacctccagcctgggtgacagagtgaaattctgtctcaaaaaaaaaaagtaaaagaaaaggaaacaaaattccccactgcccccaaagtcac

SEQ ID NO: 83466 - DNA, 350 bp, Homo sapiens
aataaaaatccaggagtccacatggttataaataagtacctgaataaataaataaatgaaggcagctcttccttacagaagagttccaattaataaatgtgacatgaacaagggaaataaaaaaacaccattagaacaccacagtaataattattgcagacaagacgcactgatgtatgctaaaattaatgggtgaaagtttgaggagaagcagcatgttcgaattgtctcaaagtatctcccccaagagatttactaattataaaggggaaagaaaatacagtaatctgcagtggagaaacccagtaggtgccaccttaatcaagtgaccaagttaacatcaccagtaa

SEQ ID NO: 83467 - DNA, 413 bp, Homo sapiens
actttggtacagaggaacacaaatacatcctgagttaactgtgacttgtttattacatttacacaaaaatattttaccaagtcagtgtgcacacattcatttctgattagattttcattttaattatattgagatcccaagcaatgatagtatagttaattagacataaataatgacatatttctgtcatcaaaatcttctgaaaactctaaataggtaataaaacattatgcaattatggtgtaatcagcacaaaagtactgggaaataaatacatccataagtgcattttcatctaaacttgtgattgctttgctcctcactctctttctctgtatgcaggcgccttaaggctgaacgtcagtccttgtgatttttactctattaatacctgttcttaaattccttttctc

SEQ ID NO: 83468 - DNA, 276 bp, Homo sapiens
atttttttcccatagcacgtatcactctctcatgtgttacctgctacactagaattatgacccctaagagggaagagactatgtcagtatcattgattcttattaacaccattatttagaaccatgcttggcttaaagtagtagctgctcagtaaatatttatctatgtgtgaatttttaagttcttcctttatattgaattaaaattagtctcttgtgtgcagcagtctgggtttgtcttatgttgaaatacttatgttgacttctacatacatt

SEQ ID NO: 83469 - DNA, 993 bp, Homo sapiens
tgggtatcctgcagaagaagctggcatctttcaacatggagcttaatacacacctgggccatcagtcagagaagctggagtacaattcaggcaaaaatacatgcagttgtagggttggctgctgtcccacgccaatgaaggaagcccatagataagcagagtgtatgatgaaaaaaacacccactataactttctgtgatggttaaatttatgtgccaacttgaatgggttaagggatactcagggataagggatgctcagcccaacttgagtgggctaagggatgctccgatagctggaaaaaacattctttctgggtgtgtctgtaaagaggtttgcatttgaattaatagactgaacaaagaagattcaccctcaccagtgcagatgggcatcatccaatccattgaggacctgcctgaataaaatgaaaaggcaaaggaagggcgaattcactctctcctcttgaaccagtacattcatcttctcctatgcttgggcactgatggtcgtggttcttgggccctcagacttagaccagcaacacccccaaccaaccctcttcaggacccctaacccctccttcccaggttcttaggcctttggacttgaattaattacacgactgggttttctgattctccagctctcagaaggcagattgtgggacttttggggcctcataattgcatgagccaattcctataataaattgcctcttataaaaaacacatcccaccacaccccacaccaccacagcaacaagaacaaccagagagggggcggccaataaaaagatcaccccagagcggagccacaactcagggcgacagcccacgagtagagttgcaaaaaggggcgcccaacagagcagcacacatatacaaagacacagaccaaatggccgcacctactaaaaaccgcagcgagccgcggaacacaacaagccatccacagagacaacaagccggagaacgcaccacactcacaccc

SEQ ID NO: 83470 - DNA, 493 bp, Homo sapiens
caaaatctggcatccctttacgattaaaactcttagcaaagtcggcatacaaggaacatacctcaatataataaaagccatctacgacaaacccacaaccagcataataatgaatgaggaaaagttgcaagcattccctctgagaactggaacaagacaaggatgcccaatctcaccacccctcttcagcatagtactggaagtcctagccagagcaatcagacaagagaaagaaataaagggcatccaaatcagtaaagagaaagtcaaactgtccctgtttgctgttgatatcatttaccttgaaaaccccaaagacgactccagaaagctcctagaactgatagaagaatttggcaaagtttctggatacaatattaaggtatagaaatcagtagctcttctatacttcaacagtgaccaagcagagaatcaaatcaagaattcaaccccttttacaatagctgcaaacaaacaaacaaacaaaaaaaaa

SEQ ID NO: 83471 - DNA, 783 bp, Homo sapiens
gtcctattcccattgtagaggctaggaaactgatctccaagacgttaggtaagttaacagggcttgtagtggcagaaccagattgcagactgcaggctagtttctcggcctgtgttggtttccctttgccatgctgtatgtaggcgacaatggtctgctgagcactcccgggagcctgagcctcagggctggctcctgtggatgctggtcacagctgaccacaggccacctgtttgttccctgactttcctgttcatcagggcaggcatctgcatctcatctttccgtaatcagcatcagcatcctctagccagaaactgctggtgacatggactagcagttgcccatttcattggggaagctccttttgaggggacagaatccaacttctggtgagtgtagacaaattctcagccaactttccttgattttctggcaagtgtttcctgaccatatccaccttcagagatatgaaacttttagagacagataagttttccccggtggtcctttctcacctcattcttacctgtgaatacacttggggaccctgaatgacacccaaactcatagcaggctttttcacaatacttaccaacaccattactccagtcagcagcccaaagaaacatcaggctccacactaaaaatgtcttctttataacaggcaacgttgcttcaaacatgggttggaacacacacttagcaccagattgcatccccagtgttgaaatcaggatccacattgatccatcattaacccactatacccgggtggcattg

SEQ ID NO: 83472 - DNA, 315 bp, Homo sapiens
ctaccgctagctctcaagagctactgatcccctgaaatactacagaagctagtgaatgcactactcatttggtttacatacaataccctgtgctgtgggcatgtattatctcccaaatgagacttcttgagagcagaggacctgtgagctatcttttcccccatgacatctagtatactaccctaatgcttaattgcatttactgagtacctaccaagtgccaagctttgtgctgggccctaagaaatccacgatgtctaagacaaaatcccaactcttggctgggcatggtagctcatgcctgtaatctcagga

SEQ ID NO: 83473 - DNA, 807 bp, Homo sapiens
aactacagtgtcgtagtgactaattaggtaaatacaacactttcatttcatagaaactcaagacatctgcaatttggaggtagcaatatggtcatttttattcaaatcctgttttgttttcatgaaataaaaattgcaatgctgattttcacatctgggcagttgggtgtcaacaaatcgagaacaaactgtcaaccaagtaaacaatagaactttcaattctgaaaactgattttgatgaagagtaatttcttaaagaaggatgatcactccaaaaatttcctgattatgttctgaaatctttcagtaaaaatcattaacaagatcatacagtctctgttatttgtgtgggaaaatataacaagtcaactatttgaagccaaaattaacctattgtttgactgtacaactcctttcatcaaagaatgacactgaagatatcagtggcacaaacagaagaactgatgaaaaataaatgccttctctataccctgaaatacacctgttatttctgttcacaagtcctgattttatcatctcaacttattaatgaatatagtatctaaccaggctttcagaagacaaggaatttgtgatgttttgcagcttctttttttattattattttgagctgtacagtggctttcttgactcatcagcagacatcgtggggatctctacgcaaaaaacctggagtgcatgccattatcaagtttgatattaacaggtgtgttaaagaaatatgtttgcactctaccaagacagagaggccttagttagtacttgattcccctttactcacgagaa

SEQ ID NO: 83474 - DNA, 112 bp, Homo sapiens
gctgtatgttatattgctttatcaaaaagcaattaaccaaccatattgtggccaccagtcatgtaagagtatacatatttcatgactaacttttgggttttgggtacttttt

SEQ ID NO: 83475 - DNA, 436 bp, Homo sapiens
ttacaattgcatttattatagaaatgaaccacttggtatttttcagcaagcaaacatttggaaacagtgttttagaaagattaattttgcaatatcataaaggatgaattggaaggaagaagattccagagatggagaaataaattaggagtttataataatctatttgtgaaataaaactgaaaagggggatgagattggaatagaaaagaaaggcaataagagaatgcaactgaaaaatcaataggacatgtccactaatgcaaccgcccaaggggttcactttgccagccacctagacagaaccgattcatcaagacgggaattgcaaaagataaagagtaattcagacagagccagctgtgcgggagacaggagttttattattactcaaatcagtctccctaggcattcggggagcagagttttaaggata

SEQ ID NO: 83476 - DNA, 492 bp, Homo sapiens
gtgagtctgccatgcagggcagttactatggtaaaacatattttggctccagaaactgaatttacagttggagtagctgactcaaaagttacttgcttaaaattaaaagtatgagaaaccccaaaaaatctctttattctactacatactgcacaatatcaagaaagccaactagaaaaaaatagggcagtccttaaaactgacaaattaagccagaagtcttctaagtcagtgggaatagttaaaacaaaattgtaacagatggtagatattaaaaaaactatggctaaagccagggtaggtataaattttgttttggcaaatcagaagctgaaaatcctaataagctccaaatcattttggtaaatcgacacagttcttaaggacctgtggccccttacgtgaataaggaaaagaaaatttctctaaacatacaaggtgtggtggtatttacccagcctggaacatgtttgttttaagacgaggaggtca

SEQ ID NO: 83477 - DNA, 478 bp, Homo sapiens
ttatgaccatttatttttaaccataattttatttatataatttatatagtttatatagtttacatacatttatataatttaacttctaatgatagattttcaggaattctcagctggttgtaaaacctaacaattggctcttgcaagccaatacaagtcggctccagcacacccctgagattgctacactgcaagatactacagacactatttttcccaggaaaatcacagtcattatttccttaatgaaaatccagctctctctgtgttttcagcagtccataggtatgtttgtgtggcaacagtaggtgtctgtattcacagctccttgggcttggcgtcggggctggagagtgtgtagatgaggaaaggcacagatgttggagtcaaatagaccagtgactgctctgtgtcaaggtgtaatttcattaacctttaagccttcatttaataatatttattagctgtgggattgttg

SEQ ID NO: 83478 - DNA, 367 bp, Homo sapiens
cagtttccaaagctatgaaattactaacagggataatgatgaattcccttcagtgatgatagcggctctacagcgatgctcgagcttctgtttgagctgactgttgacatacagcatactctgcttatattgagggtaaaattcacctttgggctacagtgtgtacagtaccagatgtcttgttctgtttagcattttataaagaggaattgttccgctcattttctttagtcaaatagggatttttttaagcctaaaagtgatgcttgaaagaagattcagatgtgagaagtaaacagcagttggggggcagttaaaacaccagggaacaatgcggctgccccataaaaatgtgctcccacttgca

SEQ ID NO: 83479 - DNA, 389 bp, Homo sapiens
taagaaataagttatttcatattcaagttaaaaatatgatttgatgactttacttgtcagcttgtttattgtaacagagaaggtagtggtgaaaatttccagcttgtttagttgaataaccaataaacagatcatctaaattaaaacaatctgatcttgacttcacagagatgaagaagaaagttttatcttttatctctactgctattccatgtcctttggtcccaaaataatgttttggggaaagtctgtataagtctgtatgcacaaaggtacctcagaaggttggaaatctatacttaagaatatagtgttgcttaggttttgttttttttttttttttaaagtcatgcattgtctgtttgctacaaattcattatctaaacagg

SEQ ID NO: 83480 - DNA, 411 bp, Homo sapiens
tgccccttctcaaccctaacagggtttgtacctcgcctatagtacaggataattttgtgatccaaataccactgtgtgctgagtcacatggatgaagaaactaggtgttcattatctctgtccagtgggaaatcgggggcttggctccaagtcacagcacagcaagtgactctgaaatctgccacctgctccacctgctgtgagcagtgcagggttctgctagcagttggtactttaaaaaatattcgttgaataaattgtcatctgacatatagattatccaaacctgccccttctctttgtccttcctgaggctaggaactgtgtctacctcatttgcattttatcttaaatcagcacctgagaaagtccctgggaatggatttcattcttttcctacctccttccaga

SEQ ID NO: 83481 - DNA, 828 bp, Homo sapiens
gcaagtataaaaggaggtgagggagcaggtgctgcacgagtttccccaacctccagccagaagacaagcaaggcctgaggcaggcacctgtctggtttgtttggtgagcagtgagaagccaatggagccaggagaggggcagcaacagagggcagaggggtgatgaggcaggtcactggggacttgcaggcctctgcagtatagatagccctgtgggatggagatttagtctgcacttaaacatatctaaataaagcaagtttatcagcctctaattaattgccatttgggtcttgtcttagacagaagtgttccccttttctgaggacagattatctcctgaaatcaagttctgaccagagtggcccttcagacttctggttctaagcctttcctaaccatctggttcatcctgaatgccttgtacttttgttaaaaagctgccagaatggcatatctatgctcttgtatctcttagaaaatgtatctttctggtgcctctaaagatccccattcctagcaagtgactagactagctgatctgaatagctcaggtctctagattagtcctcatttggtgtccccactccatccccattcctatcacacatccctggatcccattccttatgggtagttctgaaaaataagagctagtttggggacaagcacctaacaattgttcctaggttgccagtcattaggcaacattatagtaaagaagggcctggcagagactagagctgctatatcgtgacttgagggactggtgttattttcatttgtttcaccctcctgttgacatttaatgttacccaaaatcaactc

SEQ ID NO: 83482 - DNA, 875 bp, Homo sapiens
gcaagtataaaaggaggtgagggagcaggtgctgcacgagtttccccaacctccagccagaagacaagcaaggcctgaggcaggcacctgtctggtttgtttggtgagcagtgagaagccaatggagccaggagaggggcagcaacagagggcagaggggtgatgaggcaggtcactggggacttgcaggcctctgcagtatagatagccctgtgggatggagatttagtctgcacttaaacatatctaaataaagcaagtttatcagcctctaattaattgccatttgggtcttgtcttagacagaagtgttccccttttctgaggacagattatctcctgaaatcaagttctgaccagagtggcccttcagacttctggttctaagcctttcctaaccatctggttcatcctgaatgccttgtacttttgttaaaaagctgccagaatggcatatctactgcttatgaccttgaaggcctgcatttttttcaaagaaacatctactgctcttgtatctcttagaaaatgtatctttctggtgcctctaaagatccccattcctagcaagtgactagactagctgatctgaatagctcaggtctctagattagtcctcatttggtgtccccactccatccccattcctatcacacatccctggatcccattccttatgggtagttctgaaaaataagagctagtttggggacaagcacctaacaattgttcctaggttgccagtcattaggcaacattatagtaaagaagggcctggcagagactagagctgctatatcgtgacttgagggactggtgttattttcatttgtttcaccctcctgttgacatttaatgttacccaaaatcaactc

SEQ ID NO: 83483 - DNA, 528 bp, Homo sapiens
gcaagtataaaaggaggtgagggagcaggtgctgcacgagtttccccaacctccagccagaagacaagcaaggcctgaggcaggcacctgtctggtttgtttggtgagcagtgagaagccaatggagccaggagaggggcagcaacagagggcagaggggtgatgaggcaggtcactggggacttgcaggcctctgcagtatagatagccctgtgggatggagatttagtctgcacttaaacatatctaaataaagcaagtttatcagcctctaattaattgccatttgggtcttgtcttagacagaagtgttccccttttctgaggacagattatctcctgaaatcaagttctgaccagagtggcccttcagacttctggttctaagcctttcctaaccatctggttcatcctgaatgccttgtacttttgttaaaaagctgccagaatggcatatctactggtaacgacccagagatgtgcatgcaactgcacgatgcgacatacactgatccgctatgctccatg

SEQ ID NO: 83484 - DNA, 547 bp, Homo sapiens
  misc_feature (193)..(193): n is a, c, g, or t
taaagccagagtggggctgacatgatgaggtggttctaaaccacatgtgcacacaagaatcatttacatagcttggaaaattcctagtgcccaggtctctcacccttgcctacctcagaatctccagggtaggcctgctatcaggatttctctatagctccccaagaaggtccagggtgcagccaagggcgtngaacccctgccatagtgggtcatatttcagttaggatgaaagactgctgaggaagctatgacaggtcagtaagaaccatcagcctgtcagctttgtttccagaagtgaccctgagccctcaagcttggtacccacatcccacatgagccactggccctctgggcgtatgtgtggataaagattaggtcggaccctgctctttttccttgcttatctgttactcagctatgaacatctgacacagaaatgggagaggttaccagccccggtgaatgttcctggtaaaatctgccctcgggaaaggctttggatttgggtgaggagtttgggcctgggctaacacagggatttgca

SEQ ID NO: 83485 - DNA, 459 bp, Homo sapiens
taatggatggagtgaggaaagccaaagaatagaattaaaagaaatcagggagtaaggaggataggttgtaaatcacatagcatgaattttcttccagaatgtttcatcagtgtagatgcttaggcgtgcaagtttaatttttgtttaaaatgggggaaaaaccctacatgaatagattcctggattaaatttagtatcagatttaatttttacagtcaagaacaattagattgtctgctcgtattttctggatcatgagatctattcacactgaaatgtctaacattttgctcattgtcaaaaaaagccttcaagtgctgacatgaagaattgtgctttatttcaaattgtgcacatcactgcagtagcagaggctcatcacacatgagagaagacatactggaagtaagattcatctcttctagttgatttgacataagcagtatcatccaactaaat

SEQ ID NO: 83486 - DNA, 417 bp, Homo sapiens
agctaagatgctcaatctctaaaaaaaaaaggatctgtattcgtgagagtagagagaaaggttgtttaggaagagtcaacagactttagcaaaatccttttatttgattcatgcataactcctgatggagtgtcaaggaagactcattcacttttctttcctgccagaaagttggttcttgcaaaatagattaacttgatgactatgtgtatattggatactcctaattttagctctgttagatatgtttctttctaaggacaagcaactatgtatagacttgttgtttgaattttttttcagtatatatatgtttcttgtttttctatttttctacttcatactgttaatgtcaaatatcaaaaatgttttccagcaatatcaagttatggcaatggcaaaagtccttgttgtaga

SEQ ID NO: 83487 - DNA, 245 bp, Homo sapiens
gccatagctcactcaatggttcaagaaagctggagcagcaattatgtgactgattaagatttaaggtaaatacctgagagagtagtgtcttcttcccagaagctggagaggtgagattggatctgctgctgccctccttgtagtgagccgaactggcaatgtcaggggagctggagactacgtgcctaactctagccactctccaacttcttcctgacttgccttggcctttttccagagcaaat

SEQ ID NO: 83488 - DNA, 473 bp, Homo sapiens
acaatctgtttcttaagtaaatcaattgtgtagtagtttgctgggctgccataataaagtataatacttgatttaaacaacagaaatttattttctcactgtgtctctttgtgtttccgaatttcctcttcatataagaacaccacgcctggctgtttttctacctttttatgtaggtgcatatataaacttccctgttagtactccttttgctgtatcccataggttttgctatgttgtatttccattatcatttgtttcaagaaaatttttaattttcttactagtttcttcattgacccactagtcattcaggagcatgttgtttaatttccatgtgtttgtatagtttccaaaattcctcttgttgttgatttctagttttattccattgcggtcagagaagatacttgaggtaattgtgatttttttttggaatttttaaagacttgctttgtggcctaacatatggt

SEQ ID NO: 83489 - DNA, 242 bp, Homo sapiens
ttactggcatttaagagtaaataaacgactccagcctgggcgacagagggagactgtctcaaaaatatatatttatccaattggctttgatttgttgtcttagatcttaaaatgttgtcagacctttgttctgatgctgcaaaatcatctgcatattatatagatgaaatcaacaaagagttatgttcttttattctatcacatttaatatcggtatgcctttggataaaggagaaaaaatc

SEQ ID NO: 83490 - DNA, 874 bp, Homo sapiens
agaggctttttctagagatgccctgctgggagagtatccatggctttgcgtccccatcatggccctgcggtcggcggcctcctcctggagcacagcaagctgagatctgtatctgtggacctgaatgttgatccctcacttcagattgacatacctgatgcgctcagtgagagagataaggtcaaatttacagtgcacacaaagaccacactgcccacatttcagaatccagagttttctgttacaaggcaacatgaggactttgtgtgactacatgacactcttattgaaacaacagactatgctgggcttatttatttccacctggttccttaagaaggccccgatttggtgggcccctcaaaaagagagtagtcgcgagaactcgtggagagaagtgtgaaggggtctagtgacccaagagaagaatgtgccaagatgaaacaagaactggaagctgagtatctcgctgtgtttaagaagactgtgtcctcccatgaagtctttcttcagcggctttcttctcaccctgttctcagtaaagatcgcaactttcatgttttcctggaatatgatcaggatctaagtgttaggcggacaaaatactaaagaaatgtttggtggcttcttcaaaagtgtggtgaacagtgctgatgaagtcctttttactggagttaaggaggtagatgacttctttgagcaagagaagaacttccttattaactattacaataggatcaaagattcttgtgttgaaagctgacaaaatgaccagatctcattaaacaatgttgccgatgactatatccaaaccggcagcctgctttacatagccctggctttacgaagagcccacagtcatcaaaaagtacca

SEQ ID NO: 83491 - DNA, 322 bp, Homo sapiens
ctacatggaatcataagtgttcctaaaaaaggaagacagatttgaagacagaggaggaaggtgatgtgatgatggaaacaaggggagaaaacgcaatgtgatgtggccatgaaccaagtaatgaggacagcctacagaagctggtcaaggcaaggaaacagattctcctctaaagtccctggagagggcctggccatgctgacaccttgattttgtcccagagaaactcattttggatttctggcctccagaaaagtaagagaataatgtgctgttttaatgtcaggtttggggtaatttgttatagcagccataggaaagg

SEQ ID NO: 83492 - DNA, 365 bp, Homo sapiens
gggggttcagcgacggtcagtgccattcacaggtcactgtgatgtgggttgtggcggccaagccatggtttggggtcccgtatccctgggcttatgacatcattgtagtagcccatccccacagaaccacggtgtgtggtggcgctgaggcatcgtagatggtggaaatgctactggcttccccatgctctgccctgaggcctgactgcctcactccccttctcagttatgttccaggccccccgagcttcctggctggacagcttctctcctgggggccgttttgtcacagtgaccctgtgtttctagtcccaaatctgggtgctatagtctctttttagcgtggtggttgtcttagtcttttt

SEQ ID NO: 83493 - DNA, 810 bp, Homo sapiens
gggccagtggggccaattctgagcttgcttcctgctttctactctgtcatagaaagtatcaatataatgtcagaggttcagatctctgtgttaatattgcagagctctgacatcaatttctcattctgaagcaagttaattgttctgtaatataattgagggggtgtagggggattctaattaagtacaaaaaattatggagccaaaccgctggcattcaaatgctagttccaccacttactagctgtgtgatcttgggcaagttacttacctgtaaaatggggataattatagtacttatctcacttgatacttagcagattatgtgaatacatagacatcctcgaacagtacctggtgcaaaataagttactgtgtaactgttagcttttataaatagtattgttattcggcagagggagtccctacagaggagccaggagctgatgttaggagctacaataacatggcattctggttatataattaaatgcaagttgtttgcttttgcaaaagaaaatggaaaacaaggaagggagagccaatatttttagaactatagaaacgagagtaacaaatcttataacagggagtaacctctggttttgcgatcagctgtttttcatttataccgcagatgggcagaaaaagtactggtcaataagcataggggtttgtagagtaagatgattctgcactacatatacaagaaattgcttctggttacttgcatgcttcaaaggtttgatctagaagtttgcacataaattgagaaattagggtaagaattaaaaatgtagtaaatgaaga

SEQ ID NO: 83494 - DNA, 378 bp, Homo sapiens
cagacaatttatttttctattttccatgaagaaggagagggacaattttagattcaccagtgtgcaggacaaattcttacttaacctatagaggagcaaactttcttcaaacacattaccaatacaattgtaatactaagaatcaataccatagttctcgatgtagcatgactacaaattgtcacagtagattttggatgactttaccatagccacacttaatgaattattatttatatttctatttgtactttaataaaactatattttaaactttaaaattgtcatttaaattactaaagaaaatgagtagttcccataatgaatccataatgttaagaatttgctttagcaatgagactatattcactagctttg

SEQ ID NO: 83495 - DNA, 701 bp, Homo sapiens
tttagagttaacctttttttaaaaattagaaaagcataattttttaaaatttcccaagggacagcagtatgctacacttataccttagcttgttacagatgatgctaacttgggagtatgtttgaactgtgaagtcaaaagcaattttcatttttcaataaataaggatactacagacacccttctcccaaatgaagttagcattacattagtgtgcaagtcagtcactggtagccagtgtcatgtccacaaagccagggtacagggtaaagaatctggaagtggagaccctttcttgcaagaaaaactcacttcgaccccctatgattccatctccaacctgaccaatcagcactccccacttcccaagcccctacctagcaaattatctttaaaaactctgatgcctgaatgctcagggagactgatttgagtaataataaaactctggtctcccgcacagccagctctgcatgaattactctttctccattgcaattcccctgtcttgataaatagactctgtctaggcagcgggcaaggtgaacccattggatggctacaaactaaagaatctcaggacaagcaaaagccattccaaaggtccttgggcaagtgtctaatttccttctgctgtcatccacaagcaaaactgtagtttaccaactatcaatgcaaacaagttttaaagctgtctcaaa

SEQ ID NO: 83496 - DNA, 525 bp, Homo sapiens
gatgccttctgaccctgtggtttggcatctcactcctaccttcccttcctaggtgcttggccaagtccatacactcctgctctccagaggagccctcccaacaggtgcaggacttggaaaaagtcacctgagagaggagcagcagcggcttccacatacaggactttctaacagtcctcttgtctctaaggttaatcgtgatctggctaataattggtggagtgtccacaggaggggctaccactagccctgaaaagggtaaaacttcgatatactgacttgtccacaaattgaaggggaaaaaaaagcaagttatagacacgaagaatgtgacacccttagcaaacaaaacccattcatgcttgcataagcataaggaaggatacatttctgagtgtacacacccatgctttacaagggctgcctggtcacccaagagcagggagaccagggcagaagaagggataagacctttaactttaagctttctatattgtttcattttgtgatgacgaactcaaatta

SEQ ID NO: 83497 - DNA, 372 bp, Homo sapiens
tgttgtcctacaaaatccccatcaagtacctgcgtgtcttccacccctaccactttgagctggtgaagcccactgagtctgggaaagccgatgaagccactgccaagacccagttgtacgcaacagtcgttcggaagagcagcttcataccccgctacatcggctgcaaccacatggctctggagatctttctccggggagtcaacgagcccctggccaacaaccccaaccccatagtggtgattgcccgggtcgttcccaactacaaggaatttaaggtcagccaggctaacagggacctggcctctgtggggctgcccatcaccccactgtccttccctatcccgtccatgatgaactttgacgtgcctc

SEQ ID NO: 83498 - DNA, 1955 bp, Homo sapiens
  misc_feature (21)..(21): n is a, c, g, or t
  misc_feature (24)..(25): n is a, c, g, or t
cccgttcgacggagactctcnaannttttttttaaaggttcattattgctttctacctgctttgtcttaagcaggtagaaagccataatgaacctttaaaaaaaaaaaaagtttgagaggaaaatgtttcaaacttctctgaaagtcacttttctgtgtccaataacaattgactcacgaagcacatacgtcttatgttgcctgcaggaccgtttgcaccttttctggctttttatccatttaataatccaaagaacagacttttaagaaaagtagacttcaacgaatattgtatgtatgtagatttacagactcagtgttggaagccttagccaccaacaagtttaatcttacccacaacgttgccgagagatggtcatctacactctggaggtttccattgagcccgtgttactctgtcagggacagctgattcgattgttagccagatattagaaagttcttccttatattgtgatataatgtacctccttgtagccccagtctgtttgtccctggatgaagctagaaccattctataccctcttgaggacaacagccttccagatatttacattcaagagagactgcaaattagccccttttgggtgttttattcagtctgcagaagattttagtttttttaatacttgccaacatttaaagatcagaaagttgtatataacaaatgcagatttccagctactctttcaaatctggaagatctagtaaccatagatcttaattctcccaagtcaacaactgggctgaagctgagagcagctgtcactactagctgctttccacctggtggaagagacactttctaccacttggcctgcttcattgatagccagtaggtgccactataacatctctcttccatctatttttctcaactaccctctgccattgtgccatggtgtccagagttctcatgagttgaggttccctcctttggatatttggcagttgtactttatgcagttcagccaagaactaaacacaggccttcaggtgtggtcagagtacagtgggccagaggtcctttcttttcttcatgtggtcatacacctctgttaattcaacttaagtttatattacttttgggggtgggagtggggaagaggatcacattgttgacttgctggaagcattatgtcaactaaaatccttcagttcttattttcatcatgctgttgggttctccctatgttgtttctttttaaaaacaccaaatgcagaacttcccttttatactgcttctatttcatcttgttgacttgtagcctatcagagtatgattctttattgtcatctaaggtattctgatataatcactgcatgtctaaattctagttattgactaaatgctacttgagaccattctcttggttgtcacattattttacagttgaagaaactgaaccttagagaggttaagtaccttgttaaaggccacctggctggaacataacatcctggtcattttaactactaatgctgtcatgaaagggagttagccagggcaggtgtgaatagagcattctagcataagcagccaacaattagagcaactgtgtatttttagtgtgtggatagcaaatctttgctgtcttggaagttactatcttagaagcatggtattaagccctctattcaatgtggtgttcacatcagtagcattggtttcatttgggagctttttagaaatgcagaactcaggccccactccaggcctaaggattcaatctgcattttaagaagtgacccatatacacattaaagttttagaagcattgctgtagtatcctattttccacactttagtcatttgcatatcacttgtgcaactttggctttatctgcatacttcctgaagggggcctgcccctccacacctgtgggtatttctcgtcaggtggagatgaaagaatgagaaaagaaataagaca

SEQ ID NO: 83499 - DNA, 244 bp, Homo sapiens
agactttaagggtaaaaggaacacaatttgctgatggaatggacggtggggatatgagaacaagagcacagttaaggataaagccaaagctcttggcctgagcgatgagacacatggaatcaccaattatagggatgggaaagagtaccagagagcaggaatgggtgggaagatcaagagttgggttttggaagtttcagtgcctagcggacatcaggtggagctgttagtaggcagggggata

SEQ ID NO: 83500 - DNA, 461 bp, Homo sapiens
gaagacaaacaataaatatataatatgtcaggtggtattaaatgtatttttttgtggccatcccgcactgagacaggatgcattccacactcaaaatttggttcacatgtccagactgatagccaagttcagtggctcacgcctgtaatccagcactttgggaggccgaggtgggcagatcacgaggtcaggagatcgagaccatcctggctaacatggtgaaaccccatctctactaaaaatacaaaaaattagccaggtgtggtggtgggcacctgtagtcccagctactagggaggttaaggcgggagaaatggtgtgagcctgggacagtggcagcttgctgagtgggccatgagtaggagaccttctgtgaagccagggcagcgcccccctgctctgacgtagcgcgacgaaaaaaaaagcacattgatgtgttcgcttagggacgcgtaatcacc

SEQ ID NO: 83501 - DNA, 1008 bp, Homo sapiens
gaagacaaacaataaatatataatatgtcaggtggtattaaatgtatttttttgtggccatcccgcactgagacaggatgcattccacactcaaaatttggttcacatgtccagactgatagccaagttcagtggctcacgcctgtaatcctagtacttagggagaccaaggcaggaggatcacttgaggccaggagttcaaggccagcctgggcaacagagagagacccccatctctgcaaaaaaagaaaaaaaattttttaattatctgggcatggttgtgcacacctgttgtcccagctgctcaggaggctgaggcacgagaatcacttgagcccagaagttggaggctacagtgagctatgattgtttcattgcactgtagcctgggcaacacagtgagaccctgtctcaaaaagaaaaaaaaaatgactgatgaagccacacacacaccaacagagtatgaaagggttgttactcacataatgaagctttctggggaaagcagggcagctcctaagcaggatttgacaacagggaaggagactgacttggagttttttggtggttagggagtagggccagagtgatgtttcttgcatgtggtttgaatttcccactggtatcaaagaaggaaacacccaggcttgcttgctttatttttttaaagagatggtgtctcactatgttgcccaggctgggctcaagtcatcttcctgcctcggcctcccaaagtgctgggattacaggcatgggccaccatgtctggcgagcacccaggctttcttagcttgccagaggtgtagggcataaggggacgaggggtgggataaggcttaaaagccaccagcagtcaaacataaattaagtcagattcttaattacagatttcagatctgatttcagatcagagcttatttcaggtcagattccaggtgtagagatcatctgaagcagtcctgggcctcttcacactacagataccaacactgcctttactcttccatt

SEQ ID NO: 83502 - DNA, 666 bp, Homo sapiens
gcccgctgcccttctcttctgttctttgctctttccaagcttcctttcagtcctcctcatcagacatgacctttgaggaagtgatgagtctgctatgtgtgagacagagcccctgttgtgaagtagaactcagggttcgtcctcagaagcctcggtgggtcaccatacgtcctgcaagtgctgtcagtctgctttgattcgtgtgagggagaagtccctgccaagtgctctgtagtaggcattcaggccaaccaaagaacagggcagggtcctgaggcacaggctcagagctcttgcttatttcatggggtgtttaaattgaggtataatccctatcacagtgaacgacacgcatacttccaatcttgagtgtgccaccagagaactgttgatactccccagatctgcacccagccagggcaaactgtgcaccactcttctgacttccatggccagccgagacatttggaatctctgtgcaatcacactctgtgccatctttttttcgagacagggtctcgccctgttgcccagggtagagtgcagtggtacaatctcggctaactgcagtctcgacctcctgtgggctcaagcaatcttcccacctcagcctcccaagtagctggtactacaggtgctcaccaccatgccctgctaatttttgtg

SEQ ID NO: 83503 - DNA, 457 bp, Homo sapiens
agaagacaaaaaacccacaacccaaaggatgggattttacatctcaagacatctcctagcaaaactgcatttcccaagctcctcttctctcaatgggtcacatgacttgttctagccaatagaacgagggtggaagtaatgtgaccactttcaggtgtcccctaaagtctcctgtgagatcttccaatcttgctctcctcactctgcatggctggaaatgaatactctgatatctgaaacaacatgatgaaggagccaggatgcctaagttcaccacttagagaagagacagcttgaagagtcattctggagaactggctgaccaaactcattggattgtaacagaatataaaccttttattctgatatgccagaggcacattatggattgtattacaatgactagcattagctgtcctgattaatagacactgtgacaagattctttattgctaaa

SEQ ID NO: 83504 - DNA, 440 bp, Homo sapiens
caagaggacagcaccaggggcaacatgacaaagtttagaggggaatggaaataaaaaagaataaagcaagaggtgggtcaacagcaagaaacaagagggagaaaacgttctgactttgtgtttactttaatgtgcttctaggtggggcacagtggcttatgcctgtaaccctagtgctttgggagggaaggcaggaggactgcttgagggcagtagtttgagaacagcctgggcaacatagcatgacccctatctctacaaaaaaaatttaaaaattagccaagcatggtggcgcacagctgtagtcccagctatgcagaaagctgagatgggagggtcatttgagcccagtagttcaaggctgcagtgagctatgattacaccactgcactccagcctgggcgacacagcaagaccctgacttaaaaaaaaaggcttct

SEQ ID NO: 83505 - DNA, 715 bp, Homo sapiens
gccggctccgggcggagaagctgtcgggcgctgtcgcacaaagcgattttgtgcctcctcccggcgccttcctccactccctgccgcgttcaaggacaaacaaggacctccaaattcgtgttcaaacgccccgcgtggtaggcagtgtgggggggtcagaggagagtctggaaggaacccaaagggtgagcagacctagccagtgaagaacgcacagacatactgacccagcagcccccagaagagaagccagggaccagaagcgcagggcacgggaatgtgtcatgattggcgcacaggctgtggccccaccgctgcctgccttactcccctctgcgcgctgaccttccactcctcctgcaccgaggtccttctcaaaccagaggcttcacacctgttcttccctctggctcagatttcccatccctctttgcacacttaactgctacccgaccctcagtctcagctccagcgtgccttcctggaagaagcttccctgcccacccctccattccctttcccaggttcccacagccccctaagctgtgctttccacgtctacaatcatatatatttcttaaatgccgtataagtttccagcggctcctgtaacagatgaccacaaactggatggcttaaaacaacacgtatgcattgtctcccagctctagaggctagaaattggcagtcaggatgtgtgtaaggccacgctccc

SEQ ID NO: 83506 - DNA, 806 bp, Homo sapiens
gataactccaaggtgtgtggctttatcatctgagtgctgtggtgccattagttgagacagcaaacactgaaggacagagaggatatatagatataaaattacattttggacatgctgctcttgaggtacccaaggaaaatttccagaagggagatatctatatatatgtttgcagctccgaggagagatacggaattcaggtctcagtgttacgtgtgtctctgtattagaatgctttttctgacacccatactcaccccctactggaatcagtggcattctaccgtcctttataacactgatctcacttgtcattatttgctcagcatttatcttcctcactagaaggtaaagaatgtgcctgtcttcttaagttccttaagacggagcacaaagtaggcatatgcagtaaatatttactggatggttgaatgagtaaccgatttgagggccaccagtaggactgaagtcacagtaaatgacaagaaaaagagaaccaatgatggcatcatcaaggggtaaaagctgcatttaagaagatggcagaagaaaagaaaacggtaagggaaagggtcactcaatggagtgaaagaagaaaactaagtaagtactaatttgtcacctccacagggtcaaatgctgcagggaagtcaaggaagaacttaaaagggtccgtccattaagactgaacaagagttgatgtcaagctgggcaagaagactcggaggaatagtgtggatggaaaaaaggaaagaaagcggaaataatacagaacaggggagagctgaacagctttggtatcccct

SEQ ID NO: 83507 - DNA, 1268 bp, Homo sapiens
aaaagttagccaggcatgttggtgtacatctgtagtctcagctacttgggaggctaaggtggatgtgagtatcacttgagaccagggagaccaaggctgcagtgagctgtgatcacaccattgcactatacagcctgggcaacagagtgagaccctatctcaaaaaaaaaattatttcttcaaaaattaaaaattaaaaatgttttttaaaaatttccttatgggctgggtgcagtggctcatgcctgtagttccagctacttgggaggcggaggtgggaggatcacccaagcctggcaaggtcaaggctgcattgagctgtgatcttactactgtattccaacctcagtgacagagtgagaccctgtcttaaaaaaataaacataaaaaaaattccctatggtggaaggatcataaagatcataatttcctctcggatattttgattaataaatttattttaatgtgagttgcatgttttctgtttgtttaaattcttaggcattttctttatgatggagaatgtttcaagaataggattcctgtattaaaaagtaaacatttgtggggattttgtttttgtttgcttcattttacttttggtaaatgttttctgttgaaaataagctaaatgtttactgatatgagactggaaaagtaatgttataaacatcttttggagttctgtacttcgaatataatgaagcagatctattaatgcaagaaattgtttgtataaataaattgttaaaatttacaaaccacagtaaaaaaaaaagccatttccaatttttcataaaacatatatgtgtatttgcaaagaaatatctagatttgttcattaaatgttaacaccagttaattcaaggtgagattaattatttttaagtaagtgttgctttcaaaatagaaataaaacaatgaaagcaactttcgttttagttaaaaaataataataataagttggccaggcacggtggctcacacctgtaatcccagcactttgggaggcccaggtgggcagatcacttgaggtcaggaattcgggaccagcctggccaacatggtgaaatcctgtctctactaataatacaaaaattaggcgggtgtgatggcttgtgcctgtaatcccagctacttggaggctgaagcatgagaatcacttgaacccgggacacggaggttgcagtgagccgaaatcatgccactccagccactccagtccactccagcctgggagacagagtgagactctgtctcaaaaaaaa

SEQ ID NO: 83508 - DNA, 472 bp, Homo sapiens
attcaaaatgaaacacaaagagaaaaaggaatttagaacctgtgaactatgggttaacttcaggtgaccaaatagacgtgtaattggagtcccagaggagagaagtgatgggggatagaaaaaatatttgaagaaataatggctaaaatttttccaaaattaaaaataacagctgggcatggtgtctcaggcctgtaatcccagcaatttaggaggctgaggtgggtttacaccgtgttagccaggatggtctcgatctcctgacctcatgatctgcccgcctcggcctcccaaagtgctgggattacaagcatgagccaccgtgcccggccatagaattttgtctgttttctaagtagaaatacaagttcaggacttctgctcatttgaaataaaagggactgaatttatacttccacctgaaacaatttatttaaaaagacaacatatgttaataatggttggtttggta

SEQ ID NO: 83509 - DNA, 305 bp, Homo sapiens
ccagcacagatgcacagcaaatagtgctgaataaagacccagctactgctagcttaccctgctccaaacattcaccaagtcctcagcaaagagggccatccattcacctcttctaaaaacacactgagctccccagtctataccccaagatatgcttggctcccaactatactttctctctccactcccgggagtgggggagggtacaggttttaaataaaatgtgttgggtaattagagaagttgctggttggggaaagaggactgaaaacaattcaggaagataaacagacaatctctcctct

SEQ ID NO: 83510 - DNA, 356 bp, Homo sapiens
aatacacaaacaattatatttctcggtatagacatatatataactttgaacccgagttctccaactatcctttatttgggaaaatcagatatggcttctagttcaaatgattatttctcatttataaaaggaagaaatattctgaaggtaaagtacttagtcgactattaaatagagcttgatagagccagaccaaagcagtcacacaacaatgcaaaatattatcttgctccattgtgagctatggttgagtatgactggcttctgacaaaacaattcactacatacctgacctaaattactctgttgtttttaattaaatgaatgtggtatgcaaaaaagcaaaataattaagt

SEQ ID NO: 83511 - DNA, 420 bp, Homo sapiens
tttttttgagatggagtttcactcttgttgcccaggctggagtgcagtggtgcgatcttggctcactgcaagctctgtctccctggttcaagcctgccgagtagctgggattacaggtgcctgccaccacacccagctaatcttttgtatgtttagtagagatggggtttcgccatgctggccaggctggtctcaaactcccgacctcaggtgatccacccgcctcggcctcccaaagtgttgggattacaggtgtgagccaccgcgcctggcctgtgcaggcttttctttccagtgagttcttctgtctttgcctgattcgcccctttctgagatggagaccatgcgctgtccccatgggaagcatttcttcaccgtccgaggccaggctgtaccttcccttctgagttcctgtggtgc

SEQ ID NO: 83512 - DNA, 440 bp, Homo sapiens
tcttttataagggcattaatcccattcatgagggcagagcccccatggcccaatcacctcccaaagtcttcacctcgtaatgccgtcaccttggggtttaatttcccacgtgaattttggagaaacgaaaacattcaaactgcagtactagctaatgcaataagataataaacagaaataagaagcaaatagattgggaaaaaagaaataaaactgtctttgttgacagatgacatgatcatttatatagcaaatccaaaagaattaacaaaaacaccctggaactactaagtggttatagccaagttgcaggatatgagggtaatatacaaaaatctatcactttcctatttatcagcaatgaacaagtgtaatgtgaaattgaaagcatattatcatttacattagtacccccgaaatgaaatgcttaggtagaaatc

SEQ ID NO: 83513 - DNA, 712 bp, Homo sapiens
ctcaccaggtctgattttattgttttgtaagaactgggctttaaaaaaagtcagaccatatgataattttgatattaaaactcttctgaaagactaagtgaatgaactagtcatctatattcactgattaaaaacaaaataagacaaacttactccatagtatagtactttgggtttgtctaattaaaaaaaattcatttacaaataccatttctgaggaacaatagcatttctctaggatacatctacatacatgcaagtgaagaaaatagcttttgtgtttactttatgtcttgtaggagttgtatagctacataagagtattgtaatgcaagaggtacatcataaaaactgctttgttatatgttgtgtgcatgtatatttgtgcatttacatatcaacagcatactcactgttgttcagtagcatattttgtgatgaatgatgaaaccagtacaaattaaatgtgaatttgacttatgaactcttcacatccactacctcataaacattacaagctagagaatgtagggatttgaatccacaaaccacagatgtcaagattaatacattacgttttgattacttgaaactgcctgtacaattgaatttacagttgttttttaaaaaagaaaatagaactgagaagaagtgctacaacaatcatactttgtgatttaaaagaaaataaatactactagttcatgcccag

SEQ ID NO: 83514 - DNA, 965 bp, Homo sapiens
ggttacattgccatcattaatcaatctatttcacagagcccttgaacacttaaatgtttgcttatgcattcacttattcattcaacaagcatttctttagcacttaaaacctgccagagataatcagagattcattagactggcaagtgccatgttataaagataaagatcaataaatatggtaattcttagagttcatgattctaagaagcatatttttttctattttgacatctctaaaatttggacacatcatataattgtgtgtttcaattgtaattggcagtatgttttccttaatggtaaataaaataagagtgtcttacaattgatgtcttagatttgatgaaatacggtacatttctaaacaatcataaagttttaagatctcaaagcaagaaccacatgtaaggtgtcttcacatttccctaactcctagcacggaatcacactgaatacattttttgctaatcggtaaagaaacatttctctcaaaatcttatctttaggcttaagtttttgctttctgttactttagaatgtttttaaaaattagtatgtaaaatgttatctggcaatattactattcttccattggatagaatagcttaaactttattgacattttaatcctttttttattttatagttcattacttcttttcagcagttacactataccttacaattaggaattcttgggttgtatttccatttctgatttggagatggttgaagtgtatgcttgactgactaggatttagtttaagataaactgataaagtatagctagttttttgttatccatcataataggatgggtaattgtaatttgtgaatgatatctcaaccctttattagtttttttatgacaggtactaatatgtgtcaaagttatactggtttgtattttaaagcttaatgtttcctctttaggggaggtagtaataaatactgaaatggca

SEQ ID NO: 83515 - DNA, 505 bp, Homo sapiens
atggtagcatttcagaggagaaataagaaggcctggatcaaggccggccaggtaaagagaacatataatagtgatatgcaggagataaaattgtcaggataagtgggtagaggggctgtagtaaatggaggtctccatggctcccagtggctttgtagatggcaacacctttatccaagagatcaaatccagatgcaatcttagacccgaggagaataagctgtcaagtttgattctggacatcctgccatttgaggtgtcaagggatgaccttactggaaatgttcttctaggcaaatgtgtaaatgggtctggagtacagaggcaggatttggacggtaacagatatgggcagcagctgaagctgtgtgtacatgagagctctcttttgagagagtttaaaatacgacaagatgaagctctggaggtatccgtgagctgagggagctctgctaagaaggtaaaatgaaggtaaagcaaaagccagaggctaatgtgctcgaat

SEQ ID NO: 83516 - DNA, 345 bp, Homo sapiens
agacagatggaagaaagaaaggatagtcaggatttacataggcagagtcagcaaaggggaagggaaagacattctagatgaaaaaatatcataacaatgtaaaatgttaataacatgctgaagtgttcagagagtagtcagagcaccaaatgaccgacgatgaagagtttatgctgaggaatatttaagtttggaccattttggctacaagtagcaataacccggccaagctaacttaatcaaaggaggaatgtattgctgcattttagggatatcctacccaattcaagaggagggatgtagttgcctctagggacacatgaaagcagagaccagggtgtaaca

SEQ ID NO: 83517 - DNA, 232 bp, Homo sapiens
cgagattagggacacatcactaatatgaaagaaggacaaagaaacataaaaaaggatcaaacacaaatattaggtataaaatcacaatatctgaagtaaaagacatcttgaacaggctatacaacaaaatggatacagttaagaaacaaattaataaattgaaagatcagatttggggaatttccttgaaggagggaacaaaagaaagaaaaatatgtattttttaaattta

SEQ ID NO: 83518 - DNA, 665 bp, Homo sapiens
ctgttgggctcaagcgatcctcccccctcagcctcctgagtagcagggaccacaggtgatggccatcacaccgaactaagtttttattttttgcttgcatttatttatttatttatttatttatttatttatttatttatttatttatttttgagccgagattgcaccactgtactccagcctgggcaacaagagtgaaactctgtctcaaaaaagaaaagaaaagaaaagatgaaactgacacatcagagaattctctgactcatgagatggagacatctgctacagagaaagtgggctaaactgtaaataaagacaaaaaatgtgaggaaagttatttttcccttgcctttacagatgttaatgatttaccttattgtgtcttatgcaacaatattttgaatactgttatggtgcaagttaactgccacatcagtttgagaccaatcattcagagtctgaagaaaaaaaatttaaatgcagatgtgataaattaatatgtcaccaagagaactgtacttctgccttacaatagaatctctggacttactgtattgcttgtacttgtctggtatcagcaccaacttaagcacagaagctcttttatatgaaagttggccacacacccaagtggtagggaaatacttaaagtactgaataactat

SEQ ID NO: 83519 - DNA, 317 bp, Homo sapiens
ttcattgggcacgtaggtaagctgctctcatagcaattaaagttactggatacataaaacatagaacatcctttttagctacctggagatgtttagtgaaactgaaggaaattaattgaaaatgtcttgatttttaacttgctgattttttttagctggcaaaaaattgcaagtacttttttcctgaagtttaggcaaatgaataattctgtaacggcatagatgctggaagaaaaacttcagtatattgtacgtaacatataattagtctattgaccattgatggtagttcagcatagtattatatatcagtatct

SEQ ID NO: 83520 - DNA, 442 bp, Homo sapiens
cacttctgcctacttttctaggtccgtgtgagattatacaggtggaagaacttattgacttaacacaacaatgttcctggagctgtccctttgtgtctttcaaacactggggccaggacatacagttctggggtggccattatggagcctgtgtgaccaactccagggtggtcatgtgagtccatctgtcctaatcaaggactacccttctggcaagacagcctaaccatgccttccaggacctgggattattggctgggacccctcattaactaagtgcttgtacctccctggcacgctgggaactcctgggtctggtcaaaggtctttctgggcctgtcttcagggtctggaaactactagaagaaagttcttccatccgatctgcctacagctgctgctttgcactgtacaaatccatgttgttacctctcacctctgg

SEQ ID NO: 83521 - DNA, 440 bp, Homo sapiens
aattcacatcccctatttggtgagaatatgggaacatgtcattttaatcataactttaaaagttagatttggttatgctctttaagaaatatgcacaggtctctcccactggagaaagtctaaaattaaataaaaattagtattaaatcgtaattaaaaaaacaaaaagggctgggcacggtggcttatgcctgtaatcccagcactttgggatgccaaggcgggtggatcatgaggtcaggagtttgagaccagcctagccaacatcgtgaaatcctgtctctactaaagacacaaaaattagccaggcatggtggcaggtgcctgtaatcccagctactcgggagaatcgcttgaacacaggaggcagaggttgcagtgggtcgagattgcaccacagcgctccagcctgggcaatagaacaaaactctgtctcaaaa

SEQ ID NO: 83522 - DNA, 261 bp, Homo sapiens
aaaaaggccataaatccttgccctcgtggagcttaccttctaataaggagagacagagggtgagaaacaaacaaacaaaaatatgtgagttaacacagagtgttggagggtgtcaggtgctatgggagaaacgtggagcatgtcaaggagagagcaggcaagagggcattctggaaaggcctaggaagatggtgacatttgaccttcatatccaccaacccccagcacaaagcatttgccagaggcagacagaggagggca

SEQ ID NO: 83523 - DNA, 379 bp, Homo sapiens
cctagtctcatttcccttgagtcaaataaggagtttattgaataccacctgtgtgcagagcagtgtgccaagcactagagtccataccaagatatataattccatattgtgattctaaatcgtgtagtctatttgggctctcacaaattaaataacagtacaaaacagtactgtgccaagtgagcagtgaaaataggggctagagaagtcaggaggagagcagtcacgtcgtgacagacctgttaattgctggaaatgtttggtttgatgagggttagtgagcagatggtccagtatctcccaggtgtctgtttgtaatcatcccctgctcctccctcttcagtcacctcccagcccatacacacacacacacacacac

SEQ ID NO: 83524 - DNA, 350 bp, Homo sapiens
  misc_feature (163)..(163): n is a, c, g, or t
  misc_feature (329)..(329): n is a, c, g, or t
ctgtgcagaagtgaacggaaagactcatcattcttagagagtggaattaagactgcgagcaaattggccctttccatggctcccaagggcaacagcgtgctgcacctgccactgtgggtgtgcccggactgccgcaggaccgtggagaaggaggagaggcatngcggccttgaccagccagtgagccaagattttcttcttcactcctcgcttggtggctcccagccagaggccggcagtggtgggaggctcgctctgggtgcacagacgctgccttcagacaccgcatgctcgtgcgaggcctgcagtgagcgcagagaaatttcggnagaggcggaccgggaacctca

SEQ ID NO: 83525 - DNA, 529 bp, Homo sapiens
gttctgcaaaagtgctcacatagctgggcaggatggcggcgcgtgcctgcggtcccagctacttgggaagctgccaggaacccaaggctgctgtgagctatgatgctatgatcaagcctgtgaatagccactgtactccagcctggacaacatggtgagaccttgtctcaaaaaaaaaaagttctcacattgagcgattcaatttctgagtctatgcatttactttaaatacttataaagcacctacaatatagtcaggcactgcaataggtactggggacttagcatgaaaaaaacaacaaaagacctgcccctcaggtgtatgtattttggtggaagacacaaatacacaagtgtaatgtatgctcaatagtgttaaatgtcccagagaaaaataaagaagaaagagtggctgggaggttaaaactcgggatgaggaagatgctactcttttataaaatttggtcagggggctgggtatggtagggtaatcccagcactttgggaggtcgagatgggtggatcactt

SEQ ID NO: 83526 - DNA, 455 bp, Homo sapiens
ctgtagccccagttactcgagaggctgaggcaggagaatcgcttgaacttgggaggcggaagttgcagtgagccaagatcgcaccactgcactccagcctggcgacagagcgaggctccgtttaaaaaaaattaaaagatacctgagagctcactttaatatcaaggtatttgcatccattcccaccctgttagctcttaagggaggagggaaatcaattccaaccatactttcctgtgatggaagatgtttcctcttgaaaaaatgccaatacagatttttaaaacctattgttttccaaatgcactttgtaagtttttgcttttaaaatagcttcttggaaccaattttattgtatttgtacttaatttttgttctcatctaaatgtgcattttctgactgtatagaagaagctttggtatgtaatttaataataaattagaaatctaaatga

SEQ ID NO: 83527 - DNA, 3001 bp, Homo sapiens
gccgtgtctgtgtagaaagaagtagacatgggagacttttcattttgttctgtactaagaaaaattcttctgccttgggatcctgttgatctatgaccttacccccaacctggtgctctctgaaacatgtgctgtgtccactcagggttaaatggattaagggtggtgcaagatgtgctttgttaaacagatgcttgaaggcagcatgctccttaagagtcatcaccactccctaatctcaagtacccagggacacaaacactgcggaaggcggcagggtcctctgcctaggaaaaccagagacctttgttcacttgttgatctgctgaccttccctccactattgtcctatgaccctgccaaatccccctctgcgagaaacacccaagaatgatcaattaaaaaaaaaataatataataataattcttgtcctcttattttacactcataatgagaaatcacaagttctttcttgatgatctgtgctatagatttctactctgtctcctcaactctgttgatatttggggaaaattctgtttttcatagattctttgagatgctgatggaccagcttcagcatgtttgaggttgtctgaaatggagatcactgtaaaactgtctttttcttttaaattacaagtacactggggttaactgtattgctggaaaaacatcaagaatgacagtcttatatttaaggcaccagtcatggtttccattttttttttaattcttcccttggattaatattttctactgaaaagaaatgaaatctcagttccactatgataaaagaaaccgaatcaccagtgtctgtcagtgcccccactgctcctcctcataccagcattgacactggtagctgaggaaggggactgctcaatttctaatgtgatctattcaagaagccacatataaaaaggcattgagggctcactgtccagagaattgcttttgtaaatgctccacaacgtatgggcaaaagtttaaggactactgcctgatgtaccaggaatcctgagttctgtgaaaatctgttcattccaaatctgttaagcatttccaaacatccagagaatggtttcactgttgagggtgcatgtggcagaatctgtctctctctgcacctgtcttctgttaccatccctggacagtgacagattttaagccagccaccagaattcttttcgagttaaccatttcttagtttctgtaaattcatgacttgtcttactgaactacagcctggtttgtagacttccaacatctacactgctgctcttcaccattggaattcactgtggtatttatagtattggcttcagtccgagccacaggcaataaaaggatatcagctgtagttctcagctacatcatggtgtatagatgctgttattcaggcgaacttgctcatgggtggactaacacctggtttggtacagagactgagaagtttttcattctggtgtcaaagttttgttacattatgggtgtgaagggcatttgatatatttttcttaactatggggtttatttttctaaatgtgggttgattgactgttaattgattcagggtacccttaaaagaaaagaagttttcccattgtgaaccttaaatgatcagagaagtaagttcattgattaaattctctgttgggagaacaaaacttttctcccttgacactttattatctttgatttttcaaagggccttgattggtggttgtgtctcggttaaaatttatgggactttgctatgtagttggcatttataaaatctgaagtatcataaataaagttatttatttaattatactaccagtcttttttactggtctgattcttttgtgcattcattaaagctgattgtgtgagagtgaactgggacacaagctagtctagctcactgcagccaagcaaaccctgttgatggctgatgggcctttccattagggttttgcttatgtgaagtaatggaattatgttggttattttctttatgaaaataaaccagttcttccaaggaagttaaaaggcttggtatggatgttggtgtcagataggtctgactaacctctccgtgctgcagcctatactaaggtgacccagggccacatgtagacagctaggccagtgctttttcctcttagggtttctttgcagaaagaaacctccagcaagggaagagaggtgtgtgtccacaggaaggggctccgtggggatcccatgaagggatttgagctctttcagctccatgtcatttaacttttttgtttaaccaccttggctttctctccttttttgctgtcctccttacggaccagttaccagattcagaggctaacagttagttacttgttaatgctagtcacagccaggaggtcagaaggaattttctacttctggatccaaatgttacctcttaggggaagttatgccccctcaactattgtcttattataatgaatctttcctttttggtccttttaagtaaccactcaaaacttttcatttcactgaaaaaatatgaaaaaccatgacaatagggctgggtgcagtggctcacgcctgtaatcttagcactttgggagaccaaggcaggcggatcgtttgaggccaggagtttgagaccagcctgggcaatgtagcaagactctgtctctgcaaaaaaaattaaaagatacctgagagctcactttaatatcaaggtatttgcatccattcccaccctgttagctcttaagggaggagggaaatcaattccaaccatactttcctgtgatggaagatgtttcctcttgaaaaaatgccaatacagatttttaaaacctattgttttccaaatgcactttgtaagtttttgcttttaaaatagcttcttggaaccaattttattgtatttgtacttaatttttgttctcatctaaatgtgcattttctgactgtatagaagaagctttggtatgtaatttaataataaattagaaatctaaatga

SEQ ID NO: 83528 - DNA, 2626 bp, Homo sapiens
  misc_feature (76)..(76): n is a, c, g, or t
ctctctgacagctaaatatactatcgttaccatccctagtagctctgttagcgatcatacgacgtagacctgcggnacacagtcgagcaagttctttcttgatgatctgtgctatagatttctactctgtctcctcaactctgttgatatttggggaaaattctgtttttcatagattctttgagatgctgatggaccagcttcagcatgtttgaggttgtctgaaatggagatcactgtaaaactgtctttttcttttaaattacaagtacactggggttaactgtattgctggaaaaacatcaagaatgacagtcttatatttaaggcaccagtcatggtttccattttttttttaattcttcccttggattaatattttctactgaaaagaaatgaaatctcagttccactatgataaaagaaaccgaatcaccagtgtctgtcagtgcccccactgctcctcctcataccagcattgacactggtagctgaggaaggggactgctcaatttctaatgtgatctattcaagaagccacatataaaaaggcattgagggctcactgtccagagaattgcttttgtaaatgctccacaacgtatgggcaaaagtttaaggactactgcctgatgtaccaggaatcctgagttctgtgaaaatctgttcattccaaatctgttaagcatttccaaacatccagagaatggtttcactgttgagggtgcatgtggcagaatctgtctctctctgcacctgtcttctgttaccatccctggacagtgacagattttaagccagccaccagaattcttttcgagttaaccatttcttagtttctgtaaattcatgacttgtcttactgaactacagcctggtttgtagacttccaacatctacactgctgctcttcaccattggaattcactgtggtatttatagtattggcttcagtccgagccacaggcaataaaaggatatcagctgtagttctcagctacatcatggtgtatagatgctgttattcaggcgaacttgctcatgggtggactaacacctggtttggtacagagactgagaagtttttcattctggtgtcaaagttttgttacattatgggtgtgaagggcatttgatatatttttcttaactatggggtttatttttctaaatgtgggttgattgactgttaattgattcagggtacccttaaaagaaaagaagttttcccattgtgaaccttaaatgatcagagaagtaagttcattgattaaattctctgttgggagaacaaaacttttctcccttgacactttattatctttgatttttcaaagggccttgattggtggttgtgtctcggttaaaatttatgggactttgctatgtagttggcatttataaaatctgaagtatcataaataaagttatttatttaattatactaccagtcttttttactggtctgattcttttgtgcattcattaaagctgattgtgtgagagtgaactgggacacaagctagtctagctcactgcagccaagcaaaccctgttgatggctgatgggcctttccattagggttttgcttatgtgaagtaatggaattatgttggttattttctttatgaaaataaaccagttcttccaaggaagttaaaaggcttggtatggatgttggtgtcagataggtctgactaacctctccgtgctgcagcctatactaaggtgacccagggccacatgtagacagctaggccagtgctttttcctcttagggtttctttgcagaaagaaacctccagcaagggaagagaggtgtgtgtccacaggaaggggctccgtggggatcccatgaagggatttgagctctttcagctccatgtcatttaacttttttgtttaaccaccttggctttctctccttttttgctgtcctccttacggaccagttaccagattcagaggctaacagttagttacttgttaatgctagtcacagccaggaggtcagaaggaattttctacttctggatccaaatgttacctcttaggggaagttatgccccctcaactattgtcttattataatgaatctttcctttttggtccttttaagtaaccactcaaaacttttcatttcactgaaaaaatatgaaaaaccatgacaatagggctgggtgcagtggctcacgcctgtaatcttagcactttgggagaccaaggcaggcggatcgtttgaggccaggagtttgagaccagcctgggcaatgtagcaagactctgtctctgcaaaaaaaattaaaagatacctgagagctcactttaatatcaaggtatttgcatccattcccaccctgttagctcttaagggaggagggaaatcaattccaaccatactttcctgtgatggaagatgtttcctcttgaaaaaatgccaatacagatttttaaaacctattgttttccaaatgcactttgtaagtttttgcttttaaaatagcttcttggaaccaattttattgtatttgtacttaatttttgttctcatctaaatgtgcattttctgactgtatagaagaagctttggtatgtaatttaataataaattagaaatctaaatga

SEQ ID NO: 83529 - DNA, 3993 bp, Homo sapiens
gccgtgtctgtgtagaaagaagtagacatgggagacttttcattttgttctgtactaagaaaaattcttctgccttgggatcctgttgatctatgaccttacccccaacctggtgctctctgaaacatgtgctgtgtccactcagggttaaatggattaagggtggtgcaagatgtgctttgttaaacagatgcttgaaggcagcatgctccttaagagtcatcaccactccctaatctcaagtacccagggacacaaacactgcggaaggcggcagggtcctctgcctaggaaaaccagagacctttgttcacttgttgatctgctgaccttccctccactattgtcctatgaccctgccaaatccccctctgcgagaaacacccaagaatgatcaattaaaaaaaaaataatataataataattcttgtcctcttattttacactcataatgagaaatcacaagttctttcttgatgatctgtgctatagatttctactctgtctcctcaactctgttgatatttggggaaaattctgtttttcatagattctttgagatgctgatggaccagcttcagcatgtttgaggttgtctgaaatggagatcactgtaaaactgtctttttcttttaaattacaagtacactggggttaactgtattgctggaaaaacatcaagaatgacagtcttatatttaaggcaccagtcatggtttccattttttttttaattcttcccttggattaatattttctactgaaaagaaatgaaatctcagttccactatgataaaagaaaccgaatcaccagtgtctgtcagtgcccccactgctcctcctcataccagcattgacactggtagctgaggaaggggactgctcaatttctaatgtgatctattcaagaagccacatataaaaaggcattgagggctcactgtccagagaattgcttttgtaaatgctccacaacgtatgggcaaaagtttaaggactactgcctgatgtaccaggaatcctgagttctgtgaaaatctgttcattccaaatctgttaagcatttccaaacatccagagaatggtttcactgttgagggtgcatgtggcagaatctgtctctctctgcacctgtcttctgttaccatccctggacagtgacagattttaagccagccaccagaattcttttcgagttaaccatttcttagtttctgtaaattcatgacttgtcttactgaactacagcctggtttgtagacttccaacatctacactgctgctcttcaccattggaattcactgtggtatttatagtattggcttcagtccgagccacaggcaataaaaggatatcagctgtagttctcagctacatcatggtgtatagatgctgttattcaggcgaacttgctcatgggtggactaacacctggtttggtacagagactgagaagtttttcattctggtgtcaaagttttgttacattatgggtgtgaagggcatttgatatatttttcttaactatggggtttatttttctaaatgtgggttgattgactgttaattgattcagggtacccttaaaagaaaagaagttttcccattgtgaaccttaaatgatcagagaagtaagttcattgattaaattctctgttgggagaacaaaacttttctcccttgacactttattatctttgatttttcaaagggccttgattggtggttgtgtctcggttaaaatttatgggactttgctatgtagttggcatttataaaatctgaagtatcataaataaagttatttatttaattatactaccagtcttttttactggtctgattcttttgtgcattcattaaagctgattgtgtgagagtgaactgggacacaagctagtctagctcactgcagccaagcaaaccctgttgatggctgatgggcctttccattagggttttgcttatgtgaagtaatggaattatgttggttattttctttatgaaaataaaccagttcttccaaggaagttaaaaggcttggtatggatgttggtgtcagataggtctgactaacctctccgtgctgcagcctatactaaggtgacccagggccacatgtagacagctaggccagtgctttttcctcttagggtttctttgcagaaagaaacctccagcaagggaagagaggtgtgtgtccacaggaaggggctccgtggggatcccatgaagggatttgagctctttcagctccatgtcatttaacttttttgtttaaccaccttggctttctctccttttttgctgtcctccttacggaccagttaccagattcagaggctaacagttagttacttgttaatgctagtcacagccaggaggtcagaaggaattttctacttctggatccaaatgttacctcttaggggaagttatgccccctcaactattgtcttattataatgaatctttcctttttggtccttttaagtaaccactcaaaacttttcatttcactgaaaaaatatgaaaaaccatgacaatagggctgggtgcagtggctcacgcctgtaatcttagcactttgggagaccaaggcaggcggatcgtttgaggccaggagtttgagaccagcctgggcaatgtagcaagactctgtctctgcaaaaaaaattaaaagatacctgagagctcactttaatatcaaggtatttgcatccattcccaccctgttagctcttaagggaggagggaaatcaattccaaccatactttcctgtgatggaagatgtttcctcttgaaaaaatgccaatacagatttttaaaacctattgttttccaaatgcactttgtaagtttttgcttttaaaatagcttcttggaaccaattttattgtatttgtacttaatttttgttctcatctaaatgtgcattttctgactgtatagaagaagctttggtatgtaatttaataataaattagaaatctaaatgattgcatttgtaattgtttatattgaaacagtaaccatcaaggtagtttggggatagagattatggtatctctggtgttgataagtgtttctcatgatgtcctgaaacccaggatgaaataatacaggtgctgaaaagctgtcacatgtcattcagaaaccatcatatgaacagtccactagtattttagccctagaagtgaaggggaatctcttaacatgaaacttcaggaggcataatgggaatctacaattgtagaattggctgggtgcagtggctaacacctgtaatcccagcagttcgagaggccgaggcaggaggattgcttgagaccaggatttgagaccagtctgggcaacacagcaaagaccttgtctctacaaaaactaaaattagccattcatgatggtgtgcacctatagtcccagctactcggaaggctgaggtaggaggatcatgagcccaggaggtcaaggctgcagtaagcaacgattgtgccactgtactccagcctgggtgacagagaccctgtctcaaaaataaattaattttttaaaaatcgtgtactgctgggctttagtacattagttgtgcaaccagccccactgtctaattttagagctttgcaattaatccagccagtgatcaattcctcttctataaaatggtgataaggatggctaccataattgtgccctgattatattgtcagggttatgtgaggaaatgctcataagcatctcagcaaagccaggggtacagggctcacctgacataagagatatccttgggtttgtcctaatagcgagaaaccgggcctcttttgcctctttttttccctcttgctgatgtgggagaggagagaacattcaagaggtgatcagcagacatccttaattttgataaaggcagctgagcgggaaatataaggtcggttctgtgtagatagacaggtggaacccagcaatcagtttaaccagcctccaagcggtt

SEQ ID NO: 83530 - DNA, 3372 bp, Homo sapiens
gccgtgtctgtgtagaaagaagtagacatgggagacttttcattttgttctgtactaagaaaaattcttctgccttgggatcctgttgatctatgaccttacccccaacctggtgctctctgaaacatgtgctgtgtccactcagggttaaatggattaagggtggtgcaagatgtgctttgttaaacagatgcttgaaggcagcatgctccttaagagtcatcaccactccctaatctcaagtacccagggacacaaacactgcggaaggcggcagggtcctctgcctaggaaaaccagagacctttgttcacttgttgatctgctgaccttccctccactattgtcctatgaccctgccaaatccccctctgcgagaaacacccaagaatgatcaattaaaaaaaaaataatataataataattcttgtcctcttattttacactcataatgagaaatcacaagttctttcttgatgatctgtgctatagatttctactctgtctcctcaactctgttgatatttggggaaaattctgtttttcatagattctttgagatgctgatggaccagcttcagcatgtttgaggttgtctgaaatggagatcactgtaaaactgtctttttcttttaaattacaagtacactggggttaactgtattgctggaaaaacatcaagaatgacagtcttatatttaaggcaccagtcatggtttccattttttttttaattcttcccttggattaatattttctactgaaaagaaatgaaatctcagttccactatgataaaagaaaccgaatcaccagtgtctgtcagtgcccccactgctcctcctcataccagcattgacactggtagctgaggaaggggactgctcaatttctaatgtgatctattcaagaagccacatataaaaaggcattgagggctcactgtccagagaattgcttttgtaaatgctccacaacgtatgggcaaaagtttaaggactactgcctgatgtaccaggaatcctgagttctgtgaaaatctgttcattccaaatctgttaagcatttccaaacatccagagaatggtttcactgttgagggtgcatgtggcagaatctgtctctctctgcacctgtcttctgttaccatccctggacagtgacagattttaagccagccaccagaattcttttcgagttaaccatttcttagtttctgtaaattcatgacttgtcttactgaactacagcctggtttgtagacttccaacatctacactgctgctcttcaccattggaattcactgtggtatttatagtattggcttcagtccgagccacaggcaataaaaggatatcagctgtagttctcagctacatcatggtgtatagatgctgttattcaggcgaacttgctcatgggtggactaacacctggtttggtacagagactgagaagtttttcattctggtgtcaaagttttgttacattatgggtgtgaagggcatttgatatatttttcttaactatggggtttatttttctaaatgtgggttgattgactgttaattgattcagggtacccttaaaagaaaagaagttttcccattgtgaaccttaaatgatcagagaagtaagttcattgattaaattctctgttgggagaacaaaacttttctcccttgacactttattatctttgatttttcaaagggccttgattggtggttgtgtctcggttaaaatttatgggactttgctatgtagttggcatttataaaatctgaagtatcataaataaagttatttatttaattatactaccagtcttttttactggtctgattcttttgtgcattcattaaagctgattgtgtgagagtgaactgggacacaagctagtctagctcactgcagccaagcaaaccctgttgatggctgatgggcctttccattagggttttgcttatgtgaagtaatggaattatgttggttattttctttatgaaaataaaccagttcttccaaggaagttaaaaggcttggtatggatgttggtgtcagataggtctgactaacctctccgtgctgcagcctatactaaggtgacccagggccacatgtagacagctaggccagtgctttttcctcttagggtttctttgcagaaagaaacctccagcaagggaagagaggtgtgtgtccacaggaaggggctccgtggggatcccatgaagggatttgagctctttcagctccatgtcatttaacttttttgtttaaccaccttggctttctctccttttttgctgtcctccttacggaccagttaccagattcagaggctaacagttagttacttgttaatgctagtcacagccaggaggtcagaaggaattttctacttctggatccaaatgttacctcttaggggaagttatgccccctcaactattgtcttattataatgaatctttcctttttggtccttttaagtaaccactcaaaacttttcatttcactgaaaaaatatgaaaaaccatgacaatagggctgggtgcagtggctcacgcctgtaatcttagcactttgggagaccaaggcaggcggatcgtttgaggccaggagtttgagaccagcctgggcaatgtagcaagactctgtctctgcaaaaaaaattaaaagatacctgagagctcactttaatatcaaggtatttgcatccattcccaccctgttagctcttaagggaggagggaaatcaattccaaccatactttcctgtgatggaagatgtttcctcttgaaaaaatgccaatacagatttttaaaacctattgttttccaaatgcactttgtaagtttttgcttttaaaatagcttcttggaaccaattttattgtatttgtacttaatttttgttctcatctaaatgtgcattttctgactgtatagaagaagctttggtatgtaatttaataataaattagaaatctaaatgaaaaaaaaaaaaaaaaaaaaaaaaaaaaaaaaaaaaaaaaaaaaaagggggggggggcaaaaattcccccggggggggcccattttggggccccgtttttttgaaaaagggggggcccattaaaggagggggtgtaataaaaagcagaagaggacaagggcggcgtgtttaaaaaacacgtcgagtgagggaggaaaacgtggtagtctgggaggatctattgggggaagagcccccaacttcgggggtggggaacatattgggaaacatacccaacagagatttagcagctcagggaagattaaatttaagtggtaatgtcggaacacacggcatgtcggggtaaaatttgtcacgaatggtcgaaattcg

SEQ ID NO: 83531 - DNA, 1819 bp, Homo sapiens
gccgtgtctgtgtagaaagaagtagacatgggagacttttcattttgttctgtactaagaaaaattcttctgccttgggatcctgttgatctatgaccttacccccaacctggtgctctctgaaacatgtgctgtgtccactcagggttaaatggattaagggtggtgcaagatgtgctttgttaaacagatgcttgaaggcagcatgctccttaagagtcatcaccactccctaatctcaagtacccagggacacaaacactgcggaaggcggcagggtcctctgcctaggaaaaccagagacctttgttcacttgttgatctgctgaccttccctccactattgtcctatgaccctgccaaatccccctctgcgagaaacacccaagaatgatcaattaaaaaaaaaataatataataataattcttgtcctcttattttacactcataatgagaaatcacaagttctttcttgatgatctgtgctatagatttctactctgtctcctcaactctgttgatatttggggaaaattctgtttttcatagattctttgagatgctgatggaccagcttcagcatgtttgaggttgtctgaaatggagatcactgtaaaactgtctttttcttttaaattacaagtacactggggttaactgtattgctggaaaaacatcaagaatgacagtcttatatttaaggcaccagtcatggtttccattttttttttaattcttcccttggattaatattttctactgaaaagaaatgaaatctcagttccactatgataaaagaaaccgaatcaccagtgtctgtcagtgcccccactgctcctcctcataccagcattgacactggtagctgaggaaggggactgctcaatttctaatgtgatctattcaagaagccacatataaaaaggcattgagggctcactgtccagagaattgcttttgtaaatgctccacaacgtatgggcaaaagtttaaggactactgcctgatgtaccaggaatcctgagttctgtgaaaatctgttcattccaaatctgttaagcatttccaaacatccagagaatggtttcactgttgagggtgcatgtggcagaatctgtctctctctgcacctgtcttctgttaccatccctggacagtgacagattttaagccagccaccagaattcttttcgagttaaccatttcttagtttctgtaaattcatgacttgtcttactgaactacagcctggtttgtagacttccaacatctacactgctgctcttcaccattggaattcactgtggtatttatagtattggcttcagtccgagccacaggcaataaaaggatatcagctgtagttctcagctacatcatggtgtatagatgctgttattcaggcgaacttgctcatgggtggactaacacctggtttggtacagagactgagaagtttttcattctggtgtcaaagttttgttacattatgggtgtgaagggcatttgatatatttttcttaactatggggtttatttttctaaatgtgggttgattgactgttaattgattcagggtacccttaaaagaaaagaagttttcccattgtgaaccttaaatgatcagagaagtaagttcattgattaaattctctgttgggagaacaaaacttttctcccttgacactttattatctttgatttttcaaagggccttgattggtggttgtgtctcggttaaaatttatgggactttgctatgtagttggcatttataaaatctgaagtatcataaataaagttatttatttaattata

SEQ ID NO: 83532 - DNA, 120 bp, Homo sapiens
aagttgtttgacagaagtgtaatctccccagaagtcctgctggacaggcttcacttttcctttggaggaacacagagatacagggaatatgttttaatgacatatacctaacgctgaaca

SEQ ID NO: 83533 - DNA, 671 bp, Homo sapiens
  misc_feature (663)..(665): n is a, c, g, or t
  misc_feature (668)..(671): n is a, c, g, or t
cttttcttctctttgcttatgccaacctgggttcacactcacctctttgtcctgatttttctcagaccgccacaagcatatgtgaaaagcaaacgtcactgaagtttgcttgggtttggtgggcgggggaaggctcttaaatttgcagaaatacaaacagattagaactgaatgttggacattcattctaataacctcttagatcaaagcatcccctgaggatttctcactggtcacatttctctgcagattccagtctcccaccatgctgctggtcctcagactctcttcacatctccctgctcctctgtttttccagcatcctcatcttggtccacaaagtcactcatgttctctgacaatcagacagtcacctaatctgggccccatccaggagtcccatggaagaactggcggaggtttttaatttcagtctttcctctctcatcttcacttgctcctgtgggtggaagtaagcagcacaggaacttattcctcactggtagaaaacatccccttagaagacagaagaaactagcaacggtcaattttgatttatataacaattttgacatcctcatattatttgtgagtgataatatcgaaacaaataactgaccataaatcatgaaacatttaataaaatgggaactaagcagttannnaannnn

SEQ ID NO: 83534 - DNA, 272 bp, Homo sapiens
gattagacaggtgcttgtatcagatacagttcttcacttcctttagcagatttaatatcataattgtttaattgacagcaaaataagtgcaaatatcatactgtaagaataatgagcattcagttcatttgatgacagtgtttattgaattctcaaaattaatagtttcactgctgtctatcagtatgctttatgttgccttaatttttttttcaaatgtgcagattgaatggtgctgcagtatctgttaagtttattaagttcatcttggc

SEQ ID NO: 83535 - DNA, 507 bp, Homo sapiens
taaatggcaaattataaatacattttaggtctgaactcacgaaataatacctgcccccatttttctccttccagctccacagagaaccgaaataaacttttgtaaattacacaggcaaaaaaaaaaaatctgcaacagtgaattcctatcagttagcattcttgtaaccatggggaaatcaggctttcttctttttttttgagacagagtcttgctctgttgcccaggctagagtgcagtggcacgatctcggcttactgcaacctctgcctcccaggttcaagtgattctcctgcgtcagcctgccgagtagctgggattataggcacccgccactgcgcccggctaatttttgtatttttagtagagacggggtttcatcatcttgaccaggctgttttcgaacttttgagctcgtgatccacccgcctcggcctcccaaagtgctgggatcataggcgtgagctatcacgcctggccaggctttcttctttgaaccctctgaag

SEQ ID NO: 83536 - DNA, 844 bp, Homo sapiens
catcaaaaaaaaaaggagctaactagatgctgtcaataagagactcactttagatctagagacacaggttcaatgtaaagggatggaaaaacatattccctgtggaaatcccaatgagggtgctatggttttgcatgtggtttgtccccaccaaaactcatgtctaaatttaatgcagatgtaatggttgtgggagcctgggccttaagagataattaagatggattaatgtgctttcccatgagactgggttagtctgagacgtacttgcaaaagcatgttgtcgttaagtgggtcatcctcctttgtcctgtctcttttatatacacttctttccccttctacttttccaccctattatgaagcaccgtgaagccctcaccagatgccaccaccatgcccttgtaattcccagcttccagaactgtaagcccagtaaatttccttataaattacccagtcttaggtattctgttacagctacagaaaagactaagatttttgcagaaataggaaaatccatcctaaaataaggaatctcaagggattctgaatagccaacaatcttggtaaagaataatattggaggtctcacatgtcctgatttcaaaacttaaactacaaagctacagtaatcaaaactggtactggcataaagacacatagacagattagagagcccagaaatccttgtaattcaatagcaaaacaattaaaaatgggcaaaggacttgaataggcatttctccaaagaagatacacaaacatccaataaacacatgacaagatgctcaatatcactagtcattagggaaatgaaaatcaaaactataataccatgtcg

SEQ ID NO: 83537 - DNA, 367 bp, Homo sapiens
caatctagtgtccagcaaacgcaatctttagaaaacactagtcaaatttggtctcctaatcccccttatggctacccattatcctcagaataaagccaaatttagtaacaagacccgttagatccttcatgatttacctccagcctaccttctcagtctcatttctcaacacacaccagcttgactaaatcagcttcctcaatatgtctctctctccacaaccttattcatattgtcttctctgcctggtatactcctctcttgaccccttctatcttcagttgattaactcccactgattctttacgtctcagtttagatgtcactttccccagaaagtcttgactcatccaggttaggtgctttt

SEQ ID NO: 83538 - DNA, 408 bp, Homo sapiens
cctgtaggaaagcagggcagggctttgtatccatactaaggattttgtacgtgggaagccattaaatcgtgtgttcttttcattatttattaaggtagagtacatataacataaaattaatcctattaagcattttattttattttattttatttttattttattttattttttgagacagagtcttgctctgtcacccaggctggagtgcagtggcgccatctcggctcactgcaagctccacctcccaggttcaagccattctcctgcctcagcctcccgagtagctgggtctacaggcgcctgccaccacacctggctaattttttgtatttttagtagagacggggtttcaccatgttagccaggatggtctcgatctcctgacctcgtgatccacccatctca

SEQ ID NO: 83539 - DNA, 734 bp, Homo sapiens
gttttttttatgtttttgagacagggtcttgctctgtcgcccaggctgcagtgcagtggcgaggtcacgactcactgcaacctcggcctcccaggcttaggcaatcctcccacctcagcctgttgggtagctgggacctcaggcatgtgccaccatgcccagctaatttttgtattttgtgtgtctttttgttttttcactgtgagtatacgttagtcatttttcttaacaattgaaactgggaactctggggattcagaattaacagccttggctgtgagcttcttatcgataccagaaaaagtttggaccttgcgttccacgttgttctgctgggctttgtccgaatgaacccttgtgagctgctgtgtccatttcacgcggattctcctgcccacaatttcacctgggaagaccgagtcctcgaggattgcgacgtgcgcagctgtcggagcgtggatcctgggacgcttttgcttattttttgtacaccttttttgagttggtttaggcagaattttcctctaagcaatagacgacatacttaccagtgaactttttctccaattcacgtactagccagacttggatgttctggaattatttcagtggcagaagaagaacaaagattatgataacttccttttttttttctttctttctttctttcttttttttttttgagacagagtgtcgccttgtcgcccaggctggagttcagtggctcagtattg

SEQ ID NO: 83540 - DNA, 406 bp, Homo sapiens
acttttgtattattagtagagacagggtttcacccatgattagccaggctggtctcaaactcctgcccacaatttcacctgggaagaccgagtcctcgaggattgcgacgtgcgcagctgtcggagcgtggatcctgggacgcttttgcttattttttgtacaccttttttgagttggtttaggcagaattttcctctaagcaatagacgacatacttaccagtgaactttttctccaattcacgtactagccagacttggatgttctggaattatttcagtggcagaagaagaacaaagattatgataacttccttttttttttctttctttctttctttcttttttttttttgagacagagtgtcgccttgtcgcccaggctggagttcagtggctcagtattg

SEQ ID NO: 83541 - DNA, 478 bp, Homo sapiens
gctcctatagtagggaggcttgctgccatggtgagtaccgccagcatggccaccatcaggttactagttgtttttagtttgttctgtgttttcaagttgtcctttgccatctgcgccaacttcttgatttgtccctatgttggagaatttgcctgatgactattctcagttttctccttcatctctgagaggtttatttgtgccatcactcataccgggatttttggctcttcccagagtcctctcttcctgctgtagttcatgatagatcttcagatgtttggtgggcacgcatacaggcacatgattgtcacctggagagacacaagcaaatcctcttccccatgtaattatccgccctttgagtagttaaagggccagggaggttagtatgtgcttttatatgagtaatataaaaagggggaatgtctttgttgtactgcttgctgtaaagaatgaaataaaagattaagttggt

SEQ ID NO: 83542 - DNA, 302 bp, Homo sapiens
tccaaaaacatcttctaacccgcttttggaaataatgggattccttgatcacgggacaacgaatcaccctgaagtttttctccagtttactcagtcacataagccaccagaggctaaccacactgacaacaaaagcaagtcccaggattccgggggctaataccatgctaggcattacttgggaagttatgagttggtatacatctgtgaatttggtgggaggagaaaactaacagtaaatttatcaaagccagtggaacgttcagcgttataaaattacaaggatctgcttctcggcgact

SEQ ID NO: 83543 - DNA, 454 bp, Homo sapiens
gagccaccatccacataactaattattatgtaaaacgaaaccatgaaaagaattgatgcttctccatggcagtagatgccccaggggaacagagttcccattcctggtttcccccgtttgcagcctccacacttcagaagaactagcaagttgcaattggcacttgaaaaagtgttacaaaacactgacaagtattagagaaacgttgattaatgtaaacagcctgcctcaaggaatgatacctttcttaagcagttttcaattcgcatttctatgtgcaggtaaatgcagtgtttgaagagatgtgatttttgcctttgctggagagaagagaggattatcatatttacatcttaactttctgaaaatttgaaaaaagaattgacagattaaaagtcaataggcccaaaaaagaaggaaattctgacacatgctacaacatggatgaaccttg

SEQ ID NO: 83544 - DNA, 317 bp, Homo sapiens
cactcctgcagtaatggtactagttgattcatgagagctctgcctctaagagatcccacctcccaataccatcacaatgacaattgaaattcaacatgagttttggtggcgacaaacattcaaactatagcaatatattgaattatcatatcaaaaatatgcctttgctctcattccttcaataagttggacagggcagtagaaatgaattaaaatttagaaaatccttcttacctgaatgtaaaatattgtaaaatttaagtttagcaggatttggcccttgtctctaatgctataacagatttagagattgttcc

SEQ ID NO: 83545 - DNA, 542 bp, Homo sapiens
agcgattctcccgcctcagcctcccgagtaggtggaattacaggtgcctgccaccacgcccagctaattttttgtacttttagtagagacggggtttcagcaggttggccaggctgctctcaaactcctgacctcaggtgatctccatgcctcggcctcccaaattgctaagattacaggcatcagccattgcacctggcataagttcgtattgttttcagtatcacaaccacatacatgttcaattgcacatatactatgttctctacaaatgtgcagtttggacctgcctcatcttggtactctacaacaagagcattgcattgtcacacatgtagacaatgaattgactcagaatcacaaatacttgtactggggacctgtagggagaagtcaagccctaggaagagtaccaggtcatcatctgggaaaggaaatattaggagtatttggggtgtgaatagtactgtattgaattccaattcatttcaaaatatatttcacagattatcacaaaccaggaaataagttgtgtgtatttt

SEQ ID NO: 83546 - DNA, 426 bp, Homo sapiens
tggttgttgttgttgtttgttgttgtagagacagggttttgctatattgcggttttgctatattgcctaggctggtcttgtcttgaacccctaggcgaaaatgatcctcccactttggcctcccaaagtgttgggaaaacaagcatgagccactgtgcccaggctggagagagctttctaatgccacacatcccagcacatcactctgctaatgaagtccaggtagggctcaccattgccctcaggataaatgttagcctggcaccatgttcttttccatgtgcagtctctggctgcatcttctttttctaccctactctctaacacatccactgccacactgaattagttttctgaaatgccattccctttttgggcctcttggcctttccactgggcgacattctttgtcctgtcacctctgtt

SEQ ID NO: 83547 - DNA, 358 bp, Homo sapiens
tatttttgtttgagagtctgacgcagtataaagttccaagctgaaaaaccttttcccccctgattttgtgtttatttttccattagtttgtagaatccagtgttgctattgagaagttcaatgtcattttgtttcattttttttcaactttaattttagataagggggtacatgtgcagatttgtcatatgggaatattacatgatgctgaggcttaaggtacagatcctgtcatcctggtagtgagcatagtacccaatagttgtttttttttttatcctccccacctccctgcaccctctagtagtccacaatatctgttgttcccatattaatgtccatgtgtgctcaatgctta

SEQ ID NO: 83548 - DNA, 628 bp, Homo sapiens
atgccagactaattttttaaaattaaattatatatttttgtatattttaattttctttttatagagaaagggtcttgctatgtttctcaggctggtctcgaactcctggtctcaagcaatccacctgcctcagccccccaaagtgctgggattacaggcctgagctaccatgtctagaccacagccggctaattttaattttttttgtatagacagggtttctccctctgttgcccagtctggtctccaacttctgggctcaagcagtcttcctgccttgaccttctaaagtgttggaattacaggcatgagccactgagtcctgcccatagagtgtacttacgcaaacctagatagtatagcctactgcacacctaggctatatgatacagcctactgctcctacgctacaaatctctacagcatgttactgtactgtatactgtaggcaattgtaacacaatggttggtatttttgtatctaaacatagaaagggtacactaaaaatggtacaataaaaatacaatattgtaatctgatggaaccactgtcttatatgcagtctgttgttgactaaagatcatgtgacatgtgactgtatttgctcaatgtattgcatggagaggg

SEQ ID NO: 83549 - DNA, 588 bp, Homo sapiens
tgaagcattcttcaacaattgagggcagaagctgaggatggggtggaaactccaggcttaattccaaaaggatttcttctgaatcttcctgtgggaggggaaaaaaaatggtttatttgtttgtctcaaaagttaagagcatgtatatggaaagagcttatgactcatataatcctcatttttacttactgggggagggactctgggtcctgggtctgtagtttagatgtggctcctcagaatggggtatatgagagaggagggtgtatccctagatgttattagcctaaggggtgcctggagtttggaaggtaggtgagtctcacggaaataagaacaagtaggcccagccctcagcttagctgcatggtctgtgggaagtgggattctttctaacattggatagattgcggtgtttgcaaacaccgcaatctacagtatttcgaggaatgattggacatagcatggttaacagtaaaatacttctcttaaagaaaccaagagtctggtgggagctagaaggcccacaagtacctctgcgtactgactgccttgctatcgtcaataatcttgtgtgcctgtaaggcg

SEQ ID NO: 83550 - DNA, 720 bp, Homo sapiens
tgatgttcctgccaaagtgaggctggaaagctaggaagatctgtaagacgtgtgccagcacaaagtgactacaattcaaaagttccaaaaaccttgcttgaaacaattgcaaatagctcatcattttaaaccagtgaacccaaggctgagtgtttcatcaatttacagaaaaccaagaagagaaatctgacagctatcccagtgtatgacttaccatggagatcttcaaatagaatcactttggtttgggtctcattttcatattataacacaaatttgtgtatgtgggttaagattcatatttgataggaactgctgggaattcttgcagttatatcctcaaaagacaaaataagcataaccaacagaattgtgaagcaataaagttgattatggatgaaaactgggctgaacagtcataggacatgacttgttcctttgacctaaaatgtgcttttctttccttatctacccagtgtaatggtactactctttcaaccatcttgaattcactcacacttattcgtcaaatcctgctcagctattcccactacccacaaagtgtacctttttcgtattccttactttttatacattagctcattttcccccaaacaatgcaataaagtaaaaaatattactctattttatagaaacttgcagctcagaaaggataagaaacttgcaagttgatccaaaataaatttctaaaaagcaaaa

SEQ ID NO: 83551 - DNA, 617 bp, Homo sapiens
taagaactctgccttaaagagttacaactctgccttcaagagttagtgagagaacaatcctattgttttaaattattgattccagaccataaggaactgtgaagggcattcataggataaatagctctgctgaagtccagaaagggttttagcttagtggtcagggaaagctctgagactttgaaggatgagtaaacctagacaggaggaaagcatcgtagatggggaaaagagcagaggactggaggcaggaatcctcctctgagtttgggaggaaagacagccattggactagaaatgaggaaacacttgaaactatggtaactatgagatgggaacaagaggagctcaccttcttatggactgggtatagttttagggaaattcatctcaaagcaaggtcacttattgttggattaggccacaaaattaaatattgcctatcttatttgtgcagagcttttttgaaaaacagctttctttcagaatcactttattatagggaggagtcagtatttttctcctcaaactgagctatggacattaaaagtatagtctgaatgaagtatatagagttatgacagtttcagaacccaggtatttttcttatagtccca

SEQ ID NO: 83552 - DNA, 451 bp, Homo sapiens
tgtgacagtcttgctctagaatgcagtggcgggatcctggctcactgcaacctcaccctcctgggttcaaatggttctcctatctcagcctcctgagtagctggtgcatgccaccacacttcattttgctgtatttttagtagagtcagggtttcaccatgttggccaggctggtcttgaactcctgacttcaagtgatctgcctgcctcagcctcccaaagtgctgggattgcaggtatgaaccaccgtgcctggccaataggtttttggtcaggtgtgaggtttgggtgatggggttggggatgctagagctgcaagctcctgggagcaggctgagcttccaagagggagcgagtccttgggttccttctgccctggggaatttcctgagcagtgggaggagagctggcaactaggtaaatctcccagagtttgaggaaatgagatgct

SEQ ID NO: 83553 - DNA, 470 bp, Homo sapiens
cacagagtggtctcaaattcatgcatctgacaaacattactggttattcaatttgtgtatgactgaaacacttccatttgttcatagttcaccctcttccaaagaataggcctctttaggaaaagagggtgtatgaatagcacacgtaaatactcaagtaggtgacaggggcagttatttaaagtggtttagagactagagtcaccagcaaggtggcaagggggacctattgtggccaaccgtggtggctcacacctgtaatcccagcacttttgggaagccaaggtgggcagatcacttgagtccagaagttcaagaccagcctggctaatatggcaaaaccctgtctctactaaaaaatacaaaaagtccgggcgtggtggctcacacctgtaatctcagcactttgggaggccgaggcaggtggatcacctgaggtcaggagttcgagagcagcctggcaaacatgg

SEQ ID NO: 83554 - DNA, 330 bp, Homo sapiens
tttttttttggagacggagtttcgctcttgttgcccaggctggagtgcaacagtctgatctcggctcactgcaacttccacctcccgggttcaaatgattttcctgcctcagcttcccgagtagctggaattacaggcatccgccaccaggcctggctaatttttgtatttttattagagacagggtttcaccatgttggccagggtagtcttgaactcctgacctcaggtgatccactggcctcagcctcccagagtgctgagattacaggtctgagccacactgcgcactgcaatcttagtattttctaaggcagaattcaaaggggg

SEQ ID NO: 83555 - DNA, 451 bp, Homo sapiens
ctggtggtggcctgagaggagggagcaggttgagtcgttggcttcttctaaggctccctgaggcctagtgggaatgcggaaatgagctgctgttgcttcccagggaacaaatcggatggaacttgggaagagactgtcagctaccaagtaaggagatttctggttctggctgcaggttctggctgatgagcaggccttatcggcacaccagtgctgccaccctatggcagtcctgggcattaccaagcctgcagtcacttccctgggctaaaccaaacactagtgctgacagaggtcaggtgacaaatgagccaccacgctggcagaaagtatagacctgccgaaagggggcagtggtgactcaccttccaatctgctgctcatccagtggtaccagatttttgaatttttctaaaagatgttctaagagctccagagggggtaaaaaaaa

SEQ ID NO: 83556 - DNA, 804 bp, Homo sapiens
gatacaatggtgtcgttcgggaaacgcagccctaacgttggtcctaagctgacaaattggtctgtggacgccaaacttccgtgctaggactttctgcgtgtggaccgggggcctagtcctgcgtgggtccaacacagacaggagaaagctgcctgcttttgtgcctcccggaggtcctggtagaagcgaaacggggacaggagctgcagcgtcccaagcccagtgaggcgaagctactggagacagctctgccgggtccaaagttgggctcaccggctggaacttgaaaccggagcacgccggactcctgctgaagccatcatctctctctcctggccccgggcgccttggccggcgggcacaactggtttcggggccaaggtggtctggaagcctgactgtggcgtctggcctgggctcccgcgagcggaaaaggttcccctcctgtgagagggaaactatggaagttcctacgcccggagccagaactcctgctgctcccgcccgacccaaggtctagcttggcggcctcccacctgtgcttctgagggttctgcttccaagaggctgctggtgcccgggacaccagcagtttcgccatgggtgtttcgccatgggagtttcgccatgggtgactttggcctgagatgcgctccatggagcagattctggagttgctggtgttggaggagttcctgactatcctgtcccaggacatccacagcagggtgcagaagctgcaacgggcgagctgtgaagaagctgtaactcttttaaagtatatgtatgacttttaaaagagag

SEQ ID NO: 83557 - DNA, 526 bp, Homo sapiens
tgtagtggagagaatgatgttactcccaatatcccagggggtgtaaaccacccctgtttgtaaacaggggtgtatcacccctgtgatattgttccaaatggcctgtgaaagagtcaatatgactcccattatcgcagggggtgttcagccctgatgatattgttttctaacatccagggaaggagagtatgctattactcccaatattgcaggggttgtacacctttttgtgttattgggcccaatatccaggaaaatagaggatgagagtactcccaatatggaaataattgtacagcacccctgtgatattcttcctcatatccagaaaggaaatgaatgatattacttccaacagtgtaggaaatgtatacccgtgctgtgatatctttcccaatatccagttggggagaggatcatattacttccaatatcgcagggtgtgtacaccccctctgtgatctcgttgctaacatccaggtttggggaggatgacattactgccaatatcgcaggaggagtccac

SEQ ID NO: 83558 - DNA, 380 bp, Homo sapiens
caaacaccgcaatctcaagtatttggagatttctcaaatttcttttgattgtagattttaattctttgtgatcagcaaacatattttatattatttcaatccttctaaatttgagacttgttttgtgacattgcaaatggtctaacctggaccttaaaaagaatgtgtattctgctgttgttggatgaagttttctatagatgtcagttaagtcagtatggttaattatactgtctagtgtttatacccttgctgatgttttgtctggttattctgtcaattatttagagtggagttttgaagtcttcaattattgatgaattgtctctctcagttctgtttcatttgttttggtgctctgttgttaggttgcatgtagg

SEQ ID NO: 83559 - DNA, 331 bp, Homo sapiens
atccagaggcagaggttgcaatgagccaagatcggaccactgcactccaactccagcctgggtgacagagtgagactcttgtctcaaaaaacaaaaacaaacaaacaaacagaaaaaataaccctggctatagttgagagactctttggagtcaggtgtggactaaatgttgtattctcttacgatgtttaatgtggttttttgtaagactaaagactccagaattctgttacagagttgtttgctgatttgtttcttttgtgtaagtgcccttttcatttctagatcatggttactctaacatcgttcctcaaatatatgcatttcatgg

SEQ ID NO: 83560 - DNA, 363 bp, Homo sapiens
agccaaacctctttctaaaactaccaaaccatcttttgatggcattaagctctctagcgttagatcctcaccttccttttgctttaagttgtcatataatgacttcactttttctcacatcatattagagtctacatgtactcctttcttatagcaaccctgcacataaaaggtgaattttcaatatgagataaaaagttattttgcaaaaagtgcaagattttcacacctcctggtatagcttcaccaatttcctttattttattttattttttttttacaatagtccttacactgactattgaaatagtgggcaaccataggtacagacctcaatctgtggaacatatcaagcaattcaga

SEQ ID NO: 83561 - DNA, 811 bp, Homo sapiens
cagaggcaagattagaactcagtgctgtctgactccaaagctcttgtccttttcattctgcttgacacttccctaaggagtgccactcaagccagcttctcttgaaactgaaatgagcgtcgcagacagcagagtttcaaacatgtgtggctttggtacccctaaggaaggcaggcactgtgcaattcaacacggtccctgcagctcctgaatgcaggacccttcacccaggacccttcactccttgatgttattttcttggcacagaggcattggagtttgcagcctctgtgagtgaagcaacctgaatgtataagggcaacttcttacgcagtctcttctttcagactgctttgaactgcgtattgactatttgcatgcttcatatgagtgactcacagccactatgatctccacacatcccaaatggaacatttttttctttccctccaaatatgttcctctgtccttgttccctagctaatgactggcattgtccttgaaactcctcccctccccagaaacaatcccaagacttactgattttaccttcccaggatatctaccattcctctcccctccttcctacccccatcattcaaccctcttcgtctccctcttggactagcagttgccttatctctggtcttgttccattcaatgtatcctcctgggtctttcctgagtcagcattcaaaatgcccatttgatccggtcactctgggctcagcattcctcagtgggtcctgtactcgttatttattgtggcagaacaaattgctccacaacttaacaagttaaaacaagaaat

SEQ ID NO: 83562 - DNA, 644 bp, Homo sapiens
gtcacactgagggaactcctctagcaatcaatgtatgataggaatgggtggcatgtccccatctggtagctctgtctaggtgtggggtgtgctctgcattcttccatggctccccgggtcccctaaaggttggttttagaggacagggtggataatgaattggcttcagacttcgttctggtcttgatccaacaaggaaagtagagattctgactgtgagcagtgaactaggaatcagaggcctgaactggagacttagactggttacttaactatatgtgtttatataggtcttcccctttgctaagccttagtttctccatttgtaaaaatggctatcagtagcaagcagggacattgccactaaaaccacagagacaatgtatcgtaaagctcactgcaaacggtagtaatggctgggggaatctaggatggaatcctcttcctaaatctaggtcaatctctccgcctttagttttcttcccccatcctttgcccatctgggggatggaggaactaggcagggctattgccccggttactgcagaattcccctaatgcaggttgtagctgttaccagagcacctgtggtcacagagtacagatctctccaccaggcatttcttcctctggggccccatact

SEQ ID NO: 83563 - DNA, 879 bp, Homo sapiens
atgaaagttattggtttatcatgcattcatctttatgaaaagaaaggattcggccttgcttcttccttgttacgaaagtatggccagggctgggcacggtggctcacacctgtaatcccagcgctttgggaggctgaggagggtgggtcacctgaggtcaggagtttgagaccagcctggccaatatggtgaaaccccatctctactaaaaatataaaaattggctgagtgtggtggcgcatgcctgtaatcccagctactcaggaggctgaggcaggagaatcacttgaacctgggaaggtgaggttgcagtgagccaagatcaggccattgcacttccaacctgggcgacagaacaagaaggctctgtctccaaaaaaaaaagaaagaaaaaaagttgggccagtaaaagacttagaagctgacttgccttagaattaaagttaaccagcagattttgtgtattcattcaataatcaagtctagttaaattgtttgaagccattttaatgtttaaaaaaatactaaaagaggccattgaatagtcatggaaaaagaaagcaaattattgtttttctttaagtatcagttcatctgatagatgtgggttaccacaaagcattggtggctcaccaaaaattgcctgttggtagcctgtgtttgcaaactgatacctctctatttcatggagtgatatcaattaggttatacttaaatacttcaaatgcttttggttgtctattggtttgggttttaaattagtacacgttaattgttgaattgggtagccacattttgtttgttttatgtatatttaaacaatgtgaccaaaaatactttttccatttgcggcagcaatgtgaataatggaacattgtg

SEQ ID NO: 83564 - DNA, 343 bp, Homo sapiens
gtttgagcaggatattgaaattattatacttatagaaaatatttgcataaaatatcaaatttgtctctagtattcatttgattccatcagaaattgatggaaaaaatgggaaaacatcaacatcagtgacatggaaaaagtctggacaatgaggcatacaatagctctatccaaaactattgtggattttggggtaagaccagttcaagggttcttcctggacagaataaacactgttgtggtaaacactgtgatagttaaggaggaaaatgcatatgtatttttaggttcacagccacacttcctcatatacattatgactgaacactgtttatgcacagtt

SEQ ID NO: 83565 - DNA, 834 bp, Homo sapiens
aaaatgcccacatttctggcacagttgaaatagcgagacttgagtttagacaccagtggtctccttattatgaattactgtcctgctatttattagtctttctcaatagattgacatagttggccatttttctctgtaaactctttcactcctacctgttcccaccaacacatgtatagacatgcataccccagattgactcatactcgttttggagatgttttgccatacaaataaaatgtctaagccctgtggcatatggtttatagatctcactcaaatattttgattggccctatgccatagctctagctaggggtgccaaagtgctaaatctattggttgtgtttcagtccttaccttatttgaattcttagtaatatttgatgtcaatgaccacaccctccttgagatactgttctccattggtttctatgctataacagcctctctgttttcttttcccttgcctctcagtcgatttcttctctactggtatagtctctacttggccagtaaatatcaacattttccagagtctaggtcctcttctcttctaattctgcctactttccagctgttgccttcattccacatctttggtcagtaggagcctcttcaggttggtccctgaatcctattaatatgattctggtagtctctgagagcttccttgttgtctattttaagatactctgaggttgtctgtacattttctgccctaaatagggaataagccatttctccaaaaagtcttcatttcttttagttggaaatggtatttcaagatcgtaatttgggccctagaggtgcttactgtgacaggatttgtca

SEQ ID NO: 83566 - DNA, 323 bp, Homo sapiens
  misc_feature (100)..(100): n is a, c, g, or t
  misc_feature (137)..(137): n is a, c, g, or t
  misc_feature (144)..(144): n is a, c, g, or t
  misc_feature (161)..(161): n is a, c, g, or t
  misc_feature (164)..(164): n is a, c, g, or t
  misc_feature (298)..(298): n is a, c, g, or t
tccaccttcatgttgctgtttattaatctgattaatctgtttgtttgtttgttttcaaagtagagtaaaaataaaatcaacattcctagtctcacgaggnaagtgctcaaggtaaaaaaagagtcctggagaatcgnccacggntgcgggaagcaggaacnccngatttttctattattaggagagatggggtttcaccatgttgtccaggctggttttgaactccttacctcaggtgatccgcccgccttggcctcccaaagtgctaagattacagatgtgagctactgtgcctggnctgatgaacagaatttaattactga

SEQ ID NO: 83567 - DNA, 387 bp, Homo sapiens
cataaaatatttggactccgtgaaaattctgtttgtctcaacatagcccatctggtacttttcatcaaattgtcaataaggatttgattacaattggtggcaccactgccatttgattcatggcagacttttatcatcctctttatttctagagtttacaataagacaggtaatcgatcagtgaattcttttaccattcacaaaacccgcatatctgaataaaatatactaacatccccaactttttattttattttcatgttttatccagattgtgggttttggagtctcaaaatggcaagtcctaatttggtgttcattggaaatttataagtaccttctctcttctgcttatcctaaaacttcccttcatccagcacacccagc

SEQ ID NO: 83568 - DNA, 364 bp, Homo sapiens
  misc_feature (248)..(248): n is a, c, g, or t
  misc_feature (361)..(362): n is a, c, g, or t
tacatgggtgatttcatgtaatctttacagatgttcatcattataactttatatggctgaacaggtctgtgttttgttttttccttttctttttaattagttcctgtaagcagaatgtctgtgtttttgtattgcttcactggccaagagatttctccctacattaaggagcaattttttgttgtttacttttaccctttcctagtgttgacttaaacaatgaatgttcaatgtaggtgagttcaaantctagtttgtttatattgatcacttttagttactcaataactttaaaggttggttgcaaaactattttgttttttgcagtctctgaaaagaggattctgagatgttaaattannaa

SEQ ID NO: 83569 - DNA, 828 bp, Homo sapiens
aaaaagaatagttaagtcaggaatggtcctgcctatagaagagctttgagagaggtgggcccacgggtgcccctctcacccatttgtgtactctgtgagtttaccagctctgccctggcctctttcggtaccaggaactggcaaccttcatctcactcctgagggcccaggtctctgccttcattgttgctttttctggtgggggcaaggggagctggtatggatggaatgacaagaattagtccaaatggaaccccttgaaggataatgagaaaccacaaggcctgcctctgactggggctgacacggaggtgcattagcccaggctggaggtagcccacccaaatgccctttctgattctaattgatttctttcaacagaatttgccaaaattcagacatgcacttctaaggggaaggtgattttccagttcaaaaaaatgggcaggagtggggaacaaaacaattaacgtaagagctacaaaggagggaaaaggaaccaagaagtagaaggagtcccatcaggagggaagatggtgggcctcagggaggatggggatcaagggacaggccaggagccaggagtggggaagggagggatgaaaggggacacaagtccctgtctctgaagtttctttaaaatctgagttccctcccctctctttgacattcctgaaagattaccagccagcaatagcccagggctcccccaaaagaattggttcagattgtaattatcagttaggcaatgtttttaaaacttagtaatgagaaactgtgaaaagagccaagtgttacattgagcttggggtgggagatggggaacag

SEQ ID NO: 83570 - DNA, 759 bp, Homo sapiens
ttgctagtaatatttttcactcataagtgtatatgtacttctgtgttatatgttctaaatgtttaaggagttctaatataattcattagttgatatagtatatgtttgattgaagtactgttttaatttatatgaagaccttattttatagtttcagggatataaaaggaatgcttagagtatttgatttttttttcctaattgactcttagaaaactgggtacttaacctggaacctttattttagatcaccaacttgaattttatattgtttatttcagataaaaaattagatgtgatgtttggcatgtgtaaaatcagttcacattggggccattaattgtacattctgtcacattgtaacagtagataagaaagtgattatcagaactggtctattccttgttaggattgttactttggatttagtgtatgatgtaaaatgggagaactgatctcattttatctcaataaacccagaaagtgtaaggaagtctgttttgtttgttgttgggtttttttaatttttttgagctgatgtagattcttctttccaaaccctttcctgacacatttaaagtgtgaaatgccgaggctccccactgaaggattaaggtatatgaatcaaggagattgcagttctctctggcagacttcattttcagagattgtaactgttttgtgtgtgttgaagagtgatatatttgcatccaaaaaataaatgcatccaccctggaaactacttgtctgaaataaata

SEQ ID NO: 83571 - DNA, 609 bp, Homo sapiens
gttggtgagcttgtaattatgtggttctcaacaccttaaatcctaagcctagtctggctgatcttttctctttttgagacggagtcttgttctgtcatcaggctggagtacagtggcacaatcttggctcactgcaacctccacctctaggtttaagcgattctcctgcctcggccaccttagtagctgggagtacaggtgcgtgccaccacacccagctaatttttgtatttttaatagagatggggttgcactgtgttagccaggatggtcttgatctcttgaccttgtgatccgcccgcctcagcctcccaaagtgctgggattacaggtgtgagccaccgcacctggcctctctggcttttgttttctaatgttttgttagatgttctttggcttgctttgtgaaatagtcatgtagttgatagtgactgctgccccgaaacactccagatcatcctggccagctatcagggcccaggggaagcagacagtaggggtcgggagtaggccagagtggcacatcaggaatcctgcagtgctgtggaagtcatctcctgcttgggactaactctttgcagaggacttgataagagactactcaaaaaa

SEQ ID NO: 83572 - DNA, 419 bp, Homo sapiens
aaactagcttggcgtggtggcacgcacctgtagtcccagctactcgggaggctgaggcaagagaatcacttgaacctgggaagtggaggttgcagtgagccaagatcgtgccactggactccagcctggcgacagagcgagactctgtctcaaaaatcaatcaatccaccaggtagtccaacctgactcctctgctcccactgcttggcccaggtcaccatcatctatccactgggtaactccaaaaacctcctaacaatgtcaaccggagtctacccttgcctttctctacatctattcctaacgttgcagccaaaatgcttctgtcaaactgtaaagcagattgtcatttctttgctcaaaccctcataatggctcttcacttgccataaagtaaaacctgaaatccttataatggg

SEQ ID NO: 83573 - DNA, 583 bp, Homo sapiens
ttttctttcctttttttttgaagcggagtctcgctctatttcccaggctggtgtgcagtggtgcgatctcggctcactgcaacctctgcctcctgagttcaagggattctcctgctttagcctcccgctggccgtcatttttaatcagggttgtgattttcaacctattgaagtttgagaattgctgccttagagtcttctgaaaccaatcaattgatcatttattggctgtcccagtcattttcactagccaaataaaaagtgagggctggctaagtactacattgggataatattttcttattttgaatgagaaattggactgcccttatgttccagtgagtttttgaggcctttattttcccattcttatgtgaagacagccagatacttttgcaaagcttgagaaaaagcatttgtttatggaagagtagcttggacaataaggtgcttagactttggggtcagaggcaataacagtagttagtaataatagctgcttatgcttattgaattctcttgagggatccagtgttaaatgctttttgtgaattattattactattttgagacagcatatcac

SEQ ID NO: 83574 - DNA, 1168 bp, Homo sapiens
ggctgaggaaggtggggctggttgggagagactgccccaggtgtctcggcttcctggaagttatttagggtctcttctgaggagctgcgttcgggctcccctaagtcagtagccctggaaagtgacacatcaaggatctccgaagaagagagatcttccgtgtgagattcatccagatcatcatagctctcagtgtcctctgctatactgttgttagagctgatactagcggagatctgagcaggagtaacgctagttatctggaagccacttttctttttcatttgagttccgcctggcgcaagaggctgtgcctgcagctgagcctgcgaaaggaggttcaggctttgtggaggcggaggctgtggtcccgacgtagaagatgctgcagggggcggcggctgaagcagcgacggaggcggaaaatcctcggaagatgtggcattactaccgacgccggtacctgctgcattgagagcagaggcgctgccactaccgctgccccttcgagggaacattgccgggtgcgccatcttcctagcgctaatgtctgcagcggcggcggccgcggcggtggactcaggcggctggtgcattgtgttgggtaccgggggcgcggaggagacgagtgcaatttccttctgcaccgtaatctttgtattggagacgccggagaggaaaacgggacctgacgctccgcctggcgcgattcctccttctcctcctcctcagccaaaggcgccggtcgctcctgccttcgagagcgagcccctgggctcgcggcggctgctcggtgaggaaacgctggccgcggctggggccggggcgacgcggctgcgagcggggcggcggcgaggcgcccggtacggtgagcccagcaacgaggcgcgggcgggcgcgcagagacgccgggtcctcgcggagcacggccggggcgcggcggcggcggtggcagcgggagcccagggaccgctccatcactggcagccatggagcccgagcattttcctccctcagggcaggcgcctcgactcggcacacgtcctcggggaggaaggggccggcacccgagcctctccggagggcggcgggacgtgcgctagggcggagggtgcgaccctctcttatcctcttcctccgcagccggctcttcctcaccccgctgctc

SEQ ID NO: 83575 - DNA, 1588 bp, Homo sapiens
ggctgaggaaggtggggctggttgggagagactgccccaggtgtctcggcttcctggaagttatttagggtctcttctgaggagctgcgttcgggctcccctaagtcagtagccctggaaagtgacacatcaaggatctccgaagaagagagatcttccgtgtgagattcatccagatcatcatagctctcagtgtcctctgctatactgttgttagagctgatactagcggagatctgagcaggagtaacgctagttatctggaagccacttttctttttcatttgagttccgcctggcgcaagaggctgtgcctgcagctgagcctgcgaaaggaggttcaggctttgtggaggcggaggctgtggtcccgacgtagaagatgctgcagggggcggcggctgaagcagcgacggaggcggaaaatcctcggaagatgtggcattactaccgacgccggtacctgctgcattgagagcagaggcgctgccactaccgctgccccttcgagggaacattgccgggtgcgccatcttcctagcgctaatgtctgcagcggcggcggccgcggcggtggactcaggcggctggtgcattgtgttgggtaccgggggcgcggaggagacgagtgcaatttccttctgcaccgtaatctttgtattggagacgccggagaggaaaacgggacctgacgctccgcctggcgcgattcctccttctcctcctcctcagccaaaggcgccggtcgctcctgccttcgagagcgagcttcggaaaggaggatgaacgagggtgaacagggcggccggggacccgaaggggggatcccttcagtccttcgccattcactttcccctctagcctcacacccccctttatattctgcttcacgtggggtgcggggcaggagggagggggagagcgcaggaaggggaggaaaagcgagaaatgcccaccttctccggccaactccgaagccgcctcagccccctcctcccgccgcgtcggcggccgctgcaaagccctcccggccgctctgcacggaggcagcgccaagcaaatgtcgccttcccctcgccacccccggggccgccgccgccgccagcgagccccgagctcagtgtcgctcaaacctcccctcccggccccgctcggccctccccccgcgccccgcagaccctttcaaaccccctgggctcgcggcggctgctcggtgaggaaacgctggccgcggctggggccggggcgacgcggctgcgagcggggcggcggcgaggcgcccggtacggtgagcccagcaacgaggcgcgggcgggcgcgcagagacgccgggtcctcgcggagcacggccggggcgcggcggcggcggtggcagcgggagcccagggaccgctccatcactggcagccatggagcccgagcattttcctccctcagggcaggcgcctcgactcggcacacgtcctcggggaggaaggggccggcacccgagcctctccggagggcggcgggacgtgcgctagggcggagggtgcgaccctctcttatcctcttcctccgcagccggctcttcctcaccccgctgctc

SEQ ID NO: 83576 - DNA, 566 bp, Homo sapiens
ggagaatgtggcacagaaatggtaagggggggaacccatacttatttcttcaacagacttgtacagaagggccatggttgctactgctctcacacaaggaggcagccctcaagccaccgggtccaggtgttggctaaaatagcctataggcctctgatgatcaccatgtttctggatcagtaccctggatgcagtacctccagttttgtgtgtgaaaagggagaaaggcagtttgtagtttgggtgccctaaggctggggcattagttagaatttcctttatttgttgtatagctgattgtccctcaagagtccacaagatgggatcagtttgttcattttttaagtatgcctacagagtttgagtcataaagaagaatttggtatccagtttctacaatagccagccaggacccaaaatcctctaagttgtttattagtcacaggcattgggaaagctaaaattcctctcactctgtcagggttaatactcagtcctttgactgagataatatgcctccaaatgcttaacttgcagcaagcatggctgaagtttgtctttggaca

SEQ ID NO: 83577 - DNA, 472 bp, Homo sapiens
  misc_feature (79)..(79): n is a, c, g, or t
  misc_feature (105)..(105): n is a, c, g, or t
gacaatctactaccaagaaccagctccaagaagaaaacatctctgggaaacagtaccaaaaggagtcactgaattgtcnttggaggagtccaggatagctcttcntgttattttcaccttgaggaattgtccattacatctatgagccttatgtgtggctttctccgatatagaaacctatcaggtgtcttttagatcatttcaaaacactggcttattctttcttatgtttccaactgaagtctgcatcccaagatgtagtttcactgctaccccatatggcacccttgtacgaatttgaaaaaagtactcactctaggcacatgcagagccatgcctgcggggacagcttagagagtagagggtgggctgaactccagttactctcgtacagggatccacctttttgcagaaatcacagtgtggctatggtgtggtttgatttcataaaacagatgcttaaaaagtaaaa

SEQ ID NO: 83578 - DNA, 486 bp, Homo sapiens
tcagttaaaaagactgggctgagagaaggtaaacaactctctcaagttcagagccaagctgaggaggagggcccaagctgaaatgggtggccctctatgtccactgcaagaaccagtccctctggtcacagacatccagatactggagaagtcacggtccatgtctgggttcctctagctcagaaacaagagacttccagagcccacttagttggaagtagaggagtctgtgtatctataaaatctcaggtggccttttacttagaaaagcaagttattttcaagtaccctctagtgaaatagttacacacaactaactggccagactaattggaagtcattgtaatctattaatcaaaataggatcctttaagaatccccccactgggaaacacattaacttaagatgctatggatattgatatttaccatttgaaaactggaatttaaaaactgtttaccagattttatcttgaactcagacca

SEQ ID NO: 83579 - DNA, 3506 bp, Homo sapiens
  misc_feature (3498)..(3506): n is a, c, g, or t
gggttccacatcagccaccactcctgcttctgagcacagggtgctctcctcttgagctcagcttctgattttgcagccaagcattcttgctgctgctgcctgcctgcccacccgcctgggcttgcagcccgccactttactttctccagccctgataccagctgagaagtctccctgcagctgctagttcctgcccaggaccatgtgtgtggatgctgcttgggagaagcgggcacttgctcctggcactgatcccagctgagtttctcctgttgatttctggaccactgatgctgttgctgaggaggtatttcctggcatccctccccctgagacaccggctaaggaccagcctaaacgcaaggcaggacagtgtcaggatggaccgcgctgccagaagccgacgctagcgagggaggtgtgaagagttggccagaatgaccaactcctcctccacatccacctcctccaccaccggtggctcgctgctgctgctctgcgaggaagaggagtcgtgggcgggccggcgcatcccggtgtcactcctgtattcgggcctggccatcgggggcacgctggccaacggcatggtcatctatctcgtgtcgtccttccgaaagctgcagaccaccagcaacgccttcattgtgaacggctgcgccgccgacctcagcgtctgcgccctctggatgccgcaggaggcggtgctcgggctcctgcccaccggctctgcggagccccccgcagactgggacggcgctgggggcagctaccgcctgctacggggtgggctgctgggcctcggactcacggtgtccctcctctcccactgcctcgtggccctgaaccgctacctgctcatcacccgggcgcccgccacctaccaggcgctgtaccagaggcgccacacggcgggcatgctggcgctgtcctgggcgctcgccctgggcctcgtgctgctgctcccgccctgggcaccgcggcccggcgccgcgccaccgcgaatccactacccggcgctgctggccgccgcggcgctgctggcgcagacagctctgctgctgcactgctacctgggcatcgtgcgccgcgtgcgtgtcagcgtcaagcgggtcagcgtgctcaacttccacctgctgcaccagttgcccggctgcgccgccgccgccgccgccttcccgggcgcccagcacgcgccgggccccggtggcgccgcgcacccggcgcaggcccagcccctgccgcccgcgctgcacccgcggcgggcacagcggcgtctcagcggcctgtcggtgctgctgctctgctgcgtcttcctgctggccacgcagccactggtgtgggtgagcctggccagcggcttctcgctgccggtgccctggggagtgcacgcggccagctggctcctgtgctgcgccctgtccgcgctcaacccgctgctctacacgtggaggaacgaggagttccgccgctccgtgcgctcagtcctgccgggcgtcggcgacgcggcggccgctgccgttgccgccacagccgtgcccgcagtgtcccaggcgcaactgggcacccgcgccgcgggccagcactggtaacctagccggggcccgagggaagcggagatccccggcttccgacgtccttgggcaccgtcgcctccttccctcctagggcatcccctgcctgaacgaagacttccgccgcgaagcccgatagatcgggggaaaatggggccttcgaccccagcgggctacctgaaccaaggcgtctctctaagtggggcgcccgaagtcattttggacggccacctgatttttaccctttgtttctgtgttttagaggaatcctaaagtcaaaacaccagagacttgaagaacttgcaaactggcgttttaaaataaccggttaatttatttccacacagtttgtttttgaaaaagagctttcataatgtataaccctttccactttcatcgtcttatatatgaagcgccttgagtgtgcatgaaccaaaggaaataacattgaagaaggaaaacaatatgtagaaagtattttagaaagtaacctgtctttgatgatgcttctcttaccatttagtttttgtatattaccctggggcagtgaagccctaggtgtgcccaccagtatgagttgccattaagacctcaagccctttattcttaaaagggtttttaataaagtctttctcaaatgaggtagaatcttagccagtgagaaaaaaaattattttatgctccttttttttcgcactcttaagactgaaaattggcgttgagtgttatagtgaaaattttccagtttgataattgatggtcagagccagcactggaattttgaaaacaaataaggtgattatctattttaggtaccgtttcacattttctatagcatgcacacttgttgctaccctcattttgtaaccaatttatttgccttatgaatgtgattgcagctttgaacattctgtactgtaatggttgctaagaagaataagtccttctgttttctctttaacatttaaaatatctcaatgcacatgatataattaaacactaataataccatgactgcatagctaatattagctgctattgcatgctcctagatgctagaacttattgggcatgtggtatactgaagcgatacccgttagacaaggatattttacttcttccagacaccagaagaaatggccttcaattatttgaaaagagacacagagacacctctggctacctagagttcttcctgtcttgaccaatttatgagaaagctcccagttgggactttatctcacaagtggaatcacagtcaagacggatcaataatatggtttggctcagcaaagccagctgtgctcttttagggtttaaacaagccacacgttagaaagcaacactgtttttatgtagttcatatatattaccatgacatttaacatcaatattgtatatgttgaaggaggtataataaactcagtcatatatagtgaacagttcaaatgggaaagtgttctaaaacatattatttgagatttgtcatattcatctttggtttactaaatttacttagaaatatttgaaatgcaaaattgtgtgaaatcaccttatcaaattaaaatgggaagaaagtaattttaataatttttaataatcatatgtcagcattctgactacttaccacatcaaatctgggcccaaacagcctcagttaactgcataattcaggaacaaaaccagcttgctttgttgcacgcctgggcaatttcagccaggacattaggaccacttgttgtacatctgaataattatggaagttgggacatgttaaggaaaacaaatatgttcatcaccaacaatcagctgtcattttattaatctatcccttttgtgcatgcaccatttctctcttactaacagtttcatctgttcacattttccttgattcaaatattaaagttcagacaactattctgannnnnnnnn

SEQ ID NO: 83580 - DNA, 348 bp, Homo sapiens
gatccacgggcctcagcctccaaaagtgctgggattacaggtgtgagccaccgtgcccagcctaaatctctaataaattgtctttttgaagcagaagtttgttttttactggttaagttgatcaaataaaggtggtgctactcatgtaagcataagaagagcccatttccaaggttcttaggtatgttgatagttctgataaggatctattatgtcctgccatataacataacaatttaatgtcttgaaatagtagtttcttttttgcatcttagaatttagtaaagaaaattaaattaaacttcatagtttagtgtaatcaatgtatttagttttaggaaaaaacaa

SEQ ID NO: 83581 - DNA, 740 bp, Homo sapiens
ggaaagtgaagtagtttacatagttcactgtactatatttcagctgtggatcatcctgctgccagtccagctgctgcaagccctgctgctgccagtccagctgctgtgtccccgtgtgctgccagtccagctgctgcaagccctgttgctgccagtccaactgttgtgtccctgtgtgctgccagtgtaagatctgaggctctggacccagaccttcaggtttctcctgtttggtgaaagcatttcttatggttccctgagtcagttcgtcccacacatcctccctgaggcacctgcacctgctctagctcaccatccatgcacacacctccttccatggctcagctctcctctgggccctgccttcagcctcctcactccagaaacgtgtgtttccctgatgcgggaggtgtcctcgcctggacgcaggcacccagccgactgccacgatgttccctgcacttgggtgtggaccatcttcttcttctccctgggctgactgagatgcaaggtctgaccccacaaggccaggccgacgtttctgagtgatcactaagaaccagcttctcaaccaccatcaggaccctggatcctcctgggccgctgcctgttctcctgtggcccaagtgtgaccaggaaggtctctttccttcctgttgtctccatctgtttaaaaaaaaataacaaaataatgaatgaatttccttgcaataaagcctctcatgtctgtaaatcaactg

SEQ ID NO: 83582 - DNA, 308 bp, Homo sapiens
aggaaaaaaacataaagactaaaaagaatctgtttagccaaaatgaagactatcttatagttgagtagatgcaaggtctgaccccacaaggccaggccgacgtttctgagtgatcactaagaaccagcttctcaaccaccatcaggaccctggatcctcctgggccgctgcctgttctcctgtggcccaagtgtgaccaggaaggtctctttccttcctgttgtctccatccgtagtgacgttcctcaatcccagtgacgttcctctatccagtgacgttcctcatcccagtgacgttcctcatataa

SEQ ID NO: 83583 - DNA, 752 bp, Homo sapiens
tcaacgttgctctatctgacctacctatcagaccaacaacaaaacaaagttgaggctgtggatcatcctgctgccagtccagctgctgcaagccctgctgctgccagtccagctgctgtgtccccgtgtgctgccagtccagctgctgcaagccctgttgctgccagtccaactgttgtgtccctgtgtgctgccagtgtaagatctgaggctctggacccagaccttcaggtttctcctgtttggtgaaagcatttcttatggttccctgagtcagttcgtcccacacatcctccctgaggcacctgcacctgctctagctcaccatccatgcacacacctccttccatggctcagctctcctctgggccctgccttcagcctcctcactccagaaacgtgtgtttccctgatgcgggaggtgtcctcgcctggacgcaggcacccagccgactgccacgatgttccctgcacttgggtgtggaccatcttcttcttctccctgggctgactgagatgcaaggtctgaccccacaaggccaggccgacgtttctgagtgatcactaagaaccagcttctcaaccaccatcaggaccctggatcctcctgggccgctgcctgttctcctgtggcccaagtgtgaccaggaaggtctctttccttcctgttgtctccatctgtttaaaaaaaaataacaaaataatgaatgaatttccttgcaataaagcctctcatgtctgtaaatcaactg

SEQ ID NO: 83584 - DNA, 1045 bp, Homo sapiens
gggctgctgtggctgctccagaggctgtggctccggctgtgggggctgtggctccagctgtgggggttgtggctctggctgtgggggctgtggctccggccgtgggggctgtggctctggctgtgggggctgcagctccagctgtgggggatgtggctccagatgttatgtgcctgtctgctgctgcaagcccgtgtgctcctgggtgccagcctgttcctgcaccagctgtggctcctgtgggggctccaaggggggctgtggctcctgtgggggttccaaggggggctgtggttcttgtggctgctcccagtccagctgttgtaagccctgttgctgctcctcaggctgtggatcatcctgctgccagtccagctgctgcaagccctgctgctgccagtccagctgctgtgtccccgtgtgctgccagtccagctgctgcaagccctgttgctgccagtccaactgttgtgtccctgtgtgctgccagtgtaagatctgaggctctggacccagaccttcaggtttctcctgtttggtgaaagcatttcttatggttccctgagtcagttcgtcccacacatcctccctgaggcacctgcacctgctctagctcaccatccatgcacacacctccttccatggctcagctctcctctgggccctgccttcagcctcctcactccagaaacgtgtgtttccctgatgcgggaggtgtcctcgcctggacgcaggcacccagccgactgccacgatgttccctgcacttgggtgtggaccatcttcttcttctccctgggctgactgagatgcaaggtctgaccccacaaggccaggccgacgtttctgagtgatcactaagaaccagcttctcaaccaccatcaggaccctggatcctcctgggccgctgcctgttctcctgtggcccaagtgtgaccaggaaggtctctttccttcctgttgtctccatctgtttaaaaaaaaataacaaaataatgaatgaatttccttgcaataaagcctctcatgtctgtaaatcaactg

SEQ ID NO: 83585 - DNA, 887 bp, Homo sapiens
gattttccattttattttgttataaatctaaaactgttcttaaaaataatgtctgttaattttttttttaaaaaggaaagaagcactgatacatgctatgacatggaagaactctaaaaatattaggctaagggaaagaagccacatacacatacacatacacagatagtttatggttccatttatataaaatattcagaatagaaaagttcatagggacagaaagtagattacctggggagtagggggtgaaaaatgggtagtaactgcttaatgggtatgaagtttcgtttagggcgatgaaaatattctggaactagaaagtgatgatgatggtcacacagcaatgtcacatatacaataccacagaactgtacactttaaaatggttaaagggttttattttatgttatgtattttaccacaattgaaaaaaatgtttattaaaattaatgtgtaaacatttgtggaagaataatgtgtagtttctaacatttatgtgtttaaatttatgagtttaaaaatagaaaaaaaaatgatggcccagaagagcaagttcagagtgctgttcatgagtgatccgcatgggaccgcgatgcctctgacgtctgccatcctggagagcagcagagcgtcactagcagccaaacaggaagacaagtgtttcacggacataagaaatttaaagtggaagcactttctagagcacacaaaacagcctccctaacacatgagaagtcaccagcaacacagaaatcaccaacaagtaggtcaccacatttttaaagatcataggaaattgttcacgccaacaaatctcagtgaacctcagctctcagccttgaaaacaaggatggctgtactactcacttttttcttcttcttcc

SEQ ID NO: 83586 - DNA, 899 bp, Homo sapiens
ctcctgcttgccggcctggcggtcctactcaacaccgcaagatttcaaaagggaaattcctccagggctgagtcacagggaagaaagcgatttcctccgcctcttccaaagcggcccctttggtgccagtctgctggagtttgctggaggtccactcctgaccctgtttgcctgggtatcaccagcagaggctgcaaagcagcaaagattgctgcctgttctttcttctagaagcttcgacccagtggggcacctgtcagatgccagccagagctctcctgtatcaggtgtctgtcggtccaagctagaaggttgtggggctagacaagaaggaaaaaaatcactgtcctcatggaagttaaattgtactgacaaaggaggaaaatgtcagggagttaacaattcagtctctgtggcttcctcctgtcctctccctgaaactgagatccagccaatctgcacatttattctgagagtggccccactttaatgactacacccagctgtctacacaccaggaggggagggaactgtatcctgaggcaccaacccgattacccacccaacagccacagggacttccagtgactagggcatcatcctcaacgccaccaacccctctccttcctgtggcttttctaactggaactggaactcagaaagtacattaatcaccaatttgggaagctataggaaagtatgttttctaatatacagtgagagaatgtgactgataaaaccaattttcttgagactttctccctggaaagtgaatatatgtattcatagggccttcacaagcacagactaacaagcaaagagctacattcactaggaaggaagactcaaaagtaagtgaaaaataatagttaacctttagatgttgtgcaataaattat

SEQ ID NO: 83587 - DNA, 425 bp, Homo sapiens
taaaattaatgtgtaaacatttgtggaagaataatgtgtagtttctaacatttatgtgtttaaatttatgagtttaaaaatagaaaaaaaaatgatggcccagaagagcaagttcagagtgctgttcatgagtgatccgcatgggaccgcgatgcctctgacgtctgccatcctggagagcagcagagcgtcactagcaggtcctcgtcttctcacttcataacattctttccaaaagtcttgttgacattcttctgtcttccacatatagtttatcttcttgaactcattataactttaaaatatttttactgtgttacatgtactgcttatatttgtttattttataattattaattttaaattgtgcactttattttgctctaacaataaaattgacatgttcgtatagatgatacataatt

SEQ ID NO: 83588 - DNA, 1222 bp, Homo sapiens
ctcctgcttgccggcctggcggtcctactcaacaccgcaagatttcaaaagggaaattcctccagggctgagtcacagggaagaaagcgatttcctccgcctcttccaaagcggcccctttggtgccagtctgctggagtttgctggaggtccactcctgaccctgtttgcctgggtatcaccagcagaggctgcaaagcagcaaagattgctgcctgttctttcttctagaagcttcgacccagtggggcacctgtcagatgccagccagagctctcctgtatcaggtgtctgtcggtccaagctagaaggttgtggggctagacaagaaggaaaaaaatcactgtcctcatggaagttaaattgtactgacaaaggaggaaaatgtcagggagttaacaattcagtctctgtggcttcctcctgtcctctccctgaaactgagatccagccaatctgcacatttattctgagagtggccccactttaatgactacacccagctgtctacacaccaggaggggagggaactgtatcctgaggcaccaacccgattacccacccaacagccacagggacttccagtgactagggcatcatcctcaacgccaccaacccctctccttcctgtggcttttctaactggaactggaactcagaaagtacattaatcaccaatttgggaagctataggaaagtatgttttctaatatacagtgagagaatgtgactgataaaaccaattttcttgagactttctccctggaaagtgaatatatgtattcatagggccttcacaagcacagactaacaagcaaagagctacattcactaggaaggaagactcaaaatttaaaaatagaaaaaaaaatgatggcccagaagagcaagttcagagtgctgttcatgagtgatccgcatgggaccgcgatgcctctgacgtctgccatcctggagagcagcagagcgtcactagcagccaaacaggaagacaagtgtttcacggacataagaaatttaaagtggaagcactttctagagcacacaaaacagcctccctaacacatgagaagtcaccagcaacacagaaatcaccaacaagtaggtcaccacatttttaaagatcataggaaattgttcacgccaacaaatctcagtgaacctcagctctcagccttgaaaacaaggatggctgtactactcacttttttcttcttcttcc

SEQ ID NO: 83589 - DNA, 485 bp, Homo sapiens
  misc_feature (437)..(437): n is a, c, g, or t
  misc_feature (446)..(446): n is a, c, g, or t
gtgtgagccactgtgcccaccataatccatttcttaagtctctacaacaccacatcctcattgccttcattggtttgcctcttccacagtatgtttttctcccacagtaattaattcaatgcagatttggtttacactatgcatcaagcatatgctagacactaggaatacagcagtaaaaaagaagagccagagaggggagatgtgcagattggcagtgcaaggtgaggaataggcactagagcaacattgaaagagagtttggagcaatggccttcttcttcttcttttggtttgtttactcaggtagtaattaaaaaaaaaaaaaaaaaactatgtttttcctctacacggttggttttttttgggggggggggggacgaaatctcgctcggtcgcccaagcgggagggcacgggcgcgatcgcgggtcacggnaacctcggncttccgagttcaagcgattccttccacaggttttaaagg

SEQ ID NO: 83590 - DNA, 646 bp, Homo sapiens
gtgtgagccactgtgcccaccataatccatttcttaagtctctacaacaccacatcctcattgccttcattggtttgcctcttccacagtatgtttttctcccacagtaattaattcaatgcagatttggtttacactatgcatcaagcatatgctagacactaggaatacagcagtaaaaaagaagagacctgccctcaaaaatattcattctagtttttataatgattttagtataggctcaaaaggcttcctaaagattaagttcaaatacatttactaatgggttaaggaacccagaatcctaactagggtcggacagttggagctgagtgtttgttgaaaaggacttaaggtgtttagtccagcttcctaagccacatagtgatttcttctgtagtggcccaaacagaagcatacccagggtctgcttgttttagtttcagtgatgaggatgcttaccccagcctccctcatttattcattcaggaaagaaatgaccacctactcgctgagagcccaccgtgtcatgggcgctgaagcactgtcataaacagatgctggagagacttaaggattaaaacgttctttctagcactgagaagaaatctgttttcctgtgtttgtcaccactgcctctagtata

SEQ ID NO: 83591 - DNA, 742 bp, Homo sapiens
gctgtgtcttgcagcctgtgggctttttctggctgctgtggcccactacgcctgcagcaggactggaggcttgcaggactgatacccattccccagagcaaccctcaaccaatgaccttcaggattgggtggataaatatcccagctctcttactcttcagcaccatgagaagagcttctcccctgtaaatggccactctcacttgtgggtccatgactagctgaactgaacccattccacagtaaggacccaagcccagcagatctgcagccaaaaccaaagttgctcagtgggacccatgccacataagccgacccatggccaacctgaaaataaattttcagccaagacattcttttgcagcctaagagggttattatggagaggtggaaagatcttcaaacctggaaggcttgcttcaaaccccagctctactccaactacaggattggggcagaggctggaagagctaaaatgttcatttctcagcctctccttctgccagcaataagacactgggaggtctgttgatgtggcagatggcggtggcatgccctgtgtcccatgcccacagtctaatcacctctgacttcagtcacagctgtggtggacagttccgtgtgttccaattcacctcatgcaagacagcatccagtctcaagtgtggacttctaacagccatcttatatcacaaacgtcatctctgcttccagagggcacagcctagaacaggaacaaagg

SEQ ID NO: 83592 - DNA, 2864 bp, Homo sapiens
gcctcccctccagggccgggtggggtggggctggccagggtgtgaccaccgtgctgggcagcaggctccagtccctaacccccagccactactggcatgaggggtccctcagggcccccaggcctcctctacgtcccacacctcctcctctgcctgctctgcctcctcccaccgccgctccaatacgcagccgggcagagccagatgcccaaagaccagcccctgtgggcacttctggagcagtactgccacaccatcatgaccctcaccaacctctcaggctcaggcttgccactgataatgaagggcttggctgggaggccactccccattcccagctcccacgatggaagtcagctgggctggcattcaggagtccaagaaggggatgacccctcagctttccaactccagggaaactggcagaaggtggtaaacattctctggttgccgtggctacaggtgtgacttcctggctggtcttgaattcctgtgctcaagcaatctgcctaccttggcttccccaagtgctgagattatgggtgtgagccactgcacctggccaagaatccgaatggattcaaagataccttgaaataattcctcaatgcaacacacacacatatgccagggttggtcaaatgggaagagagccttggcctgaagacagggacctgggctttcctcagctcttctgccaagtcacgccgggcgcgcactcccactccctctccgcacgcggctgcgggacgcgatggacgcggcactgctccacagcctgctggaggccaactgcagcctggcgctggctgaagagctgctcttggacggctgggggccacccctggaccccgagggtccctactcctactgcaacacgaccttggaccagatcggaacgtgctggccccgcagcgctgccggagccctcgtggagaggccgtgccccgagtacttcaacggcgtcaagtacaacacgacccggaatgcctatcgagaatgcttggagaatgggacgtgggcctcaaagatcaactactcacagtgtgagcccattttggatgacaagcagaggaagtatgacctgcactaccgcatcgcccttgtcgtcaactacctgggccactgcgtatctgtggcagccctggtggccgccttcctgcttttcctggccctgcggagcattcgctgtctgcggaatgtgattcactggaacctcatcaccacctttatcctgcgaaatgtcatgtggttcctgctgcagctcgttgaccatgaagtgcacgagagcaatgaggtctggtgccgctgcatcaccaccatcttcaactacttcgtggtgaccaacttcttctggatgtttgtggaaggctgctacctgcacacggccattgtcatgacctactccactgagcgcctgcgcaagtgcctcttcctcttcatcggatggtgcatccccttccccatcatcgtcgcctgggccatcggcaagctctactatgagaatgaacagtgctggtttggcaaggagcctggcgacctggtggactacatctaccaaggccccatcattctcgtgctcctgatcaatttcgtatttctgttcaacatcgtcaggatcctaatgacaaagttacgcgcgtccaccacatccgagacaatccagtacaggaaggcagtgaaggccaccctggtgctcctgcccctcctgggcatcacctacatgctcttcttcgtcaatcccggggaggacgacctgtcacagatcatgttcatctatttcaactccttcctgcagtcgttccagggtttcttcgtgtctgtcttctactgcttcttcaatggagaggtgcgctcagccgtgaggaagaggtggcaccgctggcaggaccatcactcccttcgagtccccatggcccgggccatgtccatccctacatcacccacacggatcagcttccacagcatcaagcagacggccgctgtgtgacccctcggtcgcccacctgcacagctcccctgtcctcctccaccttcttcctctgggttctctgtgctgggcaggctctcgtggggcaggagatgggaggggagagaccagctctccagcctggcaggaaagagggggtgcggcagccaagggggactgcaagggacagggatgagtgggggccaccaggctcagcgcaagaggaagcagagggaattcacaggaccccctgagaagagccagtcagatgtctgcaggcatttgcccatcccagcctctctggccagggccttactgggcccagagcagagaaggacctgtccaacacacacagctatttatagtagcagacacagggctcccctgccctactcatggagccagcagccaggcaatggtgtggccctgcactggcccttggactccacactcagtggtgccctgcagttgggtgggttaacgccaagcaaaggatcagtttggctgccttatcccagggctgtcacctagagaggctcacttgtaccccaccctgttcctgtgtcccctccccagccatcctccccgccttgggggctccatgaaggatgcaggcttccaggcctggcttcctctcttgggagaccccttctctgcctagtccacagattaggcaatcaaggaagacgccatcagggaagccacatccttagtcaaccagttgcatcgtgcggggcaaaatgaggagcagaggcatggaggagggaggcgtgggatgggaatagcagaaccaccatgtcttcagtgattgaaactcataccccattgccctttgccctccagtctccccttcagaaacatctctgctctctgtgaaataaaccatgcctcttgg

SEQ ID NO: 83593 - DNA, 2669 bp, Homo sapiens
gcctcccctccagggccgggtggggtggggctggccagggtgtgaccaccgtgctgggcagcaggctccagtccctaacccccagccactactggcatgaggggtccctcagggcccccaggcctcctctacgtcccacacctcctcctctgcctgctctgcctcctcccaccgccgctccaatacgcagccgggcagagccagatgcccaaagaccagcccctgtgggcacttctggagcagtactgccacaccatcatgaccctcaccaacctctcaggctggtcttgaattcctgtgctcaagcaatctgcctaccttggcttccccaagtgctgagattatgggtgtgagccactgcacctggccaagaatccgaatggattcaaagataccttgaaataattcctcaatgcaacacacacacatatgccagggttggtcaaatgggaagagagccttggcctgaagacagggacctgggctttcctcagctcttctgccaagtcacgccgggcgcgcactcccactccctctccgcacgcggctgcgggacgcgatggacgcggcactgctccacagcctgctggaggccaactgcagcctggcgctggctgaagagctgctcttggacggctgggggccacccctggaccccgagggtccctactcctactgcaacacgaccttggaccagatcggaacgtgctggccccgcagcgctgccggagccctcgtggagaggccgtgccccgagtacttcaacggcgtcaagtacaacacgacccggaatgcctatcgagaatgcttggagaatgggacgtgggcctcaaagatcaactactcacagtgtgagcccattttggatgacaagcagaggaagtatgacctgcactaccgcatcgcccttgtcgtcaactacctgggccactgcgtatctgtggcagccctggtggccgccttcctgcttttcctggccctgcggagcattcgctgtctgcggaatgtgattcactggaacctcatcaccacctttatcctgcgaaatgtcatgtggttcctgctgcagctcgttgaccatgaagtgcacgagagcaatgaggtctggtgccgctgcatcaccaccatcttcaactacttcgtggtgaccaacttcttctggatgtttgtggaaggctgctacctgcacacggccattgtcatgacctactccactgagcgcctgcgcaagtgcctcttcctcttcatcggatggtgcatccccttccccatcatcgtcgcctgggccatcggcaagctctactatgagaatgaacagtgctggtttggcaaggagcctggcgacctggtggactacatctaccaaggccccatcattctcgtgctcctgatcaatttcgtatttctgttcaacatcgtcaggatcctaatgacaaagttacgcgcgtccaccacatccgagacaatccagtacaggaaggcagtgaaggccaccctggtgctcctgcccctcctgggcatcacctacatgctcttcttcgtcaatcccggggaggacgacctgtcacagatcatgttcatctatttcaactccttcctgcagtcgttccagggtttcttcgtgtctgtcttctactgcttcttcaatggagaggtgcgctcagccgtgaggaagaggtggcaccgctggcaggaccatcactcccttcgagtccccatggcccgggccatgtccatccctacatcacccacacggatcagcttccacagcatcaagcagacggccgctgtgtgacccctcggtcgcccacctgcacagctcccctgtcctcctccaccttcttcctctgggttctctgtgctgggcaggctctcgtggggcaggagatgggaggggagagaccagctctccagcctggcaggaaagagggggtgcggcagccaagggggactgcaagggacagggatgagtgggggccaccaggctcagcgcaagaggaagcagagggaattcacaggaccccctgagaagagccagtcagatgtctgcaggcatttgcccatcccagcctctctggccagggccttactgggcccagagcagagaaggacctgtccaacacacacagctatttatagtagcagacacagggctcccctgccctactcatggagccagcagccaggcaatggtgtggccctgcactggcccttggactccacactcagtggtgccctgcagttgggtgggttaacgccaagcaaaggatcagtttggctgccttatcccagggctgtcacctagagaggctcacttgtaccccaccctgttcctgtgtcccctccccagccatcctccccgccttgggggctccatgaaggatgcaggcttccaggcctggcttcctctcttgggagaccccttctctgcctagtccacagattaggcaatcaaggaagacgccatcagggaagccacatccttagtcaaccagttgcatcgtgcggggcaaaatgaggagcagaggcatggaggagggaggcgtgggatgggaatagcagaaccaccatgtcttcagtgattgaaactcataccccattgccctttgccctccagtctccccttcagaaacatctctgctctctgtgaaataaaccatgcctcttgg

SEQ ID NO: 83594 - DNA, 2709 bp, Homo sapiens
gcctcccctccagggccgggtggggtggggctggccagggtgtgaccaccgtgctgggcagcaggctccagtccctaacccccagccactactggcatgaggggtccctcagggcccccaggcctcctctacgtcccacacctcctcctctgcctgctctgcctcctcccaccgccgctccaatacgcagccgggcagagccagatgcccaaagaccagcccctgtgggcacttctggagcagtactgccacaccatcatgaccctcaccaacctctcaggctcaggcttgccactgataatgaagggcttggctgggaggccactccccattcccagctcccacgatggaagtcagctgggctggcattcaggagtccaagaaggggatgacccctcagctttccaactccagggaaactggcagaaggtggtaaacattctctggttgccgtggctacaggtgtgacttcctggctggtcttgaattcctgtgctcaagcaatctgcctaccttggcttccccaagtgctgagattatgggtgtgagccactgcacctggccaagaatccgaatggattcaaagataccttgaaataattcctcaatgcaacacacacacatatgccagggttggtcaaatgggaagagagccttggcctgaagacagggacctgggctttcctcagctcttctgccaaggtccctactcctactgcaacacgaccttggaccagatcggaacgtgctggccccgcagcgctgccggagccctcgtggagaggccgtgccccgagtacttcaacggcgtcaagtacaacacgacccggaatgcctatcgagaatgcttggagaatgggacgtgggcctcaaagatcaactactcacagtgtgagcccattttggatgacaagcagaggaagtatgacctgcactaccgcatcgcccttgtcgtcaactacctgggccactgcgtatctgtggcagccctggtggccgccttcctgcttttcctggccctgcggagcattcgctgtctgcggaatgtgattcactggaacctcatcaccacctttatcctgcgaaatgtcatgtggttcctgctgcagctcgttgaccatgaagtgcacgagagcaatgaggtctggtgccgctgcatcaccaccatcttcaactacttcgtggtgaccaacttcttctggatgtttgtggaaggctgctacctgcacacggccattgtcatgacctactccactgagcgcctgcgcaagtgcctcttcctcttcatcggatggtgcatccccttccccatcatcgtcgcctgggccatcggcaagctctactatgagaatgaacagtgctggtttggcaaggagcctggcgacctggtggactacatctaccaaggccccatcattctcgtgctcctgatcaatttcgtatttctgttcaacatcgtcaggatcctaatgacaaagttacgcgcgtccaccacatccgagacaatccagtacaggaaggcagtgaaggccaccctggtgctcctgcccctcctgggcatcacctacatgctcttcttcgtcaatcccggggaggacgacctgtcacagatcatgttcatctatttcaactccttcctgcagtcgttccagggtttcttcgtgtctgtcttctactgcttcttcaatggagaggtgcgctcagccgtgaggaagaggtggcaccgctggcaggaccatcactcccttcgagtccccatggcccgggccatgtccatccctacatcacccacacggatcagcttccacagcatcaagcagacggccgctgtgtgacccctcggtcgcccacctgcacagctcccctgtcctcctccaccttcttcctctgggttctctgtgctgggcaggctctcgtggggcaggagatgggaggggagagaccagctctccagcctggcaggaaagagggggtgcggcagccaagggggactgcaagggacagggatgagtgggggccaccaggctcagcgcaagaggaagcagagggaattcacaggaccccctgagaagagccagtcagatgtctgcaggcatttgcccatcccagcctctctggccagggccttactgggcccagagcagagaaggacctgtccaacacacacagctatttatagtagcagacacagggctcccctgccctactcatggagccagcagccaggcaatggtgtggccctgcactggcccttggactccacactcagtggtgccctgcagttgggtgggttaacgccaagcaaaggatcagtttggctgccttatcccagggctgtcacctagagaggctcacttgtaccccaccctgttcctgtgtcccctccccagccatcctccccgccttgggggctccatgaaggatgcaggcttccaggcctggcttcctctcttgggagaccccttctctgcctagtccacagattaggcaatcaaggaagacgccatcagggaagccacatccttagtcaaccagttgcatcgtgcggggcaaaatgaggagcagaggcatggaggagggaggcgtgggatgggaatagcagaaccaccatgtcttcagtgattgaaactcataccccattgccctttgccctccagtctccccttcagaaacatctctgctctctgtgaaataaaccatgcctcttgg

SEQ ID NO: 83595 - DNA, 1318 bp, Homo sapiens
gcctcccctccagggccgggtggggtggggctggccagggtgtgaccaccgtgctgggcagcaggctccagtccctaacccccagccactactggcatgaggggtccctcagggcccccaggcctcctctacgtcccacacctcctcctctgcctgctctgcctcctcccaccgccgctccaatacgcagccgggcagagccagatgcccaaagaccagcccctgtgggcacttctggagcagtactgccacaccatcatgaccctcaccaacctctcaggctcaggcttgccactgataatgaagggcttggctgggaggccactccccattcccagctcccacgatggaagtcagctgggctggcattcaggagtccaagaaggggatgacccctcagctttccaactccagggaaactggcagaaggtggtaaacattctctggttgccgtggctacaggtgtgacttcctggctggtcttgaattcctgtgctcaagcaatctgcctaccttggcttccccaagtgctgagattatgggtgtgagccactgcacctggccaagaatccgaatggattcaaagataccttgaaataattcctcaatgcaacacacacacatatgccagggttggtcaaatgggaagagagccttggcctgaagacagggacctgggctttcctcagctcttctgccaaggtccctactcctactgcaacacgaccttggaccagatcggaacgtgctggccccgcagcgctgccggagccctcgtggagaggccgtgccccgagtacttcaacggcgtcaagtacaacacgacccggaatgcctatcgagaatgcttggagaatgggacgtgggcctcaaagatcaactactcacagtgtgagcccattttggatgacaagcagaggaagtatgacctgcactaccgcatcgcccttgtcgtcaactacctgggccactgcgtatctgtggcagccctggtggccgccttcctgcttttcctggccctgcggagcattcgctgtctgcggaatgtgattcactggaacctcatcaccacctttatcctgcgaaatgtcatgtggttcctgctgcagctcgttgaccatgaagtgcacgagagcaatgaggtctggtgccgctgcatcaccaccatcttcaactacttcgtggcagccccacctcttgagagcccccagtgccggagcagaaaggaccctggacccagaggcagatactgcggggtggtagaaaaggtagagtaggctgtggcaatggaataaaacacgattaaaaacgttaaaaa

SEQ ID NO: 83596 - DNA, 872 bp, Homo sapiens
gcctcccctccagggccgggtggggtggggctggccagggtgtgaccaccgtgctgggcagcaggctccagtccctaacccccagccactactggcatgaggggtccctcagggcccccaggcctcctctacgtcccacacctcctcctctgcctgctctgcctcctcccaccgccgctccaatacgcagccgggcagagccagatgcccaaagaccagcccctgtgggcacttctggagcagtactgccacaccatcatgaccctcaccaacctctcaggctcaggcttgccactgataatgaagggcttggctgggaggccactccccattcccagctcccacgatggaagtcagctgggctggcattcaggagtccaagaaggggatgacccctcagctttccaactccagggaaactggcagaaggtggtaaacattctctggttgccgtggctacaggtgtgacttcctggtaaggacttgcaaagcagcagcccggccctgagttctggcccctcagaggtttccagtggctgattcacagggtcagggccagccactgcagagctgcacagagccctggattctgctgggttccagagagatgtctccagtgtcccaccctgtatcctggccttcccaggtctgcatccacaggatgggagtgggggtgacccttgctcgggcctggggccactgccagggcacaaggagacaagggtgctggccagcacccagacccagcctacaggcactgcccaagccaggcgtcaaagagaaagtcttgctgcctgttctccttccactggggcagtcaatagctccggtgttgggatcaggtagatccaagtctggatcctagctcttcc

SEQ ID NO: 83597 - DNA, 291 bp, Homo sapiens
gaaaaggataaggaagaggcccctggagagaggcaacagcatcagggaaggacctgttttggaagcagacagttccttgtcatgagggtggcagtcgacccatgagagcagaaagcagaggaggggatggtcccagaagcccagggttggtccctgggagccagctgagcctctgccttccccacaggtgcgctcagccgtgaggaagaggtggcaccgctggcaggaccatcactcccttcgagtccccatggcccgggccatgtccatccctacatcacccacacggat

SEQ ID NO: 83598 - DNA, 480 bp, Homo sapiens
aaatagattatttctattttattcatcacagaggcagctacatatatttgaaaaatattagggcatatattatgaggcatattatttatcctatccatagatgatataaaaatccaaatggactatttatttattttttattattttttgtaggctggtcttgaattcctgtgctcaagcaatctgcctaccttggcttccccaagtgctgagattatgggtgtgagccactgcacctggccaagaatccgaatggattcaaagataccttgaaataattcctcaatgcaacacacacacatatgccagggttggtcaaatgggaagagagccttggcctgaagacagggacctgggctttcctcagctcttctgccaaggtatctgtcctttcttagtgactcactgggctgaagtctagagcattccaatgggtgctggggatgggttagtgaaccaggaccagccctgcccttgggg

SEQ ID NO: 83599 - DNA, 2287 bp, Homo sapiens
gcctcccctccagggccgggtggggtggggctggccagggtgtgaccaccgtgctgggcagcaggctccagtccctaacccccagccactactggcatgaggggtccctcagggcccccaggcctcctctacgtcccacacctcctcctctgcctgctctgcctcctcccaccgccgctccaatacgcagccgggcagagccagatgcccaaagaccagcccctgtgggcacttctggagcagtactgccacaccatcatgaccctcaccaacctctcaggtccctactcctactgcaacacgaccttggaccagatcggaacgtgctggccccgcagcgctgccggagccctcgtggagaggccgtgccccgagtacttcaacggcgtcaagtacaacacgacccggaatgcctatcgagaatgcttggagaatgggacgtgggcctcaaagatcaactactcacagtgtgagcccattttggatgacaagcagaggaagtatgacctgcactaccgcatcgcccttgtcgtcaactacctgggccactgcgtatctgtggcagccctggtggccgccttcctgcttttcctggccctgcggagcattcgctgtctgcggaatgtgattcactggaacctcatcaccacctttatcctgcgaaatgtcatgtggttcctgctgcagctcgttgaccatgaagtgcacgagagcaatgaggtctggtgccgctgcatcaccaccatcttcaactacttcgtggtgaccaacttcttctggatgtttgtggaaggctgctacctgcacacggccattgtcatgacctactccactgagcgcctgcgcaagtgcctcttcctcttcatcggatggtgcatccccttccccatcatcgtcgcctgggccatcggcaagctctactatgagaatgaacagtgctggtttggcaaggagcctggcgacctggtggactacatctaccaaggccccatcattctcgtgctcctgatcaatttcgtatttctgttcaacatcgtcaggatcctaatgacaaagttacgcgcgtccaccacatccgagacaatccagtacaggaaggcagtgaaggccaccctggtgctcctgcccctcctgggcatcacctacatgctcttcttcgtcaatcccggggaggacgacctgtcacagatcatgttcatctatttcaactccttcctgcagtcgttccagggtttcttcgtgtctgtcttctactgcttcttcaatggagaggtgcgctcagccgtgaggaagaggtggcaccgctggcaggaccatcactcccttcgagtccccatggcccgggccatgtccatccctacatcacccacacggatcagcttccacagcatcaagcagacggccgctgtgtgacccctcggtcgcccacctgcacagctcccctgtcctcctccaccttcttcctctgggttctctgtgctgggcaggctctcgtggggcaggagatgggaggggagagaccagctctccagcctggcaggaaagagggggtgcggcagccaagggggactgcaagggacagggatgagtgggggccaccaggctcagcgcaagaggaagcagagggaattcacaggaccccctgagaagagccagtcagatgtctgcaggcatttgcccatcccagcctctctggccagggccttactgggcccagagcagagaaggacctgtccaacacacacagctatttatagtagcagacacagggctcccctgccctactcatggagccagcagccaggcaatggtgtggccctgcactggcccttggactccacactcagtggtgccctgcagttgggtgggttaacgccaagcaaaggatcagtttggctgccttatcccagggctgtcacctagagaggctcacttgtaccccaccctgttcctgtgtcccctccccagccatcctccccgccttgggggctccatgaaggatgcaggcttccaggcctggcttcctctcttgggagaccccttctctgcctagtccacagattaggcaatcaaggaagacgccatcagggaagccacatccttagtcaaccagttgcatcgtgcggggcaaaatgaggagcagaggcatggaggagggaggcgtgggatgggaatagcagaaccaccatgtcttcagtgattgaaactcataccccattgccctttgccctccagtctccccttcagaaacatctctgctctctgtgaaataaaccatgcctcttgg

SEQ ID NO: 83600 - DNA, 2442 bp, Homo sapiens
gcctcccctccagggccgggtggggtggggctggccagggtgtgaccaccgtgctgggcagcaggctccagtccctaacccccagccactactggcatgaggggtccctcagggcccccaggcctcctctacgtcccacacctcctcctctgcctgctctgcctcctcccaccgccgctccaatacgcagccgggcagagccagatgcccaaagaccagcccctgtgggcacttctggagcagtactgccacaccatcatgaccctcaccaacctctcagtcacgccgggcgcgcactcccactccctctccgcacgcggctgcgggacgcgatggacgcggcactgctccacagcctgctggaggccaactgcagcctggcgctggctgaagagctgctcttggacggctgggggccacccctggaccccgagggtccctactcctactgcaacacgaccttggaccagatcggaacgtgctggccccgcagcgctgccggagccctcgtggagaggccgtgccccgagtacttcaacggcgtcaagtacaacacgacccggaatgcctatcgagaatgcttggagaatgggacgtgggcctcaaagatcaactactcacagtgtgagcccattttggatgacaagcagaggaagtatgacctgcactaccgcatcgcccttgtcgtcaactacctgggccactgcgtatctgtggcagccctggtggccgccttcctgcttttcctggccctgcggagcattcgctgtctgcggaatgtgattcactggaacctcatcaccacctttatcctgcgaaatgtcatgtggttcctgctgcagctcgttgaccatgaagtgcacgagagcaatgaggtctggtgccgctgcatcaccaccatcttcaactacttcgtggtgaccaacttcttctggatgtttgtggaaggctgctacctgcacacggccattgtcatgacctactccactgagcgcctgcgcaagtgcctcttcctcttcatcggatggtgcatccccttccccatcatcgtcgcctgggccatcggcaagctctactatgagaatgaacagtgctggtttggcaaggagcctggcgacctggtggactacatctaccaaggccccatcattctcgtgctcctgatcaatttcgtatttctgttcaacatcgtcaggatcctaatgacaaagttacgcgcgtccaccacatccgagacaatccagtacaggaaggcagtgaaggccaccctggtgctcctgcccctcctgggcatcacctacatgctcttcttcgtcaatcccggggaggacgacctgtcacagatcatgttcatctatttcaactccttcctgcagtcgttccagggtttcttcgtgtctgtcttctactgcttcttcaatggagaggtgcgctcagccgtgaggaagaggtggcaccgctggcaggaccatcactcccttcgagtccccatggcccgggccatgtccatccctacatcacccacacggatcagcttccacagcatcaagcagacggccgctgtgtgacccctcggtcgcccacctgcacagctcccctgtcctcctccaccttcttcctctgggttctctgtgctgggcaggctctcgtggggcaggagatgggaggggagagaccagctctccagcctggcaggaaagagggggtgcggcagccaagggggactgcaagggacagggatgagtgggggccaccaggctcagcgcaagaggaagcagagggaattcacaggaccccctgagaagagccagtcagatgtctgcaggcatttgcccatcccagcctctctggccagggccttactgggcccagagcagagaaggacctgtccaacacacacagctatttatagtagcagacacagggctcccctgccctactcatggagccagcagccaggcaatggtgtggccctgcactggcccttggactccacactcagtggtgccctgcagttgggtgggttaacgccaagcaaaggatcagtttggctgccttatcccagggctgtcacctagagaggctcacttgtaccccaccctgttcctgtgtcccctccccagccatcctccccgccttgggggctccatgaaggatgcaggcttccaggcctggcttcctctcttgggagaccccttctctgcctagtccacagattaggcaatcaaggaagacgccatcagggaagccacatccttagtcaaccagttgcatcgtgcggggcaaaatgaggagcagaggcatggaggagggaggcgtgggatgggaatagcagaaccaccatgtcttcagtgattgaaactcataccccattgccctttgccctccagtctccccttcagaaacatctctgctctctgtgaaataaaccatgcctcttgg

SEQ ID NO: 83601 - DNA, 2514 bp, Homo sapiens
gcctcccctccagggccgggtggggtggggctggccagggtgtgaccaccgtgctgggcagcaggctccagtccctaacccccagccactactggcatgaggggtccctcagggcccccaggcctcctctacgtcccacacctcctcctctgcctgctctgcctcctcccaccgccgctccaatacgcagccgggcagagccagatgcccaaagaccagcccctgtgggcacttctggagcagtactgccacaccatcatgaccctcaccaacctctcaggctggtcttgaattcctgtgctcaagcaatctgcctaccttggcttccccaagtgctgagattatgggtgtgagccactgcacctggccaagaatccgaatggattcaaagataccttgaaataattcctcaatgcaacacacacacatatgccagggttggtcaaatgggaagagagccttggcctgaagacagggacctgggctttcctcagctcttctgccaaggtccctactcctactgcaacacgaccttggaccagatcggaacgtgctggccccgcagcgctgccggagccctcgtggagaggccgtgccccgagtacttcaacggcgtcaagtacaacacgacccggaatgcctatcgagaatgcttggagaatgggacgtgggcctcaaagatcaactactcacagtgtgagcccattttggatgacaagcagaggaagtatgacctgcactaccgcatcgcccttgtcgtcaactacctgggccactgcgtatctgtggcagccctggtggccgccttcctgcttttcctggccctgcggagcattcgctgtctgcggaatgtgattcactggaacctcatcaccacctttatcctgcgaaatgtcatgtggttcctgctgcagctcgttgaccatgaagtgcacgagagcaatgaggtctggtgccgctgcatcaccaccatcttcaactacttcgtggtgaccaacttcttctggatgtttgtggaaggctgctacctgcacacggccattgtcatgacctactccactgagcgcctgcgcaagtgcctcttcctcttcatcggatggtgcatccccttccccatcatcgtcgcctgggccatcggcaagctctactatgagaatgaacagtgctggtttggcaaggagcctggcgacctggtggactacatctaccaaggccccatcattctcgtgctcctgatcaatttcgtatttctgttcaacatcgtcaggatcctaatgacaaagttacgcgcgtccaccacatccgagacaatccagtacaggaaggcagtgaaggccaccctggtgctcctgcccctcctgggcatcacctacatgctcttcttcgtcaatcccggggaggacgacctgtcacagatcatgttcatctatttcaactccttcctgcagtcgttccagggtttcttcgtgtctgtcttctactgcttcttcaatggagaggtgcgctcagccgtgaggaagaggtggcaccgctggcaggaccatcactcccttcgagtccccatggcccgggccatgtccatccctacatcacccacacggatcagcttccacagcatcaagcagacggccgctgtgtgacccctcggtcgcccacctgcacagctcccctgtcctcctccaccttcttcctctgggttctctgtgctgggcaggctctcgtggggcaggagatgggaggggagagaccagctctccagcctggcaggaaagagggggtgcggcagccaagggggactgcaagggacagggatgagtgggggccaccaggctcagcgcaagaggaagcagagggaattcacaggaccccctgagaagagccagtcagatgtctgcaggcatttgcccatcccagcctctctggccagggccttactgggcccagagcagagaaggacctgtccaacacacacagctatttatagtagcagacacagggctcccctgccctactcatggagccagcagccaggcaatggtgtggccctgcactggcccttggactccacactcagtggtgccctgcagttgggtgggttaacgccaagcaaaggatcagtttggctgccttatcccagggctgtcacctagagaggctcacttgtaccccaccctgttcctgtgtcccctccccagccatcctccccgccttgggggctccatgaaggatgcaggcttccaggcctggcttcctctcttgggagaccccttctctgcctagtccacagattaggcaatcaaggaagacgccatcagggaagccacatccttagtcaaccagttgcatcgtgcggggcaaaatgaggagcagaggcatggaggagggaggcgtgggatgggaatagcagaaccaccatgtcttcagtgattgaaactcataccccattgccctttgccctccagtctccccttcagaaacatctctgctctctgtgaaataaaccatgcctcttgg

SEQ ID NO: 83602 - DNA, 802 bp, Homo sapiens
gcctcccctccagggccgggtggggtggggctggccagggtgtgaccaccgtgctgggcagcaggctccagtccctaacccccagccactactggcatgaggggtccctcagggcccccaggcctcctctacgtcccacacctcctcctctgcctgctctgcctcctcccaccgccgctccaatacgtccctactcctactgcaacacgaccttggaccagatcggaacgtgctggccccgcagcgctgccggagccctcgtggagaggccgtgccccgagtacttcaacggcgtcaagtacaacacgacccggaatgcctatcgagaatgcttggagaatgggacgtgggcctcaaagatcaactactcacagtgtgagcccattttggatgacaagcagaggaagtatgacctgcactaccgcatcgcccttgtcgtcaactacctgggccactgcgtatctgtggcagccctggtggccgccttcctgcttttcctggccctgcggagcattcgctgtctgcggaatgtgattcactggaacctcatcaccacctttatcctgcgaaatgtcatgtggttcctgctgcagctcgttgaccatgaagtgcacgagagcaatgaggtctggtgccgctgcatcaccaccatcttcaactacttcgtggcagccccacctcttgagagcccccagtgccggagcagaaaggaccctggacccagaggcagatactgcggggtggtagaaaaggtagagtaggctgtggcaatggaataaaacacgattaaaaacgttaaaaa

SEQ ID NO: 83603 - DNA, 470 bp, Homo sapiens
ttttatttttttcactgttactgttttttatctttgattgataaaaatgaaaatgccaaaatgagggttagcttaatttaaagtataagcgtagttagcagctttttctaatcactcctgtccatttaaaaaataatcctcataggagtataaacagaggaaggagaaatggaggatgggcttaagagaaagagtatttcacaaatgtctgcatagcaaattcaattcatctacctagtagctccttccgtgttaacctacaggtgttctcccctccaaaaaaaagcatcttttaggaagaaaccaccttaacactacctttagaagattgaacttccagggataggttgtttgagagaatcaccaaaagccatttttaatgaatttttaaattacgctttctcattcttataatagtgtagcagccaccttccatctactatgtaacttataacaaataatcaagtact

SEQ ID NO: 83604 - DNA, 1108 bp, Homo sapiens
tcacccaacacaaccccaaatcctttaaaaagcccttcccagcaccctcatactgaggcaccccatggttccccatggtgtgtgatctctcttgtgtaaaagtgtgctgataaacccaactcgattcaactgcagatctgttcctcatgatctctgacgggtggacattgacaataattttttgagcttagattataactccattttatatttttgttgtagatctgcagtacttgatttgctcaaaaatgcaattaccagttaagtgagggaaggtcgtagtctttgttcagtacgtaaccaagagttttctatcattttaaaaactgtcactagtggcaacattgctcatggcatttgagttccaggtcaaaactactgcagtagtctgcatttgtagtgggcacattaatggtaattatatgtacatgtgcaagcatctaatgattgtgtcatcaggagttttggccatctccagtttgaattacacattaccgtaagttgcttccttttatttgtctgttacattacagttagatattaaagatacctttaatcatgatagatgatttaaaaatatgcctcacgtaagttatattgtttgtgttttagaataataaaacatgtttaaaaataaacaaaaaaaaaaaaaagaggctatttcccctatcatagaagagcttatcacctttcaggatcacgccctcataatcatttccttatcggttcctagtccggtatgcccttttcctaacgctcacaacaaaactaactaatactaacatctcagacgctcaggaaatagaaaccggtctgaatatcgtgcccgacatcatcctagtctcatggcctccaatccttaagaatcctttacataacagacgaggtcaagatcctccttacatcaaatcatgccccatgtttgaactagagtaacgatacggggttattcttaatctaatattccctatatctaaacagggctgcgatctggagtgaatggttgtacccgtgaccatgttaattatccaagtgtcctggcgccattggtaaagatgtccgggtacacttcgccaagggttagcgtctttgggcatttcgctaaata

SEQ ID NO: 83605 - DNA, 456 bp, Homo sapiens
cagttagatattaaagatacctttaatcatgatagatgatttaaaaatatgcctcacgtaagttatattgtttgtgttttagaataataaaacatgtttaaaaatatttctgataaaaagtggctgtgggcctgaaggggtgaaaaccattagtctacagtcattgatgaacagtctgtcccttaggccctcttagttggagctgaagagtgtatagatacgaacttgaactctggtgttctaatattctgtgttgcttactgaaggtagatgccatgtgctttggaaaccagcatggacattctatgaaatttgagaagagaagcagttttctcatttagatggtctatcatgggtggtaatatctagtgttctaagtgaatgtagtagatgctgcttatattaatttaagagaaatcctatatatcccattaaaaaaaatcgtagagaaacatt

SEQ ID NO: 83606 - DNA, 969 bp, Homo sapiens
ctttctgtaagcactgtgcacatgataagaattattgtctggcatagtttttgttattgttgagcaaataagcttcaggtgcttttagaatcttaactcagtattttaaaggtgacacatttattaccatactattaatagtactgtaatgtttctttttaggtgtagagttaggagacaatcttgaaaaattaggtaagaaggaaattatgatggaaaatttcaaacatatataaagtaggcccagtagaatgttctgcgtactcatccccaccttcaacattgggcaactcatagccaattttgtttcatttctacactctcacctcccctttcttatgttatcgtaaagccaacatgtatttattttcttcttcttgtttttttaacctttttgggatatgtagaaatacttttaatattcttttaaaaatctaattataagtactaaaaaagataggttggtagttgagactaaaggactgttatgtgaatgagttattctctgacaggaactagcaggtaaacaggatattttatttctcaagattttcatatgatggtgaccaactgcattgcaaaagaatggtcacattccagggttgtaactagttctggaggcttagttacgcaattgccggctctgtcatcttctacagggatgtgaccttacggaaaagtaaggaatctgaagcgtggcagatcactttgaagcttgcccagtttttgcatgttatcatgtaatagtgctaaaactttttgtcctccagctaggcaacataggtatgtaatttagactttgggaatactgtagagctgtgataaaccctgctttaagctacattctgggatcgtaacatgtaatttagaagtcaaaatccacttagaagaaaagaatttttaaagcacggtaaatcagaaccatttttgtgattaatttttattgatctttttaaatttttcataatt

SEQ ID NO: 83607 - DNA, 716 bp, Homo sapiens
tgattgaacccctgcccaccccagtctgtttctttatctgcctccctgctgggctgtgtatttccagcatggccctgagttggtgctcagctgttagcacatgacacggtgtcactgaacacgttaccccaccttcaggagacccttcctgtcttgtgggtgtgggttttgcaggaagcatctcttggaacagaggagaaccccaagctgccttgggtgtgagaggcctgggctgtcggcccccattgctgctggctggtgtgtccctcctcgggcagggagggccctgccacaccctgcacttcctctcattgtgcctcccttcctgtttagctagactgttaggctggagggatttttcctccctttcaggacctgaatggagctatttctccttgcatctctgccaacatctcccaggatccacctctgatccactggtgggctcgggcatcaacagctttgggttccaatcccagctgtccccattcagctgggtggtgagaagccagggtctcacctctctggacctcagtttcctcacttgtaaaaagaaaaataacaaggtggctcgcgtgtttttgcgtgggattatgagggtttaatgagctaaggatgtctgtgcttctgggaagtgtgagccatggctgtgtcacccttgtccctgaccccgctgatgtgggggctctgcagagagcccagctgggtactcactg

SEQ ID NO: 83608 - DNA, 593 bp, Homo sapiens
caggaccttgcctcataaaggacgaaggattcggcctaacaaagggcagcactggcgaaagcaaggcaccaacagagaagcgctgtatgtgaacaaaaccaagacaggcgctgtccagaggacacaggagcccttgcaagcctggaggatgaaggcagggtgtgcgtgaggggaatcccaggtgactcaggtctcagctcgcacttggggagctgaaacccaaggctcagccagggccttccctctcccgacagctccctgcagacaggcaccaaccacacacagggtgtggggaaaacggcagcgcggaggctcacggagcaggcactgcagatgcaggagggccaaggtgtgcaggagctctcaatgcagaggtggggatggagtcactgtcacccctgcacacgtgcacacgatgctccccagccctgtgcactgggggcgctggcagcagccaacaccctagctgcaacaagcacacgcagcgcccagaccctgagtcctaaacacacccagaaggaaccagggcgccctgcaggagcagctgtcccacctagagccaccaggagcagcgcccagaccctgagtctctt

SEQ ID NO: 83609 - DNA, 582 bp, Homo sapiens
ctcgcctgctttaatttcttgagatattacaaaataaaatattacagttattgccttattcacagtatacaaaggtattttatcatacaaactgttgatcctacagggactggtcatggaggagagtctatttttggcctaggattgtatggtgatcaagcaagcttttttgagacagaaaacgtcccaagaattaagcacaagaagaagggcacaatgtccatggtgaataatgacagtgatcaacatggatctcagtttcttatcactacaggagaaaatctagattaccttgatggtaccatacagtatttggtgaggtgacagaaggcattgacataattaagaaaataaatgagacctttgttgacaaggactttgtaccatatcaggatatcaggataaattatatagtgattttagatggtccattttgatgacattcctgatttattaatccctgatcaatcaccagaacctacaagggaacaattaaagagtggtagagttgacacaaatgaagaaattgatcatttcaaacgaaggtcagccgaagaagtagaagaaataaaggcagaaaaa

SEQ ID NO: 83610 - DNA, 474 bp, Homo sapiens
catgctagctatgtaataactgtaaaatttggccacaaatgcatttgctttgagaaaaatgatcatgtgaaattcctaaatatttgggccatatggaagatgatatcagaagaataatatattctctgtatgtcaaaggaggaggataataaaaaccgtagttattaggttagtacaaaaacaattacagtattcgccattgccaaaaattgcaattgcttttgcaccaaggtagtaataaaagtatggttgagtttctgtagaattccggcaaaggatgagcatccttaatctgaaatccaaaactctcccaaattcgaaattttttgggtgcccatatgatgcctcaagtacaaaattctacacctgacctcatgcaatgtatcatagccaaagcacaggtacacaacacatagtttattcagtgctttcaagagaaaattaaaattaacatgaggctacatgtaaataaat

SEQ ID NO: 83611 - DNA, 198 bp, Homo sapiens
tgagccactgcgcccagcctgcaaaaactctttgaaacaaaggtctgccaaacaatttgtctttgaattactgtttatggtatgcctgctggttgttcaaggagtccccagtgtcccaaggaatttaatttaaaattacctgaaatggtttctgcataaatatgttccttatagcatttttttttttttttttttttt

SEQ ID NO: 83612 - DNA, 520 bp, Homo sapiens
caaaacaaacacaggataggccatataagacaattatcttcgtagacaatataaacaaacatttgaccacttattaactatgcctatctaatctgtctccagaaagcagtttataatgagaaaaatatacaataatgttgataaaattaacataaattaaatatatgaattaaaaagaaaccaccatatgctaatcactcagcctgatgagccactatgataaagattacatttatctgaaggaactggtgctgctgtataagatcattcacttcataaatccttgacgaggactgacaatatgcccgccactaggtgaggctggggatacaacagtgaacaagacacaagatttagagcaggagtgtccaatcttttggctttcctgagccatatcggaagaagaattgtcttgggacacacataatatacactaacactaatgataactcatgagctgaaataaaattgccaaaaaatctcataatgttttaagaaggtttacaaatttgtgttgggc

SEQ ID NO: 83613 - DNA, 248 bp, Homo sapiens
gatggccgtataagaaaataaacaacttgctaaaactgctgaaactccctctgcttgtgagatttaaaaaaactggctgaaattggttggaaccaacatgtccaatggagtctgaatagaaagagcttgctgacatcacagcccgaatttccaccacatttcatactaactccccctgaatttgcatatgcaaaccacaagcaagcatgatcaaacagacaactgcgcgtgtccgaggactttccaga

SEQ ID NO: 83614 - DNA, 404 bp, Homo sapiens
tcttcgtaagctgaggaggatgtatgtcacctcaggaccctgtgatgattgcgttaactgcacaaattgtttgtagagcatgtgtgttagaacaatatgaaatctgggcaccttgaaaaaaagaacaggataacagcagtgttcagggaacaagagaggtaaccttaaactgaccgccagtgagctgggcagaacagagccatatttctcttctttcaaaagcaaatgggagaaatatcgctgaattctttttctcagcaaggaacatccctgataatgtgtccctaagggtagacctctaaaatggccgctttgggggtggctgttttttacggttgcagctgtagggatgaaataagccccagtctcccatagcgctcccaggcttattaggacgaagaaat

SEQ ID NO: 83615 - DNA, 788 bp, Homo sapiens
tataaacaggagtcttgttgcaagagtagatttataattccaaaagatctgttccaatagaataaggtgtttattttaagaatcttaatgtggaagattgaatctgaaaatgacaatcttattattaaataatggcgatattattaataatattattttattaaagtagacctcaaataagctctttgatttatcaaaaattttattggataaatattgaaatttttctgatttgccttactacttcacaacaattagctattcttctggataatctaaaaactttgaacattctactagtataatagaaaacaaattttgggtcgggcgcagtgccttattcctgtaatcctagcactttgggaggctgaagtgggcagatcacttgagggcaggagttcgagaccaacctggcaaacatggtaaaaccccgtctctactaaaaatacagaaaaattagctaggcaggatgtcacatgcctgtaattccagctactcaggcggctgaggcatgagaatcatttgaatctgggaggcggaggttgtagtgagcagagattgtgccactgcactccagcctgggcgacagagggagatcctgtctcaaaaagaaaaaacaaacaaaaacagaaaagaaaaaaaaaaagaccaggcccagtggttcatgcctgtaataccagtattttgggaggccgaagcaggaggattgcttgagcgcagaagtttaagaccagcctaggcaacatagtgatagccctatctctccaaataaataaataaataaataa

SEQ ID NO: 83616 - DNA, 494 bp, Homo sapiens
atttctccgtaaaggaaagtaaagtgagtcatattacatacaagccacaatacagaactgatctgaaatacactgcggaatggcctttcagtctatgctggactctaacaggaaaaaggcagaaggtggtcaatggtgcatttatttaaacccctcatttcctccctgacgagaagaaggacaacagttcttatttttcatattatttttgaaaaggcagaaaggttaattatatattgacatgatttggatctgtgtcctcaccataatctcatgtcaaattgtaatccccagtgtttgaggtggggccaggtgggaggtgattggatcgtggaggtggatttctcatgcatggtttagcaccatcttcttggtgctattctcgtgatagtgagtaagttctcacgagatctggttgtttaaaggtgtgaagaacctcccctctgtctctcttgctcctgttcctgccatgtaagatatgctggctccccctt

SEQ ID NO: 83617 - DNA, 793 bp, Homo sapiens
tttttccctgtctggattgtgtaaattttttttctatgaaaatgtgtatttgtgataaggaaaatattttttttaagatcccagaaaatactggaagaaaagaataacaatgagatttttcttttaaattttgccttattgttaaactatagaacttgattatacataaaatgaaatatgcaagccttaatttttttctttgtatgcttagaaaaggtgaggtaccttattacatatgatttttattagtttctggaggcaaatttaatttttattttaaaatccaaaatctattttaaaagaaatagttctcaaaaagacaatgatgactgggtgtggtggtgtgtgcctgtagttcaagctgctcaggagacagaggcaggagaaccacttgaggccagttcagtctagcctgggtaacatagcaagaccctgtccctaaaataataaaaaatttaaaaaccacaataatgtgagttacaaaaaagtgtaacttatgaaaagtcgtatttatattgacctttgtaagagctcaattatttcaggaagcaaggaatatcaccattctgagtaatacaatttcaactaatctttatttcttctacttgaagtcagtgcctatctaccacaaacattcctatatcagtgtgcaaattaatttggagacaataggctttttacgacaatgaattggttaacttttaaaagttgttttttatctcacattttataatacgataaataaatgtacagcagatctttaagaacattgtttaactataatgttgatggc

SEQ ID NO: 83618 - DNA, 532 bp, Homo sapiens
caacacactgcaagcagtaggataaggccaacttcaaccatgccccagtggcctggactcagccacttaactctcacaaacaatgagtctaccttcaaaaatcagatggacctgaacttcctctccctgaagcagaccaacgtaggatgaaagtaatcatcaccaaggacagtcagctaatcagcaccaaagccgcatcagtcagcatctgagaaacagcttattcacgggaccaggatacttaagtgacaccaactaagattcactctcatcagcagatttccctttggctagattacctttttatcacctcccaacatttttttgttttgttttgagatggagtcttgctctgtcactcatgctggagtacagtggtgtgatcttggctcactgcaacgtccacctcccgagttcaagagattctcctgccttagcctgccaaactgctgggattccaggcgtgagccaccatgcccagccttcctcccaactattttaggtttgggagtacatatgcagttttgttaca

SEQ ID NO: 83619 - DNA, 370 bp, Homo sapiens
tccagaacttcagggttctttaacctccacggtctccttgaaaagagagaggtgtgctctaccacttgtctaaggagcaagatggaaaaacaatgcaggagggtctatctttttaacagaaataattgctaatcaaaatgaacctttagaaactccaggcagtctcatggagataattttgggcagcacgttcttatgtaagccaaataaccctgcagggagcctgttgtggaactgggtcccctaagatcttcctaccttatctagagtgttccacgccattgcctcaaacccacacattttctaaaagttgaaggtttttcacaacatttcttatggctctatgaggcaagagaggtgcagccatttg

SEQ ID NO: 83620 - DNA, 276 bp, Homo sapiens
agatggaaaatattggtagacctgggagatagagatcactgaaaactagataacaggatagtttgagaggggcacctagttagtacaggacagtgctattctagcgacgacccatggctccatgagcaccatggaggtgcttctgaacttaaaactttgtttttatcttggtgtaaaatgcttcctgatatctcagagatgatgaaaaaccctcctgagatttgcaaattgagttgtttaaacctgttgcaagtataattccttaaacatgtacat

SEQ ID NO: 83621 - DNA, 842 bp, Homo sapiens
ctctctccgggtcttcgggggtgcgcgtcttccggccgaccctcctcctgctcctgctatgttgctgacccacgctgctggcgcgagtggtcttgcccctcgggacccgaggagggaggagttcttcgttcccttcagctttcaggccccagggagaacctttcagtcacaggcagcctaggttcaagaagaagaaaacctgaggcctcggctcaccctgacagggaagtggcgtggggaccgctaaaggactgcgaggttccactgcccagggctgtctaaccgcttgctttagactgtgggtgcacggagtccgtcactcagcctccaggaccagggctcctgatgtgtgagcgcgttccattcccccattcccacaagaaccctcgctcccgcgaaggcctcctgagcttgcgcgactccgctgggccttggagagctctggggagggaggcgcctctccagcacccagatccccagcctgcagcgcctcggggccagtgtggcccggaatggcaggtgagtttacaggggggtctccggggcctttcctaagtctatagacccatgtccttttgagaattctgaattgactccaaatggaaggcttaccatgcgattgaaaaaatcgaaacaaaaccgcaggaccctattcgtccctggcctcctctggctcatgctctgtgcatttgctggaacccctctctactgcagaggtcaccaggagggtctgtgcggggtctggggatgggtagcgaagcgcagtttccagtcctcccagcagcagctgttttcctgagggactttctgggacccagtgtgttccaggtggtggattcctc

SEQ ID NO: 83622 - DNA, 420 bp, Homo sapiens
ggaaggcaggaaaagttataaaaagttgcttctaagaaaccatcccattccaaccttttcttaactccgtgagcttggctcaatttaacattacataatgcagggtttcctcgttaattcatttaatctgcttcaatatgggcatcatgcttataattttcatatcactaaaactattgtggtataatgtccctataatgggaaaacggaaatgatcagatattatctaaattagcagatagtagatttcttgtgactttgttaatatgtaattcatttaagcaaacttaatatccattaactttccttgtaggggcccattagctttaataatacattagctcctttgtacgtcctgagtagatattcacccagtttccacccctaaactctttcagtattttcccagaatatctttta

SEQ ID NO: 83623 - DNA, 403 bp, Homo sapiens
catgtgccaccacgcccagctaattttgtatttttagtagagatggggtgtctccatgttggccaggctggtctcgaactcccgacctcacgtgatccacccacctcggcctcccaaagtgctgggattacaagcatgagctaccgtgcccagccagaatgtgatgaactttttaagattctcaaggtggtgtggaggatgtgaggagtggacaaggggagactctttgggggaaatattcctcttgaaaatattcaagatgagtggtagcaaccagggctggggctggcttgtagagataaagggcttaaagaaagttcatgaaagttgtgaaagctgtggaataaaatacgtcatttaaggatagttacaagtttttaaatttgaattaagatccctctta

SEQ ID NO: 83624 - DNA, 287 bp, Homo sapiens
ataggcgtgagccactatgcccagcctctattcttacttttcttattcccttcttgctcccttttatgagatagatagatatatatattctcccacctcagcctccctagtagctgggagtacaggtgcacaccaccacgctcagcttattttattttttttgtagagatggggtttctctgtgttgcccaggctggtcttcaactcctgggctcgagcaatctgtccaccttggcctcccaaagtgctaggattacaggcatgagctacttatgcctggtctttca

SEQ ID NO: 83625 - DNA, 518 bp, Homo sapiens
aaatgggtacttttgaagcatctgcactgaaaaatgctttccaaagaaaacatttgttagaacacacaaacgatttatttgggtacattgaagaacctaaacatttgattcagctgccagtatgtgctttgctggctaatgtttcttcagcatttccacattttcataggctagcggccaagttgtccgacagtctggtacctcttgggggtggaagtgggtgtgtatatgtggagctggtagcactagcatgctcctgtatgtcgccagttggcatatggtagaactggcagaagctggccccgccaacctggaagcatatagatactaacaagcttcttcagcctgcccaaaatggctcgaggaagctcactcagatcctctgtgacactgatcccaggaagtcagaactcttagagcagttttctcagctatgtcggatctgaggtaatcaagacagtacatctgaactggagtatgccatcattgcactaagacatattgtgattaaaaaaaaa

SEQ ID NO: 83626 - DNA, 705 bp, Homo sapiens
ttttatttttcatggttaatcctgggaactatattttaacttcagtggcttgtttccaccaagttcctgtacatcttctggtgggggagtggggttattagtttatagtatggttttagttctcatttcagtgtggaattagtcatttctgtataagggcaaaaggttctctgataatggtataaaactatagattgtttttggagtagcagtgacacttgtcaatttctaagatttataaggcttaaataccttgcacacatgttttttaaagtagattcaggggtcgggaaaactgaaaaatcactgtctttaagtacaagagaaaaatggaaatgcataaatattgaaaggttttacaatttgaaatgttctttgtggttttttcttttttaggtatgttttcataagcatatataaatttaaacatttttgatagcctctggccttaacttactgagcatgtgtcaccattgcacagctctttaaacagccgcttttaagatcaatgcaatttttcttttaattgaagattttgaaagattaagagttagtgagatgagctctctgcctcttttagtagaattgaatagtctggattgtggatattatttctctccgcccttttgtaaccctctttggctaatgtcctctgttcatccacgtattagccaagtgccagtaaccctgctttacattgggatt

SEQ ID NO: 83627 - DNA, 347 bp, Homo sapiens
gagaatcaacttgggaaaggcaaagtagatcccttttacttccctttggttccagtactgtttcatgtttttcattagaatgtggataaggaaatggggggagcgctcattaagctttgtgaatgacagcaaactggcaggagtattttaacacaaggtaactcctaacaagggccatatccattgaaaacggggtaaatgcacttgactaaaatggacattagaatgttaaatgtccttgtcaattgggagaaatagaaataaactgtaaaatccatgagagagaagtaacaacattgaaatgtaaaacaagtataaataaaaaagatgcacacattatatgtata

SEQ ID NO: 83628 - DNA, 416 bp, Homo sapiens
tctcacataaagactgtaagtccgtcccacattgcctggatttttaacagagcagtgattctcagtgtggtcctgggtcccacagccagcagcatccgcatcactggggaattcgtgagaaatgcacattctcaggcctgttggcctcctggagaggaggctctggggtggggcccagccatcggcatttaacaaaccctccaagggacccgacacacacacctttgagaaccaggatggaaaacatgctttttcaacacacattccctatctctgcacagcagggggactggatattctcccactctgcagatgaaaacactaaagcccagagaggttaagggatttgcctaaagtcaatcacctgcccctcccacactacacacttcagaaatttacctgagggggggtttcag

SEQ ID NO: 83629 - DNA, 699 bp, Homo sapiens
ggaaaaatggctaccaggggctgcagaatgatattttctttgtctagaaactacaacagagagaagtctgtctcccaatgtcagcatttgatttcaagggcaactctggctgtaggtatgaatgaatgacagggtgttgctctgtgtctcaggctggagtgcggtggcatgatcatggctcactgctccagctcagttttggttatgtagctatcctgtgtttctaggagtaggggttgtgccatagtagacacccagctagagctgcacggacttggggaggaattcccaggcaaagggtgactgtttccaggagaagggaaattggaaagtgctttgagctgattttaaaaagaatagttacatggacccttacctcataccatacataagaattaattcaaagtggaaccaagaatgaaatataagaggtaaaactatacaactctgggaggaaagcatagggacagctcttcatgaccttgtatttggcagtggtttcttacataagacaccaaaagcacagcaacaaaagaaaaaatagataaattagacttaatcaaaattaaaaacttttgtgcctcaaaagatacctatcaataagtgaaaacaaaaccaacagaatgattaaatatttgcaagccctatatctgataagggcttatgtctagaatagataaagacatcttagaactgtac

SEQ ID NO: 83630 - DNA, 314 bp, Homo sapiens
tttcttataaagacccttatgatgacacttggcctacccggataatccaggggcatctcccccatttcaacatcttcaagttcatcacatctgcaaagtgccttctgccacatttccaggttcagggattaggatgtaaacatctttgaggagctgttattctgcctgtctcctatgttttcttctagaagctttctatttttagattttacatttagatctctgtttcatctcaagtgaatttttgtgtattgtgtgaagcaggggataaggtttattttttctgtatctttttttttttttttttttttttt

SEQ ID NO: 83631 - DNA, 359 bp, Homo sapiens
acctccgactcatacatgctttcagtaagacccagtgagctaataaggattttgtgttaaatggtgagtctgtgaagatgcctttgcttctgcatttaagacagagagaagactttctgcatggatgtatgttttaacacttatgataaattatcggaaagagtggagtgagcccagaccaggagataatttacaatacatataaacaaagatccagcatcagaatgtacaaaataattcctacgaatcaactagaaaaagacaaataaccaaagcaaaaaaaatagcaaaggatataaaaaggaaactggaatgactcaaacatatgttcaacccctaatattcaaataaatataaac

SEQ ID NO: 83632 - DNA, 650 bp, Homo sapiens
gtggcctgggattgggagggccatcattttcatcccctacccccactccagggaagagtgtgaggcctgggctggcctgggctttgctgggcactttcataagctcctaagcttttctttgtgtcttaatggctgttactttggtatatgccttcctgggttcatcagactagtgtttcttgaacttaatctcctcccagacccacctgcacttgaagtaacacacatacaactcacctgggagcatgggaggacttcctaggccacgcctgatcaaaccagaggacagcaggaggaatcagggaatgtttcctagaggagctggaacttgacagaaagctgggagggatcaggaagaaagaactatctgcgaaaggcataaaaggagaaagggaaaggcaagattcaggtcagttatattcaacaagtgtttgttgaacatgtcctttgagccctctgtgaagccctgaagccctagagggagaagcttgacaaaggcaaggaaagaatcttctgccatcaccctaacattgccaccttgaaaagcttcgatggcagaagacttgataatgcaaaatacttaagggataacaggcagtagggtaaaatccggcacctgactcctaacaggatgctcatttggaagagga

SEQ ID NO: 83633 - DNA, 332 bp, Homo sapiens
ttttgacaggaaatggaggtgtattttaatataggcagcgagggagagggaggtggcaaggatgactcctagttcctgacttgctcgcggatgtttgtcgaatgaatgatccagtgaccccaaggcagaagtatctcagagagatccccccactcccctccccgcacccgtcaccacgctgccttcggagctctgaccgtaagggggtggatggaaggcaggaggaagggaatggccacggagtcttggtccaggagctgctagactggacacttctagcactggtctgagccaggagacgctgcgaaaagagggcaaacgtttctcctctc

SEQ ID NO: 83634 - DNA, 230 bp, Homo sapiens
taatggagtcaggttgatttttctatacttccgttatgttatgtatgattatgaatggcaaattaacatgaggtatagatctttttgtgtattatgttagaacatctatgcaaaacaaatattttggtaggtaggtaagcactcaggccttctcaattttcaccataattcaaaaaaatcattttagactatgactaatttcattttctccaacttataagagagcaaaa

SEQ ID NO: 83635 - DNA, 116 bp, Homo sapiens
ctggcagcagcaggacagggaaagggtgagacattggcatgttttggagatattcaggaacaagactccagaattcagtgccagccgaattattttttcttaggtatttactatgc

SEQ ID NO: 83636 - DNA, 283 bp, Homo sapiens
ctgatagggtagtgggtggaagatgatgggaatagaaagatcttgaacattgggtggttccaatgttccacgtgaggatgaaagggagccgaaagcaagccttgcctccctcactactgtcttgaagtgactacaatcagagatgacagtcccaattcctaggctatcatttatgaagcatggagctctgatgggttacctagcaggcacagcaatgtagtccatctttaatgtgagtggcaggaaagtcaaccgcagccccccagagccatcgaccactggg

SEQ ID NO: 83637 - DNA, 239 bp, Homo sapiens
aagaggggtgttcctcttgggcggccctgagccaccctcggcgggtcccaggagcctgcgaggcagctcccgggagaatgggggtcctgaggataggctgggggtcccgggagcgccgaaacagcgggcccacctgtagtcctgcctgccgtgagggtaccccgctcccgggccagccgagccctgccgctgtctggcgccccctccgcctggggaagccccgaaggcagtttccgccc

SEQ ID NO: 83638 - DNA, 345 bp, Homo sapiens
ggcctggtgtttggctgaggtgcactaggacccctggccgtggtgtactggatggcatcagttctgatgggtcagatgtccattctaacaggttggtgctggagagggagcagttgttaaatatctttactatctcccctgctccggacacctagatgcccaaatatacagcacgtagtatcgaggcaggcccttttgattgacatcagaatcaggtttgcaatggaataggagctttccttcctcctgtcactttagccccaggctccacctcagagtctggaatgctcatacctatggcaggtgaccttgtgtaacaggttggggttaatgccattctgtcct

SEQ ID NO: 83639 - DNA, 474 bp, Homo sapiens
tcatgtcaccgggtcacaggaggattgtttttaatatctgagtttttaaagcaagggactgtaagtttactattctttaatactaattttttaaaaatgcatacttagtaacagtacaccacataatcctaacacaaattatccaattaaattctaaaccttaaatttttttcatttttttttgttttttgagacagggttttgctccgtcactcaggctggagtgcaggggcacaaccatggctcactgcattctccacctcttgagctcaagcgatcctcccatctcattttttcagagatgggggtctcactattttgcctaggctggttgagacttttcaacagaagcaactgataccacaaaactattaaataatttcttcataaactgaggccagcacggcggctcactcctgtaatcccagcactttgggaggccgaggtgggaagattacttgaggcctgagacca

SEQ ID NO: 83640 - DNA, 526 bp, Homo sapiens
ttagtagaaatagggtttcaccatgttagccaggctggtcttgaactcctgacctcaggtgatcacccgcctaggcctcccaaagtgctgggattacaggcgtgagccaccgcgcccggccaaaaatgacatttctttaaagtgtatctctccggtttcacaatgaatgatggcagcaactggtaaaccaaataggaggttctaacagtccaacaagaaatgataggggcctgaactaatgatgacataaaagacacagaatgtaacgtcacaggaatttgtggatacttccaaaccagggggaaaagagggcggtaggagtcatcctaaaattcccaggtttctcactgggataagaaagtgctgtgctgctgatgccactgagatggcgaacttaggcagaagttattatttgcttgtaaaatatccaaaagaaaaaatacatttaagagtggctttttcccaccttctgggccattcaatattactgctgtctactatagctcatatctttttctccctacta

SEQ ID NO: 83641 - DNA, 356 bp, Homo sapiens
attacatataacaatgcagcatttgatctaattgaaaagtagctactggaagtgaaggtggttttccataagaagaatagctggtattatcaggaataacagtgaggtcacagggcattgagttgagtcagtttgttctgacacttacatatttgattttcatgcctcttttattctaagatgcataatccatgtcacccaacatggagctggactaccaactactcttcttttgaaagctatgctaatttgagacattcttaccgggcgcacggtgtgggtatgggttacagagaatgtggatgatctatttctcaggaaacctctgaaaaggaggacagtcacccatctgtctg

SEQ ID NO: 83642 - DNA, 217 bp, Homo sapiens
ccatgcaaaaaccaatcaaaagaagctaccgtaacaacagtaatatcaaataagacagatgtctcaacaaagaaaattaccaggaaaaaagaggaacaaggcccaggcaccgtggctcacacttgtaatcccagcactttgggagcccagcagagatcacctgaggtcaggagttcgagactagcctggccaacatggtgaaaccccgtctctacta

SEQ ID NO: 83643 - DNA, 413 bp, Homo sapiens
ggtggggtgttactatattgcttagaatgatctcgtactcctgggttcaagtgaccctcctatgttggcctcccaaagtgttgggagtacaggcatgagccaccatgtctgggtgcattaagcattcttgaggagtctctgacccagttcctctccagtgtagtactggggagggcagaatttttaacagcatagccagcattctgctgggaagtgagaagccagtgcatctttcttatgggcactccaatctctacaagcaatttcctaaagctctgctcacttgacactgtagatggagagaaagcaacccctcctactttcaaaggaagaaaaggtaaaaaccctttcaactgtgggcgctatgctccccacaaggccaacgatctcagtgtttgtctttctctactcat

SEQ ID NO: 83644 - DNA, 433 bp, Homo sapiens
agagggctctgtgacaccctggtctcaccgccactcttccaaagtcgcagaggctttagcagagatgggcccagcctctctgagtcataggcttctgcacacgggagctgtctttagagggagggtggaatttcatcagccacccacatgggggagttgagggcaagaattaggagcaaagatgggaaggggtctgggaggaatggccagtgatcccctttgacaagtgggcaggaaacgggggctaggtcaaagttgagtggaagacctggagggagacgggaaggtctctgtaggcacagttcagacaggagggaggtgtgagccagggcacatgccggtggccgtctggcaggatttgggacatgctggagcagggacagcggctcatcaggggccattgccctcatccaggccagagtgtcacaagccc

SEQ ID NO: 83645 - DNA, 532 bp, Homo sapiens
gccgcgcgctcccgggtccgcagcccccaccgccgacagggccccgcagggcgcagcggggctgggaaggggaagtcggccaggcctgcgcggcttcccaggctgtcccggcgcagaggcggccccgggcctccttggaaaggaaccgtccccgtgtatcccggcggggtgagcacaaggcgggtgctgtccgactttcaacagtcgcagcgagaatgtcctaggaaactaaacaactttttaaactgtctttccaaagaatcaggatgctgagaagtcaaccagctcctggaggactgaccggaagggcacctggcctcggcccgggcggctccccattcgttcctcactgcgcccctcatccccactcccccggccctgcagggtgccccgtggtgctgaccatggcattgcctggacccatcaactggtaaaacacacgagccttagcagagatacgatttcattcctcaccagaggcccttgagattttaggattctatcaacgctagtaaaggaactacttgaacac

SEQ ID NO: 83646 - DNA, 434 bp, Homo sapiens
acagaccagacaatggtgagaactgaagtgagcttttcctttgtcccatgggtaatcaccaagtttggccagaagtatgaatgacaggtattcatgagtgttaactccctcctcccaagcaattcttggtactcaacctaggagtttgttccccatctccccgagatgagcatatcctgctgtattccagccagaaagtaactgagcatttcagttctgctatttgcctagttttctgggtgggaaagacagacacattaaggtttggccaggcacggtgggaggattgcttgaggccaggaggttgagtttgagattagcctgggcaacatagagagacctcatctctacaaacaacaaaaaaatagaaaaaaattagtgggcatactggcacacacctgtagtcccatctactttgggaatttgaagcagga

SEQ ID NO: 83647 - DNA, 218 bp, Homo sapiens
taagcccagctattggggaagctgaggtgggagaatcgcttgaaccgggaaggcagaggtgagttgagatcacgccactgcaccccagcctgggcgacagagagactccatctcaaaaaaaagaaaaagacacagagcaatggggaagatagagaatagaatttcacatctggggggaaatgtgtccatctaactgcaaaatattaagatagccttta

SEQ ID NO: 83648 - DNA, 916 bp, Homo sapiens
gttcagtgctatccaagtgactcccccgggagaggacaactggaaatttatgcctggtgtcttcctggactccgacctatgcacctttttccttggatgattttaacctgtctccttttgctgcaatgaaccataacccatgagtatatcagcttttctaatttttgtgagtccctcaagtgaattatcaaacctaaggtagttttgggacccccatcacagagagtcaaacaggggcagggcaagaagagctgcttttcctggaaggctaatgagtctgaacttcgccctggaggtaatcgttatagtaactccaggctctaacctggagctgacatgataaggtcaaatgtacacctctagaagacttccgactgcagaggggaatggatgggggagctgagggaggagagctgaagcaggaagaccatggcctggaaagagatggctgaaccagtccaggtggcgaggagtccatgtcagctgccgtcatccacaccacagatcagacatggcaaagagtggccaggccttctgagtgaaggtgatccaacctgtcaccaagcctaagggcaaatcctggctgtgctgtgatggctccaacaaccccaaacagcagcgcagaggctgcagccaccctcggaggcaacactgggaaacgctcattagcagccttccattgctcacccgccccatcccacctctgtgcatcccagatcatcagcgaagtgcacagctggcttccatcctcggagccttcctccttcatttgcctattcaacagttacaaaggcctgagttgcaaaggggcttacaacccattccacccagaagaaagagaactgagactgagcaagacagagaataggtggaaggggagatgaaaccaagcaatctctagatcccaaatggggac

SEQ ID NO: 83649 - DNA, 387 bp, Homo sapiens
tgccgccctgcctgagagctgcgtcgccctaggaatcactcccgccacctcgggccgccgggtccccccgctggctccagtcttacctgacggctgtctctgtcctctggagaatgctgagcgaaggtcaggtgtccctaaggtctgaagaactgaaaggctggaatgtctcctggtgggcaagtgcggggtcaggggtcacagccagcctggaggcctccttccctaactccttgtgggagccacctggagactcaggaatgagcctgcctggggcatgggtcaccgtgcaggaccccagacacacctgggttgaaaccctactgtctccaagcttgggggtcacttccattcttgaacctcagctgccacacctggggggttaca

SEQ ID NO: 83650 - DNA, 599 bp, Homo sapiens
tcacagaggcagcggcggccatgttggaagagggcaaagagccgccaggacccgcccaccccgcggatgcgctggatctcgagggcgcagaactcggagtggcgaggagaagcgggagggcagattgagcgcgcgtggggctcgtgagcctggggactgggagtaaaaacaactacctcaagcaggaggctcagtccccgccaacactcgctgggataactctcgataggacggaggaggagccccccagtgggaccctcctcagtgcaatggatgggaccctcctcagtgcaatggatgggaccctcctcagtgcgatggatgtgagcagcccaggccctaggggagcagagagtgttccgctgaagaaaccctctgctggtcctttgagcgcccccagataagagagacagggtctctctctgtcgcccaggctggagtgcagtggcgcgatcccggctcactgcagcagcctcaacttccagagctcaagggatcctcccaccccaacctcccgagtagctgagactacacgaatgtaccaccactcccggctaagttttgtgtttctcgtagaaacgtggtttcgccatgttgcc

SEQ ID NO: 83651 - DNA, 417 bp, Homo sapiens
gctctgggtggatgtgtgtgtgtgcacacatatgtatgtatgtggatgactaaaagtgcatgctctcctctcctttcccagcttcctctccagcacagcaacttgtgttcgtatgcacacacatgcacactctctctcatgggcacatgcatacccacacacactcgtgtacatttccaggaaatggaattacatttcagatagattcagattccaacggcagtcttctaaacacttttatgcaagcagccattcaaggagaccctcagcaaaatataaatgacgaggagctgccctcatggggccctgtggaaagcactttgcagtccagccttgggttttgtggtcacagagttcacctgtggatgtttgtagcacactctccttgtcttgtctgctctgggtcaccaggcacag

SEQ ID NO: 83652 - DNA, 624 bp, Homo sapiens
cagcagagagcagggagtagggagagtgctggctccagatgcttctatccagggagatgctgggaagtggcccagagtcaagggcttaggaggttgcaaacctcactatgccaagagctcggtccctgatccaccccatccccttccacatctccctgactgtccttctttacatttgctgggcagagtgccacctgtgtgcaccagccctccctgcctgcacaagccacactgagaaagccgttgcctccagctcatggagagaaacaccttctcagctgccacgtcatgagcaagtttgcttcgggaccacctgggaaaccaggagtagaaggggtaaactcttcctcatctgccacaggcctgccttgcctcaggccacgtcaccttaccccagccatgttgccagggcatgaggactaagatgcttgccctgccaagcccggaggggatgagcagcctcagctggtgccgccacagacagcacaccacagaggtggctcagggaccttggtagatgggaatgtgagaatctattaaaataggcagggatctccggtcctctgtcaagaggcaatgctgacggctttttcctgctggcgtgcctctgcccaccagccttcc

SEQ ID NO: 83653 - DNA, 335 bp, Homo sapiens
tctgcacaaattgcttctaaatttctttcctcaaagaagaggtattccccctgctagtacatacatcaagcctaaccagaaatttggagtaaatcaaacagagggaggccgaggtctacctttcattatgcaaaaggggcttaaggaagcaagtgactgtaattaatattaaactggacaaaaatagccgtttattccttacaattgcttcaacactgccagcagtatacaaatagcccgttatcctagtcactggagatgacttcataaacagttttccctctgtatatataaacatacatcttctgctctgatttttaaaatgtctttatgct

SEQ ID NO: 83654 - DNA, 398 bp, Homo sapiens
atagtgtaaaattacctggactttcaagtctcagtaaatgttctacggaaatgtaaaacttgttcacaatagaaataagttgcaccatagtcatacaatcttttgaaacttggacattcactgtttagaggagattcaccctttaaacaagtttcacaaaagtagagtcaggcggatcacgaggtcaggagatcgagaccatcctggctaacgtggtgaaaccctgtctctactaaaaatacaaaaaattagccaggcgtggtggcaggcgcctgtagtcccagccactcaggaggctgaggcaggagaatggcgtgaacccgggaggtggagcttgcggtgagccgagattacgccattgcactccagcctgggcgacagagtgagactctgtctca

SEQ ID NO: 83655 - DNA, 304 bp, Homo sapiens
ttgatttaagttgaaccaatctaatagtcaagagactagttaagtcacaacttgaaaaaaaaaaaacagaaaaatgagaattaagttaggttgacaaagtgtgagaagaaaaaagggatataaaaagttctatttttttttaacttcttaaaatatctcatatttatctactttccactgtcaccaccacctagagtagggtgtctaatcttttggcttccctgggccacattggaagaagaattgtcttgggccacacataaaatacaataacaccaaccatagctgatgagctaaacaacaa

SEQ ID NO: 83656 - DNA, 753 bp, Homo sapiens
ctagagacaaggtgccctccgaccccttcttccaaatatactcttttgcctcttgtcttttattcccgtgtttgccccctttgttcagtccccctaggtccatgcaggttacatagtggtgccccaaacagtgacacaattgggttctcaacaagtggtgactcagaacagggacgccaaggatgccaacaagtggcgtctgaacacgggacttcgacgatgtgaacaaaaaagatctgctggagcagagaagctgaaattgacaaggcaaacggggaccccaggatgagtctgccggcagcatatataaggcagggactataggaaatgaaggtgaactcgtggagattttggagagaatttaatgaagaggctgtttaccaaggatctctctctgtctccgaggctggagtgcaatgttgcaatcagggctcactgcagcctcgacctcctgggctcaactgatcttcgtaccacagcctcatgagtaactgggactacagatagtatctcatgatatgaatggtcctggatttacttacacatcctcctttggatgagcaaaaagtaaatttttcacagtgatagacatttgtagtgctttttaaaggcactggttctggtggacactgagagacaatttttatttgctgcacgtggaaaggacaacaacatacctggacagaaatgcctcgaggatgtactgaaggcccctctcacttttcacaggtactgaagacagatttaacggac

SEQ ID NO: 83657 - DNA, 423 bp, Homo sapiens
ataagcaatctaatggtgtactcaagaactagaagagtaagaacaaaccaaatccaaaattagtagaaggaaagaaataacagatcacagaagaattaaacaaaatagagactaaaaacacaatagaaaaaaatctacaaaataaaaagttgttttttttgaaaagacaaatacaatcaataaaccacttggtaggataaccaagaaaaaaaaagggagaagaccaaaataaaatcagaaatgaaaaaaaagacatcacaactgataactacaaaaatacaaaagatcagaggcactaacaaactaaaaaacgtacaggaaatggatgagttcctggacacatacaacctatcaagatcaaatccagaagacgtagaaaatctgaagaaaacaataacaagttataagagattgcggtgttaa

SEQ ID NO: 83658 - DNA, 603 bp, Homo sapiens
cggtgatgggtagagaatggagaggagagagtgaggtggtaacactggaaaggtgacgtggtaaattcacacagtgaaggaggaggtgcacatacaagtggaggggtcccaggtgctcatggccatggtggggggaggccaggctggagagaagattcaggtgttggtcaataaaatgatgggccgggtgcggtggctcacccctgtaatcccagcactttgggaggccaaggcaggtggatcacttgaggccaggagtttgagaccagcctggccaacatgctgaaaccctgtctctactaaaaatacaaaaattagctgggcatccgggcctggtggttcacgcctctaatcccagcactttgggaggccgaggcggacagatcacaaggtcaggaattagagaccagcctgaccaacgtggtgaaccccatctctactgaaaataaaaaattagccgggtatggtggtgcctgcttgtaatcccagctactcagaaggctgaggcaggagaatcgcttgaacccgggaggtggaggttgcagtgagccaagatcacaccactgcgctccagcctgggcgacagagtgagactctgtctca

SEQ ID NO: 83659 - DNA, 705 bp, Homo sapiens
ggtatagccatataatggattacagctgttaaaaagaagggtggatgtgtgacataacaaaaatatattagaattgaagaccgggcacagtggctcatgtatcccaggactttgggaagctgaggctggcagatctcttgagcccaggagttggagaccagcctgggcaacataatgaaaccaagtcctacaaaatatacaaaaattagcaggggttggtggcatgcatctgtggtcccagctacttgggaggctgaggcaagaggattgcttgagccctggaggctgcagtgagccatgatagcaacactgcattctaccctgggtgacagagcgagaccctttcttaaataaaataatggaatgaaaaaaaatgtaagtacagcagcagtacaaggcatagcatcaacctacttttgttgaaaaaattttttttagtttgtatacatgtagaaatgcctgaagcaattatttgcagattacctctagataatttatatgcctgtttggtggtgttgtttggttttggggttaggttacactgtctttttggagacagagtctcgctcgggtcgccaggccgaagtgcggggggcgcaaatcatcagatcagcgggaacctccggctccgggggttcaagcagattccccgggctcgagactcccgaggggctggggactacaggccacgtgccaccaaaccca

SEQ ID NO: 83660 - DNA, 742 bp, Homo sapiens
aatacaatggcttctggtcaattcagtcataagatgtattcctggctggaaaattctgctatttggaatctacagttagacaagactgcatgttagactctgaagttaggcagggtcaccaccctggacaggtatggaatgtattcggtgttgaggagtttggacagtacagcagcagctgctctagagcataagcagatggtgaatgttcaacttgattacattgaccaaacggaattggataacaaactcgaaatagtttgagaaaaaagcacacgtataatgcttagagatgtaaaagccattttgcaagaatgagaatgagtgctacatgctaaggaaagtggaatggaaagttaagaacagttaagaatgaggtgaagactagaaaagggaaaattgtctttgttgaagagcgcttgtctcctgacagttactcagtgatgcaaagctaaaaagagcactgtgctcatggtggaaaataattcccaggacttgacagggaagaatgtactcattccacgccccgggcagaagtctgctgagacaaacagaagaaagatagttagtgagcaaattcatcaagaccaatatcatgtatttctccccctggcctgatggctgatttgcactcctcctgtaagcaacaaaactgcaaaaccagtgctacaaaacagaagcacctgtaagtccgtgggagcacatctttgctcaacaagagatcctgacaactaacaactaa

SEQ ID NO: 83661 - DNA, 538 bp, Homo sapiens
agattgggcccactcagataatgaaaagatggttttgatattgaatttgttaatcgtcttttagatgtttcttcatctgtatcttttaaaatacacctacctcatactttgtgtgaagtttaaatgaaatatctttgctttatttgggatgctgtggcatttcctttttttgaaagttgtgtttaatcactaatattgcaacaattctatgtgttaatgattctctaggtaaaagaaatatttttgacatcgtaggctaaacaggcatttgtaaattagttgaggaacattttttgtttcagttgggatatatattgtaagtatcctaaaaatctcagaatgaacctgttttgtaaactggactgattgtacagtaaaataccaagtaggtaatgatatccaaataccagcttaaatcctaacctataatgggtgctgaaaagtgtttactgaaataaaagtaactaaatagtgtgatgtcttttaagaattttagtactctataatcactaacctagaagcctctttattataagat

SEQ ID NO: 83662 - DNA, 404 bp, Homo sapiens
tctttccttttctttttcttttctttcttcttttgtctctctctctctctctctctctaagtcccactctgttgtctaggctcgagcacagtggtgcaatcacacctcactgcaacctcaatctcctgggttcaatgaatcctcccacctcagcctctcaagcagctgggattacaggtgcatgccaccatgcctggctaatttacttttgtgtgtgtgtggttttcttttgttgttgttattttttgtagagattggattttgccatgtttcccaggctggtgatgattattttcttctagtgtttgtttgtgccacctgaacactgaagtggtgtaccacctgatcctcaggtcttcttgtttccctccttcctcctggtggtgaacaacactttttctgtg

SEQ ID NO: 83663 - DNA, 820 bp, Homo sapiens
ctgctttcagaggagtggctggtagactgatggctcttttattagtgaagttcagataagcctgtgatccactccacggcaacccgagggagaggtcaagtcacacagagctctgtgtcaccccctgacagtttcctcaccacagtcagaatggcacttgtgacagacactggagtttctctgctatctaattaaggttccattaacttaactaggttaaccatatttgctttctattatggccaacctccaggccagaatttcaataattatcatatattgttgattttttttttccacaaacgctttccggttgccactatccttcagcaattgggcaagccttctgtctatgtgacaaaattttttttttttaaaaaaaggatacaatcaaactgcgttcattgattggcagatatattctagctgctaaatgagctgctggggtcctccagataagcccctgcattctggagcttgccctgcagtgggtgacatggacatgttcagcagagctgtgtaatgactgcggccatgtgccggtagattccaagtgctgtgttatcacacatgaggaaaaactgggcagtcatggaaccattactggaagaggaaagggctagagtgaatccaaaatttcaactagagattggccatgggaagagagaggaagaagatattgcaggaagaaaggtagtgacttgaacacatttggaaaagtgcatttattcaacaagatccaccagtgcaggaagaagagagagagagagagagatgatgtcagaccatgaatgtcccaaatagaaaaattaaaaaggga

SEQ ID NO: 83664 - DNA, 1463 bp, Homo sapiens
ggaatctaacactcaccgaggggcggagtagcttccggaaagggtactgcatttcccgtttctacctccactgcacccgcttattgcgtcttgctcctgggtcacagagcctaaaacgacacacccaacacgcccgccggagttacagctaaaggaaggacaggggaagcaatgaaatgccgagggcggagccaagagcgacactgggggagcaggaaaaggcggggcttccgcttggggcatggaggctgtacctcttacgtcacttccgtaaacaaacggagctgcggaggagcgggtcccgggatgtgaccggggctctgcttgtggctgcggcggtggcttctgaggctgtcgggtctttgcgggttgcggaagggggccccaatacccttcttcttcaggtcttaagaagctggccgtggtgcaataaggaacttaaaacaatggaagagcggaaagtgaagaggaggagtcctaagtcttttagtgcccactgtactcaggttgtcaatgccaaaaaaaatgccattccagtgagtaaaagcacagggttttcaaatcctgcatcacagtcaacttcacagcgaccaaagttaaaaagagtgatgaaagaaaagaccaaacctcagggtggagagggcaaaggcgctcagtcaactccgatccagcactccttcctcactgatgtctcagatgttcaggagatggagagagggctgctcagtcttttgaatgatttccactctgggggaatgcaggagaaattagctcgcttgaatttggagctctatggggagttagaggaacttcctgaggataagagaaaaacagccagtgactccaatctggataggcttctgtcagatttagaagaattgaattcttccatacaaaaactccatttggcagatgcacaagatgttccaaatacttctgctagctaaaatgaaatgtagtttgctttcttgtgatttgaagagaagcagcagtctttacttttccagccaaatccagtagcagaatcatcttccacaacaaggaattaaagtaattaaagtgcaagttcaatgatcgttttcacttactgcttttagtaaatgtgactcgctgtaattcgccataactggaggcctaggccttgttgaaggcttcatcaggaaatgtgacgcagagattgtgctgctgtgcttcatattgttgccttatgggattatacttgaaatgcattgtgctgatgttcttgacagggcggagggatttctctttcctgagctcaccaaacttattccagtgttgatcgcaagctgttgatgcacaggcgtcttgtggcaagcccagcttcagtttatgttagacaatcagtacacatgctggtgtgttttccaatggccagtgataagaaattaaataagtatttgtgagatttgctattttttaataaagtaattgttttaaattaa

SEQ ID NO: 83665 - DNA, 1085 bp, Homo sapiens
aaaaataactctgggccaggtgtggtggctcgcacctgtaatcccagcactttgggaggccgaggcaggaaggttgcttgaggccaggagttcaagaccagcctgggcaacatagccagactcctcccccatctctaacaaagaatagaaaaattagccaggtatgttggcacatgcctttgggaggctgaggtgggaggattgcttgagcccaggagttcaaggctacagtgaagtatgatcgtattactgcattccagccagggaaacaaagtgagtccttatctctaaaatttaaaaaaaaaaaagtcttcaaattctagacagagtataatttactacatttaaaagttgtcttaccacatctgagtgtctcagtagcaacacaagagcttttcctttgaacatatctcttttttaaataccgctttctctttgctcctgaatgtaattttcagaaatgtaaaagaagtaccccttatagaatgaaaatcttcttaactgattaattcagacaaaaactccatttggcagatgcacaagatgttccaaatacttctgctagctaaaatgaaatgtagtttgctttcttgtgatttgaagagaagcagcagtctttacttttccagccaaatccagtagcagaatcatcttccacaacaaggaattaaagtaattaaagtgcaagttcaatgatcgttttcacttactgcttttagtaaatgtgactcgctgtaattcgccataactggaggcctaggccttgttgaaggcttcatcaggaaatgtgacgcagagattgtgctgctgtgcttcatattgttgccttatgggattatacttgaaatgcattgtgctgatgttcttgacagggcggagggatttctctttcctgagctcaccaaacttattccagtgttgatcgcaagctgttgatgcacaggcgtcttgtggcaagcccagcttcagtttatgttagacaatcagtacacatgctggtgtgttttccaatggccagtgataagaaattaaataagtatttgtgagatttgctattttttaataaagtaattgttttaaattaa

SEQ ID NO: 83666 - DNA, 1317 bp, Homo sapiens
ggaatctaacactcaccgaggggcggagtagcttccggaaagggtactgcatttcccgtttctacctccactgcacccgcttattgcgtcttgctcctgggtcacagagcctaaaacgacacacccaacacgcccgccggagttacagctaaaggaaggacaggggaagcaatgaaatgccgagggcggagccaagagcgacactgggggagcaggaaaaggcggggcttccgcttggggcatggaggctgtacctcttacgtcacttccgtaaacaaacggagctgcggaggagcgggtcccgggatgtgaccggggctctgcttgtggctgcggcggtggcttctgaggctgtcgggtctttgcgggttgcggaagggggccccaatacccttcttcttcaggtcttaagaagctggccgtggtgcaataaggaacttaaaacaatggaagagcggaaagtgaagaggaggagtcctaagtcttttagtgcccactgtactcaggttgtcaatgccaaaaaaaatgccattccagtgagtaaaagcacagggttttcaaatcctgcatcacagtcaacttcacagcgaccaaagttaaaaagagtgatgaaagaaaagaccaaacctcagggtggagagggcaaaggcgctcagtcaactccgatccagcactccttcctcactgatgtctcagatgttcaggagatggagagagggctgctcagtcttttgaatgatttccactctggaaaacttcaagcatttggaaatgaatgttccattgaacagatggaacatgttcggggaatgcaggagaaattagctcgcttgaatttggagctctatggggagttagaggaacttcctgaggataagagaaaaacagccagtgactccaatctggataggcttctgtcagatttagaagaattgaattcttccatacaaaaactccatttggcagatgcacaagatgttccaaatacttctgctagctaaaatgaaatgtagtttgctttcttgtgatttgaagagaagcagcagtctttacttttccagccaaatccagtagcagaatcatcttccacaacaaggaattaaaggcggagggatttctctttcctgagctcaccaaacttattccagtgttgatcgcaagctgttgatgcacaggcgtcttgtggcaagcccagcttcagtttatgttagacaatcagtacacatgctggtgtgttttccaatggccagtgataagaaattaaataagtatttgtgagatttgctattttttaataaagtaattgttttaaattaa

SEQ ID NO: 83667 - DNA, 1517 bp, Homo sapiens
ggaatctaacactcaccgaggggcggagtagcttccggaaagggtactgcatttcccgtttctacctccactgcacccgcttattgcgtcttgctcctgggtcacagagcctaaaacgacacacccaacacgcccgccggagttacagctaaaggaaggacaggggaagcaatgaaatgccgagggcggagccaagagcgacactgggggagcaggaaaaggcggggcttccgcttggggcatggaggctgtacctcttacgtcacttccgtaaacaaacggagctgcggaggagcgggtcccgggatgtgaccggggctctgcttgtggctgcggcggtggcttctgaggctgtcgggtctttgcgggttgcggaagggggccccaatacccttcttcttcaggtcttaagaagctggccgtggtgcaataaggaacttaaaacaatggaagagcggaaagtgaagaggaggagtcctaagtcttttagtgcccactgtactcaggttgtcaatgccaaaaaaaatgccattccagtgagtaaaagcacagggttttcaaatcctgcatcacagtcaacttcacagcgaccaaagttaaaaagagtgatgaaagaaaagaccaaacctcagggtggagagggcaaaggcgctcagtcaactccgatccagcactccttcctcactgatgtctcagatgttcaggagatggagagagggctgctcagtcttttgaatgatttccactctggaaaacttcaagcatttggaaatgaatgttccattgaacagatggaacatgttcggggaatgcaggagaaattagctcgcttgaatttggagctctatggggagttagaggaacttcctgaggataagagaaaaacagccagtgactccaatctggataggcttctgtcagatttagaagaattgaattcttccatacaaaaactccatttggcagatgcacaagatgttccaaatacttctgctagctaaaatgaaatgtagtttgctttcttgtgatttgaagagaagcagcagtctttacttttccagccaaatccagtagcagaatcatcttccacaacaaggaattaaagtaattaaagtgcaagttcaatgatcgttttcacttactgcttttagtaaatgtgactcgctgtaattcgccataactggaggcctaggccttgttgaaggcttcatcaggaaatgtgacgcagagattgtgctgctgtgcttcatattgttgccttatgggattatacttgaaatgcattgtgctgatgttcttgacagggcggagggatttctctttcctgagctcaccaaacttattccagtgttgatcgcaagctgttgatgcacaggcgtcttgtggcaagcccagcttcagtttatgttagacaatcagtacacatgctggtgtgttttccaatggccagtgataagaaattaaataagtatttgtgagatttgctattttttaataaagtaattgttttaaattaa

SEQ ID NO: 83668 - DNA, 370 bp, Homo sapiens
ataaaacacaaagcatggtcagttactcttactgtatcagccatgtaaactacaatagtaaagagcgagatggaagattaggagaacgtctactcaacaagaatttggcagccatccgtggacaaaagttcccttgagggagatttgggacctggatagaagactgcaaaactctagtggagcccaagactgaggagggctgttttgactggcaggctgcacctaggtggcaggctcactgaccatggtcccagctacaaacccagaaattgcttcattgccctgtggacttggtcctgcctctagaaccatctgccaagaaatccaggaggaatcacattcacctgtacctctggtgacaagcccacag

SEQ ID NO: 83669 - DNA, 539 bp, Homo sapiens
tggtgatctagaggatccgttggatgaggaacgtcacttcatgtgaggccccagtcacctgcttaagcccttttgcacttattgggcaggtaaacaagagtttgcatataaatcggggcaccttagctctaggatcaataggaagcagagtcacaatgcctaaggtaatgagaacggttaataactcagatgattaaatcctccttttccaggatcatggtgtagaccaagagtacctgcagtcacgccaggaatgacgtccattcttacctcacccatctgtttttgcacaatttgcatttagatgtagcaaactaaatttcctttactcattccttccttgtttttaagctctacttaattctgacaaggttcacaatctaatgatggaaaggacaggcttaatggacaaaaggggatgtcagcctcccagaaacaaatattcttttgttgagatctcccacacaaaatgtggtcagtatgtcagcctggaaatgttgaccttttcacagttgccattaatgggtcaagccagtggg

SEQ ID NO: 83670 - DNA, 778 bp, Homo sapiens
cagtctgtcattttgctttggcctccagctctagcaatgaataggtagggatgaagaaaaggttttctaccaaggataaaagaagaacagcaacttctctcggaccagtagccaaagacaaagatctaaactgtttccactctcctagctggccacctcatagacaggatatggctctatttgggacagataatcagaatttcttcttgcctttcctgcagaccagctcagtcccgctcagctcccgtaccttctaggcagaaatagtcttgtcacttcatgtgaggccccagtcacctgcttaagcccttttgcacttattgggcaggtaaacaagagtttgcatataaatcggggcaccttagctctaggatcaataggaagcagagtcacaatgcctaaggtaatgagaacggttaataactcagatgattaaatcctccttttccaggatcatggtgtagaccaagagtacctgcagtcacgccaggaatgacgtccattcttacctcacccatctgtttttgcacaatttgcatttagatgtagcaaactaaatttcctttactcattccttccttgtttttaagctctacttaattctgacaaggttcacaatctaatgatggaaaggacaggcttaatggacaaaaggggatgtcagcctcccagaaacaaatattcttttgttgagatctcccacacaaaatgtggtcagtatgtcagcctggaaatgttgaccttttcacagttgccattaatgggtcaagccagtggg

SEQ ID NO: 83671 - DNA, 670 bp, Homo sapiens
tcctgcaccatgatgtctgcactggttagttccttcttttgttggttcactggacttgccagcctctgaggccaggatgccatgtggagctatgctgcagtggtgtccagagaggctcttcactcctgtatgtcctgcagatggatgtgccctgggttgccatggtatccagggatgtcaatgctgccactgagtcctagttcttcagagtcaatccctctctttgggtatctcattctaaagttgaccttagttttgagagtcaatggattcttctctcagggacagtatgtccatcagccaacctcatgatattgaagcatatgagctagaatgcaatttattaataaaaaatgagaacagtatttgccaagaagaatgggcgtttattctttagccaacatttttcctctgtggatgagtcatggtgagaaatgtacatgagttttcaaactttcctagggatagaaactgcagctgggacaaagactccttgaattcagagctgtgctttgaaattcaaggagtcttcgtcccaatggcagtcaaattcaatttataacttagtaggcagttaagccatcagtggcatcgggttctagccaggcacttgattcccagagtgttgtctgggtacgagctcgatcgtatcaggcatgtgtcgtaggaa

SEQ ID NO: 83672 - DNA, 729 bp, Homo sapiens
gaacttcggaggatgttcatgtccaggagcagccccacgccctgtatggtcggtgtctagagcctcacagcaactaagaccaacccagctctcagaagaaggaatgtcaaaatgtcatgttcaattttacattcagtgcctggaatcttttcttcacaattgaaatgaaatgtgctgaaggaggtgaatccatgcattaatcttcagctcacaaaggaaatactacataagaagcaaggtaagtgcctgctctcctcccagaacgcctcctggggcggctgaacaaacgttttgctgcacaaagcctagcgttggattaaaggggtggtttaattcattcctaggaacacgcaagagatctacagctctgatctccaggatagtgaaatgaggtggtgaatgataagggtataatttagccagctcagtgaataaataatcattgcaaatgaagcagtagcaccaggtaattaaattaatctgtctcatagacatgattccctgactctccactgacaaagttgcctttctagatttgacttttactgttgggccttctttggatgctgaaagaagttcttagcttcctattctcagagggttcccctggaaagggcatgaagaataatagacaaacattccattcttcaccccgtgctgccagccccatgaggtccaaagggtgggatgtagacaccatcacagtttcatgtttttataccttccctt

SEQ ID NO: 83673 - DNA, 691 bp, Homo sapiens
taaattcaaataggatacttaacctctctgttcatccttcctcttgtacaaaaaaatacaggaaataattgataaccgctagtcaatcggttattgcaaagagtaagtgagataacgtctgagaacatacatgcaagcacctagcagagtgttggccccaggctccttcctgcggcttccctgctcccccagcttccaccctccccctgccctttatagcttccaaagttcatcctggttcattttgaatcaggcaacgaagctgttccagtagcttccattgtgatgggaggagggttagaaataagaaatgaaggagtctaagcagcactatctaactcctggtcaacagcaccaccctgggaaagtcatttggcttctgtgaggctcagtgtcctcatctgtcaagtggaaatagtggtaatgcccatcctgccaaattcccctggtgttatgagatttaagtcaaagtgtttatgggaaagtactttggagaataatataagttcttgccatgtttagaggttttctagtctataattttttttagaagagtgcctatgatgaaggatggatgaagtgagcttaaatgctgggctttcaaaaccaatgtaaggcctttctgaaatcctgctttgtaaagcatacacttatctaacaagaaagaaacagggtgataggtggctggaaa

SEQ ID NO: 83674 - DNA, 406 bp, Homo sapiens
gggatgctgaagccggagaatcgcttgaacccgggaggcggaggttgcagtgacctcacattgtaccacttgcactctagcctgggtaacagagtaagactacgtcttaaaacaaacaaacaaaccaaagaaattatacaggtttgcctctgaagaagagaagtttgaataagcacaatagtattttctagatttagtgtaattaggtaaatatatcaatttataaaaagtacgaaaccacatttttgacacgtttattatatttaaaatatagcgcaataaaataaggttaggaaatgattgcatattactctctgagaggaagaatgttatctgttggtagaattaataaagttactcatttcttataagaagtaaagatatattggccgggtgcggtggctca

SEQ ID NO: 83675 - DNA, 863 bp, Homo sapiens
tgatgtccctagacttctcagtggcaacaactcatccattcaggagctccatgtaaccactggttcagagtctgtcatctgaaccatgaggatctggtggcttctgcttgccattgaaatctgcacagggaacataaactcacaggacacctgcaggcaagggcaccctggaatccctgggaaccccggtcacaatggtctgcctggaagagatggacgagacggagcgaagggtgacaaaggcgatgcaggagaaccaggacgtcctggcagcccggggaaggatgggacgagtggagagaagggagaacgaggagcagatggaaaagttgaagcaaaaggcatcaaaggtgatcaaggctcaagaggatccccaggaaaacatggccccaaggggcttgcagggcccatgggagagaagggcctccgaggagagactgggcctcaggggcagaaggggaataagggtgacgtgggtcccactggtcctgaggggccaaggggcaacattgggcctttgggcccaactggtttaccgggccccatgggccctattggaaagcctggtcccaaaggagaagctggacccacggggccccagggtgagccaggagtccggggaataagaggctggaaaggagatcgaggagagaaagggaaaatcggtgagactctagtcttgccaaaaagtgctttcactgtggggctcacggtgctgagcaagtttccttcttcagatatgcccattaaatttgataagatcctgtataacgaattcaaccattatgatacagcagcggggaaattcacgtgccacattgctggggtctattacttcacctaccacatcactgttttctcca

SEQ ID NO: 83676 - DNA, 952 bp, Homo sapiens
  misc_feature (23)..(23): n is a, c, g, or t
tttcagaactgcatcttatcatnttccgaataaagcacaaagtgctcaaaatcagagtttaatctcttcctctaatattcgactatcttcggtagcattcatgtatttttagttaacataacgattggtttagttttggcttatttaaagcattttacacttgctgtttcagatgtcagatgtcccctgtgagcttcttccttgaggcagcctgctctataggacaggtgagcccagcgggagccagcccactgctgacccaaaccctctagtccttgtcacaaaaagaggctgggacctgatggtggttctcttcctgacttttcctggtggtccttctgacttggagtggcctggcaatttcggtggcgtgacagccggaatgctgccactaaaattcctctctgggcaccatgagcggctgacagggcacgcggagaaaacgattcgcttctcccaggattggtggagcgaccgctgttggacgaatgtggtcgtccctggatgtctgagcaaagagacactgccatggcggccgccggtcagcgtataaggtctgttagggagacccgaagccctgcaccaggaacgcagtttggctcgcccagcccaccctgcagggctggctctccaggcgctgggtccggggagaagaggacagctgccccgccgcaccgcgcatccttccatccactgtggtacatggcgctgccccggtctccaacgtcgcgccacaccttcacggtctcacccggaagtcgaagcccagagacggtgccggccgcacccaatcactgctctgccgctccgacttccgctacggactcgcccagcctcctgggagaaacgctgcagtgcttggggtgctgaagccacttgagagccttgtgttctgtgagaaggttgcattctgaaggaacctcagctgtttgctttgctcttctgccaccca

SEQ ID NO: 83677 - DNA, 821 bp, Homo sapiens
ccgtctctcataccctatataacactaaaacaacacaccacccctctatataggtctgttgacttcttccttgaggcagcctgctctataggacaggtgagcccagcgggagccagcccactgctgacccaaaccctctagtccttgtcacaaaaagaggctgggacctgatggtggttctcttcctgacttttcctggtggtccttctgacttggagtggcctggcaatttcggtggcgtgacagccggaatgctgccactaaaattcctctctgggcaccatgagcggctgacagggcacgcggagaaaacgattcgcttctcccaggattggtggagcgaccgctgttggacgaatgtggtcgtccctggatgtctgagcaaagagacactgccatggcggccgccggtcagcgtataaggtctgttagggagacccgaagccctgcaccaggaacgcagtttggctcgcccagcccaccctgcagggctggctctccaggcgctgggtccggggagaagaggacagctgccccgccgcaccgcgcatccttccatccactgtggtacatggcgctgccccggtctccaacgtcgcgccacaccttcacggtctcacccggaagtcgaagcccagagacggtgccggccgcacccaatcactgctctgccgctccgacttccgctacggactcgcccagcctcctgggagaaacgctgcagtgcttggggtgctgaagccacttgagagccttgtgttctgtgagaaggttgcattctgaaggaacctcagctgtttgctttgctcttctgccaccca

SEQ ID NO: 83678 - DNA, 195 bp, Homo sapiens
tatgtatggtattcgtgcttacacataaaaagagtattatattttttttcacctcacaagaagcagtttttatctgcttggagaatgcatgatttaacaacagtgaaagaggtaaccctttagcagggtaagattaggctggatcacagtagctcccacctgtaatcccagcactttgggaggctgaggcgggtg

SEQ ID NO: 83679 - DNA, 280 bp, Homo sapiens
ggggcttagagggcatggaatggaaggaggacctacttctgaaagcctaggcatgcccactgcagaggggccagagggaaggaaggaagaaaggaattcatgcctttggcatttcctgcctccccaagcactgcaggagtggtttgccgggaaggctggtgttagaccaaaacctgcacctctgggagtcaacaaagagagcctggagaggctggaagggcagctggaagatcccatctctggaatctttgcaaaagaaggacctacctgtagacacaca

SEQ ID NO: 83680 - DNA, 712 bp, Homo sapiens
acatagatactgggtgaggaaggagccctaaattgcttgaaaaattgaatgctctttgggcaaagcaggaagccttgctatggaagagcatcatttgaacataaatcagagtctcagtacaaacagagtgctcaggacatcaagatggttaaccagagagcctggccagaatatctgcggtggagagaaacgatcttgttgggagaaggatgacaataattggggacttagaataaaggctaaaaatgattcaaagagaatgcaaaaagaatcaggcacacatcctttactctgttgtgcaaatctcaccttactgtgtgtttgtattctattcctccacaatctttattttattttatttttatgttcacagagatttgttggtgccaactaaatgagcccaacagccagtgacaacagaactgcactaaaaaaagtccctcatcagctcttgagagcaggttccttaaaggtgaacaatattccacatacaaggactttttcagcaccatgcattagaaatggaagtgaatgtttattattttttgtataagttggttgatacggcttttcagcttccctcagtatcattatccaaattttgtagatgacactaaagctcagaggagttaaaccattttcctcaaatcacatagctttaaataggaaaaccagatatgaaaagcagatttttttctaaattaaaaaaaaa

SEQ ID NO: 83681 - DNA, 350 bp, Homo sapiens
ggagtggcaggcaatcctgcctggatgctgctgtggggcttcatggagtttgcccctgcctgtgctaaagcatctagctggttccagcacccactcacctgtgtgctccctcctgcaaggagtggaacacagcaagtcttgagtgagtggagtttgatcccgctgtcactgaagtggctagccctttccagtgcttgttgactccagttcccgcacctgtttgcttgtgctccctcccttgaggagttgagagtggcgggctaagtaaacaaggcacccctgttgagagtctcatgaaggggtcagggaaatatcctgcttcaataccatcatcattcttcacagaagtt

SEQ ID NO: 83682 - DNA, 149 bp, Homo sapiens
atccacagaaccccaatcttggatggctactcgtgtccctccaatctccaggctctcctccctctggttcacactgcacattgcttcactaacctgctggctgcctcaccagcaaccgcgttaccttcggactgaacagagatttcaag

SEQ ID NO: 83683 - DNA, 624 bp, Homo sapiens
aagaacaaaacttcagggttgaatctggagaagaaaagggagatttgaaaccccagaaagtgtggagcaggattgcccgtcgcagagactctcaggctctcaaacagggagacagggcgaggtaaagatgagtggagttttcgcatctattcgggagagactagggcaggcccagcaaattgagggccccaccctaagccgcctagcgctactgagtttaggggagatcggtgacgccccaaaacttgcaggcctgcccagcctcctggaactgcgccctggaacacgcctcgacttctcgtgggtaaggcccggtgcctggaagacctcccagcgcctgcagcccgtctcggccccatgagtggactcagccctggctttccatggggacgcgccccgggactgaatcagccgcccgcgcatgctatgaggaaagttgtatagggaaggccggctgggcctgagcgcctgtggctgggcgggcctaagtttaagactccccccgccccccaccaacctccccagcccggctcccgtggtcgctgaggcatccgccctttgcacctgcaggggctgggcggccggcaggggcgtgtgtccgtgtcaagtgggagcgcccgacag

SEQ ID NO: 83684 - DNA, 544 bp, Homo sapiens
cctggagagaaccctatacatactctcaactgtaggagaaacactgttattttgttactcagtgcatcattgctatcaactcttggatttggcagttagtcaaatgaggttctaccatttaccaactaggagtctgtggccaagttactcaatctcctttctaagcctcttcctcatatgcaaaaagggaataataagtgttttataagattcatgcatgatataatgtatgcaaagtgtttagcatggtgcctggcatatcataactgttaaacaattattagccagctcctagcattttgggaggctgaggcaggcggattgcttgaggccagcagttcaagaccagcctgagcgacatagtgagatcctgtctctacaaaaaaaaaaaaaacaaaaacaaaacaaaacaaacgcaaaaaaatttagccgggcgtggtcgcgggctcccgtagtcccagctactcaggaggctgaggcaggagaacggtgtgaacccaggagacggagcctgcagtgagccgagaccgtgccacatgcactc

SEQ ID NO: 83685 - DNA, 339 bp, Homo sapiens
gcccaggttggaagtggagaaggtcaaaactgctgtgctatccagtagtgggatgacatctgtgaatagccactgcactccagcctaggcaatatagggaaaccatgtctctttaacaataacaacaacaacaacaacaatcccagaaactacaaaaggagagtctttttggtgcctccagtgttagtccctgtccttccagccttatttttcttaagtatatgcacaatgtgaaaggtagataaattcatatccttagacaggtaaagcattcattaattcagggtggtatgcaaggatactatccaaggcatggtatccatgcaaggtgactgcaag

SEQ ID NO: 83686 - DNA, 441 bp, Homo sapiens
gcctttgccctggagagaaccctatacatactctcaactgtaggagaaacactgttattttgttactcagtgcatcattgctatcaactcttggatttggcagttagtcaaatgaggttctaccatttaccaactaggagtctgtggccaagttactcaatctcctttctaagcctcttcctcatatgcaaaaagggaataataagtgttttataagattcatgcatgatataatgtatgcaaagtgtttagcatggtgcctggcatatcataactgttaaacaattattagccagctcctagcattttgggaggctgaggcaggcggattgcttgaggccagcagttcaagaccagcctgagcgacatagtgagatcctgtctctacaaaaaaaaaaaaaaatgtgttttcattagctgggtgtgttggcatgcacctgt

SEQ ID NO: 83687 - DNA, 201 bp, Homo sapiens
tgaagggtgttttatttttaggtcaagattgctatctagcaaagacccaagaactctcctaagatgaaaatttcagaagacaattgtctgtctgagacagatgagatcagtgtttctctgaagaaaagtttgttttcaggaatagagtctgaaattagtcctccaacctgagcgacattggaatagcagtaattcattgat

SEQ ID NO: 83688 - DNA, 387 bp, Homo sapiens
ggattatagcagacataatcatgtgagaggccagagaaagaaattgacaggcaaaagcaagaaattgagtttgtgtttagggaacaatgagtggctctttttgcccttggcagtgggattcacatctaggagaagacagaggaggtggaggcaggaggatcatttgagcccaggaatgcaagaccagcctgggcaaaatggcaagaccctgtctttacagaaaattttttaaaaattagccagccatggtggcctgcacctgtgatcccagatactcaggaggctgaggcaggaggattgcttgagcccgggagatggagactgcagtgagccatgatcatgcgactgcactccagcctggatgacagagcaagatcctgtctcacc

SEQ ID NO: 83689 - DNA, 328 bp, Homo sapiens
cccactgcactccagcctggatgacagagaaagatcttgtctcaaaacaaacaaacaaacaaacaaacaaacaaaaaactagaatgtgttttgggcaccagcaaagcaaggggcatacaattttttttaaatggggcatttccagaaaaaattacaacaaaaaccaaaaacaaaacagtcatagtgagtaaaatcagaacttgattaaatgtccttgactgtagcttacacactggtatcacttttagttgtggcttcataatcttctcagcattcagggtctgaaggcattaccctgctgggcagacagctcccctacataggacca

SEQ ID NO: 83690 - DNA, 967 bp, Homo sapiens
gtgctaaaggttctgctggagcttccgtctctcttctctgcagagggagaatagggaaaggagtgggtgtcagctgggagaaatttccactcagtttaatgttgctggaaatccagacatctctaaaatatgggctgaggacccccacgtgcccagcactgtgccagccagccccagaatgcagagatgaagaagagctgtctattgaggacagaggagactgcttatggatgtgtccttgacagccaccttggctgggcacgtggaagagatcacaggaggcaatgtcagtgagggttgtgcaccactgcaccctgcaagctgcctgagggtgggcccacctagcacagtgcctggcctgctggaggagctcagtacacatttgttgagtgaattagtggaatgaggtagtttaggaaggctttctggaggaaagaaaatctgaacagggcccagagaggatgggtggaatttgaccaggccaagtagaaaggaatgtatcctgtgcggcagagagccctaaaaggagaggtaaggaaggggacagtccacagtaggctgttctagacaggagcatggggaacagctcctttgttactctcaggataaagccaggccccccggttcactcgcaagatccttctcatctggctctgcccacccttcattactgcctcttcccacagcaccctggtcctctattccagctgactcaagcatttatttgcaatccatgggacaagacccttgctctctctcctccaggcctgtgaacaactctcctcccctctgccaggaaggcctccacctgtacctctccctgtctctccagctcctcctgacaccattgatctctcctgacaccagtggtctctcctgcgaggacctcaccttctgaagtcaggtcctagactgaaccatggtcatggtcctagactggtcatgttccagtgcaccagattcccca

SEQ ID NO: 83691 - DNA, 218 bp, Homo sapiens
cctgagtgtagattaccaaaggttgactttcccaggcctttccctgaacacacccagccttcattcctagaccacccagtcccagtggcaccagtgattgtggcctccaccccgctgtgtgccctcagggatacagttgggatccgagatagccaaggctgtcatagagcaggtccctagagagagactcctaagtgacatgtctgtgaacaaacaca

SEQ ID NO: 83692 - DNA, 657 bp, Homo sapiens
tagcacacaagtactcactggtatttcatttgtcgggagaagggttctgggtcttggaatttcccaaatcagataaaatcaagacgtgctgattgccgcgggagaagccagcattatcttcctctggattccctcctacatatctatggggatttactggaaggacttctctggctttagaatgcaaaagcatttataaagtatgccttgagagcctccaaaagattattataatgtggaaactaaaaatgaaaaatatctcgtatctttgaaaacttcattttacccacagcaacagttttatagttcaaggtttcaaggtcatgggaaagcaagacgaagggtaaaagggaagtagttatttgtttccaagaaaatatttttccccttacttaggaccttgaggaccccagttgcctcacacctttcatttaaaaatcctcagttctggctaggcatggtagctcccacctgtaatcccagcactttggaaggacaaggcaggaggattgagcccaggagtttgagaccatcctggcaacagggcgaaaccctgtctctattaaaaaatacaaaatttagccaggcatggtgatagttccggctactaagaaggctgaggtgggaggactgcttgagcccaggaggttgctcagc

SEQ ID NO: 83693 - DNA, 755 bp, Homo sapiens
gaaaaggcaagtttaaccacgttgctctaaagcactagcccctttcaggtttcggacacgtggcctctctggctgaatggacagaaagtctgaatgtgcgacttcttggcagatactgcatcttcagccaggagaagttggcttagtacaaaagggcttttgaagcggaaactacaagaagatgcatctgtcttaacaaaaaataataaaccaagaaaataaaagatatgggatcctagaaataaaaggtgcaacacaagagagagataaagaaaaacattgacagcctctctatgaagaaagacccaaagtaacaactttgcaacagctctagggaataatttgttcagataagagtaactcaggagactccaagagcgattttcgagaagattaaatctatagaatacctaatatgtttgcacttgtaaagaagagttttatactacttggagagaatttagcagttcatctatcagtatcatttgcatagatataatgttcgctaaatatttctatagcctaaggaagatggtgaatgagaagtgtgcttatgtgtggcaaggaagaaggggatttaccaagtgggaagtccatggtcaaatgcttaagacttagtaaggcatttaccaagtgggaagtcaatgggcaaatgcttaagacgtagtaatcagaatgcaaatacataagtacatgtagaggcaaaacatagcattgtagttatgtgcgcagatgctggagtgagactctctggg

SEQ ID NO: 83694 - DNA, 309 bp, Homo sapiens
ctgtgctgagagagaagggaagactggagtggggctcctaggcaccgtcttcagggagaagcccctttcactcccattctgccaccaacccctccgatacaagcaaagtaaggctagattagcatagctttctgcttgtcacacctgctgaatgagcaggattctgccgtttctatctttaagtagaaacattaccactgatttgtagtcatcgcactctccaggagtccttaataaactttaagatcattactgagtcacttagctcttcttttcctcttcacagagttaccagttttctgatctctc

SEQ ID NO: 83695 - DNA, 490 bp, Homo sapiens
atagtgatgtctgattggaatctcaaacgttaacacatcccaaactggagcccacaacttcctgccaggcctctccctcctccagtgttcctcacctctgtgctcaaggccagaacgtctccatctccctgcacccccacatccagccgagctgccagccagccagtgttacgtctgaattacgtctcagacttgaccacgtccatctctgctggccatttctcccttagggttctgaagtggcctcctaccttgcctgcccacttcttttcaccacacttcagcctgttctctgctgcatgcctccagaatggtgtttaaaaaccaaccatccttttggggtgacagaaatgtttgggaagtaggtagaggtaatggctgcacatcgctgtgaatgcactaaacaaccctgaattgtgcatgttaaagctattaactgtatgttatgggaatttcatcttaagttttaataaaagatttttcaaagcct

SEQ ID NO: 83696 - DNA, 320 bp, Homo sapiens
ggtctttatatgtttccgagacaggactgaaactccctgccttcaagtcattttcctaagtagctgggactataggctgtttctttttttaaaggaaggattttatgtttatcatgaaggaaaaaaataaatttggctaacttaaagagttatttatcaggagacactattaaaaaaaggcaaatcagaaatttggagaagatatttttaatactgataataagacagaattgtaccctgtaaccataaatatgtagaatttctaccatatcaataaggtataagtttctgttgctccacatcctcttgcacggttggta

SEQ ID NO: 83697 - DNA, 916 bp, Homo sapiens
gtgccctctctttttaagcactgggctagatgttggagaaggatagggcaatcattcccaaggaaagatagaaagtgatgtcccaagagatgttaatgtcaggttgctaagaagcaggtgaaattatctggatataagctccatgaaggcaaacattttgttggaagctccattcccaaagcttaacacttaattggcagccatttgtatgaataagtgaggttaaacaggacagttccatgcagggaacgatggctgctaacacctatccaggacctagtttccatgaccatgcatatctttttaaaaatttcctttgcccacttcttaaatgttaacatacattttctccaagttaagtttcagcccttttctcattgtccatgtgatctttatgtagtcttatccactgccacggcctcaggttccatctctagttctcaaatttatattcttagcctagatcaggagttagcaaactttttcttaaaagagccagctagtagaaaaaaagataaaagaaaacaacaagaaagaaagagccagctagtaaatatttttagcttgtgagctatatggtctgtcacatgtcccaactctgtttagcttgaaagcaggcatagacaatacataaggatgtgtcccagccaagtgtggtggctcatccctataatcccagcacctcgggaggctgaggtgggaggatcacttgaacccaggagtttgaggtcagcctggacaacataatgggatcccatctccacaaaaataaaaaataaaaaattagcttggcacagtggtgcatgcctgtagtcccagctactcaggaggctgaggtaggaggattgcttgagcctggcaggtcaaggctgcagtgagccatcatcacgcctgggtgacagaggtccaaaaaaaa

SEQ ID NO: 83698 - DNA, 234 bp, Homo sapiens
atggatggatggacggatggatgcatggatgcatggatggatggatggatggatgggcggatggatgcacacactcatcaccagatggatatcaacttagctgcttcattttccgggtttttctggtcttacatttctaaccaatccccagggccaagcatgtcttcatcctgctaatattcccaggccctcccacatgcccagctccatgagggacacagaaaggcactgtcg

SEQ ID NO: 83699 - DNA, 295 bp, Homo sapiens
aatgaatgacttattttacaatgacccatgaccctatttcgtgatatcaagcattttaaactttttatctttgacgaactttccaaagtcaaattctaacttcattcctcattaattttttgatatgagtcctctgaagtccaaaagagacatattggtcttatttggtataaaaatcatacaagaagcatcatcaaatataaaatggtgtttgactttctttgggctgtatttatagaaatgtcattgatatgtgctccaaaattatgggaaactcttatacttctgaaataac

SEQ ID NO: 83700 - DNA, 466 bp, Homo sapiens
atataagaagacactgagatattgcccaatggaaactgcatcttcaaaacagcatatatattacaattccattttcaaaactgatggacataattgaaaaattattcctgatttgatccagaagctcaaataccatcatataaaattatttaaaagtccagaaaaacagatgcaattaacattaagagtggtgttctctggactgtgattttggttttctttataattttctgtattttctaaaatgtctaaaacaacgaagtattaaaagtgagaagaaaatgagttaactgaatcttctattgaaagattttattttggtgcctcttgacaatcagagagcttcagcatgtaaattttctagtgatgtggtatggaataaacttccatttaccatgataatttcaacttttcttacctcacttttcatacaggactttgcattaatctcaccacagtaaatttg

SEQ ID NO: 83701 - DNA, 727 bp, Homo sapiens
ctgctattccatttgcctgcatgtcattttctctctgtatatttgcttgtgaaagtacttcttatccaacaatgcctaactcataaacctcttctactctgtcatcattctaactgctctacatcaagaatggtttccttatctatatttccacagcattttcatgcctcattatttatagtacttatcacacagtattatagttctatatttgttttaccttacctactagtgtaggagttgagggccagattgtatcttactcatctttgtattcttggggcctaacctggtgtagtaaaatagtaattcttcaataaatgttcaatagctgtgaaggaaagcaagtattctataccagtccttgtatttcttctaacaatgctaggaaatgtatggtagaaagaacaaaccagtattgttaaaaagacagcttttgagtatgtacaagtctgtgcaaggatatactatatttttctctataattcagtatatatttccaatatcccttcttggggtatgagagtcatgtttctcaaggaacataatgtctagtagtagaatggacaagacaagtcaggccgtagaagtgccaatgtccagctgaatagcgtaagatttaatttacagttaaagacagtggtagaagagtttgtcataaggcagttcaaaaagatgtctttcaaataactgaaactgtgttttagggattcttagaagagagatg

SEQ ID NO: 83702 - DNA, 281 bp, Homo sapiens
cagcctcccaaagtgctgggattaaaggtgtgagccaccacgtccggcctgacttgaccattttctaccgcccacctccaggaacctcatttcctgtctcttaatataactgatgccctcttctccccagaagtatctcagtcataggtggagactggaatcccatccctgagcccttgctagaacccactgctaaggttacagtgaacacctgccatatccggtccccagcccctaggctatcctgacagttacccagccaaagatctgcaagttcattc

SEQ ID NO: 83703 - DNA, 1702 bp, Homo sapiens
cttgggcagagataaaaggagcacagttccaggcggggctgagctagggcgtacctgtgatttcaggggcacctctggcggctgccgtgatttgagaatctcgggtctcttggctgactgatcctgggagactgtggatgaataatgctgggcacggccccacccggaggctgcgaggcttgggggtcctggccggggtggctctgctcgctgccctctggctcctgtggctgctggggtcagcccctcggggtaccccggcaccccagcccacgatcaccatccttgtctggcactggcccttcactgaccagcccccagagctgcccagcgacacctgcacccgctacggcatcgcccgctgccacctgagtgccaaccgaagcctgctggccagcgccgacgccgtggtcttccaccaccgcgagctgcagacccggcggtcccacctgcccctggcccagcggccgcgagggcagccctgggtgtgggcctccatggagtctcctagccacacccacggcctcagccacctccgaggcatcttcaactgggtgctgagctaccggcgcgactcggacatctttgtgccctatggccgcctggagccccactgggggccctcgccaccgctgccagccaagagcagggtggccgcctgggtggtcagcaacttccaggagcggcagctgcgtgccaggctgtaccggcagctggcgcctcatctgcgggtggatgtctttggccgtgccaatggacggccactgtgcgccagctgcctggtgcccaccgtggcccagtaccgcttctacctgtcctttgagaactctcagcaccgcgactacattacggagaaattctggcgcaacgcactggtggctggcactgtgccagtggtgctggggcccccacgggccacctatgaggccttcgtgccggctgacgccttcgtgcatgtggatgactttggctcagcccgagagctggcggctttcctcactggcatgaatgagagccgataccaacgcttctttgcctggcgtgacaggctccgcgtgcgactgttcaccgactggcgggaacgtttctgtgccatctgtgaccgctacccacacctaccccgcagccaagtctatgaggaccttgagggttggtttcaggcctgagatccgctggccgggggaggtgggtgtgggtggaagggctgggtgtcgaaatcaaaccaccaggcatccggcccttaccggcaagcagcgggctaacgggaggctgggcacagaggtcaggaagcaggggtggggggtgcaggtgggcactggagcatgcagaggaggtgagagtgggagggaggtaacgggtgcctgctgcggcagacgggaggggaaaggctgccgaggaccctccccaccctgaacaaatcttgggtgggtgaaggcctggctggaagagggtgaaaggcagggcccttggggctggggggcaccccagcctgaagtttgtgggggccaaacctgggaccccgagcttcctcggtagcagaggccctgtggtccccgagacacaggcacgggtccctgccacgtccatagttctgaggtccctgtgtgtaggctggggcggggcccaggagaccacggggagcaaaccagcttgttctgggctcagggagggagggcggtggacaataaacgtctgagcagtg

SEQ ID NO: 83704 - DNA, 557 bp, Homo sapiens
cttgggcagagataaaaggagcacagttccaggcggggctgagctagggcgtacctgtgatttcaggggcacctctggcggctgccgtgatttgagaatctcgggtctcttggctgactgatcctgggagactgtggatgaataatgctgggcacggccccacccggaggctgcgaggcttgggggtcctggccggggtggctctgctcgctgccctctggctcctgtggctgctggggtcagcccctcggggtaccccggcaccccagcccacgatcaccatccttgtgggcactggagcatgcagaggaggtgagagtgggagggaggtaacgggtgcctgctgcggcagacgggaggggaaaggctgccgaggaccctccccaccctgaacaaatcttgggtgggtgaaggcctggctggaagagggtgaaaggcagggcccttggggctggggggcaccccagcctgaagtttgtgggggccaaacctgggacccctacgcatcgcccgctgccacctgagtgccaaccgaagcctgctggccagcgccgacg

SEQ ID NO: 83705 - DNA, 146 bp, Homo sapiens
tgatggagacaggaaggagagaacaagtcattgaagacgtggggacagagaacgggcattcttccccttacccccgcctgctcgcatttctccactcccttaatgaatcaatacttatgaagcaattgcatttgccaagaatactg

SEQ ID NO: 83706 - DNA, 1386 bp, Homo sapiens
gacctgttaagagtattctgtaagtcaacccaatgatacacatcatgttcctgtccacatactggttttccccaaatcagctgataaattcagtgtaattccaatgagattgaaactttggaattgacagttctaaagtgcatttgggagagtgaatgtgtgagaacactaagaccactctgaacgatgataatgagttggggggtggactgctcgggggtgatcctgccagattcccagaggattctcacgccaccattacctcactcagtgtgacctggagggggtcagacagacgggagagtccagaaacagacccagggctacaggaatttagtatatggtaagagggatgttttaagtggggaaaaaggtggattatttaataaacagcacttttagacaactagctatcaaagctagatctcagctgggtgcgatggctcacgcctgtaatcccggcactttgggaggccaaggtgggtggatcacttgaggtcaggagttcgagaccagcctggccaagatggcgaaacgctgtgtctactaaaaatacaaaactagccaggaatggtggcgcgcgcctgtaatcccagttacttaggaggctgaggcaggagaatcacatcaacctgggaggcggaggttgcagtgagcttagatcatgccaccatgccactgcactccagcctgggtgacacagccaaaaaaaaaaccactaagttagatctctacctcacagtgtccatacaaattagttccagagggaagatataccacaaaattactcaaaaatttttatacctctggtgtgggacggtcttttctaaactttaacatgagacttaaaagatataataagggaaaagataagcagatttcgcaaccaaaaaatatcgaaagtctctgtgtgatggaaaacatcaaggttaaaacacaaatgacagatatggaagaaaatatttgcagcacataaaaaaatcaacgagtacaattactttaggagaaaagcttgcttcagggtccttagagaaagtcactggggcctgccaagctgccacctaaagacaagagtgagagggctgagttcttccaggtcatcagagttgttgctgcccgtattaggccacacagtggaaccccatttatatcatagcagaagaaataggattatcaatgtgaactgcttagcatggtgcctggtatatacgagagctccacaaatgtgagctataatcctactagtaaaggatgctaagcagttccactgtggcaggtgtcatttgctagtagaatttgtaatcaaacaataggaggggaatctgtgaacgcctagaaaatgagcagaataaaggatattatctttggaagtcttaaaaaaaaaaa

SEQ ID NO: 83707 - DNA, 633 bp, Homo sapiens
ggcatgcggaccccgcacccagagggacatggtggggtgcggggtgcgggctgggacgccgcacacggcacgctgcacttacactggagccgcatgcagggaacgggggacacggcgggatgcgggctgcaggtctggggcacacggcgcaggttttcacggggctgcgcgcgcgcgtgtgtatgtagtgggtggaggtcccggtgccaccgtgacacaagggcctgagtgacttaggcctgaggggtggggggaggagggaccacacctactgtgacctccccaccgcgatccctgcctggcctaggcctcagccaccaggtccaccagcctcttcggtctttgcaagcctgcccactgtcccaaccatctttgagaacccagactagacggtcaggaccccgacccaaaacccttccacaggtcccatggctaaatcccaggttccccaccctcccggcaggcccgcaggaatgccggccccgcctctccatgccggccgcccccctgtgctcctttagctgtcatcgcaagtggtcccgtcccccagagcttcgtccctgggtcgggtcatgctgttggggacgccctgagcgctctcagcgcaccgttggccctgctcgctccccaccg

SEQ ID NO: 83708 - DNA, 760 bp, Homo sapiens
caggagcctgcagaaaaacctagtgcggggccccacgggagcaggggtggccggtagtcattgctgcttcttgttaggctgctcaggagagccctggtctccacctccgtgaaatagggtgggaccagccacctctgtgggtgagagagccaggccctgggcaggcacagagctatgcaggtggccccctctcagtgcctgccctaggctctgcttgtgactctcttctcctcacctgtgccccacgcttgcagccccagctgtgtgggttccacttctggtgctctggagtctggggggaagaggcactgtggtggcccttgagactccttcctgcctccctccggagcagagagtaaagaggagccggcagtgtctggcctgcatctttccatgtggacaggagccctcccgggaggcctggaggcagagggaagaggcggagggtgccatggtccacagggagctgtgggaaggtgggagccctcctgctgcaccccaggcaccgtcagggagaaccctggtgacctgggcgagagctgggcccgagttgggatctttgatggggaggggagtgagagcagggatgtgctctggtggtggggagcctcaggtcaggtcccagaggacccaggagagctcatgaacacagggctggcaggttgtcagggaagagccgaaggagctgtggtagcctccaggcagggagctcttcctgggctggagggaggtgtgggattgttggagtgctgctctcaca

SEQ ID NO: 83709 - DNA, 458 bp, Homo sapiens
ctaccacatccttccaaatctgtttgttctctggcctccctatgtcattaagtaatgccaccatattgaaattgttcaactgaaaacttggaaaacaatctcaatccatgactccttcagcaccttcctaaagctaaatgtagtataattgtctccaactggccttcttttcactcttctcccaactccaagcctatattttctccctacagcagccagagtcgttttttcatattatcattaggtagcattatttcccttttgaaatatcatcaaaatattttcataatacattttataacataccaatgacacctaccatatcgtacacattcttacttggcatgacccctgctcatttttccaactcttttatcattcttttccttgtttattcttcaaagcacaatgacattcctattaattctggaaaaataaaagtgaattcttatctcgga

SEQ ID NO: 83710 - DNA, 497 bp, Homo sapiens
gtccacatcccaactaccagccgccatctccccatccgtaagaggaggggttggcccaagcggctctccttgctctaattctgcacttccaggtccagacggctccctggacctccccacatgctggtccaggccctctggaggcagtgaggcagccaagccaagcccagccccactgcacttccaagcccccaagagacccccagccagtgcctccatggaggagcaggcctgggtgccggtggctcagccgagaagaggacagtttccacaaatggcacagaaggctctgggtgggaataatagagggttgttggctgaaagaaggacagggggtaatcgaggcaaagcccacgccacaagcacactgggaacgatgccgccgcgccccggcctcccacgggccggatgtgagctggcagtcctggccgtgtcccgctgggaggggccgcactgggtccctgtcgtgctcagtcctgcctccacctcccacctcg

SEQ ID NO: 83711 - DNA, 190 bp, Homo sapiens
gccataatattatttattggctaattttctttttcccctcctacttaatacatgctcactgtagttgtcatgtcatacattttggtgagtcacatagtatcccctctccagaatggctcctactgatacagtcaatattaacaatttggtgagtttcttgaatacattaccgtgcttatacaaatgtaga

SEQ ID NO: 83712 - DNA, 529 bp, Homo sapiens
tttacttcgttgcaagaaacaatcagttgtaagcactagggattaaaagccaaattgaactcaggcattttgagagcgcctggggagaaggcattggtgcatttggctgagttccacccatttcagcataagatggacgtggagcatttttcacatagttctgtaggcagcctgacgccagagttttcacttcagagaaaggataaaagttgacggtttcttagggaacaaccaactcttcctcatttgcaatgtctgttctcctcaaagatgtcgtgggcaacgcttgagatgggcactcaatgactcaaagggtgggggttaggcagaaacaagaccctgggcatttagaagcccttggacgattacatatatttcaaaatgagttaagttcaaataattttttgctggtgcttagcacaccaatgaagtatgtagatatgaaaacaggaggctgctaggtaagattcattttattggcactggttccagatgccagcatcgtgatgaacgctatttgacttctgat

SEQ ID NO: 83713 - DNA, 306 bp, Homo sapiens
gttgcagtgagctgagattgggccattgtgctccagcctgggcagcaagagcgaaacttcattccaaaaaaaaaaaaagaaataataaggtatcaaaggaggaatcacaatagaaattggtacctttaaatagataaaaatgaaaacacaacaccaaaacttatgacatacagctaaaacagcactcagagggaaatttatagctgtaaatgcctatactttaaaaagaagaaagatgttatattaataacttaaccttccaatttaaaaactgaaaaaaagagcaaactaaacccaaagcaagca

SEQ ID NO: 83714 - DNA, 205 bp, Homo sapiens
aaattgagtatattaaaatgtaattccctatcctttaacatcatatagttcagactgagtttttcagttggattttctttcttctgttgattctgtaacaactttctttcaagctaaagtagagaaaagcttttgcatttgatatacttttctgctttcaggataaattacaggaagtagaaagttttttatccagcaaaatttg

SEQ ID NO: 83715 - DNA, 314 bp, Homo sapiens
agaggagacaataataatacaattaatgaaagaatatgcaactgtatgtcctggttttattggatgattatcatgttttttattttcaatccttaattcattttgattttattaagtatattctgctatatataatttgtagtatctttgtagtagttctgttgaatattatgttaagggcaggaaaagacaatgttatgtttggtgcagaataaaggtgaataggcaaaacttcactcctgctgaaaaccaaagcacatttcaaagccaattcagattcagcagaagaggagatagtctccactcattgatgg

SEQ ID NO: 83716 - DNA, 476 bp, Homo sapiens
ttgactttgaactcccatcccataagaacagtgggacatcaaacttctgtcatttttggggttccccacttcacagtgttgtgtaaagacccccaagtcttaggaagcatctagagcctggggaggttccacaggtctcaatgattagcctacacctctgatttcacatagtactctttgctgtgtgcttagggctgggcactctctggtgagtttggaatctttcctttttggagtcttgccccattcctagaggaactactgcagagcagagtgaggggcacagcgccctgcttcccacagaacccaaagcgttctccatccgtgttttctccaagggtcctaccttctactttcctaaaaattatggacataattgtcccagtggtctcaggttttgaaaaccaaaactatgaaggtaagtgttctttaggcttctgcattctgccttgccatgaacttttcctaaggcaaaa

SEQ ID NO: 83717 - DNA, 582 bp, Homo sapiens
actcctaaggtctcatgggtcctgaatcctttgcagatcacacacaagtccccagctaaaagctctccatagaggaggtggtaattactaactgtttttaatcatcactcccacctgccactgaggagaatcaaagctgctctttccaatgcccaccaccacaccaaaaggcaggcagcacaggcctgcatgaggccactagaagcctaaaatgtagagtcttggctgctctggagggcactggagtttggaggttttttcccttgttggagttactggcaatttggggactattggggttttacagcatactggctcttcaatcaacctctctgagatcacttatctgacaagcactcctgcatccactctggggtcaggccccgtgcaaggtgcagggctctcactgtggctctccaggagccatgacatggtgtgactgcttccgccagaggtgtggacatgtgtacacagaggagggaggggtgggaggtcaggaagcctcccaaatggcaggacagctgagctgaacttaagaggatgaggaggataaaggtgtgacacacaagtgaagacacagag

SEQ ID NO: 83718 - DNA, 453 bp, Homo sapiens
gtgcaaaagaattaattgccacttattttaatttgttatatttccatcctaaaggatgaatctcccaagagggccaagagagaaggtggtttggcccctagtattctgttaatagatgagagaagcaatttgttcacttgctttcacaggctgtgctctgtggtttatggctcagttttatctggccaagttaaaacgtaaacttcatccttaacagttttctatatacactggcctttctgtttcactagtacataaaaaccatttcaacatttccaatggacacaaatattgtgtctgttgaactatctaaaatgattccattccttatttacaagagagagcattctaagactctcaaaatgtaaaatactatacattttgaagacagtttctttgtatgcaatatgagtaggattatgatgaaaacacacagagtctgcagtgccccat

SEQ ID NO: 83719 - DNA, 438 bp, Homo sapiens
gcgcatgcatcaacaggagaagtgattttcttgataagtaatcagtgtctacaccagatcctgcgccaggatcctaggtatcaccttagctgacaaggcagcagcatttgtactagctcagatgctgaagatatacaaaaggcagatgatgaccttgcttcatacttctttgagaacacagagttaattagataggaaatccctcatcttctccctgccaaatctgccaacacacctgcttctgtgctcacatcttcactgccctgccttctggttccgtgggtgaactttctgcttttacccaagtcagccttttctccttgcactttgggtcccttccttctcactatgtcctggatttcctccttgcatttatccattttatttgctgcctcactatttctgtctctccactgtattttatccttatcactagtg

SEQ ID NO: 83720 - DNA, 654 bp, Homo sapiens
gccacatgctcagccgagtaattttactgatgttctatgtgatatatttaggaattctagcttaaagaagtatagacctttagagctgaaagtgaatatattgatttagtccaacccttttgttttagagaaaatcaaggcctgagagaggaactaacttgtgcaatataatgtattaatatagcaaatatttactgagttcctgccgtgccacatatactgtattaggtgatgtaccggtatacagtgagagcaaaacagaaacaactcctgctctgaggaatcagatagtatattagtagtgtggaatctggggtgatttgggccctagtgcctttgccttcattgccagggctggcccagcatatctagctgcctatgtgggtgagccttgcttcattcaacatgtctcacaaacctcaggatccatttaggaaatggctatcctaataaggctgatgaatagccacatccccttccaaagcctcgttattgtgagacctactctggacttgttcatggagtaagatgcctttttttttttttgagatggagtttcgctcttgttgcccagggtggagtgcaatggcacaatctcagctcactgcaacctctgcctcttgggttcaagcgattctagtgcctcagtctcct

SEQ ID NO: 83721 - DNA, 368 bp, Homo sapiens
agaaggaaggcccagccacacaattagacctgtaaggaaggcccggaccatcatgtaaggactatgcttaaaaaacaatgaagagcaaggcagaagccaggcatctaattttcttagaagatcaggaaaggactacccattatagctggggcacaatatgagatgtgctggattcactgaacaaaataaaaagttcagggaccacactgaaagttgactgtgaaggcaattctccttcccttagctctacaccagactgagagctgaggtgggaggatcatttgagcctgggaggcagaagttgcagtgagccatgatcaacgccactgcactccagcctgggcaacagagtgagaccctgtctcaaa

SEQ ID NO: 83722 - DNA, 667 bp, Homo sapiens
gcctgtagtcccagctactcgggaggctgaggcaggagaatggcgtgaacccgggaggcagagcttgcagtgagtggaggctgcagtgagctgtgatcataccactgtactccagcctgggtgacaagagtgagaccctgtctcccaaaaaacaaacaaaagctatctaacttaaatccaaacaattacattttgttcttgcccatttggttcttgcagctaaaatacctgaatgttacctgtaggcaacctttgctttttactgggtgcactacaaaaacaataaattcacagcctgtcctacaatttggtcattgaatgctgatttccaccttcatgaaagatagtttggagagaaaagcaccacccattttattccagtagattgagtctgcatgtgcctgggtacaccctaggatctgaaaagtctggcctggcgttttagtcatagagattattagtcacctagaaatcttgctcccacccttccttaaaagagattctgagaaacagttttgttggggcacagctctgatactataaattctaaagtgatctgatgaagcttaaaatcatttttctatttcacccaattatgaccaaaaaaaaattcatatatcttaaaataccaagaataagtaggctactaccctgatgcctgtagttc

SEQ ID NO: 83723 - DNA, 1689 bp, Homo sapiens
  misc_feature (1103)..(1103): n is a, c, g, or t
  misc_feature (1105)..(1105): n is a, c, g, or t
  misc_feature (1130)..(1130): n is a, c, g, or t
  misc_feature (1275)..(1275): n is a, c, g, or t
  misc_feature (1543)..(1544): n is a, c, g, or t
  misc_feature (1605)..(1605): n is a, c, g, or t
  misc_feature (1608)..(1608): n is a, c, g, or t
  misc_feature (1611)..(1611): n is a, c, g, or t
aactacaagactggtcaggaaagaccacacaaaaattgagtaaacacacaaaaggtttgaagaagtaatcaaaagagaatacagaggaagtgcattccatccagtgggaaggggaagaacaaaggatccttggaggcaggaatgcaatgtaatgactaattactatttgtgaggctctggtccacatggatgaggaaaaatcatgcctgttttgttgaaactccaaatctggctggggaaggcatgagtgacagacccacagcaaggcggtggggtaagtgtggacctttgtgtaccagagagaacatcatggtggctttcaaaggggtctggactcaagctttctggaaagcagtcacagcggaatttctggccatgcttatttttgttctcctcagcctgggatccaccatcaactggggtggaacagaaaagcctttaccggtcgacatggttctcatctccctttgctttggactcagcattgcaaccatggtgcagtgctttggccatatcagcggtggccacatcaaccctgcagtgactgtggccatggtgtgcaccaggaagatcagcatcgccaagtctgtcttctacatcgcagcccagtgcctgggggccatcattggagcaggaatcctctatctggtcacacctcccagtgtggtgggaggcctgggagtcaccatggttcatggaaatcttaccgctggtcatggtctcctggttgagttgataatcacatttcaattggtgtttactatctttgccagctgtgattccaaacggactgatgtcactggctcaatagctttagcaattggattttctgttgcaattggacatttatttgcaatcaattatactggtgccagcatgaatcccgcccgatcctttggacctgcagttatcatgggaaattgggaaaaccattggatatattgggttgggcccatcataggagctgtcctcgctggtgccctttatgagtatgtcttctgtccagatgttgaattcaaacgtcgttttaaagaagccttcagcaaagctgcccagcaaacaaaaggaagctacatggaggtggaggacaacaggagtcaggnanagacggatgacctgattctaaaacntggagtggtgcatgtgattgacgttgaccggggagaggagaagaaggggaaagaccaatctggagaggtattgtcttcagtatgactagaagatcgcactgaaagcagacaagactccttagaactgtcctcagatttccttccncccattaaggaaacagatttgttataaattagaatgtgcaggtttgttgtttcatgtcatattactcagtctaaacaataaatatttcataatttacaaggaggaacggaagaaacctattgtgaattccaaatctaaaaaaagaaatatttttaaaatgttcttaagcaaatatatacctattttatctagttacctttcattaacaaccaattttaaccgtgtgtcaagatttggttaagtcttgcctgacagaactcaaagacanntctatcagcttattccttctctactggaatattggtatagtcaattctattgaatattatnctnttnaatgcccaaggtaatgtggactaaagcccagaaatttgaaaagaatattcagaaatccttcccaaatcataagggccc

SEQ ID NO: 83724 - DNA, 1542 bp, Homo sapiens
  misc_feature (956)..(956): n is a, c, g, or t
  misc_feature (958)..(958): n is a, c, g, or t
  misc_feature (983)..(983): n is a, c, g, or t
  misc_feature (1128)..(1128): n is a, c, g, or t
  misc_feature (1396)..(1397): n is a, c, g, or t
  misc_feature (1458)..(1458): n is a, c, g, or t
  misc_feature (1461)..(1461): n is a, c, g, or t
  misc_feature (1464)..(1464): n is a, c, g, or t
ccaaaaacccaatcagacaagtggccgtaatctgactcccagcacacagggagctgcagggcaggcaatgagagctgcactctggctggggaaggcatgagtgacagacccacagcaaggcggtggggtaagtgtggacctttgtgtaccagagagaacatcatggtggctttcaaaggggtctggactcaagctttctggaaagcagtcacagcggaatttctggccatgcttatttttgttctcctcagcctgggatccaccatcaactggggtggaacagaaaagcctttaccggtcgacatggttctcatctccctttgctttggactcagcattgcaaccatggtgcagtgctttggccatatcagcggtggccacatcaaccctgcagtgactgtggccatggtgtgcaccaggaagatcagcatcgccaagtctgtcttctacatcgcagcccagtgcctgggggccatcattggagcaggaatcctctatctggtcacacctcccagtgtggtgggaggcctgggagtcaccatggttcatggaaatcttaccgctggtcatggtctcctggttgagttgataatcacatttcaattggtgtttactatctttgccagctgtgattccaaacggactgatgtcactggctcaatagctttagcaattggattttctgttgcaattggacatttatttgcaatcaattatactggtgccagcatgaatcccgcccgatcctttggacctgcagttatcatgggaaattgggaaaaccattggatatattgggttgggcccatcataggagctgtcctcgctggtgccctttatgagtatgtcttctgtccagatgttgaattcaaacgtcgttttaaagaagccttcagcaaagctgcccagcaaacaaaaggaagctacatggaggtggaggacaacaggagtcaggnanagacggatgacctgattctaaaacntggagtggtgcatgtgattgacgttgaccggggagaggagaagaaggggaaagaccaatctggagaggtattgtcttcagtatgactagaagatcgcactgaaagcagacaagactccttagaactgtcctcagatttccttccncccattaaggaaacagatttgttataaattagaatgtgcaggtttgttgtttcatgtcatattactcagtctaaacaataaatatttcataatttacaaggaggaacggaagaaacctattgtgaattccaaatctaaaaaaagaaatatttttaaaatgttcttaagcaaatatatacctattttatctagttacctttcattaacaaccaattttaaccgtgtgtcaagatttggttaagtcttgcctgacagaactcaaagacanntctatcagcttattccttctctactggaatattggtatagtcaattctattgaatattatnctnttnaatgcccaaggtaatgtggactaaagcccagaaatttgaaaagaatattcagaaatccttcccaaatcataagggccc

SEQ ID NO: 83725 - DNA, 624 bp, Homo sapiens
tttcaccatattgggcaggctgatctcgaactcctgacctcgtgaccagccgacctgggcctcccaaagtggtgggaaagtggtgcgattacagatgtgagccaccccgcccagcctcacctagctaatttttgtaaagacagggttttgccatgttgcccaggctgatcttgaactcctgagctcaagcaatccactcgccttggcctcccaaagtgatgggattacagatgcagccaccacgcctggcccaaaaattctttttttaaaatcaactatttaaaccctccggcaatggtcctgagggcaaacaacaaatgaaaaaacacctattcaagaaaatctacaaattcggtaagaaagatgagagggtatggtatttgaaccaagatcattccctccttactcactcctagcttagtgaggtggagcttctactccagactattgcaaactgtaataccgggcactgctcccccagctcccaatcaaatgctttcttcccaggaaaagcaggacatcagcatttctcatcctacctagagctacttgttgctgaggttaaaacctgtgtgagtgcaattgaaagttggagctctctttttttttcttttgagacggagt

SEQ ID NO: 83726 - DNA, 285 bp, Homo sapiens
agagggacggatgggggaatgtgaatgaaaatcctggtatttcctttacccaacaacggtctatagtctatagatgatcctgagggtgaaggcttgaggtctgccaccatacataccttttgaaactcattgcattatttgcattagttctcagaagagaactctttttttaaagtccatactaaaggcaatgaactgcttcatgtaaagtaacactaggtaagtttggtaataagttgtgcctttagggtcttgaaatataaaattgtgagcaaagattatctg

SEQ ID NO: 83727 - DNA, 609 bp, Homo sapiens
cttacttcttcctaatgtagaaatactttctataacatccttgatgattagacactgaattccagagctaacactctagcaatgtagaactggctgaggagtaccttgttacaagtaaaagagcagtggatgaaatgttgggatagctggggttatactcccaccccactcctgaaggtaagcgacttattccattgtgcaccttggttttctttcctctaaaacatagttgttatttattgattgctaagatgccttagaggcctgccaatttgcaaaacatttcataagaaaatctttgccaggaagtcctaattgttagaaatctgcctcctttaaccacacaattgaaagctaggtatcacatctgccagaagcattctttcttccggaccttgcagagtccttagaatatatttcttgtttgtatattattaatatctcctttagtgtttaatcaaatgatatagtggttaataggacaaaatttattcatggtattttggtggaagaagataagtggaaggctgaagctctgcaactcatagtgtaagcattttaaagactattttagtaaaagattaaataaagaatattattttagcaatc

SEQ ID NO: 83728 - DNA, 371 bp, Homo sapiens
cttacttcttcctaatgtagaaatactttctataacatccttgatgattagacactgaattccagagctaacactctagcaatgtagaactggctgaggagtaccttgttacaagtaaaagagcagtggatgaaatgttgggatagctggggttatactcccaccccactcctgaaggtaagcgacttattccattgtgcaccttggttttctttcctctaaaacatagttgttatttattgattgctaagatgccttagaggcctgccaatttgcaaaacatttcataagaaaatctttgccaggaagtcctaattgttagaaatctgcctcctttaacttctgcccaggccctctaatcttgactctag

SEQ ID NO: 83729 - DNA, 320 bp, Homo sapiens
ctaacaatagtggtgttatctgcaggagtggttggagaagctgcaaatattgtgacctctggaataatggctggtaatccattacatctgtacgttagtataattcgggttcctaccatcctcctaacttggtggcctttcattagttttgcaaaggtggtttagtttctggggagggctattatcatttaaactataaattaagctttttgggaggaggggaatccatacaaaaaagaatcattttgtagtcttaaaatatttgttaatttaataaagtttttaaactatctttagtgattggacttcctaccaaaatg

SEQ ID NO: 83730 - DNA, 283 bp, Homo sapiens
tactgggattacaggcatgagccaccgtgctcagctaatacattttacttaacctaatatatcaaaaacattttcattttaacatgtaatcactatttgtaagttgttaatgaaatattttgcattttttgtttgtttttgtttctttttttggtccttctcagtctaatccatattttgcatttgatattaagccttcaaaatatagtgtttattttgtactcacagcacatctcaatttggatgctaaattttcatcagaaatacttcatctgtatttaaa

SEQ ID NO: 83731 - DNA, 706 bp, Homo sapiens
gtgccctcgtggaattgacgttctgcttgggaacacagaaaagaactcggtgatgaaataatggagatgattccagtgacaaacgacagagatggtgatggtggtcagggaagacctctctgcagaggtagtgacttgtgatgtgagctgagacctctgtcctgggaagaccaaaagaaaagcatttcaggatgagggaatggcatgcgcaaaggccctgaggctgaaatgtgcccatgtgttctaagaaatgcagcgatgctggtgtgcctggagcagggacggagggggagaatgggaggagacaaggagctgaaggagtagttcccgaaggaccttgtgggtgatatagaggacttcgcttttgctctgagtgaggtgggagccatagaagcttctaagcagaagagggacttgccctaattcaggtgatcacaggtgtcttgtggcctccatgggaggttgaaaaccagagaaggtgaaggggggctgcactgagccacaggaacaatgatggagattccagctaagcccagaccccgtggattctagatagattttagaggcagcagacagaattactgaggaattgagtgtaagagtggaataaagttatcaaggacaatgccaagggtggggcacccccaaatttgactctgggagactcagccaaatcctatctggtaataaaatttcttttttattt

SEQ ID NO: 83732 - DNA, 849 bp, Homo sapiens
gtgccctcgtggaattgacgttctgcttgggaacacagaaaagaactcggtgatgaaataatggagatgattccagtgacaaacgacagagatggtgatggtggtcagggaagacctctctgcagaggtagtgacttgtgatgtgagctgagacctctgtcctgggaagaccaaaagaaaagcatttcaggatgagggaatggcatgcgcaaaggccctgaggctgaaatgtgcccatgtgttctaagaaatgcagcgatgctggtgtgcctggagcagggacggagggggagaatgggaggagacaaggagctgaaggagtagttcccgaaggaccttgtgggtgatatagaggacttcgcttttgctctgagtgaggtgggagccatagaagcttctaagcagaagagggacttgccctaattcaggtgatcacaggtgtcttgtggcctccatgggaggttgaaaaccagagaaggtgaaggggggctgcactgagccacaggaacaatgatggagattccagctaagcccagaccccgtggattctagatagattttagaggcagcagacagaattactgaggaattgagtgtaagagtggaataaagttatcaaggacaatgccaagggtggggcacccccaaatttgactctgggagactcagccaaatcctatctggtaataaaatttcttttttatttttcttttctttctttctttctttttttttttttttttttttttttttttttttttttcccccggggggggccccactttttttttttcccgggggggaaaaaaaccaaaaaacaaaaaaattttttttttcctcaaaaaaaat

SEQ ID NO: 83733 - DNA, 464 bp, Homo sapiens
agtggagagagaatggagtgtaggctggagcccttgcttgccacttgggatttcaattttccaatttaaaaagttctctaagacccttctaacactctagtaacgactgaacctagaatggcctccctctcaactccctaagtctcttctgttgcccaagctctagtgccacttcctccaggaagccttcctgacctttagctgcatctactctactcattcggtcttacagactggaagccttaatttaagagcaaacactttttggtgctcagtatgtgccaggcactattctacgtgctttacacatattagttcatatcatatcacactgttttttgaggtaggtagtattatcatctcccttttatagtcaggaacttgaggaaaagagggtttaagttgttcaagttgacatagaaagtgatagtgctgggattcaaacccaggcagtgtgacttcag

SEQ ID NO: 83734 - DNA, 685 bp, Homo sapiens
taaattataaattagtattcttccttaccttttaatgtctgaaagctcttagaatacagctggcacttaactgcagaattctggactctaaataatttccaaaaattagggaagttaataattttgggttacctactaagtagcaagtggacagtaaaacattaggcttgttagggtgacattatctgcattttgtggataataaggacagtgtgtgccacaaagttatatagctgaacatataaaggaagtagaccatgttaaacttctgatggatttcatagtaagaaattggtgtatgattagcagagagcttctgggcccttgtttgttgattaaacattgaagaatttttttcttaatgataaattcgagatactctcaaaatagagatattctatccagggccatcaaacagttttgattccttagtatgactcactacatcttttttcttgcatattccgtaagtttactgtagtattctcaaaacattgaagagtttggaccaaaaattcaagcagtgaaactccatgcagtgtaaaatttgagttctgtagtgcagatttgattttttaaacacagttgttctagttattttaaagtgtatgccttactgaaatagttaccagtgaaataataatgttatctgggatttgtattgaaattctccaggaaaaaaaaa

SEQ ID NO: 83735 - DNA, 114 bp, Homo sapiens
tgcagattgggtgtcctggtgctggtctcgtaacttgacttttaggagctattgccagaacattgttctctggtctacttttcatttttaattttaaaacattccttgttttta

SEQ ID NO: 83736 - DNA, 697 bp, Homo sapiens
ggcctcctccaggatctgccccatcagtctcttcctgactgtatctccaggggtgggttggggtggggtgatttggcctgaaagaaccgtgtggaaagagggaattgtctgtcaaaatgttctagaaagctgggcagcttatgaaaccaatggaggagtcttcactgctgcttcacagtactgggcagtggagtcagccagacctttctttatctcaccaggcatctgagaggtgggtcgtccccgctgtagtgctgtttctgggccccagttgatgtcttaacttgcttttctctatttcaggtctcgaaatctctctaattcacacacatcattcccaaatcccagaaacaaactatggtagattttatttttcaaaaaagagtgggatccattcgcttttgaaggccaaggtgggaggattgcctagaggccaggagttcgagaccagcctgggaaacacagcaagaccctgtctctacaaaaaatgaaagaaaaaaaaaaaaaaaagccaggtgcacatgactgcctgtagtctcagctactggggagactgaggcagcaggatcccttgagcctaggattttgaggctgcagtgagctatgattgtgccactgcactccaggctggccaacaagagtgagaccctttctaatacatatatatatatagattttttttttaagtagggagaat

SEQ ID NO: 83737 - DNA, 167 bp, Homo sapiens
agagtgaaactccatctctaaaaaaaaagaaaaattagggctgtcgcctgaaggaaacaacaattatttatggcagttatacagttcctgcctgttcatttcttggtaattcatagtgcctagcattttgttcatcataaagtacatgctcaacaaaattatcaaat

SEQ ID NO: 83738 - DNA, 480 bp, Homo sapiens
tctgtctgtatcctggctttgagtgtttatctaagctaagcccaattgactgttgtcattctttgtctcttccttgctcagacatcagttaggtatttattgaacactcctgtgttcacagcatccggctcctgggattagagacagctcttgactcctggttttgctctttgaaacctattggactgcttttcttttaagatacaccccccacattataggaatctatccatttctttgttcatttctttaattgtgcattatatcagtccgtcagtcagttttcctcctgaaatatgctaagtattgagaattataatagattctattaagcaccgctaataaagtactatccttatagtagtagtagtgtttgcggtgatggtcgtgttagtactagtagtaatcaagatggccatgaagagactgcttttaatctaccagtaatcatggtaaaaatagtaatagctcaaatgtatt

SEQ ID NO: 83739 - DNA, 178 bp, Homo sapiens
ggtgtcgggggctagagatacacatgccagttctatacatttctcagcactgtgctgtcgattcacagcagttcaattgttcaagcgatataagccagtcatgtggcccaagttattctgtcggctgtgttctctgcaggaatctgatgcaagaaggcctgaaggatgcatggctttg

SEQ ID NO: 83740 - DNA, 478 bp, Homo sapiens
tttttttaaacttttagtagagacagacagggttttgctgtgttggccaggctggcctcaagtgatctgcctgccttggccttgcaaagtgctgggattacaggcgtgagccaccatgcccagccctactctttatgtccaaaagccgaggccttcctgtaggccattcatgatggattgctgctcaccccacgtggccattaacacatggctgttggtttccaacctggccccttgtatgaaaaaccctaggtaaacacatcaaaataattatcccccggcatagcactttatttaaaagtccctcattttatgatgaggaaatggggcctccaggagggcaatgggcagagtgtgaccatcctacccactgcctctcaggagccccttgtatctgccacgagtggcctgcctcactgcaagctgtggcacagatacgtagttagacatggttaataaaaatcattgtgatttaata

SEQ ID NO: 83741 - DNA, 260 bp, Homo sapiens
atgaaatttattaaaactcagcattgtttttgttttagcactttgcagattttcttcaagcattcagtgaaaacaattttgatctcagtgtataaaactatcttattgattttttaatgaactcatttctctgtatgcttctcacctagatgtgtacttcccagatgtttaataaggtatttattcagccttttataactctaggagttgaagtggaattttatcattggtttctttagagctttcttaactgcttatca

SEQ ID NO: 83742 - DNA, 2899 bp, Homo sapiens
taaattttgctttaaatttaattgcttttctcctttttctctaataataggactatttcgcagtttccagtccttgattaattaaggcttcagagttcgttcttacatatgccatgtcttaagttttcataaaattcagtctacacaagacttgctttttgtgagcactgtgcttagtggcagtccggatttttccctccacccccgcggccacccctgcccaccgcgccgtcgggcatggatctggcaggtgcgaggccgaggcccagggctcagcgaaggacgccgagtttacagagcgcgcgcgccctagaggaggcagcagcagccgcaggcctggccgcccgaactttgcgagcctggcgggggagcacagaggcgggccgacctgccccgctagcgctgaggaacgactccctttatgccagctcgctgtccgccttcccgcagcgtacgctgcggagcctcaaagaccctgcggccctccacaaccgtcttaaataacaaacccctgtcctcgcccccgtaggaattggggcagctgggggttcgcgtcacagactcaagcccgccagcagaagggcaggccggacttcgcggggccgaaccccgctccagctggggacaggccgcctagccggcaggagggagccggcgcgagagacttgacgggaggaggtggagagcgggaggcgggaatgagggcgcgggaccgggcgggcggagcgtgcgagactgcgagcgcgagcgccagcagggcggagggcggggcgtgggcggcgcccggccttcccgctcccgcggcgctgcaactctgccgagcctccttaaaactctgccgttaaaatgggggcgggtttttcaactcaaaaagcgctcaatttttttcttttcaaaaaaagctgatgaggtcggaaaaaagggagaagaaaccggcaccctctctgagaggcaacagaagcagcaattgtttcagcgaaaaaagcagcaagggagggagtgaaggaaaaaagcaaaaaagggggcgacacgcaagtgcctgtaggggtgaaaggagcagggaccggcgatctagggggggatcagctacaaaagaaactgtcactgggagcggtgcggccaaggaggaagcagtgctgccaggctctgctccagggcacagctggctggcggctgccctgtccgcagcaaaggggcacaggccggggaccgcgagaggtggcaaagtggcaccgggcgccgaggctgctgagcgctcgccgagacggcgaccggactggctgccccggaactgcggcgactctccctactcagaacttggcctacgtttcccaggactctccccatctccagaggcccccacaaaaccgggaaaggaaggaaaggacagcggcggcagcagctcaatgagtgcctacagcagaaagcctgaacgagctcggtcgtaggcgggaagttcccgggggggctgcccagtgcagccgcaatgctgccgcgagctgccccagcagtccgggctccgtagacgctttccgcatcactctccttcctcgggctgccgggagtcccgggacctggcggggccggcatgacgggcttctcgggggcccgccgcacgcccggcagcctccggagacgcgcgccgagcccggctcccacggcctctgaggctcggcggggctgcggctgcctggcgggcgggctccggagctttcctgagcggcattagcccacggcttggcccggacgcgaccaaaggctcttctggagaagcccagagcactgggcaatcgttacgacctgtaacttgagggccaccgaactgctactcccgttcgcctttggcgatcatcttttaaccctccggagcacgtcagcatccagccaccgcggcgctctcccagcagcggaggacccaggactatcccttcggcgagacggatggaaaccgagccccctggaggacctgcccctgcagttctgcctcacacggctcaagtcaccaccgtgaacaagggaccctaaagaatggccgagccttgggggaacgagttggcgtccgcagctgccaggggggacctagagcaacttactagtttgttgcaaaataatgtaaacgtcaatgcacaaaatggatttggaaggactgcgctgcaggttatgaaacttggaaatcccgagattgccaggagactgctacttagaggtgctaatcccgatttgaaagaccgaactggtttcgctgtcattcatgatgcggccagagcaggtttcctggacactttacagactttgctggagtttcaagctgatgttaacatcgaggataatgaagggaacctgcccttgcacttggctgccaaagaaggccacctccgggtggtggagttcctggtgaagcacacggccagcaatgtggggcatcggaaccataagggggacaccgcctgtgatttggccaggctctatgggaggaatgaggttgttagcctgatgcaggcaaacggggctgggggagccacaaatcttcaataaacgtggggagggctcccccacgttgcctctactttatcaattaactgagtagctctcctgacttttaatgtcatttgttaaaatacagttctgtcatatgttaagcagctaaattttctgaaactgcataagtgaaaatcttacaacaggcttatgaatatatttaagcaacatctttttaacctgcaaaatctgttctaacatgtaattgcagataactttgactttcttctgaatattttatctttccttggcttttcccttgcttccccttttgccaatctcaacacccaagttgaagactttgtttttaaaatggtttgtcctgatgcttttgtctaattaaaacactttcaaaacagga

SEQ ID NO: 83743 - DNA, 1880 bp, Homo sapiens
taaattttgctttaaatttaattgcttttctcctttttctctaataataggactatttcgcagtttccagtccttgattaattaaggcttcagagttcgttcttacatatgccatgtcttaagttttcataaaattcagtctacacaagacttgctttttgtgagcactgtgcttagtggcagtccggatttttccctccacccccgcggccacccctgcccaccgcgccgtcgggcatggatctggcaggtgcgaggccgaggcccagggctcagcgaaggacgccgagtttacagagcgcgcgcgccctagaggaggcagcagcagccgcaggcctggccgcccgaactttgcgagcctggcgggggagcacagaggcgggccgacctgccccgctagcgctgaggaacgactccctttatgccagctcgctgtccgccttcccgcagcgtacgctgcggagcctcaaagaccctgcggccctccacaaccgtcttaaataacaaacccctgtcctcgcccccgtaggaattggggcagctgggggttcgcgtcacagactcaagcccgccagcagaagggcaggccggacttcgcggggccgaaccccgctccagctggggacaggccgcctagccggcaggagggagccggcgcgagagacttgacgggaggaggtggagagcgggaggcgggaatgagggcgcgggaccgggcgggcggagcgtgcgagactgcgagcgcgagcgccagcagggcggagggcggggcgtgggcggcgcccggccttcccgctcccgcggcgctgcaactctgccgagcctccttaaaactctgccgttaaaatgggggcgggtttttcaactcaaaaagcgctcaatttttttcttttcaaaaaaagctgatgaggtcggaaaaaagggagaagaaaccggcaccctctctgagaggcaacagaagcagcaattgtttcagcgaaaaaagcagcaagggagggagtgaaggaaaaaagcaaaaaagggggcgacacgcaagtgcctgtaggggtgaaaggagcagggaccggcgatctagggggggatcagctacaaaagaaactgtcactgggagcggtgcggccaaggaggaagcagtgctgccaggctctgctccagggcacagctggctggcggctgccctgtccgcagcaaaggggcacaggccggggaccgcgagaggtggcaaagtggcaccgggcgccgaggctgctgagcgctcgccgagacggcgaccggactggctgccccggaactgcggcgactctccctactcagaacttggcctacgtttcccaggactctccccatctccagaggcccccacaaaaccgggaaaggaaggaaaggacagcggcggcagcagctcaatgagtgcctacagcagaaagcctgtgatttggccaggctctatgggaggaatgaggttgttagcctgatgcaggcaaacggggctgggggagccacaaatcttcaataaacgtggggagggctcccccacgttgcctctactttatcaattaactgagtagctctcctgacttttaatgtcatttgttaaaatacagttctgtcatatgttaagcagctaaattttctgaaactgcataagtgaaaatcttacaacaggcttatgaatatatttaagcaacatctttttaacctgcaaaatctgttctaacatgtaattgcagataactttgactttcttctgaatattttatctttccttggcttttcccttgcttccccttttgccaatctcaacacccaagttgaagactttgtttttaaaatggtttgtcctgatgcttttgtctaattaaaacactttcaaaacagga

SEQ ID NO: 83744 - DNA, 3357 bp, Homo sapiens
taaattttgctttaaatttaattgcttttctcctttttctctaataataggactatttcgcagtttccagtccttgattaattaaggcttcagagttcgttcttacatatgccatgtcttaagttttcataaaattcagtctacacaagacttgctttttgtgagcactgtgcttagtggcagtccggatttttccctccacccccgcggccacccctgcccaccgcgccgtcgggcatggatctggcaggtgcgaggccgaggcccagggctcagcgaaggacgccgagtttacagagcgcgcgcgccctagaggaggcagcagcagccgcaggcctggccgcccgaactttgcgagcctggcgggggagcacagaggcgggccgacctgccccgctagcgctgaggaacgactccctttatgccagctcgctgtccgccttcccgcagcgtacgctgcggagcctcaaagaccctgcggccctccacaaccgtcttaaataacaaacccctgtcctcgcccccgtaggaattggggcagctgggggttcgcgtcacagactcaagcccgccagcagaagggcaggccggacttcgcggggccgaaccccgctccagctggggacaggccgcctagccggcaggagggagccggcgcgagagacttgacgggaggaggtggagagcgggaggcgggaatgagggcgcgggaccgggcgggcggagcgtgcgagactgcgagcgcgagcgccagcagggcggagggcggggcgtgggcggcgcccggccttcccgctcccgcggcgctgcaactctgccgagcctccttaaaactctgccgttaaaatgggggcgggtttttcaactcaaaaagcgctcaatttttttcttttcaaaaaaagctgatgaggtcggaaaaaagggagaagaaaccggcaccctctctgagaggcaacagaagcagcaattgtttcagcgaaaaaagcagcaagggagggagtgaaggaaaaaagcaaaaaagggggcgacacgcaagtgcctgtaggggtgaaaggagcagggaccggcgatctagggggggatcagctacaaaagaaactgtcactgggagcggtgcggccaaggaggaagcagtgctgccaggctctgctccagggcacagctggctggcggctgccctgtccgcagcaaaggggcacaggccggggaccgcgagaggtggcaaagtggcaccgggcgccgaggctgctgagcgctcgccgagacggcgaccggactggctgccccggaactgcggcgactctccctactcagaacttggcctacgtttcccaggactctccccatctccagaggcccccacaaaaccgggaaaggaaggaaaggacagcggcggcagcagctcaatgagtgcctacagcagaaagcctgaacgagctcggtcgtaggcgggaagttcccgggggggctgcccagtgcagccgcaatgctgccgcgagctgccccagcagtccgggctccgtagacgctttccgcatcactctccttcctcgggctgccgggagtcccgggacctggcggggccggcatgacgggcttctcgggggcccgccgcacgcccggcagcctccggagacgcgcgccgagcccggctcccacggcctctgaggctcggcggggctgcggctgcctggcgggcgggctccggagctttcctgagcggcattagcccacggcttggcccggacgcgaccaaaggctcttctggagaagcccagagcactgggcaatcgttacgacctgtaacttgagggccaccgaactgctactcccgttcgcctttggcgatcatcttttaaccctccggagcacgtcagcatccagccaccgcggcgctctcccagcagcggaggacccaggactatcccttcggcgagacggatggaaaccgagccccctggaggacctgcccctgcagttctgcctcacacggctcaagtcaccaccgtgaacaagggtgggtgaatgccttttcttccccctgaatgtctttccttccgcggtattttctgccccgatctatagtcccttgagtctccacacacactcctcacagagatctgtagcgtaggtacgtgacagctctgcctacatctgacgtccggagtcattaaccaggaatgtatgtgtgtctgtgtgtctctctgtggagtcgtcagaattcttcataggggttaagctaaaaaagcgaggcgaggagcccctctccaatggctcagttttgctgaataatcacgtgtgaatcgaggggcgggcttttggcaggcagatcttactagtatttactaccaagctctactccagattaaccatcccagtccttctgtcagtctccgatgccatcatgcagcctggttaggagcaaaggaaaggggaaaaagaaaaacgactaattcatcttttcctgatcgtcaggaccctaaagaatggccgagccttgggggaacgagttggcgtccgcagctgccaggggggacctagagcaacttactagtttgttgcaaaataatgtaaacgtcaatgcacaaaatggatttggaaggactgcgctgcaggttatgaaacttggaaatcccgagattgccaggagactgctacttagaggtgctaatcccgatttgaaagaccgaactggtttcgctgtcattcatgatgcggccagagcaggtttcctggacactttacagactttgctggagtttcaagctgatgttaacatcgaggataatgaagggaacctgcccttgcacttggctgccaaagaaggccacctccgggtggtggagttcctggtgaagcacacggccagcaatgtggggcatcggaaccataagggggacaccgcctgtgatttggccaggctctatgggaggaatgaggttgttagcctgatgcaggcaaacggggctgggggagccacaaatcttcaataaacgtggggagggctcccccacgttgcctctactttatcaattaactgagtagctctcctgacttttaatgtcatttgttaaaatacagttctgtcatatgttaagcagctaaattttctgaaactgcataagtgaaaatcttacaacaggcttatgaatatatttaagcaacatctttttaacctgcaaaatctgttctaacatgtaattgcagataactttgactttcttctgaatattttatctttccttggcttttcccttgcttccccttttgccaatctcaacacccaagttgaagactttgtttttaaaatggtttgtcctgatgcttttgtctaattaaaacactttcaaaacagga

SEQ ID NO: 83745 - DNA, 3639 bp, Homo sapiens
taaattttgctttaaatttaattgcttttctcctttttctctaataataggactatttcgcagtttccagtccttgattaattaaggcttcagagttcgttcttacatatgccatgtcttaagttttcataaaattcagtctacacaagacttgctttttgtgagcactgtgcttagtggcagtccggatttttccctccacccccgcggccacccctgcccaccgcgccgtcgggcatggatctggcaggtgcgaggccgaggcccagggctcagcgaaggacgccgagtttacagagcgcgcgcgccctagaggaggcagcagcagccgcaggcctggccgcccgaactttgcgagcctggcgggggagcacagaggcgggccgacctgccccgctagcgctgaggaacgactccctttatgccagctcgctgtccgccttcccgcagcgtacgctgcggagcctcaaagaccctgcggccctccacaaccgtcttaaataacaaacccctgtcctcgcccccgtaggaattggggcagctgggggttcgcgtcacagactcaagcccgccagcagaagggcaggccggacttcgcggggccgaaccccgctccagctggggacaggccgcctagccggcaggagggagccggcgcgagagacttgacgggaggaggtggagagcgggaggcgggaatgagggcgcgggaccgggcgggcggagcgtgcgagactgcgagcgcgagcgccagcagggcggagggcggggcgtgggcggcgcccggccttcccgctcccgcggcgctgcaactctgccgagcctccttaaaactctgccgttaaaatgggggcgggtttttcaactcaaaaagcgctcaatttttttcttttcaaaaaaagctgatgaggtcggaaaaaagggagaagaaaccggcaccctctctgagaggcaacagaagcagcaattgtttcagcgaaaaaagcagcaagggagggagtgaaggaaaaaagcaaaaaagggggcgacacgcaagtgcctgtaggggtgaaaggagcagggaccggcgatctagggggggatcagctacaaaagaaactgtcactgggagcggtgcggccaaggaggaagcagtgctgccaggctctgctccagggcacagctggctggcggctgccctgtccgcagcaaaggggcacaggccggggaccgcgagaggtggcaaagtggcaccgggcgccgaggctgctgagcgctcgccgagacggcgaccggactggctgccccggaactgcggcgactctccctactcagaacttggcctacgtttcccaggactctccccatctccagaggcccccacaaaaccgggaaaggaaggaaaggacagcggcggcagcagctcaatgagtgcctacagcagaaagcctgaacgagctcggtcgtaggcgggaagttcccgggggggctgcccagtgcagccgcaatgctgccgcgagctgccccagcagtccgggctccgtagacgctttccgcatcactctccttcctcgggctgccgggagtcccgggacctggcggggccggcatgacgggcttctcgggggcccgccgcacgcccggcagcctccggagacgcgcgccgagcccggctcccacggcctctgaggctcggcggggctgcggctgcctggcgggcgggctccggagctttcctgagcggcattagcccacggcttggcccggacgcgaccaaaggctcttctggagaagcccagagcactgggcaatcgttacgacctgtaacttgagggccaccgaactgctactcccgttcgcctttggcgatcatcttttaaccctccggagcacgtcagcatccagccaccgcggcgctctcccagcagcggaggacccaggactatcccttcggcgagacggatggaaaccgagccccctggaggacctgcccctgcagttctgcctcacacggctcaagtcaccaccgtgaacaagggtgggtgaatgccttttcttccccctgaatgtctttccttccgcggtattttctgccccgatctatagtcccttgagtctccacacacactcctcacagagatctgtagcgtaggtacgtgacagctctgcctacatctgacgtccggagtcattaaccaggaatgtatgtgtgtctgtgtgtctctctgtggagtcgtcagaattcttcataggggttaagctaaaaaagcgaggcgaggagcccctctccaatggctcagttttgctgaataatcacgtgtgaatcgaggggcgggcttttggcaggcagatcttactagtatttactaccaagctctactccagattaaccatcccagtccttctgtcagtctccgatgccatcatgcagcctggttaggagcaaaggaaaggggaaaaagaaaaacgactaattcatcttttcctgatcgtcaggaccctaaagaatggccgagccttgggggaacgagttggcgtccgcagctgccaggggggacctagagcaacttactagtttgttgcaaaataatgtaaacgtcaatgcacaaaatggatttggaaggactgcgctgcaggttatgaaacttggaaatcccgagattgccaggagactgctacttagaggtgctaatcccgatttgaaagaccgaactggtttcgctgtcattcatgatgcggccagagcaggtttcctggacactttacagactttgctggagtttcaagctgatgttaacatcgaggataatgaagggaacctgcccttgcacttggctgccaaagaaggccacctccgggtggtggagttcctggtgaagcacacggccagcaatgtggggcatcggaaccataagggggacaccgcctgtgatttggccaggctctatgggaggaatgaggttgttagcctgatgcaggcaaacggggctgggggagccacaaatcttcaataaacgtggggagggctcccccacgttgcctctactttatcaattaactgagtagctctcctgacttttaatgtcatttgttaaaatacagttctgtcatatgttaagcagctaaattttctgaaactgcataagtgaaaatcttacaacaggcttatgaatatatttaagcaacatctttttaacctgcaaaatctgttctaacatgtaattgcagataactttgactttcttctgaatattttatctttccttggcttttcccttgcttccccttttgccaatctcaacacccaagttgaagactttgtttttaaaatggtttgtcctgatgcttttgtctaattaaaacactttcaaaacaggaaaaaaaaacacaaaccaggaacaaaggaaggaggagaggagcaagagatgacccagaacagcgaccaagaaggggggcgggcgccaaaaacacacccggggggggcgcagtagagcgccccaccagtaggtggcaagggggcccagagagcggatatacaagaagagcggcgccctaaacagcccagaggacacgaccggcacgcaggaccacccgcgggggatagggacccaggagtggcgcgaaacgggtggccagctgcggcaggcgcctacatcggga

SEQ ID NO: 83746 - DNA, 3248 bp, Homo sapiens
taaattttgctttaaatttaattgcttttctcctttttctctaataataggactatttcgcagtttccagtccttgattaattaaggcttcagagttcgttcttacatatgccatgtcttaagttttcataaaattcagtctacacaagacttgctttttgtgagcactgtgcttagtggcagtccggatttttccctccacccccgcggccacccctgcccaccgcgccgtcgggcatggatctggcaggtgcgaggccgaggcccagggctcagcgaaggacgccgagtttacagagcgcgcgcgccctagaggaggcagcagcagccgcaggcctggccgcccgaactttgcgagcctggcgggggagcacagaggcgggccgacctgccccgctagcgctgaggaacgactccctttatgccagctcgctgtccgccttcccgcagcgtacgctgcggagcctcaaagaccctgcggccctccacaaccgtcttaaataacaaacccctgtcctcgcccccgtaggaattggggcagctgggggttcgcgtcacagactcaagcccgccagcagaagggcaggccggacttcgcggggccgaaccccgctccagctggggacaggccgcctagccggcaggagggagccggcgcgagagacttgacgggaggaggtggagagcgggaggcgggaatgagggcgcgggaccgggcgggcggagcgtgcgagactgcgagcgcgagcgccagcagggcggagggcggggcgtgggcggcgcccggccttcccgctcccgcggcgctgcaactctgccgagcctccttaaaactctgccgttaaaatgggggcgggtttttcaactcaaaaagcgctcaatttttttcttttcaaaaaaagctgatgaggtcggaaaaaagggagaagaaaccggcaccctctctgagaggcaacagaagcagcaattgtttcagcgaaaaaagcagcaagggagggagtgaaggaaaaaagcaaaaaagggggcgacacgcaagtgcctgtaggggtgaaaggagcagggaccggcgatctagggggggatcagctacaaaagaaactgtcactgggagcggtgcggccaaggaggaagcagtgctgctgagcgctcgccgagacggcgaccggactggctgccccggaactgcggcgactctccctactcagaacttggcctacgtttcccaggactctccccatctccagaggcccccacaaaaccgggaaaggaaggaaaggacagcggcggcagcagctcaatgagtgcctacagcagaaagcctgaacgagctcggtcgtaggcgggaagttcccgggggggctgcccagtgcagccgcaatgctgccgcgagctgccccagcagtccgggctccgtagacgctttccgcatcactctccttcctcgggctgccgggagtcccgggacctggcggggccggcatgacgggcttctcgggggcccgccgcacgcccggcagcctccggagacgcgcgccgagcccggctcccacggcctctgaggctcggcggggctgcggctgcctggcgggcgggctccggagctttcctgagcggcattagcccacggcttggcccggacgcgaccaaaggctcttctggagaagcccagagcactgggcaatcgttacgacctgtaacttgagggccaccgaactgctactcccgttcgcctttggcgatcatcttttaaccctccggagcacgtcagcatccagccaccgcggcgctctcccagcagcggaggacccaggactatcccttcggcgagacggatggaaaccgagccccctggaggacctgcccctgcagttctgcctcacacggctcaagtcaccaccgtgaacaagggtgggtgaatgccttttcttccccctgaatgtctttccttccgcggtattttctgccccgatctatagtcccttgagtctccacacacactcctcacagagatctgtagcgtaggtacgtgacagctctgcctacatctgacgtccggagtcattaaccaggaatgtatgtgtgtctgtgtgtctctctgtggagtcgtcagaattcttcataggggttaagctaaaaaagcgaggcgaggagcccctctccaatggctcagttttgctgaataatcacgtgtgaatcgaggggcgggcttttggcaggcagatcttactagtatttactaccaagctctactccagattaaccatcccagtccttctgtcagtctccgatgccatcatgcagcctggttaggagcaaaggaaaggggaaaaagaaaaacgactaattcatcttttcctgatcgtcaggaccctaaagaatggccgagccttgggggaacgagttggcgtccgcagctgccaggggggacctagagcaacttactagtttgttgcaaaataatgtaaacgtcaatgcacaaaatggatttggaaggactgcgctgcaggttatgaaacttggaaatcccgagattgccaggagactgctacttagaggtgctaatcccgatttgaaagaccgaactggtttcgctgtcattcatgatgcggccagagcaggtttcctggacactttacagactttgctggagtttcaagctgatgttaacatcgaggataatgaagggaacctgcccttgcacttggctgccaaagaaggccacctccgggtggtggagttcctggtgaagcacacggccagcaatgtggggcatcggaaccataagggggacaccgcctgtgatttggccaggctctatgggaggaatgaggttgttagcctgatgcaggcaaacggggctgggggagccacaaatcttcaataaacgtggggagggctcccccacgttgcctctactttatcaattaactgagtagctctcctgacttttaatgtcatttgttaaaatacagttctgtcatatgttaagcagctaaattttctgaaactgcataagtgaaaatcttacaacaggcttatgaatatatttaagcaacatctttttaacctgcaaaatctgttctaacatgtaattgcagataactttgactttcttctgaatattttatctttccttggcttttcccttgcttccccttttgccaatctcaacacccaagttgaagactttgtttttaaaatggtttgtcctgatgcttttgtctaattaaaacactttcaaaacagga

SEQ ID NO: 83747 - DNA, 2832 bp, Homo sapiens
taaattttgctttaaatttaattgcttttctcctttttctctaataataggactatttcgcagtttccagtccttgattaattaaggcttcagagttcgttcttacatatgccatgtcttaagttttcataaaattcagtctacacaagacttgctttttgtgagcactgtgcttagtggcagtccggatttttccctccacccccgcggccacccctgcccaccgcgccgtcgggcatggatctggcaggtgcgaggccgaggcccagggctcagcgaaggacgccgagtttacagagcgcgcgcgccctagaggaggcagcagcagccgcaggcctggccgcccgaactttgcgagcctggcgggggagcacagaggcgggccgacctgccccgctagcgctgaggaacgactccctttatgccagctcgctgtccgccttcccgcagcgtacgctgcggagcctcaaagaccctgcggccctccacaaccgtcttaaataacaaacccctgtcctcgcccccgtaggaattggggcagctgggggttcgcgtcacagactcaagcccgccagcagaagggcaggccggacttcgcggggccgaaccccgctccagctggggacaggccgcctagccggcaggagggagccggcgcgagagacttgacgggaggaggtggagagcgggaggcgggaatgagggcgcgggaccgggcgggcggagcgtgcgagactgcgagcgcgagcgccagcagggcggagggcggggcgtgggcggcgcccggccttcccgctcccgcggcgctgcaactctgccgagcctccttaaaactctgccgttaaaatgggggcgggtttttcaactcaaaaagcgctcaatttttttcttttcaaaaaaagctgatgaggtcggaaaaaagggagaagaaaccggcaccctctctgagaggcaacagaagcagcaattgtttcagcgaaaaaagcagcaagggagggagtgaaggaaaaaagcaaaaaagggggcgacacgcaagtgcctgtaggggtgaaaggagcagggaccggcgatctaggggggggcccgccgcacgcccggcagcctccggagacgcgcgccgagcccggctcccacggcctctgaggctcggcggggctgcggctgcctggcgggcgggctccggagctttcctgagcggcattagcccacggcttggcccggacgcgaccaaaggctcttctggagaagcccagagcactgggcaatcgttacgacctgtaacttgagggccaccgaactgctactcccgttcgcctttggcgatcatcttttaaccctccggagcacgtcagcatccagccaccgcggcgctctcccagcagcggaggacccaggactatcccttcggcgagacggatggaaaccgagccccctggaggacctgcccctgcagttctgcctcacacggctcaagtcaccaccgtgaacaagggtgggtgaatgccttttcttccccctgaatgtctttccttccgcggtattttctgccccgatctatagtcccttgagtctccacacacactcctcacagagatctgtagcgtaggtacgtgacagctctgcctacatctgacgtccggagtcattaaccaggaatgtatgtgtgtctgtgtgtctctctgtggagtcgtcagaattcttcataggggttaagctaaaaaagcgaggcgaggagcccctctccaatggctcagttttgctgaataatcacgtgtgaatcgaggggcgggcttttggcaggcagatcttactagtatttactaccaagctctactccagattaaccatcccagtccttctgtcagtctccgatgccatcatgcagcctggttaggagcaaaggaaaggggaaaaagaaaaacgactaattcatcttttcctgatcgtcaggaccctaaagaatggccgagccttgggggaacgagttggcgtccgcagctgccaggggggacctagagcaacttactagtttgttgcaaaataatgtaaacgtcaatgcacaaaatggatttggaaggactgcgctgcaggttatgaaacttggaaatcccgagattgccaggagactgctacttagaggtgctaatcccgatttgaaagaccgaactggtttcgctgtcattcatgatgcggccagagcaggtttcctggacactttacagactttgctggagtttcaagctgatgttaacatcgaggataatgaagggaacctgcccttgcacttggctgccaaagaaggccacctccgggtggtggagttcctggtgaagcacacggccagcaatgtggggcatcggaaccataagggggacaccgcctgtgatttggccaggctctatgggaggaatgaggttgttagcctgatgcaggcaaacggggctgggggagccacaaatcttcaataaacgtggggagggctcccccacgttgcctctactttatcaattaactgagtagctctcctgacttttaatgtcatttgttaaaatacagttctgtcatatgttaagcagctaaattttctgaaactgcataagtgaaaatcttacaacaggcttatgaatatatttaagcaacatctttttaacctgcaaaatctgttctaacatgtaattgcagataactttgactttcttctgaatattttatctttccttggcttttcccttgcttccccttttgccaatctcaacacccaagttgaagactttgtttttaaaatggtttgtcctgatgcttttgtctaattaaaacactttcaaaacagga

SEQ ID NO: 83748 - DNA, 977 bp, Homo sapiens
gacccacgcgatgcggacccacgcgtccggcctggttaggagcaaaggaaaggggaaaaagaaaaacgactaattcatcttttcctgatcgtcaggaccctaaagaatggccgagccttgggggaacgagttggcgtccgcagctgccaggggggacctagagcaacttactagtttgttgcaaaataatgtaaacgtcaatgcacaaaatggatttggaaggactgcgctgcaggttatgaaacttggaaatcccgagattgccaggagactgctacttagaggtgctaatcccgatttgaaagaccgaactggtttcgctgtcattcatgatgcggccagagcaggtttcctggacactttacagactttgctggagtttcaagctgatgttaacatcgaggataatgaagggaacctgcccttgcacttggctgccaaagaaggccacctccgggtggtggagttcctggtgaagcacacggccagcaatgtggggcatcggaaccataagggggacaccgcctgtgatttggccaggctctatgggaggaatgaggttgttagcctgatgcaggcaaacggggctgggggagccacaaatcttcaataaacgtggggagggctcccccacgttgcctctactttatcaattaactgagtagctctcctgacttttaatgtcatttgttaaaatacagttctgtcatatgttaagcagctaaattttctgaaactgcataagtgaaaatcttacaacaggcttatgaatatatttaagcaacatctttttaacctgcaaaatctgttctaacatgtaattgcagataactttgactttcttctgaatattttatctttccttggcttttcccttgcttccccttttgccaatctcaacacccaagttgaagactttgtttttaaaatggtttgtcctgatgcttttgtctaattaaaacactttcaaaacagga

SEQ ID NO: 83749 - DNA, 748 bp, Homo sapiens
ggctctatgggaggaatgaggttgttagcctgatgcaggcaaacggggctgggggagccacaaatcttcaataaacgtggggagggctcccccacgttgcctctactttatcaattaactgagtagctctcctgacttttaatgtcatttgttaaaatacagttctgtcatatgttaagcagctaaattttctgaaactgcataagtgaaaatcttacaacaggcttatgaatatatttaagcaacatctttttaacctgcaaaatctgttctaacatgtaattgcagataactttgactttcttctgaatattttatctttccttggcttttcccttgcttccccttttgccaatctcaacacccaagttgaagactttgtttttaaaatggtttgtcctgatgcttttgtctaattaaaacactttcaaaacaggacaacatttttctgtgattttccctcctttagaacccatacacaacttatcacttgctaaggagaactgtactaaaagttattgaatgtcttaagtctttacactagaaaaggtagaccaactggaaaactagacatactctcttgatgattcagttgttttcatcctttacccatgtcccgtccaccttggtgcctagtatttctgctttaaaacaaaataaggacaactttttttttttttgaagattaagcctgaaatttcagtgtgaatttcccttaatgtccaatcttccctttttctcgacatta

SEQ ID NO: 83750 - DNA, 471 bp, Homo sapiens
tatacatgttgcacaaattctatcttattgatcaatttatcctacttttgggcccatttaagacgttccatcatagaagctcaatttttagaagttgtcttctactttcacctactagcacttttctgcatttgaccccttcaagccccatcctatgggtcttccgcaagaactccatcaaaaataaatagttacataaatggaaggacaggcagatattttaaaatatctctgtagcatatgcacttgaaggattctaccatttctacttcttttccaggttatgaaacttggaaatcccgagattgccaggagactgctacttagaggtgctaatcccgatttgaaagaccgaactggtttcgctgtcattcatgatgcggccagagcaggtttcctggacactttacagactttgctggagtttcaagctgatgttaacatcgaggataatgaagggaacctgccctt

SEQ ID NO: 83751 - DNA, 821 bp, Homo sapiens
gaggaagtcgcgctcgtgccgcgcctgtcacaacagccgtccaggctcggggtcgtggccgtccagcacctccaactccacgataaagggaatctgtacgtcccgcttcagaaagcgccaaaaaggtttcttggattccagggcccagagcagccccatggactctagccccctaaagctgccgcccagcacgggcgcgcgctccaggtccagctcgccgcgggcgtcggcgcagtagcggaagagcccagccttctcgtcgcgcagggacgcgcgcgcagcgtgtccagcggctccgaagccaggccgcgcatggtgatgcgcaccggcttgtctcggcagccgcggcccgcgggctccaggatcagcgttgctgacatctcggagctggagcggggaatcttaaggtcgaggcccgaggcccgtccaagatcgtggcaagtgcgccgattgtccagagggcgtccggcgtcccctggtgccgggagcggccggtggctgagcagtcccagaaagcgcctgggactttagaccagttaacccggcgccctggactcgtctgaggcaaaaggagccagactcctctcctgggtcctctccttgggccccggggagcgcagacttttttttttttttttttcctttttttaattttgagacagggtctcgctctgtcgcccagcccggagtgcagtggccgatccatagctcactgtaatctcgatctcacaggctcaagctatcctcctgccttggccttccgagtatgtgggactacaggcatgagtcatcacgcctggcctaagccatcacgcctggcc

SEQ ID NO: 83752 - DNA, 711 bp, Homo sapiens
cgacaggggacggggtgaggctcccaacgctgagcgattccttctcgttcccgctggcgtggaagacgaggcttgtcttgacttcgaatcgtattaatatttcagacacttaacaggcaacctctcgtaggcattgactgcgtcccaggggctgtacctgtccgagctgattaagcgtgcgcggtcacccaggggtgaggaaacagggacggcgagctcgagtcactcggcagccggcagatccaggattcgaacctgtccaacaggccggacgcctacccccagctcacttaagtgcaagctcgcctgccgccgctggcgcacagacctcgtttgctttggcccaggtccttgctcggcacacggggcctccctgatacgcaggacccctgcctgtatttccaactgtatttcctactaaacttggcacaacctcactctgcaacagcttaattacttactgtttccggtcctcaccctcccccacctcaccgtacacctccgcattcaatctggactcctccacttcaacttcaccaccactcagatccaaacccgcactttattcctgggtacctgaaaaataactactagctggtcatcggtctccctccgctccactcgctcccatccacggggcaccgttttatgatctaaaaattgcacatcaaattatgctcacctccaccttgctcccgaaggcgcctatgg

SEQ ID NO: 83753 - DNA, 560 bp, Homo sapiens
gcgggttatctaaggaccccggggctcattcagaatttagatcttaagtgaatttgaaagggacatatcagatacatagtagatatagtaatataacaataatacacattgatcatgatttgggtgaattctctcagttgctctctctctttctctctctctctgtcactctatttcttctctcctctctctctctctctgtcttattcttcagtttgtgaatgtgcacatgtagaaacttaggaatctgtatgtgaatggttgttaaggtagcttgtcttgagagtttctttactacagcaatgactgataaaggatcactgccaaattgtggacacaaacacaaaaagagacaaaattagagagcaagagacaaaataaaatcgaagaaccagtgacaccaggtctactagggctgaattaccaaggaaaggatagcagttcaacacatttgcttcaagtctaccgcccagtagcctggagtaaatacactgggctattctcttttccttttcccaaataggatcggggggtgaactttttatttatagaagaaaata

SEQ ID NO: 83754 - DNA, 832 bp, Homo sapiens
gctggtacggtctggagagtagggaaaagccagaggctttggcaaggggcaggtacagatgtggctgagacagggccctggacgtttgctgagtgacgtcaggtcagctcgtaggaggcttccctgacttccagggtctcaccggcttccggtagctgagttaacccacctcaggtgctggaggccctccagctgtcagctggggtccgtgcaccccccagactgcctggagggttcgcacacagtttgaaaggcctctgcgctttggagcccaatttggaacttgaaggcttgacctttgtgttttggacaactgttttgtgtttaacctcagatggaggtgaccatccaaccagagtgatggtagcaggagctgggacggagccccggggctggcgcccagggacagggggccgaggcggatgggtggcgcagtccaggccagcatcggccccgtgggcctcggtttccaccgtctctacagcgtgggtggccccttcagttccgtgtggccttcgctagcgctgttgggcgctgagctgtacagctgccgtgtctgtgggcagaagttttttctcctgcaccgactgtgtcgtccagaggcgttcagagcctgctgttttcacgctctagccgcacagctgtgcccgcgagtgcgagtcccgcgtccgaggcctcggcgtgaccttacagcatctgtcgggtccgagcagtcagtccagagggtcgactctgaatgaaaacaaaacgccgtggtttgaaatggaaggaaacctggcccctgaagactttaaaaattcaaaaagcctttgctccctcaattacgacgatg

SEQ ID NO: 83755 - DNA, 407 bp, Homo sapiens
atttaaggagactggttgtaatttcttgattgggcctgctgggtggagtggcttaaagtagcatcagggcaaaaaaggtgttaggaattctatgtgatattaatattcatgcagttagttaagaagataaatgtttttatttttcttttgagcacaataacaagagctagacaaaaccgaatacattctgtgtacaccaaacttctatgagaagctaaaaaacacttttgatttcttctttctcatcatacctgaatttcatcctttggatgtgcttttacagtaaaatttctattaaattgaaattttaatattcgttcagacctaaattataagattttgtggtatgtattagtctcatctgtttaagatggtgcctaatgcagataatgcatcagtacagctct

SEQ ID NO: 83756 - DNA, 182 bp, Homo sapiens
tatatatactaaaaaacgggcattttcacatattctatgatctcttaaataatcagaagactagctgtgttcttaagttggcatcaatgggcacaagccagtttggtcatcctgtttcccgcctaacaccttagccagaactaagatctagggagagagcagttttgaagtagagatgggat

SEQ ID NO: 83757 - DNA, 753 bp, Homo sapiens
gcagaagtggagaggtgggtatgggacacacagggaagctgctctcttctgttgtctgtggcttctgttggaggatgtgctgtgggaatgcaaggaggagatggaaggaaggtgtcaatatagctttaacaaaggaaaaaaaaatgaaaacaccgaaaccacccttgcaaaaattgtaacagtgagaaaattatgacattgaaagatatccaatctaacccaactccttcttgcctttaacctccaaattgcacttagtcattcctgagcaaaggccaagctaactttgggagaaatttcgtttacagtttaaatgataatagcccttcccaaaactaacctgtctttgtaaaaatgatgaaaggccaccaggttagggaggatgagaggggcctgaatgcaggcttagataaacaattacccgccattgtttcagaggtcacaagatttgtaacttccccaattagtcctgtaaaatgatatcactgtggccttttgagatgtctttgcagttattttttgttttgtttgctttgagacaaggtcttgctctgtcaccaaggctggagtgcagtgatcatagctcactgcagtctctatctcctgggctcaagtgaaccttccacctcagccttccaagtagctgggactgcaggtgcatgccaccatgcctggccagttttgttgttttttggttctggggtgttttttgcttgtttgtttgttttgtttttgtatttttagtagacatga

SEQ ID NO: 83758 - DNA, 790 bp, Homo sapiens
aacagccagctcctaggagctgagggcctcagtcagtcatacatgcaccaggaatggaattctacctgctagtgagcatggaagaggaccctgagccttaggtgagactgcagcctctgctgtcacctggatttcctcctagtgagactacaggcagaggccccacctacctgatgtttagactcccaacccacagaaatggttttgtaaaccataggttctgggtccaggaatggggaggacgctggtggctcccacctggatttcatgccgcaagggctttctgctctggccttaactcacatggcatttttaaggcatggcaaatgttcttgcctttaaatggcagcattatatttcaaaggaaaatgtaataaagcatgcttttgcagcctcatggaaacgtgtgctatgcaaacatggacgatcctcatctgaaagtaattctctcccaactcctcaggccaccaagggaatgaaatcaaaagatgggcagcggttcctagctcatcatttgtcaaagcgagacgaagctcaaagcttcagacttttgtgtcctgcgctaaatttagctaatcgcacctctgcgttctgttcgccatccaggacccctgccatccccgggaaggactatcggcagtgacagcaataatgacactttgtgctttcggttcctcgccttggatggctttcaaaggcctctgccaccctgacgttccccatgtctgtgacacccagccaagcaggcacaggaggaggactctgtgctggcttcacagaagcaggaggg

SEQ ID NO: 83759 - DNA, 748 bp, Homo sapiens
gccatcagaggccaggattcttgccatccttcggaaacacgccctagccagaggaggtgcgctccctgcagttggaatctccggctgaggcgatgagagcccgccgggctcacctggcggtaaggccatcgcaggtgcgcctcctgcaaagcctcgagctgcacacgcgcccaggggaaagacgtgacgttgctgcacctgtggctagtccctgcgcctgtgtgtgagacctgagtggggctgtggagacccgagaggctgtggctcttgaggtgggtcggtggtggacgtggcctttgcttctgttctgaccttgtagccttggggccccttgagaccttggagaacaccttgctcaccgcctccctccgactgcagccatgtggacctagagatgagggcagaggatcaggtagcgttcatggtttttcccttgtaacttaatgtttaaataatttcagacttatagaaaagtccccagaatagtacaaagaactgtgtgtctggtacccgcattttcctttattaacatgtttctttctttaaaaaatatttttggcgaaccacctgacagtagcagacttatgccttttcttccatatacttttgtatgcatttggggcattcttttattatataaccatagtacagtgttcaaaatcagaaacttaacattgatataattctgtttttcaatctaaagattttattcatattcaccagttgtcccaattatgtccttaatagc

SEQ ID NO: 83760 - DNA, 379 bp, Homo sapiens
aactttcagactgataggaaagctgaatgctgtctctgtgcactgcctctaccctatctttcttcaaattgctgttcaggtcaacaaagacatacttattgatagatctaatagttaattttctgctgcttatctgctaaatacgattctaaccatcctcctacttgctgcaactctttctttcattggcttccaggttatcacccaatcctgattctccgtccccctgtctctgtgtgttcttagtctgttttgcctgctccagctctgcctgcccctcctgggttggcatccccaaggccctgtctttgattctcctgtctcacacacttcagggttatcagcttccatcctggcttcaattcctactctattcatg

SEQ ID NO: 83761 - DNA, 699 bp, Homo sapiens
gagccaagatcatgccactgcactgcagcccgggaaacaaaagtgaagctctgtctcaagaaaggaaaaaaaaaacaaaaaacaggtgaaatctgaatggggtcttgagttcagttaatagtaactgccaatgttggttcttagttttgacacataccatgactatgtgagatgttaatgtcaggggaaccaggatgaaggctatacagaactgtactatttttgcgacttctctgtacatctaaaattatccttaaaaaggtttctttaaaaaatgacatcttgttttctgtaaaatttgaatttctcatgagtgaaatggaacgttttgaatatgatgctctttttaaaaggtggccttaataatttgtatttactaaggaaaaaagtcagagtttatttactttaaaaaaattcaggccgggcgtggtggctcatgcctgtaatcccagcactttgggaggctgaggcgggcggatcacgaggtcaggagatcaagaccatcctggctaacatggtgaaaccctgtctctactaaaaatacaaaaaatgagccgggcgaggtggcaggcgcctgtagtcccggctactctggaggctgaggcaggagaatggcgtaaacccggggggtggagcctgcagtgagcagagattgcgccactgcactccagcctgggggacagagcgagactccgtctg

SEQ ID NO: 83762 - DNA, 200 bp, Homo sapiens
cagcagagcagctcgcagccgtccagcgcgggcgacgagctgttacaggcgcgccctgccgtgcctgctgtgcccaggcgtccgctgtacgtgcagaagttgggcgatttctcgaagtagacgaggtcgtggggggagggcggtttgtgggccgggtcttccggctccaggcgcagcagctccgcccgcgaagcgcggtt

SEQ ID NO: 83763 - DNA, 637 bp, Homo sapiens
attatgtcctcacatggcagaagagtaggagagagtgaacccactctcgcatgcctgttatccataggagtatgaatccatgtatgagggcgaaatggattagtcccatctctagatactattgcattggggattaaatttccaatatctgggtttggaagggaacaaaagcatttaaacctactgccctactcatccgtgtatcctagaatgggatctggcatctagtttttgctcaaaaaatatttgttgaatggacaactaaataaaagaatgtttactagagaaaatggactggagttgggtgtgagaacttacagactaattgtaattcggctaagcccggcaagaaagagagaatcctgcaagtgaggggtgcaggaaagatcagacgagttagtaaaagggagaaaaacaagagcccagtggtttaaaaataatctctgtgcttatccatcgtcataagggtggctgtcagtcatcagtggttgtccactgtggtttcagcctctgccagtagtggccacaacagtccctatcacatgagttagagccctcaagaacaacagctacttactgggagtctatggaaagctcctccactcaggcttccccacaatttatgctttaagagtat

SEQ ID NO: 83764 - DNA, 501 bp, Homo sapiens
attccactgttaaatctagctgaatgtagcctgcaacatggaagccatgaccaggacagtggaagtgcagtgtgaattatccaagcaatcatttcctcattccttgggtgggagtgggcagacacgcccaggagtccctcaccctgcctcccacgatgctctgcttcttcatacagtgcacacagtggtgggagatggcagcaggggcagagaggccctcattctggagaggggacctatgaatcttgtaaagaaaaaaaaaaaaaaaaaaaaaaaaaaaaaaaaaaaaaaaacaccccaccaaaaaaagaactagcatcaaacgaagagagacccccccgccagtgactgctataccccgctttcacactcatggcaaccacgcggcgcccaccatatcgcacacccactacctagatatcaacccaaaccctacggccaccgccggcatactaccccgtacggacactggcgccacaaaccaccacgctgccaaccatg

SEQ ID NO: 83765 - DNA, 526 bp, Homo sapiens
cgcatgttcccaggtggtacaggagctgcgactgcaaacacattcgtgggcaccgggtacaccacgtccacggctctgagcagtactccgactacagctaccgaccaacccccccaaatatcccagtaagcaggtatggccagccctttcagctcagcaggattgttctggagtcttatgtgaggtatcaacattcagactccagcagcattgttctggagtcctagtgaggggcaatcattcaggccctcatagcagtgttctggaatcctaagtgaggggaaatactcagaatccagcagcagtgttttggaatcctatgtgagggactaacattcagaccacagcaggaatgttctggaatcctatgttagggacagatattcagacccttgtggcagtgttctgtaatcctatgtgaggaagaaatattcagaccacagcagcagtgttgtggagtcctatgtgagggacaaacactcagaacccagcagcggtgttccggaatcgtatgtgagggacaaac

SEQ ID NO: 83766 - DNA, 810 bp, Homo sapiens
atagatcaggtgtcataaaatctgggggttcaggctgtggctcctccctctgcacccttgcgatgcaaattaacctattaccttaaaatgagatgtgaccaattctgctcagagacagaagctactggtcaaagggattcagagcaaaccagtcacagctaccagaggatttacagagggagctaacagagccgggctgggctgcagagcgacctttccacagcacgctgcaacctaatacagtgtgttaagccaggggacctacaggggagacacagattgggaaaggctgggcttggtaagcaggagaattggcccaaatgactcatcacataaggagagaatgaggcaggtaatcagaagctagcatctctaactaaggagatcaaagaaccagtgggatcaccttgctcagtgggaaggtgatctggataaataccaaagacggggacacttgcctgcagctgggcttttctgctcccagtgacagaatgccaaagtgagcctgctccatttaaagcataggccgggcgcaatgactcatgcctgtaatcccagcactttaggaggcccaagcaggtggatcacttgagtccaagaattcaagaccagcctgggcaacatgaagaaaccctatctctacaaaaaatacaaaaaactagctgggtgtggtggcacatgcctgtagtcacagctacttgggagactgaggcaggaggattgcttgagcccgggaggcagaggttgcagtgagctatgatggtgccactgcacactccagcctgggcgacagagtcagacattgtctca

SEQ ID NO: 83767 - DNA, 321 bp, Homo sapiens
actttagacaaataactcttatgaacatatatatatatgtatgtataaatctgcaacaaaattctagtgaaccaaagccagtgacgtataaaaaaaattatatactgtgaccacgtgggattaactccaggagtgcaaagttggtgtaagatacaaaataaatcaatgtaatataccatattaatacaagagagaacaaaagctatatgatcatctcaatagatgcaaaaaaaccatttcacaaaattcagcaccacttcatgataaaaacattcaacaaactaggaatagaaggggccttcctccatgcttaatggtgaa

SEQ ID NO: 83768 - DNA, 445 bp, Homo sapiens
gctaaatgtgttgcttgatatttaatgagtgaagggttctatgtaaaggcaattttccttccaaaagtactgtttattttcactggagacaaaattagacctttccagataccccatctctttttggtgaacagggttgaaagtgctgtggggtctatacttgaaaagttctcccaatatgcagttactgtttcccattcaatccctatacattgtactgtgttcatatctaattgtatcagatgaggtcagcttgccacttgatatagatcagagatgatcaaatgcacttatcctgtgaatacaactgcttgtgtacacatgtatataatatacatgcttgatttctacaattcacacgtaagtgtattatccaaataaaattgtacatattgtaaagtttatgttaaaaattaaatggtgatgatggtattaacacatggaa

SEQ ID NO: 83769 - DNA, 790 bp, Homo sapiens
ggatcagagtatcatgagtgagggcatcaggatttacccaaaggcccagagaggggacgcatcttgcttagggtcacagagcaaagtagtgcagggctgaggctagaactccaggcccctaactcccaaccagcagtcttcctgggaagctctctgaaatattccagcctatttaccaagtacctagcaagagcctcccgcggcccccactgggctcccccttgccctcaggggtcctaccataacggccatcttttggctcccaaaatgcctggggctccttcctaccacagggtttcttcttatgctgttccctctgcctggaatgctgttccccgtcctgtttgtcaagttagctccttccttgtcagatctcagctggaggatgcatccttagcaattcttcctcacctgtccagagtctgggtccaggaacttggttgtgccgtcccttctggcagcacgcactctgtgtggtgttcacattcccaactgcatctcttattagcatggaggacggagaccgagtctgctttgcttgatgctgtctctgcatccgcatggtgcctggtgcacagtaggcgctcaaggaagagcagggcaggtggggccccgcctcccagccccaaggagaagacagaggcaaatgtgttgctgggggaagcagaggcaccgaggcctgcaccagggagcccatcctagacaggtgccacccccacgctcggcctgccctggctccaggccccgccaacagcagagtgggggccctcacttgtgtctccctgcccca

SEQ ID NO: 83770 - DNA, 352 bp, Homo sapiens
gagctgatcgtggtcccacccaccccctttcctagctccatttcttccctgtgtccacttcctaatgtacctgctttgccccactgagacgtaaataaaccccaggaaccttcttcctaatcacacaggaccccagtgatctggggcaccttccccacatccagcctagtaatcagcctctcacccttcaaggtgggactcagcactctctgctaaatggaatcaccgttatctgctctgcttgtctttcctcctgggctgagaaagtcctggtcctatttagcaccataacttcagtgcccagcacactggagtgggccagtgatatctgttgactgcataaagaatgctg

SEQ ID NO: 83771 - DNA, 144 bp, Homo sapiens
aagccctgtctctaaaactgccccgggaggcccagcatgatggctcaaatctgtaatcccagcacttacgggggcaaaagcaggattctgcctgagccccaaaacttgagaccagcctgggcaatgtcatgagaccccattcct

SEQ ID NO: 83772 - DNA, 383 bp, Homo sapiens
cagtggccttatgggcagatgcaaccgtgcaccagtcgtcacagtttaacgcaaagatcaggggttaactttcagcctcactctgcagcctactgggtgcctttgtgcagggtggccctgctgggaagcacctgtgctgtcctctttctaaaatacgtaaataggaaaaagaaatgcaagatagggcctatcaaaaattcattagcataaaagtaggagacaaatgtcgctcatgagagatacaataagaatataacttcacaggcgatctactgcaggtgactttttgcatttttattatacaagcaattattcattgcaaaaaaataaaaataattagaaagggtgatcagaaaaaagaaaaaaaatccatggtctcatct

SEQ ID NO: 83773 - DNA, 380 bp, Homo sapiens
gtggatcctggggaacagaattctagcttagccaagttgacacagtagaaaaccacaataattattgttatttcactcagagaagtcacttgcttagtaggcttacatatcaggttaagtgtcataacccactttaaaaccctgtgcttgctcagtaatctcatcctgcctacaattaagtcccttagtttattcctctgtaatctgattccagtctagctttgtagacccacatctgagtgaccccttccatgcactctaggttgtaagaaaacatactctccaaacatttgtatgtggcttttcacctctggacgttgctaatattccttttcctttgcttgaaatgcttcctttccacttgcttctgcttgtttctc

SEQ ID NO: 83774 - DNA, 331 bp, Homo sapiens
cctcgcacacctacgtggtggtatcaagttctttctaaccacacgatattcaggccagtaatagtttagtgcacataatttctcatttgccaagtgtttgtaatttttcccggaaatctgaaaccttagatgttatctgagtacctccctgctgggaatagctttgaaggtcttaggcctctccaaacaggattcctctcttgatatgtgtcaaacacccaggagccaggttctgcaacctcactttctaaccatctccctgggaactcaacatacatagcgatgatgtttccacccattaaatgttagggtttcttttgtaaggcaccaa

SEQ ID NO: 83775 - DNA, 204 bp, Homo sapiens
ttcaggccctcgtcagctgtgtcctagattattgtcaaaacctcctaactgatctttgcccagtttctttagaacttgactttaacttgcctaagtttatgcagctagtgtcagagtcaggatacaaacctagctctgtatgagctaagcaatactgtttctgccaagtaacacctttcttattcatctttgtatctccagaat

SEQ ID NO: 83776 - DNA, 414 bp, Homo sapiens
tcacagtggaattgcctggccccagtgtttagtctgtattaggttgaaccacatgaaaggctggttaattcaacccttttttacctaggaaaatggcaacttcatatggttcaacctaatggagggagggattcttacatttattaaggacctactggacattcagtcattcatctaacacctgtagagcaatggctgtgtcagggccagtgtgtaacactgcttcagcaccccaagactgagagccaggatttttcatcttccctcctaaggataagaaacaaacttaccaggcagaacaagggtaaccaactcgatctgcctgagctcaggtaactactaaaacaggccaattttggccaggcatggtggcttcacgcccataatctcagcattttagaaggtcaaggcggg

SEQ ID NO: 83777 - DNA, 352 bp, Homo sapiens
gttaaaattgtctagaaatactttctccacccttactttccaaaatcaataagaggtcctttttagtgaactgtttccacagtctaccagagattcacaagcaacctaaaaaagttaatgcactttcagaatgcactcagaggttttgcgttttgcaggaagtagagatgggatgatacagttcttcgaaatacaggtgactcacctgtactacttagcataggcctgtaaggtatgccttaatttaataactacttgaaggaacctcagctatgatttggtccaacctcctaacttacagatatatttctcagagacttacccagaactacataaattattaatagtcagg

SEQ ID NO: 83778 - DNA, 704 bp, Homo sapiens
gagagagaatgagtgcccagcgaagggagaagctccttataaaaccatctgttctccttataaagatctcttaataaaaccgtcagagaactatctcattcactatcaggagaagagcatgggggaaccgcccccatgattcagtttactccacctggtcccgcccttgacatgtgggtgttattacaatttaaggtgagatttgggtggggacacagagccaaaccatatcacaaggctttctcctccttgctgggattgtacccatagcctctttctgagtcctctctcttttagcctctttatgcctgcagtgcatccttataccatttctagagtcatctttataaaacttatactctccgtatgactcataaatcctgtttttttttttgcacagtatattaagtataaaatttgttaaagtctttaatggtctgcccccaagctacatttccattttgtatgtctttcagttcctttctactttgtatttggctgttgagttaactgaatttttgccattccattaacccatcccatgcttttcccacttctagatttcacttttcttgtaggctagaatgtcttgactgggatctgactggagataatgagaacaaaaactggttcaaagagccaggatgttgcataaaagtcctaagattgtatctaagcaggtaaaataaaaattttaggcaatt

SEQ ID NO: 83779 - DNA, 893 bp, Homo sapiens
gaaagacagtttggataatcaggacaacatatcattagcaggacatttgaagcggtgcgtaatcgtgctaaaaatattaatttggaaagaatcttgaggcagccaaatttccattcgaatcctcacctccttttacaatagttttgggagcagggaaggatctgagagggaatgtgccatctctagcacttttttaatgacatacatgtattttttattccacaaagtgaatgcaggcttattgcagacaacttggaacataacggagaaaaatgaaatccataaacctaccccccaggggaggcctctgttaaccccatggtaggtcggctgttttcagcatgtgtgtgctttagaatacgttgattgaaatataacatatgtgcagaaaaatgcatggatcataaatgtatagcttgatggaattttcgggcaaaaactcccatgtaataagcatctggatcaagaaacggaacatatgaaagtgtgtgtttttttgtctttcaaattaaaaaagttttttagaaacagggtctcactctgtggcccaggctggagtgcagtggcacgggtatggctcactgcagcctccacctcctgggctcaagtgatcctcctcctttagcctcccaaggagctgggactacaggtgcacaccaccaagcctggctaattttttaattttttgtagagacagggtctggctatgttgcctaggctgatttcgaacccctggactcaagaggatctcctgcctcggcctcccaaagtgctgagattacaggcgtgagtcactgcacccagccaccaatgtggtttttaaacaaaatcagggccctatggtgttgtgagcccaattatattccccaaaaagatatgttgaaatcctcacc

SEQ ID NO: 83780 - DNA, 405 bp, Homo sapiens
gaactgtgaaacgctattccttgtccttgaggaattaaaagtgaagacagttacatttacatgtaaaaagataatatgaagagagacttttagaacagttcagtagaaccaaaacaagaaacgttgcaggccatacgcaaccatcaaatgaatgatccaagaaatcagacaaggaaacattcagtacagaatagatttgtctggggcacactctcaaaggaggcagaactcaggcaattctcaaggctgtgggtagtacctggaaaggcagaaaacaacaggcctgggaagagctggtatttaaaggggaaatttaaaggcccagggatgggaaagcaataaagtagacagtagccagggcgattttaaatcctcacacaagctcagaaacaccaagtcgtctca

SEQ ID NO: 83781 - DNA, 412 bp, Homo sapiens
  misc_feature (367)..(368): n is a, c, g, or t
gcattagcagtttagctctcaggtgatttcaatgtgcagccagaactgagaaccattgaaaaagaggcaagaaggccagacaagaaggtactgaattgaagtaatcaaaatatgaaattatgcactagggtagttacaattggaattgaaatttgaaaaatattttgagacaattgagctctctccctctctctctctcctgctgccttatgaagatatgccttgcctccccttcaccatccgccatgattgtaagtttcctgaggcctccccagtcatgtggaactttgagtcaattaaaccccttttgtttataaattaccaagcctcaggtagtatctttatagcagtgtgaaatggactaatnnaccacccttagcaccaacacatttttagcagcaattataatttc

SEQ ID NO: 83782 - DNA, 293 bp, Homo sapiens
agcaattctcctgcctcagcctcccaagtagctgggactacaggcacataccaccatggctggctaatttttttttttgtatttttagtagagatggggtttccccatgttggccaggttggtctcgatctcctgaccttgtgatctgcccgcctcggcctcccaaagtgctgggattacaggtgtgagccaccacgcccagccgcagcttagttcttattagttttggtaagttcttatgtgagtggtagctttagtggtgattatatgttttgtcagctgacagtagagaa

SEQ ID NO: 83783 - DNA, 380 bp, Homo sapiens
gaaataatacaaatttaaaaatacagtaaaactatttacatagcatttacattgtattattataattaatctagatattaaagtatatggaaggatgtgcataggttatatgcaaatactatgccattttatataagggacttgagcatccttggattttggtacctgcagggggtcctagaaccaatccccatggaaactgaggaagaattgacttttaatatattattgtagctttaaaaaaaagtgtagtcagtgatggttttcccttataaaaatactttgttttttgagaatggagctcatcttttataccttatcatattgactaagaaaaagatggtggtgtgagatactccttcacttgttagccctattca

SEQ ID NO: 83784 - DNA, 477 bp, Homo sapiens
tactgtaccttcttgaagatgaaagagtccgaaagatttaaagatttttgagcagaattagacataaaaaactgtcatagtttggtgttgctataatagaatatcacagacaaggtaatttataaagaaaaatttctttctcatagttctggaggctgggaagtccactgtcaaggtgctggcatttggtgagggccttcttgctgagtcagctcatggtggaaggtcaaagagagggcaagcgaaagcaggtgattgaacttgcagcctcacctcccattagaccctgcctcccaacagtgttgcattaggattattttcatcctatgctttttgtaggacatattcaaaccatacatagcacaacatacttgttaaaattttaaatcactgttaaagcatgtttctttgttatatgtggaaagcattgcctagtaataacttactagtcttaaggtagttttctgaaaaaaaata

SEQ ID NO: 83785 - DNA, 718 bp, Homo sapiens
gatcggcagtgacttcatgaggcctgaggcaatgacaaagagcccccagggtcttggtctgtcacccagcctggagtgcagtggtgggttcacagctcactgcagcctcaacctatgggctcgcgcgatcttcctatctcagccttccaagtagctgggactacaggcatgcaccaccacacctgggctgtctggtcctctgggcaggaacttgtggatgaagcaggtgttaatagggttccatcactggggcactgggaacccaccctgtgctgaggaagctatcatatgtcactaggaacaaagtgagcaaggtgctaagatctcccttcatatcctgttgggaaactgcttcctatgagaagaagaatccttcttggcttgagtcatgaagaaacggggagggctccgtgtgaacactattgaaagctctggacaacgctgggagggagtcttagttctaaaggtactagctgggtgaccttgagaacactgcctaatttctctcggagcccagcgtggggcctaagaggggctgggcatcagctttcaacctcgcttccagatgttctgagcactgttgttgggatggtcctgtttggcatgacagtgggtccattcttctgggaggggcaagggctggtgcacatctgtgcccctgtgccagcctgagacatctgtgatggcaaatcagactaggaaggtgatggaataaaac

SEQ ID NO: 83786 - DNA, 483 bp, Homo sapiens
ggcaaatggttggatatacctaggtcaacggccaagatctatttgttagagtgtgtgtcgaagttataactaacctcgcctactatctatacatttcaagacacattgccctccttcaagagagacagagtattatccaattgctgggaaaacaattggtaaactgtcctttataacatgtgacattgtaattggcatgaaattcacttattcattctaacttgatagatatttgtgttgtttcctttttgtttgtctggatatttatgaatagggctacgatgaacattctttcccagatcttttagtataaataagcattcagataagtgtagaaataaatgacaattaatgaatcgtgctgccaaattacttattgactcagtctgcgcccaagggaaaaacagaagccgcacagtaatttgaacaggaaaattacacagtttttaacatagaagatttaagtaatgcgggaattgcttc

SEQ ID NO: 83787 - DNA, 587 bp, Homo sapiens
agttcagcatttccttcttttccaaggctgagtaatattctattgtatgcatacaccacctttagcttatgccttcatctgtccgtggatacttgggctaatgctgctatggacatgagtatctcttcaacaccttgctttcagttctcacggatatatacatggaagttgaattgctggatcaaatggttacttttactttttcaagaaaccaccgtattattttccatagtgcctatatcattttatattcccaccagaatatacaaggactctgttttcttcacattctcaccaacacttgttatttctgtgtttctttctcttttttatttgtctatgtatgtatgtatttatttttggatagtgccatcctgatgggttgggtgtgattgctcattggaaggttttcatttttatttccctaatgagtaatgatgttgagcatcttttcttattcaagtcctgtgcccatttttcaattgggttatttttgttgttgttgacttgtataagttctttgcatattctggatagcagttgctttttcagatacatgatttgcaagtattttctcccactccgtg

SEQ ID NO: 83788 - DNA, 810 bp, Homo sapiens
cagaccacatgctattctcactctcaaatccaaagtgactgtcccagccaaaagtgatttttctttctctgccctattacagcactcagattataccattcatgtgttccctattacatgttgcttttattgtaattgtgaatcatacgagtgcctgctctattcagggactgtgctatgcacgtcacccatcctttctataattctcaaccagcctgcaagatgaataccatcatcagtggtgttcatggtctgtccaacatcgcacagctaataagaatggagcccggctctaaggctgtgtgtgtcactgcaaaccttgtgccctgcccattctagcagttgcctcactcacaattcctggttgtcttgtgcttctccatgagtatagtggtggccttgaccttatgtatcttggttccaaatgtaacatagatctacttagtgtcttcatgggctcagaacacatgacttaataataccttgtactcagtaaaggtggcatgaaggaatgcctgagatgtctctcttttcttttgtagtttatgctgaagcacatgatcagctctatttggtgtttatcaggagctgacaccttgatattcccaccatctcccaggctagttgctccctcgttcctggattagtaaattgtcctaactattctccttgcctggaatccaccctaccgtctgccaccaaacttatcttcataaatgtcagctaggtcacatattccagtaacatatagcttcaaatccctgaaagtcagtgtccttcattttgcctcatcacccccaccccatgacc

SEQ ID NO: 83789 - DNA, 386 bp, Homo sapiens
ccacgatcccgggtgttcagaagaggtgtgtgtttcttccttcctccctctcgtcacagttgctgtcccccaaggaagaggaaatgacttgcttgtggaatccgtttgcaagcaaatcacttatttggaaccaaaaatgggggagaaggaagtaggagccatagactcagggcttgatcaggattccgcaagccttagagttttccactccccacaacatacctctcacctgggccatttagaggcatctcctgcctcccactctgtctctgcctgaggtctacactccgcgcccccccaccaccccccagcccgacccccactttaacaggattcaactcctttgtctgactgtgaccacaggtgatgagagctgggagggcgag

SEQ ID NO: 83790 - DNA, 456 bp, Homo sapiens
gcccctgaattccttgacaggtggccactctttgacacgttagactccaacttgctcaccttcttccaactggcttcagttcattccattttgaccactgccatggttggcttctacatgatccccatttgtgtctcaacttggtctcctcagccaggagctctgagctgcctgttccttgcctttgatgtacctccatttcctgtaattaatctcagctttcccacagctcagcagtacatgacagacacaaggataaagcacccagttcgagccagctccagtgtctctccacttgtatccattcctcgtggtctgccactttggtaggcatcatcttaccccagaggtagcacatatgcatgccatgcagaaaacacaacactgacttctgttcaaagaaaatcaaaccgccagaaagtgaggtcatgcaagcaggcagctcgtcatattctc

SEQ ID NO: 83791 - DNA, 864 bp, Homo sapiens
ggccttgcaggagggggtgataggccctgcataaagggggcagcgatgagacggcagcaatgagacacaagctcttcagccccaaggccatagcacccctgagagtgagctccttccggaagcttctcaggctccctgaagctgctggggaactagaagcgttcagtctgggtcacctagcatgacaccccgggaagcacagccccagctctgactccgagctctgggggcgagagggggctctcgcatcagcacgtggcagtccctcaatgtcgaacccagaagagtgaagaaaaaccaagagacaacagccggcctcggtcctgagcccgaccggccttcggcattgaccccagcagcgccccgtggtgtggctgctgctacgcgaccccccgggggatgcggaggccctggggctgctgagcaagctgccacgtggtgcctgccatgctggggtctgaggccccccacctgccgtggccccgacacacatagcacatcatgggacctgcggttcacagaggattgtactcccaggggctctgccgaccctacaaccaacccccaccacgaggggcggcaaggacaggatcagcccactttgtgaatgaagaagctgaggcccagggacgtgaagggcacacgggggctggactcctggccaggaggtaaggggcgggcagggtctctgcagacggaaaagatggaaaggcgttcccggctgaaggagcagcgctgcggaaacagcaaggcctggagaccctctaaggctgccagccccctcgagggctgcagccacagaaggcgggggtgggggtggcgggggcaaggacccagagagggcctggggtcaaaggtcatcca

SEQ ID NO: 83792 - DNA, 446 bp, Homo sapiens
tagagaacctatattacttacctaactagagaacctatgttacttataataaatagatcctaaccacaaaaatatgtagcatgaaaagaaatcagtgtggaagttctaggtagctgagtccgctgcagaagttgctgcacctgggcgtgctgtctcctgtttggtgggaggacggcaggcagtaagaaaggcacagaccagcaccaaatgaagtctttctctgtgatgcggttagagggactgaaagagaattgaaaaggacatggcgttctccccaagtgaatgctttactcaatagtgtgcctatgtactacctaaaatcatgcatggctgcacccatgggatatgtcacgtttttggaaacactgtcctcattagaagttgggtgcccatggcctgaaagaattttcacccccactccatccccaggtgtggggagggggcag

SEQ ID NO: 83793 - DNA, 270 bp, Homo sapiens
gttattctggcaagtgctttcagggccctccagggtttggctggtcaccatggagggggggttcaggtgctgaatttagggaccccagcatctcacaggtttccccttccatctttcccagtggcactgtgtctgagcaggtgtgcccaggtgaggttgtatccactgtgtctgagcaggtgtgcccaggtgaggttgtatccactgtgtgtgagcaggtgtggctgttgcaggtggaagtggggatatgtgggcacctgggtgcccatg

SEQ ID NO: 83794 - DNA, 570 bp, Homo sapiens
  misc_feature (516)..(516): n is a, c, g, or t
  misc_feature (557)..(557): n is a, c, g, or t
ggagctggggccatcctccagggcaaaagaagctgagtcctgttcctccctctccacttgctaagcccacgcgaggtcttcgggggctggacaaagaagccagccttccccacactgttgtcagactgagcttctttaaaagtaaaactgactctgtcacttaccagctcaaccccctccagtgggcaaataaaatctaaactgttccccatggattccaaggtggcctggtgcaatctggccctacctgctctggcctgtcccattgctgtgccccccaccacgggtccctctgcttctcattcctgcctccgggcctttgcactgctgtgccctttgcctagaatgctcttccccctcctcccaatcattgaggggctgtttcctccccattattcaggtctctcactaaatgtcacctcctagagacaccttccctgaccccagtcttaatggctttcagtattttttctgtgcagtgcttctcactatctgatgtaatcttttctcttcaanccctttttatgttctgggttcagatttacactctgaacaanaggctcaattaca

SEQ ID NO: 83795 - DNA, 456 bp, Homo sapiens
cagtgagctgtgattgcaccactgcacactaccctgagcaacagagtgagaccctgtctcaaaaagaaaaaagaaaataataattctatagcccatcatgcctcaaacatacctagtggattaggtgtctcagttggggtttcagaatgtatgtccaccacttcatctttctgtaagatgtaggccaaaggatacaatgtagcaaatatgtagttgaacaagtcaaaagatctaatgtacagcatgaggactatggttattaacagtgtattgtattcaggctttttatgagtagattatagctgctcttgccataggggcagtgagactgcataactctgtgagatgatggctatgttaatttattctactatactaaccattttattatatgtatatatcttataacatcatgttgtatatcttaaatatacacaataaaatgtattttaaaaa

SEQ ID NO: 83796 - DNA, 708 bp, Homo sapiens
caacggtcccccagccatgggcgctgcagctccggccgagtccgcagacctcgggaacttctggaaggcgggagaacccctgctgcaaggccccgacgccctggcggctcccatgagcaggtcacccagcacgccccagaccacgccatctccccagggtcgccagagtccctggcccctgaggtccctgactcagagccatattcagtacttccagtgggggcgcccggtgcccagcacccacctcatcgaggtgcggcccacccaggaccccgccaagccgcagcgggtggtctccgagggctggaggcgccctgcccttcccggggagaccgctctggggcgagacctctcctgtgcctgggagggttgcatgaaaggggggctgtgtcgtgcctggaacccaggacggacctggagcccggtgaccatcgggatcgcgccccctgagcgtcaggagagcccctggagatcccctggacagagagcccgccccgcaggccgccccgccgcccaggagctcctggacccctgcacccgggagactctgctgggggcgctcagccagtgccccaagggaagcgctaggttcgacgggccgttgtggttcgaggtctcagacagcaagggtggcaggcggaacctgcagccccggccctctgccttcaagcccctgagcaaaaatggagcggttgcttccttcgtgcc

SEQ ID NO: 83797 - DNA, 3305 bp, Homo sapiens
  misc_feature (2)..(3): n is a, c, g, or t
anncgggggcgggctactgggcctgcgctgccgggctttgggttctgggcctctgccgctctctggccctaagtgctgagctgccgggaacggcagcttctgacgctgggccattggacgctgcggaaccaggcttcttcactttgagtttccgccgcgaagcgccagtccgggccgaggagggagcctttactacttctccctggtttcattcatgttctgaggagggtgtgagaaggaaccatggatcccacagccttggtggaagccattgtggaagaagtggcctgtcccatctgtatgaccttcctgagggagcccatgagcattgactgtggccacagcttctgccacagctgtctctctggactctgggagatcccaggagaatcccagaactggggttacacctgtcccctctgtcgagctcctgtccagccaaggaacctgcggcctaattggcagctggccaatgttgtagaaaaagtccgtctgctaaggctacatccaggaatggggctgaagggtgacctgtgtgagcgccatggggaaaagctgaagatgttctgcaaagaggatgtcttgataatgtgtgaggcctgcagccagtccccagagcatgaggcccacagtgttgtgccaatggaggatgttgcctgggagtacaagtgggaacttcatgaggccctcgaacatctgaagaaagagcaagaagaggcctggaagcttgaagttggtgaaaggaaacgaactgccacctggaagatacaggtggaaacccgaaaacagagtattgtatgggagtttgaaaaataccagcgattactagagaaaaagcagccaccacatcggcagctgggggcagaggtagcagcagctctggccagcctacagcgggaggcagcggagaccatgcagaaactggagttgaaccatagcgagctcatccagcagagccaggtcctgtggaggatgattgcagagttgaaagagaggtcgcagaggcctgtccgctggatgttgcaggatattcaggaagtgttaaacaggagcaaatcttggagcttgcagcagccagaaccaatctccctggagttgaagacagattgccgtgtgctggggctaagagagatcctgaagacttatgcagctgatgtgcgcttggatccagatactgcttactcccgtctcatcgtgtctgaggacagaaaacgtgtgcactatggagacaccaaccagaaactgccagacaatcctgagagattttaccgctataatatcgtcctgggaagccagtgcatctcctcaggccggcactactgggaggtggaggtgggagacaggtctgagtggggcctgggagtatgtaagcaaaatgtagaccggaaggaggtggtctacttatccccccactatggattctgggtgataaggctgaggaagggaaatgagtaccgagcaggcaccgatgagtacccaatcctgtccttgccggtccctcctcgccgggtgggaatcttcgtggattatgaggcccatgacatttctttctacaatgtgactgactgtggctcccacatcttcactttcccccgctatcccttccctgggcgcctcctgccctattttagtccttgctacagcattggaaccaacaacactgctcctctggccatctgctccctggatggggaggactaagaaagctaccaccctaaccacagaggcttggaattgggcctggcccccatggggcttggaggaccgagccactgacaggtatcccctgaaactgagctgagcccagtatccaaggattcctctgtctgatcctttggtctttgctaccaggctgaagtctgtcatgaaaccacttattttaaaaagcagaggcccagtcaaatgagcattgcatcccatgagggaagcacgacagggctgatggtgaggatcagagcagttctaaggtgactcgttggggtaaggatcaggactttgtccatgtagtagccaaccaccctcttccctgattcccgtccggtgtcacagttcagtcagtgaggatgatgaagtagatacagtcttcaggacaccattagatgggctttcccaataggccaaaaaaatgctgcgcatacccagagctggttgttgtgctgaggccagtcagaggatgcttcccctgaggtttgctataactaagcaacctttatgtgactctcaccttctgacctcctggcaagagaaattcagtgcagcagggggacacagacctgcccaagccaccccactgccgttccctctctgagcacaagctgggcaaatcactgtcccttggactccagtagaccagtgtcctagtcttgccttttttctctaagtggcaggatcagaaaacctgcgagctttagtttgtattttcactttatgaatgaggaaactgaaatggccttaagggagcaagttatttctttttttttgacacggagtctcgctctgttgcccaggctggagtgcagtggcacgatctcggctcactgcaggctctgcctcctgggttcacgccattctcctgcctcagcttcccgagtagctgggactacaggcgcccaccacgacgcctggctcatttttttgtatttttagtagagacggggtttcaccatgttagctaggatggtctcgatctcctgacctcatgatccgccctcctcagcctcccacagtgctgggattagaggcatgagccactgcgcccggcccctggagcaagttatttcttacaaagctgctgaaggtaagattatcaaaattataaagcatttttcacactcaagtgaaacaaggttgacaaactcacttcgcaggtcacatgcctatacatcacttattatatttgggtctgaaacttctcacatgtttgggaggttttatgtgtcctcattgggaaaatgggtgtaattcagcataaaacctcatatgattgtcctgcctcatggagctgttgtatagatcccagatccatcccatgatttgttcctgtctgaggcatagaggcaggcaagccgtggattttgcacatggtgactttcccactgtgccatgatacagtctgcatcttatagcagtgcctttgtctcagggcctctgctggcagtctagaccttttgggcagaaaggagcttcaaatggctgtgataaggaatattaaaaattgtgtttctactttaattgtattggctgttcatgtatgtaggagttaaaataggccaaactggagaaataaacgcattctgtccaccatg

SEQ ID NO: 83798 - DNA, 419 bp, Homo sapiens
ttttagtagagacagagtttctccatgttggtcaggctggtctcgaactcccgacctcaaaccatccgcccaccttggcctcccaaagtgctgggattacaggtgtgagccaccatacctggcccatttttacttttttaaaaccaagggaatagaggaaaatactatgaaactaaaagtttaagcttagctggaataatttatttgaaacaatttagaaaatgaaggtcatgtaacttttgcaagacctttgaaaattaacaaacttaattacaactttgcatttcattgccaagcataagaaggagttttactaaagctatgtaaataattgcattaggatatatagcagagacattctatatatatgtatatatatgtttaatttattttcctttttttttttctgagacaggatc

SEQ ID NO: 83799 - DNA, 533 bp, Homo sapiens
tgaggaaaggaaagacagattttctgttctagttaatggattttaaaaatggcagttcaggaggttcagcagggtatttcaggtcacatagtgagttgctgagaaagctgatttagagctcacggatagaggactattttgttggctcaatagattggtaggaagatgacttaccaatcctagatttgggaggcagacgttcatcctctccctctttctctcggattcgctgccagtaatacacaatgggctctgtgccagaggatgactcacactgcaaagtcaggtcacttccttctgtcagctctccttccaactcacacttgggcttggatggtctcactggcaacagcaacaacaagcaaaagtgtagtgattcaaagatccccaaacaccagattcaatggaaaaattatgtcctattgagttgcttctccagccatctgttttggtcaacttttgagtggggattcaactagccttgctttacactacccccaccaaaacatccacctccatcccctaagcacaca

SEQ ID NO: 83800 - DNA, 331 bp, Homo sapiens
atttagcatatatttgttcattggaaataatgcttgaaacaaaataaatatcatttggtgacaaaacacactctattacagaaacagccccaggatcggggaggcccctgcagctgtggtctgagtggcattttgccagtgctgggagcccgtggtgggaggatgggcctgcgtgagcccttcggtggtccggctgcaagtgcttccgtgggggatccagacccagtacagttacacggtatctcatgctagcgtgggtcacgttagagtgagtttctacttcctaatgttaatgaattaatttcactctgtttatactttcttatattct

SEQ ID NO: 83801 - DNA, 167 bp, Homo sapiens
ggatcccaagctaaatgttaagtcagtaattccacttgggaggaaccccagcatgggcctggcaccaggcaggaaacagtgatgaaataaaagctttctgtatcccagccgggcgtggtggctcacgcctgtaatcccagcactttgggaggccgaggtgggtggat

SEQ ID NO: 83802 - DNA, 470 bp, Homo sapiens
tccacctcgtccgtgttactctacaatgacaggccacaatgaggacacagagtcagcagagggccaggcagctgttcacctctcccatcacacccaggtaaaactccagctcatgttggcccacctcctggaaaagtctctctgtcaacagcatttcaggatctcgtattcagaagacaacagctttagcgaggagggcactgtgactgcaggtgggcatctgtgcttccgcccgtgtgggacccctgggacacttacgctgggggaggatgtggttagtggccacacaaatgcctaaatccaaagacattggaaagtgaattaattcactaaaaaataggttgtttctttagtgaataaaataacttagatactcctggatacttcattgagtcatattttggatgtttatttttatttattgatgttcctataccacagggatggacacggtggctcacacctgtaat

SEQ ID NO: 83803 - DNA, 600 bp, Homo sapiens
aaggaaaactgcacacttgtccaaccctccaccttgcaggcaggccctttgccaccggagtccactcccgtccccagaccagccagctccctgcacccagagccccagaccacacagcccctgcacccggaaccccagaccagccccctgcacccggagccccagaccagcccctgcgcctggaaccccagaccacacagccccctgaacccagagccccagaccagcccctgcacccggagccccagcccacacagccccctgcactcggagccccagatcacacagcccctgcgcccggagccccagaccagcccctgtgcccggagccccaggaccgcaggaggctgccctgctcctggcacacagtggtgctggggaaggagcctgtgggccacactgctgtctgccaggctggggctggggctggggctccagggtcccccaggggtggggagatggagctgcctccatggtcctgggcacctaccagcacctagcagagtgtggagaggcttcctcagaggctgaggcgggcgtgtgcttggcctcctcagggcccttgccgcacatcggtcccctcaccgcccagcctgttcc

SEQ ID NO: 83804 - DNA, 131 bp, Homo sapiens
acgttgagggtaagagtgggtgagaaactttctgtcagagaataaagtggtattttggccaggaactaaagatatgatggtatttcaacagttggagacctagatggagacaggaatagcctaagcaaagg

SEQ ID NO: 83805 - DNA, 397 bp, Homo sapiens
agtttataaaaattacacgatggtcagaggcaaaaggaagagatggacaattttttacccctcaatttaagataattatagggaagtcatagattttgtcataatgccatttctgaaaataacacttttagaagttatgaaggcagtacttattcattaaacaaaataaggaaaatatagaaaaacataaagaaaatggaaataatctacagttctcctaaccaaagcgaggcattgtaaacatatatagtacattcccctctttctaacctcaagttgctttgtgtctatggatgtgccataatttttttaactaccccccttaccccatgaacatttaggttgtttctcctgcccgcccccccgcattttgctattatagacaataattcataga

SEQ ID NO: 83806 - DNA, 1799 bp, Homo sapiens
cgagactgcagagggagtagtgcgatcctgcgcgcgggggaactagctggagggcaaggcgggaacaccatctattgttggggtgatcggacctaacaccaggttgtggggacaacgaagtccagaagagtgaaaggaatgagaaaagacagtttgagagagaaagtgggcccagggggccaatgcgagtatggaggctgtgaaggccccgagccctggaagcccagactatttattggtgatcaaacaaagaaacagggggaatattgtcctattatgattctcctgaagatgcctggaaaggttgcaaagggagcatacaaatggcagtctgtgaaattgaagttcattctgtagataatacatgcatggacctgataatccccggggaacagtatttctacctgaaggccagaagtgtgcctgaaagatagcggcggctggtggccctgggatcagccaaggcttgcctgactgacagtaggacccagaaggataaagagtttgctgaaaacactgaaaacttgaaaaccaaaatgtcagaactaagactctgctgtgacctccttgttcagcaagtagataaaacaaaagaagtgaccacaactggtgtgtccaattctgaggagggaattgatgtgggaactttgctgaaatcaacctgtaatacttttctgaagaccttggaagaatgcatgcagattgcaaatgcagccttcacctctgagctgctctaccacactccaccaggatcaccacagctggccatgctcaagtccagcaagatgaaacatcctattataccaattcataattcattggaaaggcaaacggagttgagcacttgtgaaaatggatctttaaatatggaaataaatggtgaggaagaaatcctaatgaaaaataagaattccttatatttgaaatctgcagagatagactgcagcatatcaagtgaggaaaatacagatgataatataaccgtccaaggtgaaataatgaaggaagatagaatggaaaacctgaaaaatcatgacaataacttgtctcagtctggatcagactcaagttgctctccagaatgcctctgggaggaaggcaaagaagttatcccaactttctttagtaccatgaacacaagctttagtgacattgaacttctggaagacagtggcattcccacagaagcattcttggcatcatgttgtgctgtggttccagtattagacaaacttggccctacagtgtttgctcctgttaagatggatcttgttgaaaatattaagaaagtaaatcagaagtatataaccaacaaagaagagtttaccactctccagaagatagtgctgcacgaagtggaggcggatgtagcccaggttaggaactcagcgactgaagccctcttgtggctgaagagaggtctcaaatttttgaagggatttttgacagaagtgaaaaatggggaaaaggatatccagacagccctgaataacgcatatggtaaaacattgcggcaacaccatggctgggtagttcgaggggtttttgcgttagctttaagggcaactccatcctatgaagattttgtggccgcgttaaccgtaaaggaaggtgaccaccggaaagaagctttcagtattgggatgcagagggacctcagcctttacctccctgccatgaagaagcagatggccatactggacgctttataagaggtccatgggctggaatctgatgaggttgtatgatggctgctgggcagcacctcctaacttcagggaataaagtgctaaagtgta

SEQ ID NO: 83807 - DNA, 745 bp, Homo sapiens
cgagactgcagagggagtagtgcgatcctgcgcgcgggggaactagctggagggcaaggcgggaacacgccactgtgagcatgcatttcaggttgttggcgcagctctgctccatgatgtcgatctgaaacccagattttccttctcttgccactgtcatctcctgcatggccaaagctaggtcaccatcatagtcatgtttcagcctatgggaagggggaaagacaatattcaagcatctattgttggggtgatcggacctaacaccaggttgtggggacaacgaagtccagaagagtgaaaggaatgagaaaagacagtttgagagagaaagtgggcccagggggccaatgcgagtatggaggctgtgaaggccccgagccctggaagcccagactatttattggtgatcaaacaaagaaacaggtggtgagaatgtggggttgaaagggagcattgcattaagcacatgatttacagctgtgatggtttagcatatgctctgctacttgagataatggagagcaggttcttttaactcaagatacaatagatcctgggagagcagggagcaaggagccagccagcctagacacattccagaggccatgagccctggattctttccaagccacaaggggttttatgccctgggcttagattatggtgcatcagggtagccttccaccctttggcgcagagcttggtgttccaaaggccacgaggggttttagacccaggatcc

SEQ ID NO: 83808 - DNA, 1701 bp, Homo sapiens
cgagactgcagagggagtagtgcgatcctgcgcgcgggggaactagctggagggcaaggcgggaacaccatctattgttggggtgatcggacctaacaccaggttgtggggacaacgaagtccagaagagtgaaaggaatgagaaaagacagtttgagagagaaagtgggcccagggggccaatgcgagtatggaggctgtgaaggccccgagccctggaagcccagactatttattggtgatcaaacaaagaaacaggataatacatgcatggacctgataatccccggggaacagtatttctacctgaaggccagaagtgtgcctgaaagatagcggcggctggtggccctgggatcagccaaggcttgcctgactgacagtaggacccagaaggataaagagtttgctgaaaacactgaaaacttgaaaaccaaaatgtcagaactaagactctgctgtgacctccttgttcagcaagtagataaaacaaaagaagtgaccacaactggtgtgtccaattctgaggagggaattgatgtgggaactttgctgaaatcaacctgtaatacttttctgaagaccttggaagaatgcatgcagattgcaaatgcagccttcacctctgagctgctctaccacactccaccaggatcaccacagctggccatgctcaagtccagcaagatgaaacatcctattataccaattcataattcattggaaaggcaaacggagttgagcacttgtgaaaatggatctttaaatatggaaataaatggtgaggaagaaatcctaatgaaaaataagaattccttatatttgaaatctgcagagatagactgcagcatatcaagtgaggaaaatacagatgataatataaccgtccaaggtgaaataatgaaggaagatagaatggaaaacctgaaaaatcatgacaataacttgtctcagtctggatcagactcaagttgctctccagaatgcctctgggaggaaggcaaagaagttatcccaactttctttagtaccatgaacacaagctttagtgacattgaacttctggaagacagtggcattcccacagaagcattcttggcatcatgttgtgctgtggttccagtattagacaaacttggccctacagtgtttgctcctgttaagatggatcttgttgaaaatattaagaaagtaaatcagaagtatataaccaacaaagaagagtttaccactctccagaagatagtgctgcacgaagtggaggcggatgtagcccaggttaggaactcagcgactgaagccctcttgtggctgaagagaggtctcaaatttttgaagggatttttgacagaagtgaaaaatggggaaaaggatatccagacagccctgaataacgcatatggtaaaacattgcggcaacaccatggctgggtagttcgaggggtttttgcgttagctttaagggcaactccatcctatgaagattttgtggccgcgttaaccgtaaaggaaggtgaccaccggaaagaagctttcagtattgggatgcagagggacctcagcctttacctccctgccatgaagaagcagatggccatactggacgctttataagaggtccatgggctggaatctgatgaggttgtatgatggctgctgggcagcacctcctaacttcagggaataaagtgctaaagtgta

SEQ ID NO: 83809 - DNA, 398 bp, Homo sapiens
cgaggcgcgcagaaggaagtcggcaggcgagactgcagagggagtagtgcgatcctgcgcgcgggggaactagctggagggcaaggcgggaacacgtgagtgcgggagtggactgggttccctgagcattgatcccaaacagggcagcttttcgttccaaggtcgtctgtggacacacactgtggcttgctttgttttaacgtctgatactggagaggagggaaatgctgctgcagcacaactgcagaaccctggaaggcgaactcgtttgaatggcttttaaaggcgacgtggagctaataatggggggatcttaaattactctagctccgaagtgggaaagtggaatctgtacgggtaggttaagattacggtggagtcggggtgggaggagaggc

SEQ ID NO: 83810 - DNA, 1641 bp, Homo sapiens
gtgggcgtgggctgagtggccgtgggcgccatggagtgggtgctgtacaagtggaccaactatctgagcagttggcagccttgatggttctttctctgtaggggaatattgtcctattatgattctcctgaagatgcctggaaaggttgcaaagggagcatacaaatggcagtctgtgaaattgaagttcattctgtagataatacatgcatggacctgataatccccggggaacagtatttctacctgaaggccagaagtgtgcctgaaagatagcggcggctggtggccctgggatcagccaaggcttgcctgactgacagtaggacccagaaggataaagagtttgctgaaaacactgaaaacttgaaaaccaaaatgtcagaactaagactctgctgtgacctccttgttcagcaagtagataaaacaaaagaagtgaccacaactggtgtgtccaattctgaggagggaattgatgtgggaactttgctgaaatcaacctgtaatacttttctgaagaccttggaagaatgcatgcagattgcaaatgcagccttcacctctgagctgctctaccacactccaccaggatcaccacagctggccatgctcaagtccagcaagatgaaacatcctattataccaattcataattcattggaaaggcaaacggagttgagcacttgtgaaaatggatctttaaatatggaaataaatggtgaggaagaaatcctaatgaaaaataagaattccttatatttgaaatctgcagagatagactgcagcatatcaagtgaggaaaatacagatgataatataaccgtccaaggtgaaataatgaaggaagatagaatggaaaacctgaaaaatcatgacaataacttgtctcagtctggatcagactcaagttgctctccagaatgcctctgggaggaaggcaaagaagttatcccaactttctttagtaccatgaacacaagctttagtgacattgaacttctggaagacagtggcattcccacagaagcattcttggcatcatgttgtgctgtggttccagtattagacaaacttggccctacagtgtttgctcctgttaagatggatcttgttgaaaatattaagaaagtaaatcagaagtatataaccaacaaagaagagtttaccactctccagaagatagtgctgcacgaagtggaggcggatgtagcccaggttaggaactcagcgactgaagccctcttgtggctgaagagaggtctcaaatttttgaagggatttttgacagaagtgaaaaatggggaaaaggatatccagacagccctgaataacgcatatggtaaaacattgcggcaacaccatggctgggtagttcgaggggtttttgcgttagctttaagggcaactccatcctatgaagattttgtggccgcgttaaccgtaaaggaaggtgaccaccggaaagaagctttcagtattgggatgcagagggacctcagcctttacctccctgccatgaagaagcagatggccatactggacgctttataagaggtccatgggctggaatctgatgaggttgtatgatggctgctgggcagcacctcctaacttcagggaataaagtgctaaagtgta

SEQ ID NO: 83811 - DNA, 291 bp, Homo sapiens
gactcttttaaatcattcaacagtcacttctacccagaagcagatgaaaggatgaaggggcacttttccctgggtcagcagaacagcaccttatcagcaccattatgtgatctgaagggactaggattaaaacccttaagcatcctgccctccagggaaatgtggaaacctgaagcagccccttataacagaaagactctagaaaagtaaagctggtttcagtgggatttctgtggttttctccattgatttttcatttccacctccaagagccttttattgccaagtatt

SEQ ID NO: 83812 - DNA, 264 bp, Homo sapiens
ttcaggtggcctccaggagggcagtttccagagatgaatttccttccccttgcccagcccaccactgcccagccctgtgggctctgaggctgacggagagagacctgccacaccccgggacactctggatcgaagccacccagcgtcagagcttggacgatcaaggtggacctacccgctcagaaagacagtggcgcttctgtcaagggagacctcaacgaccttcctctgaaaagaaaaatgtccttgcaagtaggtaaatga

SEQ ID NO: 83813 - DNA, 564 bp, Homo sapiens
  misc_feature (418)..(418): n is a, c, g, or t
  misc_feature (447)..(447): n is a, c, g, or t
  misc_feature (452)..(452): n is a, c, g, or t
  misc_feature (466)..(466): n is a, c, g, or t
  misc_feature (484)..(484): n is a, c, g, or t
  misc_feature (512)..(512): n is a, c, g, or t
  misc_feature (527)..(527): n is a, c, g, or t
  misc_feature (538)..(538): n is a, c, g, or t
aacttgattctataattgatttgacaaaagaaggcctatccaactgcaatacaggtaaaaggattttttagatctttcttttgtaaaaaggagggaagggtaacaactcataatgcactgggtctacttatgaagtttgttttaatatgtgagtgtgcctatgtttatatctctgtgcagttttagctcatgtgcagattcatgtaactgccgtcacagtgacaaagctccttcatgctacccctttatactcacaccttgtttctgccccaatccctggcagccaccaatctgttctgtactataattgttatttcacaaatttacataaatttgataatgcagtatgtgtccttcggagattgacttcttccgaggggtcatccacattcttgtgtaacagtaggtgtgtgttccnctttattgccaggaggaggcccgtgggtntgggntggcatcataattnctttaattcataaacccnttgaagggcatctgggcttgttgggggnctttttacacatttnattttcttccngtgggggacatacttttttccccaac

SEQ ID NO: 83814 - DNA, 588 bp, Homo sapiens
catcatttgtatatagtgaggagtttttaaaaattcattttggcaggcaaatcacaatcatggtcatcagccatcgaaatacatgtgatttaacttatgttttgccatatgtatgcaagaatactttgaaaatgctaattttgtttggaaggatacaattggtaaaattcccttcaactgcttttttctcacctatttaataggttgcaaattcagaggctatgattttggataagaatcttgagtcagttaatagtccaattgaaaagtcttctgtgaattatgagccttctaacccttccgaaaaaggaagtaaaaaaattaatttgtcatcagatcaaaataagtctgtttctgaaaggtaggtgtttctgcaaaaatgcataaatttatctaaatctataataatgaattttttcttcatcacagttttggatctttgtaatattgattattcttaacattcactcttaaaatgtcctatagttttacttttacatattatacttcagttgtgggggttttttttggtttttgggttttctggtgttttttgagatagggtctcactttgttgtccaggctgga

SEQ ID NO: 83815 - DNA, 2874 bp, Homo sapiens
  misc_feature (2576)..(2576): n is a, c, g, or t
taagaaactgaaagaattgaaccaacgcattgggaagacagagtgcagaaataagcatgaaggaatagctgataaacttttggcaaaaatagcaaaacttcaaagacgtattaaaacagtattattatttcaaaggaattgtttgaaaccaaacatgttatccagtaatggagcctctaaggttgcaaattcagaggctatgattttggataagaatcttgagtcagttaatagtccaattgaaaagtcttctgtgaattatgagccttctaacccttccgaaaaaggaagtaaaaaaattaatttgtcatcagatcaaaataagtctgtttctgaaagtaacaatgatgatgttatgttgatttctgtggaaagtcctaatttgacaactccaactacatcaaatccaacagataccagaaaaattacatcaggaaattctagcaattctcccaatgctgaagttatggctgtacagaagaaacttgattctataattgatttgacaaaagaaggcctatccaactgcaatacagaaagtccagtatcccccctggagtcacattcgaaagctgcttcaaactcaaaggaaacaaccccattggcacaaaatgcagtccaggttcctgagtcctttgagcacctgccacctctcccagaaccaccagcaccactacctgaattagtagacaaaacccgagacacacttcctccccagaagcctgagctcaaagtgaaacgggttttcagaccaaatggcattgccctgacttggaatataaccaaaatcaatcccaagtgtgctcctgtagaaagctaccacctcttcctgtgtcatgagaactctaataataagttgatttggaagaagattggagaaattaaagctttaccactccccatggcctgtactttatctcagtttttagcttccaacagatactattttactgtccaatcaaaagatatttttggacgatatggaccattctgtgatataaaatctatccctgggttttctgaaaatcttacgtaaaaggtgtttaataatgatatactactttttttttcatatttgtttgtttgcaatgttactgtaatactatttgccattgtaaaaggccagctcagattgtgagccctttctattgggacagtcctcttctatatgttttaagtggccagtaatttaatgaatttctggtttgtattaaatatgtccttccaatggataagttctaaaacatacgctatcattggcccatgttgctgaggtgcattgtgaacaatacctttagtgactgtggaactgctgcttctatcagaagacctaggatacaagcagccactgtttcctccgttaacaatcagcttttagtaacctgctgtggtcagcatagctacaggaaaagtcagcccttgactgagggccagatcatccctggagtgcacctctactaagattttatgaaaagatgacatgttgggctgcatgataaaagttaattataaaaattaaaagatttttttttttgagatggaatattgctctgttgcccaggctggagtacagtggtcactgcaacctccatctccctggttcaagcaattctcctatgtcagcctcccaagtagctgggactatagtcacttgccaccatgcccggctaatttatttttagtagagatgaggtttcaccttgttggtcaggctggtctcaaactcctgacctcaggggatccacccgcctcggcctcccgaagtgctgggattataggcgtaagccaccatgcctggccaaaaattaaaagattttatgaaacgaaatggcttcccattctttctattcagcttctaagtgggctattcatttgtgctctcctcttttttgttttgttttgcactttgtcaatcatttggggaaatagcctggaggtctttcctgaatctgtttgtagacataataaaatttgtgtgctgtgtacacaaaaacataatgtatcttatgaaagcattacccaacctgtttgagttgagaatgcatttgtccacctttgatttgaggctttagtttgctgatttcctaaatgctaccctttgatcatttcctggccaccatcacaatactaaggggctcagatgtgtcttgtgcccacctcttcctgagaagagatggaagtggagctgtgactagtacaagcagcccaagaaactctgaacgggacccaatggaggcaaacttgagcaaataattgggatgataagaaacaaaaataatcccaactgtttgaaagttcgaaagaggggcattcttttctggtacatggtgagagttcaggctccagagactcaaaacggaatggttttccttggcattttgtaaatgctctcacatctgtagcaataaagctgttattttctgcaaaaagtgatggtgaggaagaggatggagatgaagatgaggaagctgagtcagctacgggcaagcgggcagtgaagatgatgaggatgacgatgtcgataccaagaagcagaagacgagaggatgactagacagcaaaaaaggaaaagttanactaaaaaaaaaagggcgcgtgacctattaccctccaattccgctcttaaaattctaaaacgtggtgcgttcatttgaagaagggccgcccgcccacgggggagtggcacccgagattgaaagcgctttcaacaccaaccaaactgtggattgcccgggggaaaagaccaactccaggccggttttcttaagtctaaaggaatgcggttttcactatttgactggggggcttagttggaacccgggttgcatctgagggggctcggaactaaagaatccctttttttgtgaattggta

SEQ ID NO: 83816 - DNA, 2970 bp, Homo sapiens
  misc_feature (1489)..(1489): n is a, c, g, or t
aaacctgctctcctaggagacctgaaggctgcttccgctaacccgggctggcgctgctaacctcacccaacgatccctgctgtcggaaaatgtccagaggcaccatccctgctatgaagagggaatgccagtacaacagccacaaggggtcttcctgtggccctcaaacaaaaaatcactgcattacatcagcagactgcattggagagaaaggcgccgggacagaaaagcctgagataaaccacctgtcattcttggagaaaaggatgctgcggctttcccgatttggttgatgagatggaaaatcaacccttacaggaaggacatcaccaattccggaaaggatgctgcgccagtcatgtttccgcactctgtgagacgttgaaatctccagaagttgcccaaggttttcaagctgaacacaggagaaatgactctggatctctgaggactgttttcctcaataaggagctgcaatcttggctccaccaccctccctccaaaacatctcgtgtgtctggtatctggttatattgtggcctgacagagaagtttctttcggggccagtgaatttaaaaaaaaaaaaaaaagaaaagcgggtcctaccaactcattaatactttaatactttaaatttccctctttatagtaggttgaaatgtcagtatctcttaagaacaatggctgaaccaaatgtttcctcaaaactcacattttttcccaccatttcagaagctgcctcaggactaagctttgatttttttttttttttttaatctggcccaaattcctatctaaggggcctggggagtcatgcccaacaaaccataaattctcatcagatgagttttatttaaccctatatatggtgacttgctttccagtctgactctggcatgacatgtgacaaagaagaaagtcaaaatattttaccccaaaacatgtttctttgccatattttgaaatggtcctgcaaagctgtgctttgtgggggaaaatatgcatctgtaaagaatctctattaacacagctagatctttttcttccaggccctcccaatcctgaagagactgagagtctagcattgttttaaaggtctgaataggaaacatttgtcatctatcatctctaagggtagccattataagacttcaaaagaaccttttgaagtattataatcttttatcttaacctgaacatgtgcttcctattgatcccaggtcttcagacaattgtgaactcaaccatttgtcaattagaaaatgtttaaattggctgggcacagtgtctcatgcctctaatcccagcactttggaagaccaaggcgggcagattgcctgacctcaggagttcgagaccagcctgggcaacatggtgaaaccccgtctctactaaaatacaaaaatttagccgggcgtagtggcatgcacctgtagtcccagctacttgggaagctgaggaaggagaattgcttgaacccggcgggcngaggttgcagtaagcagagatcgtgccactgcactccagcttgggcaacaaagtgagactccatcacagaaaaaaaaaagaaaatgtttacctttacctatagcctggaaatccctgctttgagttgctccatctttctgaaccaaaccaatgttatttcttaaacgtatttcattgatgtctcatgcctccctaaaatgtataaaaccaagctgtgccccgaacaccttgggcacatgttctcaggacctcctgagggccgtgtcacgggtcataatcactcatatttggctcagaataaatctcttcaaacattttacagagttgactcttagtcaacatgtccatacctgatgagatgcttcatcaaaattctagtggactggctagttcagaaaatggaccagccaggtttgcttaaatgcacccctgcacaactatctcactcctgcttggagccggctagatcaggagacctgtccctaaactaatgtactccatgtcttaagtctttttgttttgttttgtttttgtttttgacagagtctcagtctgtcacccaggctggagtgcagtggcgtgatcttggctcgctgcaacctccgcctcccaggttcaagagattctcctgtctcagcctcccaagtagctgggacaacaggtgtgcaccaccatgccctgctaatttttgtgttttaagtagagatggggtctcaccctgttggccaggctggtctcgaattcctgacctcaggtgatccacccacctcggcctcccaaagtgctgtaattacaggcatgagccaccgcacccagcccatgtgtcttggtcttttttactaatattgattataaaatggatgaaactttggataaaatttctgcgttagaatttctttttatatctgtcctaaagcttgtaactacttgctcatgattttttgtgtatgtttagcaatgtgcatgtcattgatggcctttgtaaagtatgttcaattgagttgtggagacagaggtgcaattggagtaggttgtaagaataaaaaggagtaggcaaaaaggcacgggtataccagtggacttcaaagggtactcagactttgttcttaagggatcaattcccagatcttcagtttcatataaactctttcctaaaattgacttgcctaaaagcatgttagtgttgtgggcacagcttctcttttcttatttctgcttttacagtcatcctttttccaaaaggaaggtatacatctcctccttgtctaacaatggcacattgccccagggtgtaaaagaggccaggggtgacaagcagagacacaattcaaagcatttgtattaagagagcagtaactccaatgcattattttgcaagtcacatttttttgtttttgtttgttttgagacaggatctcactctgttgcccagcgtggagtgcggtggtgcgatctcagctcacaatcactagtgaattcgc

SEQ ID NO: 83817 - DNA, 2077 bp, Homo sapiens
aaacctgctctcctaggagacctgaaggctgcttccgctaacccgggctggcgctgctaacctcacccaacgatccctgctgtcggaaaatgtccagaggcaccatccctgctatgaagagggaatgccagtacaacagccacaaggggtcttcctgtggccctcaaacaaaaaatcactgcattacatcagcagactgcattggagagaaaggcgccgggacagaaaagcctgagataaaccacctgtcattcttggagaaaaggatgctgcggctttcccgatttggttgatgagatggaaaatcaacccttacaggaaggacatcaccaattccggaaaggatgctgcgccagtcatgtttccgcactctgtgagacgttgaaatctccagaagttgcccaaggttttcaagctgaacacaggagaaatgactctggatctctgaggactgttttcctcaataaggagctgcaatcttggctccaccaccctccctccaaaacatctcgtgtgtctggtatctggttatattgtggcctgacagagaagtttctttcggggccagtgaatttaaaaaaaaaaaaaaaagaaaagcgggtcctaccaactcattaatactttaatactttaaatttccctctttatagtaggttgaaatgtcagtatctcttaagaacaatggctgaaccaaatgtttcctcaaaactcacattttttcccaccatttcagaagctgcctcaggactaagctttgatttttttttttttttttaatctggcccaaattcctatctaaggggcctggggagtcatgcccaacaaaccataaattctcatcagatgagttttatttaaccctatatatggtgacttgctttccagtctgactctggcatgacatgtgacaaagaagaaagtcaaaatattttaccccaaaacatgtttctttgccatattttgaaatggtcctgcaaagctgtgctttgtgggggaaaatatgcatctgtaaagaatctctattaacacagctagatctttttcttccaggccctcccaatcctgaagagactgagagtctagcattgttttaaaggtctgaataggaaacatttgtcatctatcatctctaagggtagccattataagacttcaaaagaaccttttgaagtattataatcttttatcttaacctgaacatgtgcttcctattgatcccaggtcttcagacaattgtgaactcaaccatttgtcaattagaaaatgtttaaattggctgggcacagtgtctcatgcctctaatcccagcactttggaagaccaaggctggtctcgaattcctgacctcaggtgatccacccacctcggcctcccaaagtgctgtaattacaggcatgagccaccgcacccagcccatgtgtcttggtcttttttactaatattgattataaaatggatgaaactttggataaaatttctgcgttagaatttctttttatatctgtcctaaagcttgtaactacttgctcatgattttttgtgtatgtttagcaatgtgcatgtcattgatggcctttgtaaagtatgttcaattgagttgtggagacagaggtgcaattggagtaggttgtaagaataaaaaggagtaggcaaaaaggcacgggtataccagtggacttcaaagggtactcagactttgttcttaagggatcaattcccagatcttcagtttcatataaactctttcctaaaattgacttgcctaaaagcatgttagtgttgtgggcacagcttctcttttcttatttctgcttttacagtcatcctttttccaaaaggaaggtatacatctcctccttgtctaacaatggcacattgccccagggtgtaaaagaggccaggggtgacaagcagagacacaattcaaagcatttgtattaagagagcagtaactccaatgcattattttgcaagtcacatttttttgtttttgtttgttttgagacaggatctcactctgttgcccagcgtggagtgcggtggtgcgatctcagctcacaatcactagtgaattcgc

SEQ ID NO: 83818 - DNA, 2144 bp, Homo sapiens
  misc_feature (1489)..(1489): n is a, c, g, or t
aaacctgctctcctaggagacctgaaggctgcttccgctaacccgggctggcgctgctaacctcacccaacgatccctgctgtcggaaaatgtccagaggcaccatccctgctatgaagagggaatgccagtacaacagccacaaggggtcttcctgtggccctcaaacaaaaaatcactgcattacatcagcagactgcattggagagaaaggcgccgggacagaaaagcctgagataaaccacctgtcattcttggagaaaaggatgctgcggctttcccgatttggttgatgagatggaaaatcaacccttacaggaaggacatcaccaattccggaaaggatgctgcgccagtcatgtttccgcactctgtgagacgttgaaatctccagaagttgcccaaggttttcaagctgaacacaggagaaatgactctggatctctgaggactgttttcctcaataaggagctgcaatcttggctccaccaccctccctccaaaacatctcgtgtgtctggtatctggttatattgtggcctgacagagaagtttctttcggggccagtgaatttaaaaaaaaaaaaaaaagaaaagcgggtcctaccaactcattaatactttaatactttaaatttccctctttatagtaggttgaaatgtcagtatctcttaagaacaatggctgaaccaaatgtttcctcaaaactcacattttttcccaccatttcagaagctgcctcaggactaagctttgatttttttttttttttttaatctggcccaaattcctatctaaggggcctggggagtcatgcccaacaaaccataaattctcatcagatgagttttatttaaccctatatatggtgacttgctttccagtctgactctggcatgacatgtgacaaagaagaaagtcaaaatattttaccccaaaacatgtttctttgccatattttgaaatggtcctgcaaagctgtgctttgtgggggaaaatatgcatctgtaaagaatctctattaacacagctagatctttttcttccaggccctcccaatcctgaagagactgagagtctagcattgttttaaaggtctgaataggaaacatttgtcatctatcatctctaagggtagccattataagacttcaaaagaaccttttgaagtattataatcttttatcttaacctgaacatgtgcttcctattgatcccaggtcttcagacaattgtgaactcaaccatttgtcaattagaaaatgtttaaattggctgggcacagtgtctcatgcctctaatcccagcactttggaagaccaaggcgggcagattgcctgacctcaggagttcgagaccagcctgggcaacatggtgaaaccccgtctctactaaaatacaaaaatttagccgggcgtagtggcatgcacctgtagtcccagctacttgggaagctgaggaaggagaattgcttgaacccggcgggcngaggttgcagtaagcagagatcgtgccactgcactccagcttgggcaacaaagtgagactccatcacagaaaaaaaaaagaaaatgtttacctttacctatagcctggaaatccctgctttgagttgctccatctttctgaaccaaaccaatgttatttcttaaacgtatttcattgatgtctcatgcctccctaaaatgtataaaaccaagctgtgccccgaacaccttgggcacatgttctcaggacctcctgagggccgtgtcacgggtcataatcactcatatttggctcagaataaatctcttcaaacattttacagagttgactcttagtcaacatgtccatacctgatgagatgcttcatcaaaattctagtggactggctagttcagaaaatggaccagccaggtttgcttaaatgcacccctgcacaactatctcactcctgcttggagccggctagatcaggagacctgtccctaaactaatgtactccatgtcttaagtctttttgttttgttttgtttttgtttttgacagagtctcagtctgtcacccaggcttgggcaacaaagtgagactccatcacagaaaaaaaaaaagaaaatgtttacctttacctatagcctggaaatccctgctttgagttgct

SEQ ID NO: 83819 - DNA, 2081 bp, Homo sapiens
  misc_feature (1489)..(1489): n is a, c, g, or t
aaacctgctctcctaggagacctgaaggctgcttccgctaacccgggctggcgctgctaacctcacccaacgatccctgctgtcggaaaatgtccagaggcaccatccctgctatgaagagggaatgccagtacaacagccacaaggggtcttcctgtggccctcaaacaaaaaatcactgcattacatcagcagactgcattggagagaaaggcgccgggacagaaaagcctgagataaaccacctgtcattcttggagaaaaggatgctgcggctttcccgatttggttgatgagatggaaaatcaacccttacaggaaggacatcaccaattccggaaaggatgctgcgccagtcatgtttccgcactctgtgagacgttgaaatctccagaagttgcccaaggttttcaagctgaacacaggagaaatgactctggatctctgaggactgttttcctcaataaggagctgcaatcttggctccaccaccctccctccaaaacatctcgtgtgtctggtatctggttatattgtggcctgacagagaagtttctttcggggccagtgaatttaaaaaaaaaaaaaaaagaaaagcgggtcctaccaactcattaatactttaatactttaaatttccctctttatagtaggttgaaatgtcagtatctcttaagaacaatggctgaaccaaatgtttcctcaaaactcacattttttcccaccatttcagaagctgcctcaggactaagctttgatttttttttttttttttaatctggcccaaattcctatctaaggggcctggggagtcatgcccaacaaaccataaattctcatcagatgagttttatttaaccctatatatggtgacttgctttccagtctgactctggcatgacatgtgacaaagaagaaagtcaaaatattttaccccaaaacatgtttctttgccatattttgaaatggtcctgcaaagctgtgctttgtgggggaaaatatgcatctgtaaagaatctctattaacacagctagatctttttcttccaggccctcccaatcctgaagagactgagagtctagcattgttttaaaggtctgaataggaaacatttgtcatctatcatctctaagggtagccattataagacttcaaaagaaccttttgaagtattataatcttttatcttaacctgaacatgtgcttcctattgatcccaggtcttcagacaattgtgaactcaaccatttgtcaattagaaaatgtttaaattggctgggcacagtgtctcatgcctctaatcccagcactttggaagaccaaggcgggcagattgcctgacctcaggagttcgagaccagcctgggcaacatggtgaaaccccgtctctactaaaatacaaaaatttagccgggcgtagtggcatgcacctgtagtcccagctacttgggaagctgaggaaggagaattgcttgaacccggcgggcngaggttgcagtaagcagagatcgtgccactgcactccagcttgggcaacaaagtgagactccatcacagaaaaaaaaaagaaaatgtttacctttacctatagcctggaaatccctgctttgagttgctccatctttctgaaccaaaccaatgttatttcttaaacgtatttcattgatgtctcatgcctccctaaaatgtataaaaccaagctgtgccccgaacaccttgggcacatgttctcaggacctcctgagggccgtgtcacgggtcataatcactcatatttggctcagaataaatctcttcaaacattttacagagttgactcttagtcaacatgtccatacctgatgagatgcttcatcaaaattctagtggactggctagttcagaaaatggaccagccaggtttgcttaaatgcacccctgcacaactatctcactcctgcttggagccggctagatcaggagacctgtccctaaactaatgtactccagcttgggcaacaaagtgagactccatcacagaaaaaaaaaaagaaaatgtttacctttacctatagcctggaaatccctgctttgagttgct

SEQ ID NO: 83820 - DNA, 1651 bp, Homo sapiens
aaacctgctctcctaggagacctgaaggctgcttccgctaacccgggctggcgctgctaacctcacccaacgatccctgctgtcggaaaatgtccagaggcaccatccctgctatgaagagggaatgccagtacaacagccacaaggggtcttcctgtggccctcaaacaaaaaatcactgcattacatcagcagactgcattggagagaaaggcgccgggacagaaaagcctgagataaaccacctgtcattcttggagaaaaggatgctgcggctttcccgatttggttgatgagatggaaaatcaacccttacaggaaggacatcaccaattccggaaaggatgctgcgccagtcatgtttccgcactctgtgagacgttgaaatctccagaagttgcccaaggttttcaagctgaacacaggagaaatgactctggatctctgaggactgttttcctcaataaggagctgcaatcttggctccaccaccctccctccaaaacatctcgtgtgtctggtatctggttatattgtggcctgacagagaagtttctttcggggccagtgaatttaaaaaaaaaaaaaaaagaaaagcgggtcctaccaactcattaatactttaatactttaaatttccctctttatagtaggttgaaatgtcagtatctcttaagaacaatggctgaaccaaatgtttcctcaaaactcacattttttcccaccatttcagaagctgcctcaggactaagctttgatttttttttttttttttaatctggcccaaattcctatctaaggggcctggggagtcatgcccaacaaaccataaattctcatcagatgagttttatttaaccctatatatggtgacttgctttccagtctgactctggcatgacatgtgacaaagaagaaagtcaaaatattttaccccaaaacatgtttctttgccatattttgaaatggtcctgcaaagctgtgctttgtgggggaaaatatgcatctgtaaagaatctctattaacacagctagatctttttcttccaggccctcccaatcctgaagagactgagagtctagcattgttttaaaggtctgaataggaaacatttgtcatctatcatctctaagggtagccattataagacttcaaaagaaccttttgaagtattataatcttttatcttaacctgaacatgtgcttcctattgatcccaggtcttcagacaattgtgaactcaaccatttgtcaattagaaaatgtttaaattggctgggcacagtgtctcatgcctctaatcccagcactttggaagaccaaggctggtctcgaattcctgacctcaggtgatccacccacctcggcctcccaaagtgctgtaattacaggcatgagccaccgcacccagcccatgtgtcttggtcttttttactaatattgattataaaatggatgaaactttggataaaatttctgcgttagaatttctttttatatctgtcctaaagcttgtaactacttgctcatgattttttgtgtatgtttagcaatgtgcatgtcattgatggcctttgtaaagtatgttcaattgagttgtggagacagaggtgcaattggagtaggttgtaagaataaaaaggagtaggc

SEQ ID NO: 83821 - DNA, 2642 bp, Homo sapiens
  misc_feature (1587)..(1587): n is a, c, g, or t
aaacctgctctcctaggagacctgaaggctgcttccgctaacccgggctggcgctgctaacctcacccaacgatccctgctgtcggaaaatgtccagaggcaccatccctgctatgaagagggaatgccagtacaacagccacaaggggtcttcctgtggccctcaaacaaaaaatcactgcattacatcagcaggccggacgcggtggttcatgcctgtaatcccagcactgtgggaggccgagacgggcggatcacgaggtcagcagatcgagaccatcctggctaacacgactgcattggagagaaaggcgccgggacagaaaagcctgagataaaccacctgtcattcttggagaaaaggatgctgcggctttcccgatttggttgatgagatggaaaatcaacccttacaggaaggacatcaccaattccggaaaggatgctgcgccagtcatgtttccgcactctgtgagacgttgaaatctccagaagttgcccaaggttttcaagctgaacacaggagaaatgactctggatctctgaggactgttttcctcaataaggagctgcaatcttggctccaccaccctccctccaaaacatctcgtgtgtctggtatctggttatattgtggcctgacagagaagtttctttcggggccagtgaatttaaaaaaaaaaaaaaaagaaaagcgggtcctaccaactcattaatactttaatactttaaatttccctctttatagtaggttgaaatgtcagtatctcttaagaacaatggctgaaccaaatgtttcctcaaaactcacattttttcccaccatttcagaagctgcctcaggactaagctttgatttttttttttttttttaatctggcccaaattcctatctaaggggcctggggagtcatgcccaacaaaccataaattctcatcagatgagttttatttaaccctatatatggtgacttgctttccagtctgactctggcatgacatgtgacaaagaagaaagtcaaaatattttaccccaaaacatgtttctttgccatattttgaaatggtcctgcaaagctgtgctttgtgggggaaaatatgcatctgtaaagaatctctattaacacagctagatctttttcttccaggccctcccaatcctgaagagactgagagtctagcattgttttaaaggtctgaataggaaacatttgtcatctatcatctctaagggtagccattataagacttcaaaagaaccttttgaagtattataatcttttatcttaacctgaacatgtgcttcctattgatcccaggtcttcagacaattgtgaactcaaccatttgtcaattagaaaatgtttaaattggctgggcacagtgtctcatgcctctaatcccagcactttggaagaccaaggcgggcagattgcctgacctcaggagttcgagaccagcctgggcaacatggtgaaaccccgtctctactaaaatacaaaaatttagccgggcgtagtggcatgcacctgtagtcccagctacttgggaagctgaggaaggagaattgcttgaacccggcgggcngaggttgcagtaagcagagatcgtgccactgcactccagcttgggcaacaaagtgagactccatcacagaaaaaaaaaagaaaatgtttacctttacctatagcctggaaatccctgctttgagttgctccatctttctgaaccaaaccaatgttatttcttaaacgtatttcattgatgtctcatgcctccctaaaatgtataaaaccaagctgtgccccgaacaccttgggcacatgttctcaggacctcctgagggccgtgtcacgggtcataatcactcatatttggctcagaataaatctcttcaaacattttacagagttgactcttagtcaacatgtccatacctgatgagatgcttcatcaaaattctagtggactggctagttcagaaaatggaccagccaggtttgcttaaatgcacccctgcacaactatctcactcctgcttggagccggctagatcaggagacctgtccctaaactaatgtactccatgtcttaagtctttttgttttgttttgtttttgtttttgacagagtctcagtctgtcacccaggctggagtgcagtggcgtgatcttggctcgctgcaacctccgcctcccaggttcaagagattctcctgtctcagcctcccaagtagctgggacaacaggtgtgcaccaccatgccctgctaatttttgtgttttaagtagagatggggtctcaccctgttggccaggctggtctcgaattcctgacctcaggtgatccacccacctcggcctcccaaagtgctgtaattacaggcatgagccaccgcacccagcccatgtgtcttggtcttttttactaatattgattataaaatggatgaaactttggataaaatttctgcgttagaatttctttttatatctgtcctaaagcttgtaactacttgctcatgattttttgtgtatgtttagcaatgtgcatgtcattgatggcctttgtaaagtatgttcaattgagttgtggagacagaggtgcaattggagtaggttgtaagaataaaaaggagtaggc

SEQ ID NO: 83822 - DNA, 2865 bp, Homo sapiens
  misc_feature (1810)..(1810): n is a, c, g, or t
aaacctgctctcctaggagacctgaaggctgcttccgctaacccgggctggcgctgctaacctcacccaacgatccctgctgtcggaaaatgtccagaggcaccatccctgctatgaagagggaatgccagtacaacagccacaaggggtcttcctgtggccctcaaacaaaaaatcactgcattacatcagcaggccggacgcggtggttcatgcctgtaatcccagcactgtgggaggccgagacgggcggatcacgaggtcagcagatcgagaccatcctggctaacacggtgaaaccccatctctcctaaaaatacaaaaaaattagctgggcgtggtggcgggcgcctgtagtctcagctactcgagaggctgaggcaggagaacggcgtgaacccgggaggcggagcttgcagtgagccaagatcgcgctactgcacttcagcctgggcgacagagcgagactccgtctctctctctctcacgctctctctctatatatatattccatagactgcattggagagaaaggcgccgggacagaaaagcctgagataaaccacctgtcattcttggagaaaaggatgctgcggctttcccgatttggttgatgagatggaaaatcaacccttacaggaaggacatcaccaattccggaaaggatgctgcgccagtcatgtttccgcactctgtgagacgttgaaatctccagaagttgcccaaggttttcaagctgaacacaggagaaatgactctggatctctgaggactgttttcctcaataaggagctgcaatcttggctccaccaccctccctccaaaacatctcgtgtgtctggtatctggttatattgtggcctgacagagaagtttctttcggggccagtgaatttaaaaaaaaaaaaaaaagaaaagcgggtcctaccaactcattaatactttaatactttaaatttccctctttatagtaggttgaaatgtcagtatctcttaagaacaatggctgaaccaaatgtttcctcaaaactcacattttttcccaccatttcagaagctgcctcaggactaagctttgatttttttttttttttttaatctggcccaaattcctatctaaggggcctggggagtcatgcccaacaaaccataaattctcatcagatgagttttatttaaccctatatatggtgacttgctttccagtctgactctggcatgacatgtgacaaagaagaaagtcaaaatattttaccccaaaacatgtttctttgccatattttgaaatggtcctgcaaagctgtgctttgtgggggaaaatatgcatctgtaaagaatctctattaacacagctagatctttttcttccaggccctcccaatcctgaagagactgagagtctagcattgttttaaaggtctgaataggaaacatttgtcatctatcatctctaagggtagccattataagacttcaaaagaaccttttgaagtattataatcttttatcttaacctgaacatgtgcttcctattgatcccaggtcttcagacaattgtgaactcaaccatttgtcaattagaaaatgtttaaattggctgggcacagtgtctcatgcctctaatcccagcactttggaagaccaaggcgggcagattgcctgacctcaggagttcgagaccagcctgggcaacatggtgaaaccccgtctctactaaaatacaaaaatttagccgggcgtagtggcatgcacctgtagtcccagctacttgggaagctgaggaaggagaattgcttgaacccggcgggcngaggttgcagtaagcagagatcgtgccactgcactccagcttgggcaacaaagtgagactccatcacagaaaaaaaaaagaaaatgtttacctttacctatagcctggaaatccctgctttgagttgctccatctttctgaaccaaaccaatgttatttcttaaacgtatttcattgatgtctcatgcctccctaaaatgtataaaaccaagctgtgccccgaacaccttgggcacatgttctcaggacctcctgagggccgtgtcacgggtcataatcactcatatttggctcagaataaatctcttcaaacattttacagagttgactcttagtcaacatgtccatacctgatgagatgcttcatcaaaattctagtggactggctagttcagaaaatggaccagccaggtttgcttaaatgcacccctgcacaactatctcactcctgcttggagccggctagatcaggagacctgtccctaaactaatgtactccatgtcttaagtctttttgttttgttttgtttttgtttttgacagagtctcagtctgtcacccaggctggagtgcagtggcgtgatcttggctcgctgcaacctccgcctcccaggttcaagagattctcctgtctcagcctcccaagtagctgggacaacaggtgtgcaccaccatgccctgctaatttttgtgttttaagtagagatggggtctcaccctgttggccaggctggtctcgaattcctgacctcaggtgatccacccacctcggcctcccaaagtgctgtaattacaggcatgagccaccgcacccagcccatgtgtcttggtcttttttactaatattgattataaaatggatgaaactttggataaaatttctgcgttagaatttctttttatatctgtcctaaagcttgtaactacttgctcatgattttttgtgtatgtttagcaatgtgcatgtcattgatggcctttgtaaagtatgttcaattgagttgtggagacagaggtgcaattggagtaggttgtaagaataaaaaggagtaggc

SEQ ID NO: 83823 - DNA, 3009 bp, Homo sapiens
  misc_feature (1489)..(1489): n is a, c, g, or t
aaacctgctctcctaggagacctgaaggctgcttccgctaacccgggctggcgctgctaacctcacccaacgatccctgctgtcggaaaatgtccagaggcaccatccctgctatgaagagggaatgccagtacaacagccacaaggggtcttcctgtggccctcaaacaaaaaatcactgcattacatcagcagactgcattggagagaaaggcgccgggacagaaaagcctgagataaaccacctgtcattcttggagaaaaggatgctgcggctttcccgatttggttgatgagatggaaaatcaacccttacaggaaggacatcaccaattccggaaaggatgctgcgccagtcatgtttccgcactctgtgagacgttgaaatctccagaagttgcccaaggttttcaagctgaacacaggagaaatgactctggatctctgaggactgttttcctcaataaggagctgcaatcttggctccaccaccctccctccaaaacatctcgtgtgtctggtatctggttatattgtggcctgacagagaagtttctttcggggccagtgaatttaaaaaaaaaaaaaaaagaaaagcgggtcctaccaactcattaatactttaatactttaaatttccctctttatagtaggttgaaatgtcagtatctcttaagaacaatggctgaaccaaatgtttcctcaaaactcacattttttcccaccatttcagaagctgcctcaggactaagctttgatttttttttttttttttaatctggcccaaattcctatctaaggggcctggggagtcatgcccaacaaaccataaattctcatcagatgagttttatttaaccctatatatggtgacttgctttccagtctgactctggcatgacatgtgacaaagaagaaagtcaaaatattttaccccaaaacatgtttctttgccatattttgaaatggtcctgcaaagctgtgctttgtgggggaaaatatgcatctgtaaagaatctctattaacacagctagatctttttcttccaggccctcccaatcctgaagagactgagagtctagcattgttttaaaggtctgaataggaaacatttgtcatctatcatctctaagggtagccattataagacttcaaaagaaccttttgaagtattataatcttttatcttaacctgaacatgtgcttcctattgatcccaggtcttcagacaattgtgaactcaaccatttgtcaattagaaaatgtttaaattggctgggcacagtgtctcatgcctctaatcccagcactttggaagaccaaggcgggcagattgcctgacctcaggagttcgagaccagcctgggcaacatggtgaaaccccgtctctactaaaatacaaaaatttagccgggcgtagtggcatgcacctgtagtcccagctacttgggaagctgaggaaggagaattgcttgaacccggcgggcngaggttgcagtaagcagagatcgtgccactgcactccagcttgggcaacaaagtgagactccatcacagaaaaaaaaaagaaaatgtttacctttacctatagcctggaaatccctgctttgagttgctccatctttctgaaccaaaccaatgttatttcttaaacgtatttcattgatgtctcatgcctccctaaaatgtataaaaccaagctgtgccccgaacaccttgggcacatgttctcaggacctcctgagggccgtgtcacgggtcataatcactcatatttggctcagaataaatctcttcaaacattttacagagttgactcttagtcaacatgtccatacctgatgagatgcttcatcaaaattctagtggactggctagttcagaaaatggaccagccaggtttgcttaaatgcacccctgcacaactatctcactcctgcttggagccggctagatcaggagacctgtccctaaactaatgtactccatgtcttaagtctttttgttttgttttgtttttgtttttgacagagtctcagtctgtcacccaggctggagtgcagtggcgtgatcttggctcgctgcaacctccgcctcccaggttcaagagattctcctgtctcagcctcccaagtagctgggacaacaggtgtgcaccaccatgccctgctaatttttgtgttttaagtagagatggggtctcaccctgttggccaggctggtctcgaattcctgacctcaggtgatccacccacctcggcctcccaaagtgctgtaattacaggcatgagccaccgcacccagcccatgtgtcttggtcttttttactaatattgattataaaatggatgaaactttggataaaatttctgcgttagaatttctttttatatctgtcctaaagcttgtaactacttgctcatgattttttgtgtatgtttagcaatgtgcatgtcattgatggcctttgtaaagtatgttcaattgagttgtggagacagaggtgcaattggagtaggttgtaagaataaaaaggagtaggcaaaaaggcacgggtataccagtggacttcaaagggtactcagactttgttcttaagggatcaattcccagatcttcagtttcatataaactctttcctaaaattgacttgcctaaaagcatgttagtgttgtgggcacagcttctcttttcttatttctgcttttacagtcatcctttttccaaaaggaaggtatacatctcctccttgtctaacaatggcacattgccccagggtgtaaaagaggccaggggtgacaagcagagacacaattcaaagcatttgtattaagagagcagtaactccaatgcattattttgcaagtcacatttttttgtttttgtttgttttgagacaggatctcactctgttgcgcttgggcaacaaagtgagactccatcacagaaaaaaaaaaagaaaatgtttacctttacctatagcctggaaatccctgctttgagttgct

SEQ ID NO: 83824 - DNA, 2544 bp, Homo sapiens
  misc_feature (1489)..(1489): n is a, c, g, or t
aaacctgctctcctaggagacctgaaggctgcttccgctaacccgggctggcgctgctaacctcacccaacgatccctgctgtcggaaaatgtccagaggcaccatccctgctatgaagagggaatgccagtacaacagccacaaggggtcttcctgtggccctcaaacaaaaaatcactgcattacatcagcagactgcattggagagaaaggcgccgggacagaaaagcctgagataaaccacctgtcattcttggagaaaaggatgctgcggctttcccgatttggttgatgagatggaaaatcaacccttacaggaaggacatcaccaattccggaaaggatgctgcgccagtcatgtttccgcactctgtgagacgttgaaatctccagaagttgcccaaggttttcaagctgaacacaggagaaatgactctggatctctgaggactgttttcctcaataaggagctgcaatcttggctccaccaccctccctccaaaacatctcgtgtgtctggtatctggttatattgtggcctgacagagaagtttctttcggggccagtgaatttaaaaaaaaaaaaaaaagaaaagcgggtcctaccaactcattaatactttaatactttaaatttccctctttatagtaggttgaaatgtcagtatctcttaagaacaatggctgaaccaaatgtttcctcaaaactcacattttttcccaccatttcagaagctgcctcaggactaagctttgatttttttttttttttttaatctggcccaaattcctatctaaggggcctggggagtcatgcccaacaaaccataaattctcatcagatgagttttatttaaccctatatatggtgacttgctttccagtctgactctggcatgacatgtgacaaagaagaaagtcaaaatattttaccccaaaacatgtttctttgccatattttgaaatggtcctgcaaagctgtgctttgtgggggaaaatatgcatctgtaaagaatctctattaacacagctagatctttttcttccaggccctcccaatcctgaagagactgagagtctagcattgttttaaaggtctgaataggaaacatttgtcatctatcatctctaagggtagccattataagacttcaaaagaaccttttgaagtattataatcttttatcttaacctgaacatgtgcttcctattgatcccaggtcttcagacaattgtgaactcaaccatttgtcaattagaaaatgtttaaattggctgggcacagtgtctcatgcctctaatcccagcactttggaagaccaaggcgggcagattgcctgacctcaggagttcgagaccagcctgggcaacatggtgaaaccccgtctctactaaaatacaaaaatttagccgggcgtagtggcatgcacctgtagtcccagctacttgggaagctgaggaaggagaattgcttgaacccggcgggcngaggttgcagtaagcagagatcgtgccactgcactccagcttgggcaacaaagtgagactccatcacagaaaaaaaaaagaaaatgtttacctttacctatagcctggaaatccctgctttgagttgctccatctttctgaaccaaaccaatgttatttcttaaacgtatttcattgatgtctcatgcctccctaaaatgtataaaaccaagctgtgccccgaacaccttgggcacatgttctcaggacctcctgagggccgtgtcacgggtcataatcactcatatttggctcagaataaatctcttcaaacattttacagagttgactcttagtcaacatgtccatacctgatgagatgcttcatcaaaattctagtggactggctagttcagaaaatggaccagccaggtttgcttaaatgcacccctgcacaactatctcactcctgcttggagccggctagatcaggagacctgtccctaaactaatgtactccatgtcttaagtctttttgttttgttttgtttttgtttttgacagagtctcagtctgtcacccaggctggagtgcagtggcgtgatcttggctcgctgcaacctccgcctcccaggttcaagagattctcctgtctcagcctcccaagtagctgggacaacaggtgtgcaccaccatgccctgctaatttttgtgttttaagtagagatggggtctcaccctgttggccaggctggtctcgaattcctgacctcaggtgatccacccacctcggcctcccaaagtgctgtaattacaggcatgagccaccgcacccagcccatgtgtcttggtcttttttactaatattgattataaaatggatgaaactttggataaaatttctgcgttagaatttctttttatatctgtcctaaagcttgtaactacttgctcatgattttttgtgtatgtttagcaatgtgcatgtcattgatggcctttgtaaagtatgttcaattgagttgtggagacagaggtgcaattggagtaggttgtaagaataaaaaggagtaggc

SEQ ID NO: 83825 - DNA, 1828 bp, Homo sapiens
cctccacaacccacactgcccccacatccccgccgtgcctcctcgctggccgcgctccctcccggtgccggcttctctgagtcaccaacctgaggctgccccggccgcctgcgcacccggcagcaccatgacagatcaggcctttgtgacactaaccacaaacgatgcctacgccaaaggtgccctggtcctgggatcatctctgaaacagcacaggaccaccaggaggctggtcgtgctcgccacccctcaggtctcagactccatgagaaaagttttagagacagtctttgatgaagtcatcatggtagatgtcttggacagtggcgattctgctcatctaaccttaatgaagaggccagagttgggtgtcacgctgacaaagctccactgctggtcgcttacacagtattcaaaatgtgtattcatggatgcagatactctggtcctagcaaatattgatgatctttttgacagagaagaattgtcagcagcaccagacccagggtggcctgactgcttcaattccggagtcttcgtttatcagccttcagttgaaacatacaatcagctgttgcatcttgcttctgagcaaggtagttttgatggtggggaccaaggcatactgaacacattttttagcagctgggcaacaacagatatcagaaaacacctgccgtttatttataacctaagcagcatctctatatactcctacctcccggcatttaaagtgtttggtgcaagtgccaaagttgtgcatttcctgggacgagtcaaaccatggaattatacttatgatcccaaaacaaaaagtgtcaaaagtgaggcccatgatcccaacatgactcatccagagtttctcatcctgtggtggaacatctttaccaccaacgttttacctctgcttcaacaatttggccttgtcaaagacacctgctcatatgtaaatgtggaagatgtctcaggagccatatcacatctgtcccttggggagatcccagctatggcacagccgtttgtatcctcggaagaacggaaggaacgatgggaacagggccaggctgattatatgggagcagattcctttgacaacatcaagaggaaacttgacacttacctccagtagaaacactgcatttttctgtgaacacatccacttcacaagccttgtttctgatacttagtatctagagctgggttgagaaaagtctgttacagttgctagaggttttcattaaaacttatcagatgagaggcttttttaggataagaggtgagaactgggcaaaagttgtgaagcagcaattctgttatatggacagtgttctgctttttaatcctatttagcttgtttcagaaattctcacttttgttgactgccaacatacaaagtaagggaaactcaagatattaagatggctgtatcagttcttaaaatctgcagagcctggttcaaaatcagtcactcccttcagaagcagacatggcatctgttccttgcttgcttgttggttgtgtacctttcacgagacctgaattttagaattgcccagtgctgccagagtgagtgagtgtaattctcctttcaggtaaagataggctatctcaacactgctgagtgattcataaacatatcaaccaatagcattaacccattttatttcctgtccttagtgtctgaagatgctcaccagttttctgtgtacagtaaggcagcatgctaaaatgcttttgttcagttctgtatatttgaaaatagcagtgtgttctctgatggttacctgcagtggcaccctgtacaaaaaataaaagacttattgctgta

SEQ ID NO: 83826 - DNA, 762 bp, Homo sapiens
agggagacgcgggacccggagccccgcgggccaccgcccctgccggccgcgcagctgggaggatgcggacggcagcgagagcgtgcgcggccacgtgacggccgctataagagcgcacggggcagacgctcggttccccgccgtgcctcctcgctggccgcgctccctcccggtgccggcttctctgagtcaccaacctgaggctgccccggccgcctgcgcacccggcagcaccatgacaggtaccgccgcgcagcccgccgccgccagccccgggaccccggcttcctgcccagccgccgcctcccttctcctccgccctcagccccggagtgttcccggcaggacgaaaccgccgcaaagttgctggctggccgcagccgggcgtgtttctgcctgcgtcagctgccgccccgccgccccccagagtgcagggatggggcagccgggcagagcccgggccctcggccggagctctcgttcctgcttccgtctcctcgtccttcctcttgctctcacggcgaagggccggcgggcggagcagctgcggcggggccgtgtgggggtggggagccggttcccctgggggttccaggcgggagtccggggcgcagcggcatcgtggggagctgccccggcctctggcggcccggaaccccaggaagcaggggctccgaggcggggatactgcggcctccgcccggctcctccgccgcccgccccggccccggccgccacgctgagcctatttttaggcctttg

SEQ ID NO: 83827 - DNA, 2096 bp, Homo sapiens
gccacaaagattgcaggtgtaacccagagttcagccgtctttaggaagattaaactcctacccagctgtcattggtctttcttggtcatttgtaatgttggctagtctggtgttctaacctgtgttctatcccttatttaatcttggaaatcatccatatccttgcttccagaaatccttgaatcctgctcaccttattacatttttctccatgatcgcctggaacctggacttcatttgagttagatgatcattcattttgcctagcttaagtatttttggtacagattgacagcgatgttacccatgttataatgggctgaagataatagaagcaagtacaggcggatgttgatgggcctgtcaagggacaggtgccactgttcagagctttcctagagtatcaggcctttgtgacactaaccacaaacgatgcctacgccaaaggtgccctggtcctgggatcatctctgaaacagcacaggaccaccaggaggctggtcgtgctcgccacccctcaggtctcagactccatgagaaaagttttagagacagtctttgatgaagtcatcatggtagatgtcttggacagtggcgattctgctcatctaaccttaatgaagaggccagagttgggtgtcacgctgacaaagctccactgctggtcgcttacacagtattcaaaatgtgtattcatggatgcagatactctggtcctagcaaatattgatgatctttttgacagagaagaattgtcagcagcaccagacccagggtggcctgactgcttcaattccggagtcttcgtttatcagccttcagttgaaacatacaatcagctgttgcatcttgcttctgagcaaggtagttttgatggtggggaccaaggcatactgaacacattttttagcagctgggcaacaacagatatcagaaaacacctgccgtttatttataacctaagcagcatctctatatactcctacctcccggcatttaaagtgtttggtgcaagtgccaaagttgtgcatttcctgggacgagtcaaaccatggaattatacttatgatcccaaaacaaaaagtgtcaaaagtgaggcccatgatcccaacatgactcatccagagtttctcatcctgtggtggaacatctttaccaccaacgttttacctctgcttcaacaatttggccttgtcaaagacacctgctcatatgtaaatgtggaagatgtctcaggagccatatcacatctgtcccttggggagatcccagctatggcacagccgtttgtatcctcggaagaacggaaggaacgatgggaacagggccaggctgattatatgggagcagattcctttgacaacatcaagaggaaacttgacacttacctccagtagaaacactgcatttttctgtgaacacatccacttcacaagccttgtttctgatacttagtatctagagctgggttgagaaaagtctgttacagttgctagaggttttcattaaaacttatcagatgagaggcttttttaggataagaggtgagaactgggcaaaagttgtgaagcagcaattctgttatatggacagtgttctgctttttaatcctatttagcttgtttcagaaattctcacttttgttgactgccaacatacaaagtaagggaaactcaagatattaagatggctgtatcagttcttaaaatctgcagagcctggttcaaaatcagtcactcccttcagaagcagacatggcatctgttccttgcttgcttgttggttgtgtacctttcacgagacctgaattttagaattgcccagtgctgccagagtgagtgagtgtaattctcctttcaggtaaagataggctatctcaacactgctgagtgattcataaacatatcaaccaatagcattaacccattttatttcctgtccttagtgtctgaagatgctcaccagttttctgtgtacagtaaggcagcatgctaaaatgcttttgttcagttctgtatatttgaaaatagcagtgtgttctctgatggttacctgcagtggcaccctgtacaaaaaataaaagacttattgctgta

SEQ ID NO: 83828 - DNA, 1988 bp, Homo sapiens
  misc_feature (1938)..(1938): n is a, c, g, or t
  misc_feature (1943)..(1944): n is a, c, g, or t
agggagacgcgggacccggagccccgcgggccaccgcccctgccggccgcgcagctgggaggatgcggacggcagcgagagcgtgcgcggccacgtgacggccgctataagagcgcacggggcagacgctcggttccccgccgtgcctcctcgctggccgcgctccctcccggtgccggcttctctgagtcaccaacctgaggctgccccggccgcctgcgcacccggcagcaccatgacagatcaggcctttgtgacactaaccacaaacgatgcctacgccaaaggtgccctggtcctgggatcatctctgaaacagcacaggaccaccaggaggctggtcgtgctcgccacccctcaggtctcagactccatgagaaaagttttagagacagtctttgatgaagtcatcatggtagatgtcttggacagtggcgattctgctcatctaaccttaatgaagaggccagagttgggtgtcacgctgacaaagctccactgctggtcgcttacacagtattcaaaatgtgtattcatggatgcagatactctggtcctagcaaatattgatgatctttttgacagagaagaattgtcagcagcaccagacccagggtggcctgactgcttcaattccggagtcttcgtttatcagccttcagttgaaacatacaatcagctgttgcatcttgcttctgagcaaggtagttttgatggtggggaccaaggcatactgaacacattttttagcagctgggcaacaacagatatcagaaaacacctgccgtttatttataacctaagcagcatctctatatactcctacctcccggcatttaaagtgtttggtgcaagtgccaaagttgtgcatttcctgggacgagtcaaaccatggaattatacttatgatcccaaaacaaaaagtgtcaaaagtgaggcccatgatcccaacatgactcatccagagtttctcatcctgtggtggaacatctttaccaccaacgttttacctctgcttcaacaatttggccttgtcaaagacacctgctcatatgtaaatgtggaagatgtctcaggagccatatcacatctgtcccttggggagatcccagctatggcacagccgtttgtatcctcggaagaacggaaggaacgatgggaacagggccaggctgattatatgggagcagattcctttgacaacatcaagaggaaacttgacacttacctccagtagaaacactgcatttttctgtgaacacatccacttcacaagccttgtttctgatacttagtatctagagctgggttgagaaaagtctgttacagttgctagaggttttcattaaaacttatcagatgagaggcttttttaggataagaggtgagaactgggcaaaagttgtgaagcagcaattctgttatatggacagtgttctgctttttaatcctatttagcttgtttcagaaattctcacttttgttgactgccaacatacaaagtaagggaaactcaagatattaagatggctgtatcagttcttaaaatctgcagagcctggttcaaaatcagtcactcccttcagaagcagacatggcatctgttccttgcttgcttgttggttgtgtacctttcacgagacctgaattttagaattgcccagtgctgccagagtgagtgagtgtaattctcctttcaggtaaagataggctatctcaacactgctgagtgattcataaacatatcaaccaatagcattaacccattttatttcctgtccttagtgtctgaagatgctcaccagttttctgtgtacagtaaggcagcatgctaaaatgcttttgttcagttctgtatatttgaaaatagcagtgtgttctctgatggttacctgcagtggcaccctgtacaaaaaataaaagacttattgctgtacngatgnnggccagcccttctttctcctcttctatttattcccgtttttttt

SEQ ID NO: 83829 - DNA, 1982 bp, Homo sapiens
agggagacgcgggacccggagccccgcgggccaccgcccctgccggccgcgcagctgggaggatgcggacggcagcgagagcgtgcgcggccacgtgacggccgctataagagcgcacggggcagacgctcggttccccgccgtgcctcctcgctggccgcgctccctcccggtgccggcttctctgagtcaccaacctgaggctgccccggccgcctgcgcacccggcagcaccatgacagatcaggcctttgtgacactaaccacaaacgatgcctacgccaaaggtgccctggtcctgggatcatctctgaaacagcacaggaccaccaggaggctggtcgtgctcgccacccctcaggtctcagactccatgagaaaagttttagagacagtctttgatgaagtcatcatggtagatgtcttggacagtggcgattctgctcatctaaccttaatgaagaggccagagttgggtgtcacgctgacaaagctccactgctggtcgcttacacagtattcaaaatgtgtattcatggatgcagatactctggtcctagcaaatattgatgatctttttgacagagaagaattgtcagcagcaccagacccagggtggcctgactgcttcaattccggagtcttcgtttatcagccttcagttgaaacatacaatcagctgttgcatcttgcttctgagcaaggtagttttgatggaaacaaataggcccagtttctgataaatgcatccatggttaccaggtggggaccaaggcatactgaacacattttttagcagctgggcaacaacagatatcagaaaacacctgccgtttatttataacctaagcagcatctctatatactcctacctcccggcatttaaagtgtttggtgcaagtgccaaagttgtgcatttcctgggacgagtcaaaccatggaattatacttatgatcccaaaacaaaaagtgtcaaaagtgaggcccatgatcccaacatgactcatccagagtttctcatcctgtggtggaacatctttaccaccaacgttttacctctgcttcaacaatttggccttgtcaaagacacctgctcatatgtaaatgtggaagatgtctcaggagccatatcacatctgtcccttggggagatcccagctatggcacagccgtttgtatcctcggaagaacggaaggaacgatgggaacagggccaggctgattatatgggagcagattcctttgacaacatcaagaggaaacttgacacttacctccagtagaaacactgcatttttctgtgaacacatccacttcacaagccttgtttctgatacttagtatctagagctgggttgagaaaagtctgttacagttgctagaggttttcattaaaacttatcagatgagaggcttttttaggataagaggtgagaactgggcaaaagttgtgaagcagcaattctgttatatggacagtgttctgctttttaatcctatttagcttgtttcagaaattctcacttttgttgactgccaacatacaaagtaagggaaactcaagatattaagatggctgtatcagttcttaaaatctgcagagcctggttcaaaatcagtcactcccttcagaagcagacatggcatctgttccttgcttgcttgttggttgtgtacctttcacgagacctgaattttagaattgcccagtgctgccagagtgagtgagtgtaattctcctttcaggtaaagataggctatctcaacactgctgagtgattcataaacatatcaaccaatagcattaacccattttatttcctgtccttagtgtctgaagatgctcaccagttttctgtgtacagtaaggcagcatgctaaaatgcttttgttcagttctgtatatttgaaaatagcagtgtgttctctgatggttacctgcagtggcaccctgtacaaaaaataaaagacttattgctgta

SEQ ID NO: 83830 - DNA, 1809 bp, Homo sapiens
agggagacgcgggacccggagccccgcgggccaccgcccctgccggccgcgcagctgggaggatgcggacggcagcgagagcgtgcgcggccacgtgacggccgctataagagcgcacggggcagacgctcggttccccgccgtgcctcctcgctggccgcgctccctcccggtgccggcttctctgagtcaccaacctgaggctgccccggccgcctgcgcacccggcagcaccatgacagatcaggcctttgtgacactaaccacaaacgatgcctacgccaaaggtgccctggtcctgggatcatctctgaaacagcacaggaccaccaggaggctggtcgtgctcgccacccctcaggtctcagactccatgagaaaagttttagagacagtctttgatgaagtcatcatggtagatgtcttggacagtggcgattctgctcatctaaccttaatgaagaggccagagttgggtgtcacgctgacaaagctccactgctggtcgcttacacagtattcaaaatgtgtattcatggatgcagatactctggtcctagcaaatattgatgatctttttgacagagaagaattgtcagcagcaccagacccagggtggcctgactgcttcaattccggagtcttcgtttatcagccttcagttgaaacatacaatcagctgttgcatcttgcttctgagcaaggtagttttgatggtttggtgcaagtgccaaagttgtgcatttcctgggacgagtcaaaccatggaattatacttatgatcccaaaacaaaaagtgtcaaaagtgaggcccatgatcccaacatgactcatccagagtttctcatcctgtggtggaacatctttaccaccaacgttttacctctgcttcaacaatttggccttgtcaaagacacctgctcatatgtaaatgtggaagatgtctcaggagccatatcacatctgtcccttggggagatcccagctatggcacagccgtttgtatcctcggaagaacggaaggaacgatgggaacagggccaggctgattatatgggagcagattcctttgacaacatcaagaggaaacttgacacttacctccagtagaaacactgcatttttctgtgaacacatccacttcacaagccttgtttctgatacttagtatctagagctgggttgagaaaagtctgttacagttgctagaggttttcattaaaacttatcagatgagaggcttttttaggataagaggtgagaactgggcaaaagttgtgaagcagcaattctgttatatggacagtgttctgctttttaatcctatttagcttgtttcagaaattctcacttttgttgactgccaacatacaaagtaagggaaactcaagatattaagatggctgtatcagttcttaaaatctgcagagcctggttcaaaatcagtcactcccttcagaagcagacatggcatctgttccttgcttgcttgttggttgtgtacctttcacgagacctgaattttagaattgcccagtgctgccagagtgagtgagtgtaattctcctttcaggtaaagataggctatctcaacactgctgagtgattcataaacatatcaaccaatagcattaacccattttatttcctgtccttagtgtctgaagatgctcaccagttttctgtgtacagtaaggcagcatgctaaaatgcttttgttcagttctgtatatttgaaaatagcagtgtgttctctgatggttacctgcagtggcaccctgtacaaaaaataaaagacttattgctgta

SEQ ID NO: 83831 - DNA, 1118 bp, Homo sapiens
agttcgacggagactctcccaggaggtttggtgcaagtgccaaagttgtgcatttcctgggacgagtcaaaccatggaattatacttatgatcccaaaacaaaaagtgtcaaaagtgaggcccatgatcccaacatgactcatccagagtttctcatcctgtggtggaacatctttaccaccaacgttttacctctgcttcaacaatttggccttgtcaaagacacctgctcatatgtaaatgtggaagatgtctcaggagccatatcacatctgtcccttggggagatcccagctatggcacagccgtttgtatcctcggaagaacggaaggaacgatgggaacagggccaggctgattatatgggagcagattcctttgacaacatcaagaggaaacttgacacttacctccagtagaaacactgcatttttctgtgaacacatccacttcacaagccttgtttctgatacttagtatctagagctgggttgagaaaagtctgttacagttgctagaggttttcattaaaacttatcagatgagaggcttttttaggataagaggtgagaactgggcaaaagttgtgaagcagcaattctgttatatggacagtgttctgctttttaatcctatttagcttgtttcagaaattctcacttttgttgactgccaacatacaaagtaagggaaactcaagatattaagatggctgtatcagttcttaaaatctgcagagcctggttcaaaatcagtcactcccttcagaagcagacatggcatctgttccttgcttgcttgttggttgtgtacctttcacgagacctgaattttagaattgcccagtgctgccagagtgagtgagtgtaattctcctttcaggtaaagataggctatctcaacactgctgagtgattcataaacatatcaaccaatagcattaacccattttatttcctgtccttagtgtctgaagatgctcaccagttttctgtgtacagtaaggcagcatgctaaaatgcttttgttcagttctgtatatttgaaaatagcagtgtgttctctgatggttacctgcagtggcaccctgtacaaaaaataaaagacttattgctgta

SEQ ID NO: 83832 - DNA, 1134 bp, Homo sapiens
agtgatatagtgaattttcaatataaacacaattaatcctagtttggtgcaagtgccaaagttgtgcatttcctgggacgagtcaaaccatggaattatacttatgatcccaaaacaaaaagtgtcaaaagtgaggcccatgatcccaacatgactcatccagagtttctcatcctgtggtggaacatctttaccaccaacgttttacctctgcttcaacaatttggccttgtcaaagacacctgctcatatgtaaatgtggaagatgtctcaggagccatatcacatctgtcccttggggagatcccagctatggcacagccgtttgtatcctcggaagaacggaaggaacgatgggaacagggccaggctgattatatgggagcagattcctttgacaacatcaagaggaaacttgacacttacctccagtagaaacactgcatttttctgtgaacacatccacttcacaagccttgtttctgatacttagtatctagagctgggttgagaaaagtctgttacagttgctagaggttttcattaaaacttatcagatgagaggcttttttaggataagaggtgagaactgggcaaaagttgtgaagcagcaattctgttatatggacagtgttctgctttttaatcctatttagcttgtttcagaaattctcacttttgttgactgccaacatacaaagtaagggaaactcaagatattaagatggctgtatcagttcttaaaatctgcagagcctggttcaaaatcagtcactcccttcagaagcagacatggcatctgttccttgcttgcttgttggttgtgtacctttcacgagacctgaattttagaattgcccagtgctgccagagtgagtgagtgtaattctcctttcaggtaaagataggctatctcaacactgctgagtgattcataaacatatcaaccaatagcattaacccattttatttcctgtccttagtgtctgaagatgctcaccagttttctgtgtacagtaaggcagcatgctaaaatgcttttgttcagttctgtatatttgaaaatagcagtgtgttctctgatggttacctgcagtggcaccctgtacaaaaaataaaagacttattgctgta

SEQ ID NO: 83833 - DNA, 1133 bp, Homo sapiens
  misc_feature (34)..(35): n is a, c, g, or t
agggcctgctcgcgaccgctgagtcagatgaacnntacacgtttggtgcaagtgccaaagttgtgcatttcctgggacgagtcaaaccatggaattatacttatgatcccaaaacaaaaagtgtcaaaagtgaggcccatgatcccaacatgactcatccagagtttctcatcctgtggtggaacatctttaccaccaacgttttacctctgcttcaacaatttggccttgtcaaagacacctgctcatatgtaaatgtggaagatgtctcaggagccatatcacatctgtcccttggggagatcccagctatggcacagccgtttgtatcctcggaagaacggaaggaacgatgggaacagggccaggctgattatatgggagcagattcctttgacaacatcaagaggaaacttgacacttacctccagtagaaacactgcatttttctgtgaacacatccacttcacaagccttgtttctgatacttagtatctagagctgggttgagaaaagtctgttacagttgctagaggttttcattaaaacttatcagatgagaggcttttttaggataagaggtgagaactgggcaaaagttgtgaagcagcaattctgttatatggacagtgttctgctttttaatcctatttagcttgtttcagaaattctcacttttgttgactgccaacatacaaagtaagggaaactcaagatattaagatggctgtatcagttcttaaaatctgcagagcctggttcaaaatcagtcactcccttcagaagcagacatggcatctgttccttgcttgcttgttggttgtgtacctttcacgagacctgaattttagaattgcccagtgctgccagagtgagtgagtgtaattctcctttcaggtaaagataggctatctcaacactgctgagtgattcataaacatatcaaccaatagcattaacccattttatttcctgtccttagtgtctgaagatgctcaccagttttctgtgtacagtaaggcagcatgctaaaatgcttttgttcagttctgtatatttgaaaatagcagtgtgttctctgatggttacctgcagtggcaccctgtacaaaaaataaaagacttattgctgta

SEQ ID NO: 83834 - DNA, 1716 bp, Homo sapiens
agggagacgcgggacccggagccccgcgggccaccgcccctgccggccgcgcagctgggaggatgcggacggcagcgagagcgtgcgcggccacgtgacggccgctataagagcgcacggggcagacgctcggttccccgccgtgcctcctcgctggccgcgctccctcccggtgccggcttctctgagtcaccaacctgaggctgccccggccgcctgcgcacccggcagcaccatgacagatcaggcctttgtgacactaaccacaaacgatgcctacgccaaaggtgccctggtcctgggatcatctctgaaacagcacaggaccaccaggaggctggtcgtgctcgccacccctcaggtctcagactccatgagaaaagttttagagacagtctttgatgaagtcatcatggtagatgtcttggacagtggcgattctgctcatctaaccttaatgaagaggccagagttgggtgtcacgctgacaaagctccactgctggtcgcttacacagtattcaaaatgtgtattcatggatgcagatactctggtcctagcaaatattgatgatctttttgacagagaagaattgtcagcagcaccagacccagggtggcctgactgcttcaattccggagtcttcgtttatcagccttcagttgaaacatacaatcagctgttgcatcttgcttctgagcaaggtagttttgatggtggggaccaaggcatactgaacacattttttagcagctgggcaacaacagatatcagaaaacacctgccgtttatttataacctaagcagcatctctatatactcctacctcccggcatttaaagtgaagatgtctcaggagccatatcacatctgtcccttggggagatcccagctatggcacagccgtttgtatcctcggaagaacggaaggaacgatgggaacagggccaggctgattatatgggagcagattcctttgacaacatcaagaggaaacttgacacttacctccagtagaaacactgcatttttctgtgaacacatccacttcacaagccttgtttctgatacttagtatctagagctgggttgagaaaagtctgttacagttgctagaggttttcattaaaacttatcagatgagaggcttttttaggataagaggtgagaactgggcaaaagttgtgaagcagcaattctgttatatggacagtgttctgctttttaatcctatttagcttgtttcagaaattctcacttttgttgactgccaacatacaaagtaagggaaactcaagatattaagatggctgtatcagttcttaaaatctgcagagcctggttcaaaatcagtcactcccttcagaagcagacatggcatctgttccttgcttgcttgttggttgtgtacctttcacgagacctgaattttagaattgcccagtgctgccagagtgagtgagtgtaattctcctttcaggtaaagataggctatctcaacactgctgagtgattcataaacatatcaaccaatagcattaacccattttatttcctgtccttagtgtctgaagatgctcaccagttttctgtgtacagtaaggcagcatgctaaaatgcttttgttcagttctgtatatttgaaaatagcagtgtgttctctgatggttacctgcagtggcaccctgtacaaaaaataaaagacttattgctgta

SEQ ID NO: 83835 - DNA, 1079 bp, Homo sapiens
cacacccttctcctgcctcagcctcccaagtagctgtgattacaggtttggtgcaagtgccaaagttgtgcatttcctgggacgagtcaaaccatggaattatacttatgatcccaaaacagtggtggaacatctttaccaccaacgttttacctctgcttcaacaatttggccttgtcaaagacacctgctcatatgtaaatgtggaagatgtctcaggagccatatcacatctgtcccttggggagatcccagctatggcacagccgtttgtatcctcggaagaacggaaggaacgatgggaacagggccaggctgattatatgggagcagattcctttgacaacatcaagaggaaacttgacacttacctccagtagaaacactgcatttttctgtgaacacatccacttcacaagccttgtttctgatacttagtatctagagctgggttgagaaaagtctgttacagttgctagaggttttcattaaaacttatcagatgagaggcttttttaggataagaggtgagaactgggcaaaagttgtgaagcagcaattctgttatatggacagtgttctgctttttaatcctatttagcttgtttcagaaattctcacttttgttgactgccaacatacaaagtaagggaaactcaagatattaagatggctgtatcagttcttaaaatctgcagagcctggttcaaaatcagtcactcccttcagaagcagacatggcatctgttccttgcttgcttgttggttgtgtacctttcacgagacctgaattttagaattgcccagtgctgccagagtgagtgagtgtaattctcctttcaggtaaagataggctatctcaacactgctgagtgattcataaacatatcaaccaatagcattaacccattttatttcctgtccttagtgtctgaagatgctcaccagttttctgtgtacagtaaggcagcatgctaaaatgcttttgttcagttctgtatatttgaaaatagcagtgtgttctctgatggttacctgcagtggcaccctgtacaaaaaataaaagacttattgctgta

SEQ ID NO: 83836 - DNA, 930 bp, Homo sapiens
gtaaataagagaaaattcatgcgcgtcaccagcgtgtgaccggcatagaacctagtagaagatgtctcaggagccatatcacatctgtcccttggggagatcccagctatggcacagccgtttgtatcctcggaagaacggaaggaacgatgggaacagggccaggctgattatatgggagcagattcctttgacaacatcaagaggaaacttgacacttacctccagtagaaacactgcatttttctgtgaacacatccacttcacaagccttgtttctgatacttagtatctagagctgggttgagaaaagtctgttacagttgctagaggttttcattaaaacttatcagatgagaggcttttttaggataagaggtgagaactgggcaaaagttgtgaagcagcaattctgttatatggacagtgttctgctttttaatcctatttagcttgtttcagaaattctcacttttgttgactgccaacatacaaagtaagggaaactcaagatattaagatggctgtatcagttcttaaaatctgcagagcctggttcaaaatcagtcactcccttcagaagcagacatggcatctgttccttgcttgcttgttggttgtgtacctttcacgagacctgaattttagaattgcccagtgctgccagagtgagtgagtgtaattctcctttcaggtaaagataggctatctcaacactgctgagtgattcataaacatatcaaccaatagcattaacccattttatttcctgtccttagtgtctgaagatgctcaccagttttctgtgtacagtaaggcagcatgctaaaatgcttttgttcagttctgtatatttgaaaatagcagtgtgttctctgatggttacctgcagtggcaccctgtacaaaaaataaaagacttattgctgta

SEQ ID NO: 83837 - DNA, 1084 bp, Homo sapiens
cacacccttctcctgcctcagcctcccaagtagctgtgattacaggtttggtgcaagtgccaaagttgtgcatttcctgggacgagtcaaaccatggaattatacttatgatcccaaaacaaaaagtgtcaaaagtgaggcccatgatcccaacatgactcatccagagtttctcatcctgtggtggaacatctttaccaccaacgttttacctctgcttcaacaatttggccttgtcaaagacacctgctcatatgtaaatgtggaagatgtctcaggagccatatcacatctgtcccttggggagatcccagctatggcacagccgtttgtatcctcggaagaacggaaggaacgatgggaacagggccaggctgattatatgggagcagattcctttgacaacatcaagaggaaacttgacacttacctccagtagaaacactgcatttttctgtgaacacatccacttcacaagccttgtttctgatacttagtatctagagctgggttgagaaaagtctgttacagttgctagaggttttcattattgtgaagcagcaattctgttatatggacagtgttctgctttttaatcctatttagcttgtttcagaaattctcacttttgttgactgccaacatacaaagtaagggaaactcaagatattaagatggctgtatcagttcttaaaatctgcagagcctggttcaaaatcagtcactcccttcagaagcagacatggcatctgttccttgcttgcttgttggttgtgtacctttcacgagacctgaattttagaattgcccagtgctgccagagtgagtgagtgtaattctcctttcaggtaaagataggctatctcaacactgctgagtgattcataaacatatcaaccaatagcattaacccattttatttcctgtccttagtgtctgaagatgctcaccagttttctgtgtacagtaaggcagcatgctaaaatgcttttgttcagttctgtatatttgaaaatagcagtgtgttctctgatggttacctgcagtggcaccctgtacaaaaaataaaagacttattgctgta

SEQ ID NO: 83838 - DNA, 515 bp, Homo sapiens
ccccgggctgcagaattcggcacgagatcctatttagcttgtttcagaaattctcacttttgttgactgccaacatacaaagtaagggaaactcaagatattaagatggctgtatcagttcttaaaatctgcagagcctggttcaaaatcagtcactcccttcagaagcagacatggcatctgttccttgcttgcttgttggttgtgtacctttcacgagacctgaattttagaattgcccagtgctgccagagtgagtgagtgtaattctcctttcaggtaaagataggctatctcaacactgctgagtgattcataaacatatcaaccaatagcattaacccattttatttcctgtccttagtgtctgaagatgctcaccagttttctgtgtacagtaaggcagcatgctaaaatgcttttgttcagttctgtatatttgaaaatagcagtgtgttctctgatggttacctgcagtggcaccctgtacaaaaaataaaagacttattgctgta

SEQ ID NO: 83839 - DNA, 1023 bp, Homo sapiens
agggagacgcgggacccggagccccgcgggccaccgcccctgccggccgcgcagctgggaggatgcggacggcagcgagagcgtgcgcggccacgtgacggccgctataagagcgcacggggcagacgctcggttccccgccgtgcctcctcgctggccgcgctccctcccggtgccggcttctctgagtcaccaacctgaggctgccccggccgcctgcgcacccggcagcaccatgacagatcaggcctttgtgacactaaccacaaacgatgcctacgccaaaggtgccctggtcctgggatcatctctgaaacagcacaggaccaccaggaggctggtcgtgctcgccacccctcaggtctcagactccatgagaaaagttttagagacagtctttgatgaagtcatcatggtagatgtcttggacagtggcgattctgctcatctaaccttaatgaagaggccagagttgggtgtcacgctgacaaagctccactgctggtcgcttacacagtattcaaaatgtgtattcatggatgcagatactctggtcctagcaaatattgatgatctttttgacagagaagaattgtcagcagcaccagacccagggtggcctgactgcttcaattccggagtcttcgtttatcagccttcagttgaaacatacaatcagctgttgcatcttgcttctgagcaaggtagttttgatggtggggaccaaggcatactgaacacattttttagcagctgggcaacaacagatatcagaaaacacctgccgtttatttataacctaagcagcatctctatatactcctacctcccggcatttaaagtgtttggtgcaagtgccaaagttgtgcatttcctgggacgagtcaaaccatggaattatacttatgatcccaaaacagtggtggaacatctttaccaccaacgttttacctctgcttcaacaatttggccttgtcaaagacacctgctcatatgtaaatgtggtaggttctgtttcttttc

SEQ ID NO: 83840 - DNA, 1166 bp, Homo sapiens
  misc_feature (1130)..(1130): n is a, c, g, or t
agggagacgcgggacccggagccccgcgggccaccgcccctgccggccgcgcagctgggaggatgcggacggcagcgagagcgtgcgcggccacgtgacggccgctataagagcgcacggggcagacgctcggttccccgccgtgcctcctcgctggccgcgctccctcccggtgccggcttctctgagtcaccaacctgaggctgccccggccgcctgcgcacccggcagcaccatgacagatcaggcctttgtgacactaaccacaaacgatgcctacgccaaaggtgccctggtcctgggatcatctctgaaacagcacaggaccaccaggaggctggtcgtgctcgccacccctcaggtctcagactccatgagaaaagttttagagacagtctttgatgaagtcatcatggtagatgtcttggacagtggcgattctgctcatctaaccttaatgaagaggccagagttgggtgtcacgctgacaaagctccactgctggtcgcttacacagtattcaaaatgtgtattcatggatgcagatactctggtcctagcaaatattgatgatctttttgacagagaagaattgtcagcagcaccagacccagggtggcctgactgcttcaattccggagtcttcgtttatcagccttcagttgaaacatacaatcagctgttgcatcttgcttctgagcaaggtagttttgatggtggggaccaaggcatactgaacacattttttagcagctgggcaacaacagatatcagaaaacacctgccgtttatttataacctaagcagcatctctatatactcctacctcccggcatttaaagttgctgccagagtgagtgagtgtaattctcctttcaggtaaagataggctatctcaacactgctgagtgattcataaacatatcaaccaatagcattaacccattttatttcctgtccttagtgtctgaagatgctcaccagttttctgtgtacagtaaggcagcatgctaaaatgcttttgttcagttctgtatatttgaaaatagcagtgtgttctctgatggttacctgcagtggcaccctgtacaaaaaataaaagacttattgctgtagatgcggccggctcnttacaataactactattcactgactccacacactcc

SEQ ID NO: 83841 - DNA, 808 bp, Homo sapiens
agggagacgcgggacccggagccccgcgggccaccgcccctgccggccgcgcagctgggaggatgcggacggcagcgagagcgtgcgcggccacgtgacggccgctataagagcgcacggggcagacgctcggttccccgccgtgcctcctcgctggccgcgctccctcccggtgccggcttctctgagtcaccaacctgaggctgccccggccgcctgcgcacccggcagcaccatgacagatcaggcctttgtgacactaaccacaaacgatgcctacgccaaaggtgccctggtcctgggatcatctctgaaacagcacaggaccaccaggaggctggtcgtgctcgccacccctcaggtctcagactccatgagaaaagttttagagacagtctttgatgaagtcatcatggtagatgtcttggacagtggcgattctgctcatctaaccttaatgaagaggccagagttgggtgtcacgctgacaaagctccactgctggtcgcttacacagtattcaaaatgtgtattcatggatgcagatactctggtcctagcaaatattgatgatctttttgacagagaagaattgtcagcagcaccagacccagggtggcctgactgcttcaattccggagtcttcgtttatcagccttcagttgaaacatacaatcagctgttgcatcttgcttctgagcaaggtagttttgatggtggggaccaaggcatactgaacacattttttagcagctgggcaacaacagatatcagcgcatttaaagtgttggtgcagtgcccaagttgt

SEQ ID NO: 83842 - DNA, 505 bp, Homo sapiens
ttttgttgactgccaacatacaaagtaagggaaactcaagatattaagatggctgtatcagttcttaaaatctgcagagcctggttcaaaatcagtcactcccttcagaagcagacatggcatctgttccttgcttgcttgttggttgtgtacctttcacgagacctgaattttagaattgcccagtgctgccagagtgagtgagtgtaattctcctttcaggtaaagataggctatctcaacactgctgagtgattcataaacatatcaaccaatagcattaacccattttatttcctgtccttagtgtctgaagatgctcaccagttttctgtgtacagtaaggcagcatgctaaaatgcttttgttcagttctgtatatttgaaaatagcagtgtgttctctgatggttacctgcagtggcaccctgtacaaaaaataaaagacttattgctgtatattgctgtatcttggttgtttaattaaattaaggaatttcaccata

SEQ ID NO: 83843 - DNA, 1936 bp, Homo sapiens
agggagacgcgggacccggagccccgcgggccaccgcccctgccggccgcgcagctgggaggatgcggacggcagcgagagcgtgcgcggccacgtgacggccgctataagagcgcacggggcagacgctcggttccccgccgtgcctcctcgctggccgcgctccctcccggtgccggcttctctgagtcaccaacctgaggctgccccggccgcctgcgcacccggcagcaccatgacagatcaggcctttgtgacactaaccacaaacgatgcctacgccaaaggtgccctggtcctgggatcatctctgaaacagcacaggaccaccaggaggctggtcgtgctcgccacccctcaggtctcagactccatgagaaaagttttagagacagtctttgatgaagtcatcatggtagatgtcttggacagtggcgattctgctcatctaaccttaatgaagaggccagagttgggtgtcacgctgacaaagctccactgctggtcgcttacacagtattcaaaatgtgtattcatggatgcagatactctggtcctagcaaatattgatgatctttttgacagagaagaattgtcagcagcaccagacccagggtggcctgactgcttcaattccggagtcttcgtttatcagccttcagttgaaacatacaatcagctgttgcatcttgcttctgagcaaggtagttttgatggtggggaccaaggcatactgaacacattttttagcagctgggcaacaacagatatcagaaaacacctgccgtttatttataacctaagcagcatctctatatactcctacctcccggcatttaaagtgtttggtgcaagtgccaaagttgtgcatttcctgggacgagtcaaaccatggaattatacttatgatcccaaaacaaaaagtgtcaaaagtgaggcccatgatcccaacatgactcatccagagtttctcatcctgtggtggaacatctttaccaccaacgttttacctctgcttcaacaatttggccttgtcaaagacacctgctcatatgtaaatgtggaagatgtctcaggagccatatcacatctgtcccttggggagatcccagctatggcacagccgtttgtatcctcggaagaacggaaggaacgatgggaacagggccaggctgattatatgggagcagattcctttgacaacatcaagaggaaacttgacacttacctccagtagaaacactgcatttttctgtgaacacatccacttcacaagccttgtttctgatacttagtatctagagctgggttgagaaaagtctgttacagttgctagaggttttcattaaaacttatcagatgagaggcttttttaggataagaggtgagaactgggcaaaagttgtgaagcagcaattctgttatatggacagtgttctgctttttaatcctatttagcttgtttcagaaattctcacttttgttgactgccaacatacaaagtaagggaaactcaagatattaagatggctgtatcagttcttaaaatctgcagagcctggttcaaaatcagtcactcccttcagaagcagacatggcatctgttccttgcttgcttgttggttgtgtacctttcacgagacctgaattttagaattgcccagtgctgccagagtgagtgagtgtaattctcctttcaggtaaagataggctatctcaacactgctgagtgattcataaacatatcaaccaatagcattaacccattttatttcctgtccttagtgtctgaagatgctcaccagttttctgtgtacagtaaggcagcatgctaaaatgcttttgttcagttctgtatatttgaaaatagcagtgtgttctctgatggttacctgcagtggcaccctgtacaaaaaataaaagacttattgctgta

SEQ ID NO: 83844 - DNA, 2345 bp, Homo sapiens
agggagacgcgggacccggagccccgcgggccaccgcccctgccggccgcgcagctgggaggatgcggacggcagcgagagcgtgcgcggccacgtgacggccgctataagagcgcacggggcagacgctcggttccccgccgtgcctcctcgctggccgcgctccctcccggtgccggcttctctgagtcaccaacctgaggctgccccggccgcctgcgcacccggcagcaccatgacagatcaggcctttgtgacactaaccacaaacgatgcctacgccaaaggtgccctggtcctgggatcatctctgaaacagcacaggaccaccaggaggctggtcgtgctcgccacccctcaggtctcagactccatgagaaaagttttagagacagtctttgatgaagtcatcatggtagatgtcttggacagtggcgattctgctcatctaaccttaatgaagaggccagagttgggtgtcacgctgacaaagctccactgctggtcgcttacacagtattcaaaatgtgtattcatggatgcagatactctggtcctagcaaatattgatgatctttttgacagagaagaattgtcagcagcaccagacccagggtggcctgactgcttcaattccggagtcttcgtttatcagccttcagttgaaacatacaatcagctgttgcatcttgcttctgagcaaggtagttttgatggtggggaccaaggcatactgaacacattttttagcagctgggcaacaacagatatcagaaaacacctgccgtttatttataacctaagcagcatctctatatactcctacctcccggcatttaaagtgtttggtgcaagtgccaaagttgtgcatttcctgggacgagtcaaaccatggaattatacttatgatcccaaaacaaaaagtgtcaaaagtgaggcccatgatcccaacatgactcatccagagtttctcatcctgtggtggaacatctttaccaccaacgttttacctctgcttcaacaatttggccttgtcaaagacacctgctcatatgtaaatgtggaagatgtctcaggagccatatcacatctgtcccttggggagatcccagctatggcacagccgtttgtatcctcggaagaacggaaggaacgatgggaacagggccaggctgattatatgggagcagattcctttgacaacatcaagaggaaacttgacacttacctccagtagaaacactgcatttttctgtgaacacatccacttcacaagccttgtttctgatacttagtatctagagctgggttgagaaaagtctgttacagttgctagaggttttcattaaaacttatcagatgagaggcttttttaggataagaggtgagaactgggcaaaagttgtgaagcagcaattctgttatatggacagtgttctgctttttaatcctatttagcttgtttcagaaattctcacttttgttgactgccaacatacaaagtaagggaaactcaagatattaagatggctgtatcagttcttaaaatctgcagagcctggttcaaaatcagtcactcccttcagaagcagacatggcatctgttccttgcttgcttgttggttgtgtacctttcacgagacctgaattttagaattgcccagtgctgccagagtgagtgagtgtaattctcctttcaggtaaagataggctatctcaacactgctgagtgattcataaacatatcaaccaatagcattaacccattttatttcctgtccttagtgtctgaagatgctcaccagttttctgtgtacagtaaggcagcatgctaaaatgcttttgttcagttctgtatatttgaaaatagcagtgtgttctctgatggttacctgcagtggcaccctgtacaaaaaataaaagacttattgctgtaaaaaaaaaaaaaaaaaaaaaaaaaaaaaaaaaagggggggggaaaaccgggggggcgaagccccaaggtgtttggttacaagggggcccccatgaggaagctgctatgaatgaaaccaaggcaagcgggccgctgtgtaacaacacgtccggcaggcgggaaacagcacccgctggggaccctgtggaaaaggcaccccacatcccggtggggggaccacaacagggcacaagtaccttaacaaaatttagacgcctctaggccaaaatttaaaaattgaagggtaacagtggaacccaacacgctattgcgcggcaggcaaggaaaaatggtccacacggatatgcatctttggaacaattctctaagcccaggcaaccagtaaaaatgagagaagtcccaataatgt

SEQ ID NO: 83845 - DNA, 2146 bp, Homo sapiens
agggagacgcgggacccggagccccgcgggccaccgcccctgccggccgcgcagctgggaggatgcggacggcagcgagagcgtgcgcggccacgtgacggccgctataagagcgcacggggcagacgctcggttccccgccgtgcctcctcgctggccgcgctccctcccggtgccggcttctctgagtcaccaacctgaggctgccccggccgcctgcgcacccggcagcaccatgacagatcaggcctttgtgacactaaccacaaacgatgcctacgccaaaggtgccctggtcctgggatcatctctgaaacagcacaggaccaccaggaggctggtcgtgctcgccacccctcaggtctcagactccatgagaaaagttttagagacagtctttgatgaagtcatcatggtagatgtcttggacagtggcgattctgctcatctaaccttaatgaagaggccagagttgggtgtcacgctgacaaagctccactgctggtcgcttacacagtattcaaaatgtgtattcatggatgcagatactctggtcctagcaaatattgatgatctttttgacagagaagaattgtcagcagcaccagacccagggtggcctgactgcttcaattccggagtcttcgtttatcagccttcagttgaaacatacaatcagctgttgcatcttgcttctgagcaaggtagttttgatggtggggaccaaggcatactgaacacattttttagcagctgggcaacaacagatatcagaaaacacctgccgtttatttataacctaagcagcatctctatatactcctacctcccggcatttaaagtgtttggtgcaagtgccaaagttgtgcatttcctgggacgagtcaaaccatggaattatacttatgatcccaaaacaaaaagtgtcaaaagtgaggcccatgatcccaacatgactcatccagagtttctcatcctgtggtggaacatctttaccaccaacgttttacctctgcttcaacaatttggccttgtcaaagacacctgctcatatgtaaatgtggaagatgtctcaggagccatatcacatctgtcccttggggagatcccagctatggcacagccgtttgtatcctcggaagaacggaaggaacgatgggaacagggccaggctgattatatgggagcagattcctttgacaacatcaagaggaaacttgacacttacctccagtagaaacactgcatttttctgtgaacacatccacttcacaagccttgtttctgatacttagtatctagagctgggttgagaaaagtctgttacagttgctagaggttttcattaaaacttatcagatgagaggcttttttaggataagaggtgagaactgggcaaaagttgtgaagcagcaattctgttatatggacagtgttctgctttttaatcctatttagcttgtttcagaaattctcacttttgttgactgccaacatacaaagtaagggaaactcaagatattaagatggctgtatcagttcttaaaatctgcagagcctggttcaaaatcagtcactcccttcagaagcagacatggcatctgttccttgcttgcttgttggttgtgtacctttcacgagacctgaattttagaattgcccagtgctgccagagtgagtgagtgtaattctcctttcaggtaaagataggctatctcaacactgctgagtgattcataaacatatcaaccaatagcattaacccattttatttcctgtccttagtgtctgaagatgctcaccagttttctgtgtacagtaaggcagcatgctaaaatgcttttgttcagttctgtatatttgaaaatagcagtgtgttctctgatggttacctgcagtggcaccctgtacaaaaaataaaagacttattgctgtagccgaaaaaaaaaaaaacaaacacaaaaacacacttggctggggcgtcgggccccgaaaaagttttcaaaaccatcggtggggccgggcccaggttttgccctgggccagccggccagagaaccgggcggccagggtggtttcccaaaaaaagcggggggcaccggtttgacacccaggggtggggctcgccctcacggccaggcgaatg

SEQ ID NO: 83846 - DNA, 1967 bp, Homo sapiens
agggagacgcgggacccggagccccgcgggccaccgcccctgccggccgcgcagctgggaggatgcggacggcagcgagagcgtgcgcggccacgtgacggccgctataagagcgcacggggcagacgctcggttccccgccgtgcctcctcgctggccgcgctccctcccggtgccggcttctctgagtcaccaacctgaggctgccccggccgcctgcgcacccggcagcaccatgacagatcaggcctttgtgacactaaccacaaacgatgcctacgccaaaggtgccctggtcctgggatcatctctgaaacagcacaggaccaccaggaggctggtcgtgctcgccacccctcaggtctcagactccatgagaaaagttttagagacagtctttgatgaagtcatcatggtagatgtcttggacagtggcgattctgctcatctaaccttaatgaagaggccagagttgggtgtcacgctgacaaagctccactgctggtcgcttacacagtattcaaaatgtgtattcatggatgcagatactctggtcctagcaaatattgatgatctttttgacagagaagaattgtcagcagcaccagacccagggtggcctgactgcttcaattccggagtcttcgtttatcagccttcagttgaaacatacaatcagctgttgcatcttgcttctgagcaaggtagttttgatggtggggaccaaggcatactgaacacattttttagcagctgggcaacaacagatatcagaaaacacctgccgtttatttataacctaagcagcatctctatatactcctacctcccggcatttaaagtgtttggtgcaagtgccaaagttgtgcatttcctgggacgagtcaaaccatggaattatacttatgatcccaaaacaaaaagtgtcaaaagtgaggcccatgatcccaacatgactcatccagagtttctcatcctgtggtggaacatctttaccaccaacgttttacctctgcttcaacaatttggccttgtcaaagacacctgctcatatgtaaatgtggaagatgtctcaggagccatatcacatctgtcccttggggagatcccagctatggcacagccgtttgtatcctcggaagaacggaaggaacgatgggaacagggccaggctgattatatgggagcagattcctttgacaacatcaagaggaaacttgacacttacctccagtagaaacactgcatttttctgtgaacacatccacttcacaagccttgtttctgatacttagtatctagagctgggttgagaaaagtctgttacagttgctagaggttttcattaaaacttatcagatgagaggcttttttaggataagaggtgagaactgggcaaaagttgtgaagcagcaattctgttatatggacagtgttctgctttttaatcctatttagcttgtttcagaaattctcacttttgttgactgccaacatacaaagtaagggaaactcaagatattaagatggctgtatcagttcttaaaatctgcagagcctggttcaaaatcagtcactcccttcagaagcagacatggcatctgttccttgcttgcttgttggttgtgtacctttcacgagacctgaattttagaattgcccagtgctgccagagtgagtgagtgtaattctcctttcaggtaaagataggctatctcaacactgctgagtgattcataaacatatcaaccaatagcattaacccattttatttcctgtccttagtgtctgaagatgctcaccagttttctgtgtacagtaaggcagcatgctaaaatgcttttgttcagttctgtatatttgaaaatagcagtgtgttctctgatggttacctgcagtggcaccctgtacaaaaaataaaagacttattgctgtaagaattaaccctcagtatacggccagcgttc

SEQ ID NO: 83847 - DNA, 1986 bp, Homo sapiens
agggagacgcgggacccggagccccgcgggccaccgcccctgccggccgcgcagctgggaggatgcggacggcagcgagagcgtgcgcggccacgtgacggccgctataagagcgcacggggcagacgctcggttccccgccgtgcctcctcgctggccgcgctccctcccggtgccggcttctctgagtcaccaacctgaggctgccccggccgcctgcgcacccggcagcaccatgacagatcaggcctttgtgacactaaccacaaacgatgcctacgccaaaggtgccctggtcctgggatcatctctgaaacagcacaggaccaccaggaggctggtcgtgctcgccacccctcaggtctcagactccatgagaaaagttttagagacagtctttgatgaagtcatcatggtagatgtcttggacagtggcgattctgctcatctaaccttaatgaagaggccagagttgggtgtcacgctgacaaagctccactgctggtcgcttacacagtattcaaaatgtgtattcatggatgcagatactctggtcctagcaaatattgatgatctttttgacagagaagaattgtcagcagcaccagacccagggtggcctgactgcttcaattccggagtcttcgtttatcagccttcagttgaaacatacaatcagctgttgcatcttgcttctgagcaaggtagttttgatggtggggaccaaggcatactgaacacattttttagcagctgggcaacaacagatatcagaaaacacctgccgtttatttataacctaagcagcatctctatatactcctacctcccggcatttaaagtgtttggtgcaagtgccaaagttgtgcatttcctgggacgagtcaaaccatggaattatacttatgatcccaaaacaaaaagtgtcaaaagtgaggcccatgatcccaacatgactcatccagagtttctcatcctgtggtggaacatctttaccaccaacgttttacctctgcttcaacaatttggccttgtcaaagacacctgctcatatgtaaatgtggaagatgtctcaggagccatatcacatctgtcccttggggagatcccagctatggcacagccgtttgtatcctcggaagaacggaaggaacgatgggaacagggccaggctgattatatgggagcagattcctttgacaacatcaagaggaaacttgacacttacctccagtagaaacactgcatttttctgtgaacacatccacttcacaagccttgtttctgatacttagtatctagagctgggttgagaaaagtctgttacagttgctagaggttttcattaaaacttatcagatgagaggcttttttaggataagaggtgagaactgggcaaaagttgtgaagcagcaattctgttatatggacagtgttctgctttttaatcctatttagcttgtttcagaaattctcacttttgttgactgccaacatacaaagtaagggaaactcaagatattaagatggctgtatcagttcttaaaatctgcagagcctggttcaaaatcagtcactcccttcagaagcagacatggcatctgttccttgcttgcttgttggttgtgtacctttcacgagacctgaattttagaattgcccagtgctgccagagtgagtgagtgtaattctcctttcaggtaaagataggctatctcaacactgctgagtgattcataaacatatcaaccaatagcattaacccattttatttcctgtccttagtgtctgaagatgctcaccagttttctgtgtacagtaaggcagcatgctaaaatgcttttgttcagttctgtatatttgaaaatagcagtgtgttctctgatggttacctgcagtggcaccctgtacaaaaaataaaagacttattgctgtagtatgcggcagccctttttcctttttttacttacacttttttttttgttc

SEQ ID NO: 83848 - DNA, 1133 bp, Homo sapiens
gccatgctgcaacgactctcttaattttccaccgctacaggtttggtgcaagtgccaaagttgtgcatttcctgggacgagtcaaaccatggaattatacttatgatcccaaaacaaaaagtgtcaaaagtgaggcccatgatcccaacatgactcatccagagtttctcatcctgtggtggaacatctttaccaccaacgttttacctctgcttcaacaatttggccttgtcaaagacacctgctcatatgtaaatgtggaagatgtctcaggagccatatcacatctgtcccttggggagatcccagctatggcacagccgtttgtatcctcggaagaacggaaggaacgatgggaacagggccaggctgattatatgggagcagattcctttgacaacatcaagaggaaacttgacacttacctccagtagaaacactgcatttttctgtgaacacatccacttcacaagccttgtttctgatacttagtatctagagctgggttgagaaaagtctgttacagttgctagaggttttcattaaaacttatcagatgagaggcttttttaggataagaggtgagaactgggcaaaagttgtgaagcagcaattctgttatatggacagtgttctgctttttaatcctatttagcttgtttcagaaattctcacttttgttgactgccaacatacaaagtaagggaaactcaagatattaagatggctgtatcagttcttaaaatctgcagagcctggttcaaaatcagtcactcccttcagaagcagacatggcatctgttccttgcttgcttgttggttgtgtacctttcacgagacctgaattttagaattgcccagtgctgccagagtgagtgagtgtaattctcctttcaggtaaagataggctatctcaacactgctgagtgattcataaacatatcaaccaatagcattaacccattttatttcctgtccttagtgtctgaagatgctcaccagttttctgtgtacagtaaggcagcatgctaaaatgcttttgttcagttctgtatatttgaaaatagcagtgtgttctctgatggttacctgcagtggcaccctgtacaaaaaataaaagacttattgctgta

SEQ ID NO: 83849 - DNA, 1128 bp, Homo sapiens
  misc_feature (25)..(25): n is a, c, g, or t
  misc_feature (27)..(27): n is a, c, g, or t
ggtagctgagtgactctcttatatncnccgctcaggtttggtgcaagtgccaaagttgtgcatttcctgggacgagtcaaaccatggaattatacttatgatcccaaaacaaaaagtgtcaaaagtgaggcccatgatcccaacatgactcatccagagtttctcatcctgtggtggaacatctttaccaccaacgttttacctctgcttcaacaatttggccttgtcaaagacacctgctcatatgtaaatgtggaagatgtctcaggagccatatcacatctgtcccttggggagatcccagctatggcacagccgtttgtatcctcggaagaacggaaggaacgatgggaacagggccaggctgattatatgggagcagattcctttgacaacatcaagaggaaacttgacacttacctccagtagaaacactgcatttttctgtgaacacatccacttcacaagccttgtttctgatacttagtatctagagctgggttgagaaaagtctgttacagttgctagaggttttcattaaaacttatcagatgagaggcttttttaggataagaggtgagaactgggcaaaagttgtgaagcagcaattctgttatatggacagtgttctgctttttaatcctatttagcttgtttcagaaattctcacttttgttgactgccaacatacaaagtaagggaaactcaagatattaagatggctgtatcagttcttaaaatctgcagagcctggttcaaaatcagtcactcccttcagaagcagacatggcatctgttccttgcttgcttgttggttgtgtacctttcacgagacctgaattttagaattgcccagtgctgccagagtgagtgagtgtaattctcctttcaggtaaagataggctatctcaacactgctgagtgattcataaacatatcaaccaatagcattaacccattttatttcctgtccttagtgtctgaagatgctcaccagttttctgtgtacagtaaggcagcatgctaaaatgcttttgttcagttctgtatatttgaaaatagcagtgtgttctctgatggttacctgcagtggcaccctgtacaaaaaataaaagacttattgctgta

SEQ ID NO: 83850 - DNA, 1987 bp, Homo sapiens
agggagacgcgggacccggagccccgcgggccaccgcccctgccggccgcgcagctgggaggatgcggacggcagcgagagcgtgcgcggccacgtgacggccgctataagagcgcacggggcagacgctcggttccccgccgtgcctcctcgctggccgcgctccctcccggtgccggcttctctgagtcaccaacctgaggctgccccggccgcctgcgcacccggcagcaccatgacagatcaggcctttgtgacactaaccacaaacgatgcctacgccaaaggtgccctggtcctgggatcatctctgaaacagcacaggaccaccaggaggctggtcgtgctcgccacccctcaggtctcagactccatgagaaaagttttagagacagtctttgatgaagtcatcatggtagatgtcttggacagtggcgattctgctcatctaaccttaatgaagaggccagagttgggtgtcacgctgacaaagctccactgctggtcgcttacacagtattcaaaatgtgtattcatggatgcagatactctggtcctagcaaatattgatgatctttttgacagagaagaattgtcagcagcaccagacccagggtggcctgactgcttcaattccggagtcttcgtttatcagccttcagttgaaacatacaatcagctgttgcatcttgcttctgagcaaggtagttttgatggtggggaccaaggcatactgaacacattttttagcagctgggcaacaacagatatcagaaaacacctgccgtttatttataacctaagcagcatctctatatactcctacctcccggcatttaaagtgtttggtgcaagtgccaaagttgtgcatttcctgggacgagtcaaaccatggaattatacttatgatcccaaaacaaaaagtgtcaaaagtgaggcccatgatcccaacatgactcatccagagtttctcatcctgtggtggaacatctttaccaccaacgttttacctctgcttcaacaatttggccttgtcaaagacacctgctcatatgtaaatgtgctttcagacttggtctatacactggctttctcttgtggcttctgtagaaaggaagatgtctcaggagccatatcacatctgtcccttggggagatcccagctatggcacagccgtttgtatcctcggaagaacggaaggaacgatgggaacagggccaggctgattatatgggagcagattcctttgacaacatcaagaggaaacttgacacttacctccagtagaaacactgcatttttctgtgaacacatccacttcacaagccttgtttctgatacttagtatctagagctgggttgagaaaagtctgttacagttgctagaggttttcattaaaacttatcagatgagaggcttttttaggataagaggtgagaactgggcaaaagttgtgaagcagcaattctgttatatggacagtgttctgctttttaatcctatttagcttgtttcagaaattctcacttttgttgactgccaacatacaaagtaagggaaactcaagatattaagatggctgtatcagttcttaaaatctgcagagcctggttcaaaatcagtcactcccttcagaagcagacatggcatctgttccttgcttgcttgttggttgtgtacctttcacgagacctgaattttagaattgcccagtgctgccagagtgagtgagtgtaattctcctttcaggtaaagataggctatctcaacactgctgagtgattcataaacatatcaaccaatagcattaacccattttatttcctgtccttagtgtctgaagatgctcaccagttttctgtgtacagtaaggcagcatgctaaaatgcttttgttcagttctgtatatttgaaaatagcagtgtgttctctgatggttacctgcagtggcaccctgtacaaaaaataaaagacttattgctgta

SEQ ID NO: 83851 - DNA, 2396 bp, Homo sapiens
agggagacgcgggacccggagccccgcgggccaccgcccctgccggccgcgcagctgggaggatgcggacggcagcgagagcgtgcgcggccacgtgacggccgctataagagcgcacggggcagacgctcggttccccgccgtgcctcctcgctggccgcgctccctcccggtgccggcttctctgagtcaccaacctgaggctgccccggccgcctgcgcacccggcagcaccatgacagatcaggcctttgtgacactaaccacaaacgatgcctacgccaaaggtgccctggtcctgggatcatctctgaaacagcacaggaccaccaggaggctggtcgtgctcgccacccctcaggtctcagactccatgagaaaagttttagagacagtctttgatgaagtcatcatggtagatgtcttggacagtggcgattctgctcatctaaccttaatgaagaggccagagttgggtgtcacgctgacaaagctccactgctggtcgcttacacagtattcaaaatgtgtattcatggatgcagatactctggtcctagcaaatattgatgatctttttgacagagaagaattgtcagcagcaccagacccagggtggcctgactgcttcaattccggagtcttcgtttatcagccttcagttgaaacatacaatcagctgttgcatcttgcttctgagcaaggtagttttgatggtggggaccaaggcatactgaacacattttttagcagctgggcaacaacagatatcagaaaacacctgccgtttatttataacctaagcagcatctctatatactcctacctcccggcatttaaagtgtttggtgcaagtgccaaagttgtgcatttcctgggacgagtcaaaccatggaattatacttatgatcccaaaacaaaaagtgtcaaaagtgaggcccatgatcccaacatgactcatccagagtttctcatcctgtggtggaacatctttaccaccaacgttttacctctgcttcaacaatttggccttgtcaaagacacctgctcatatgtaaatgtgctttcagacttggtctatacactggctttctcttgtggcttctgtagaaaggaagatgtctcaggagccatatcacatctgtcccttggggagatcccagctatggcacagccgtttgtatcctcggaagaacggaaggaacgatgggaacagggccaggctgattatatgggagcagattcctttgacaacatcaagaggaaacttgacacttacctccagtagaaacactgcatttttctgtgaacacatccacttcacaagccttgtttctgatacttagtatctagagctgggttgagaaaagtctgttacagttgctagaggttttcattaaaacttatcagatgagaggcttttttaggataagaggtgagaactgggcaaaagttgtgaagcagcaattctgttatatggacagtgttctgctttttaatcctatttagcttgtttcagaaattctcacttttgttgactgccaacatacaaagtaagggaaactcaagatattaagatggctgtatcagttcttaaaatctgcagagcctggttcaaaatcagtcactcccttcagaagcagacatggcatctgttccttgcttgcttgttggttgtgtacctttcacgagacctgaattttagaattgcccagtgctgccagagtgagtgagtgtaattctcctttcaggtaaagataggctatctcaacactgctgagtgattcataaacatatcaaccaatagcattaacccattttatttcctgtccttagtgtctgaagatgctcaccagttttctgtgtacagtaaggcagcatgctaaaatgcttttgttcagttctgtatatttgaaaatagcagtgtgttctctgatggttacctgcagtggcaccctgtacaaaaaataaaagacttattgctgtaaaaaaaaaaaaaaaaaaaaaaaaaaaaaaaaaagggggggggaaaaccgggggggcgaagccccaaggtgtttggttacaagggggcccccatgaggaagctgctatgaatgaaaccaaggcaagcgggccgctgtgtaacaacacgtccggcaggcgggaaacagcacccgctggggaccctgtggaaaaggcaccccacatcccggtggggggaccacaacagggcacaagtaccttaacaaaatttagacgcctctaggccaaaatttaaaaattgaagggtaacagtggaacccaacacgctattgcgcggcaggcaaggaaaaatggtccacacggatatgcatctttggaacaattctctaagcccaggcaaccagtaaaaatgagagaagtcccaataatgt

SEQ ID NO: 83852 - DNA, 1814 bp, Homo sapiens
agggagacgcgggacccggagccccgcgggccaccgcccctgccggccgcgcagctgggaggatgcggacggcagcgagagcgtgcgcggccacgtgacggccgctataagagcgcacggggcagacgctcggttccccgccgtgcctcctcgctggccgcgctccctcccggtgccggcttctctgagtcaccaacctgaggctgccccggccgcctgcgcacccggcagcaccatgacagatcaggcctttgtgacactaaccacaaacgatgcctacgccaaaggtgccctggtcctgggatcatctctgaaacagcacaggaccaccaggaggctggtcgtgctcgccacccctcaggtctcagactccatgagaaaagttttagagacagtctttgatgaagtcatcatggtagatgtcttggacagtggcgattctgctcatctaaccttaatgaagaggccagagttgggtgtcacgctgacaaagctccactgctggtcgcttacacagtattcaaaatgtgtattcatggatgcagatactctggtcctagcaaatattgatgatctttttgacagagaagaattgtcagcagcaccagacccagggtggcctgactgcttcaattccggagtcttcgtttatcagccttcagttgaaacatacaatcagctgttgcatcttgcttctgagcaaggtagttttgatggaaacaaataggcccagtttctgataaatgcatccatggttaccaggtatgtgaccctgctcagaagacctagaaagtaccaagtctgtagttgcaaggtggggaccaaggcatactgaacacattttttagcagctgggcaacaacagatatcagaaaacacctgccgtttatttataacctaagcagcatctctatatactcctacctcccggcatttaaagtgaagatgtctcaggagccatatcacatctgtcccttggggagatcccagctatggcacagccgtttgtatcctcggaagaacggaaggaacgatgggaacagggccaggctgattatatgggagcagattcctttgacaacatcaagaggaaacttgacacttacctccagtagaaacactgcatttttctgtgaacacatccacttcacaagccttgtttctgatacttagtatctagagctgggttgagaaaagtctgttacagttgctagaggttttcattaaaacttatcagatgagaggcttttttaggataagaggtgagaactgggcaaaagttgtgaagcagcaattctgttatatggacagtgttctgctttttaatcctatttagcttgtttcagaaattctcacttttgttgactgccaacatacaaagtaagggaaactcaagatattaagatggctgtatcagttcttaaaatctgcagagcctggttcaaaatcagtcactcccttcagaagcagacatggcatctgttccttgcttgcttgttggttgtgtacctttcacgagacctgaattttagaattgcccagtgctgccagagtgagtgagtgtaattctcctttcaggtaaagataggctatctcaacactgctgagtgattcataaacatatcaaccaatagcattaacccattttatttcctgtccttagtgtctgaagatgctcaccagttttctgtgtacagtaaggcagcatgctaaaatgcttttgttcagttctgtatatttgaaaatagcagtgtgttctctgatggttacctgcagtggcaccctgtacaaaaaataaaagacttattgctgta

SEQ ID NO: 83853 - DNA, 1115 bp, Homo sapiens
agggagacgcgggacccggagccccgcgggccaccgcccctgccggccgcgcagctgggaggatgcggacggcagcgagagcgtgcgcggccacgtgacggccgctataagagcgcacggggcagacgctcggttccccgccgtgcctcctcgctggccgcgctccctcccggtgccggcttctctgagtcaccaacctgaggctgccccggccgcctgcgcacccggcagcaccatgacagatcaggcctttgtgacactaaccacaaacgatgcctacgccaaaggtgccctggtcctgggatcatctctgaaacagcacaggaccaccaggaggctggtcgtgctcgccacccctcaggtctcagactccatgagaaaagttttagagacagtctttgatgaagtcatcatggtagatgtcttggacagtggcgattctgctcatctaaccttaatgaagaggccagagttgggtgtcacgctgacaaagctccactgctggtcgcttacacagtattcaaaatgtgtattcatggatgcagatactctggtcctagcaaatattgatgatctttttgacagagaagaattgtcagcagcaccagacccagggtggcctgactgcttcaattccggagtcttcgtttatcagccttcagttgaaacatacaatcagctgttgcatcttgcttctgagcaaggtagttttgatggtggggaccaaggcatactgaacacattttttagcagctgggcaacaacagatatcagaaaacacctgccgtttatttataacctaagcagcatctctatatactcctacctcccggcatttaaagttgctgccagagtgagtgagtgtaattctcctttcaggtaaagataggctatctcaacactgctgagtgattcataaacatatcaaccaatagcattaacccattttatttcctgtccttagtgtctgaagatgctcaccagttttctgtgtacagtaaggcagcatgctaaaatgcttttgttcagttctgtatatttgaaaatagcagtgtgttctctgatggttacctgcagtggcaccctgtacaaaaaataaaagacttattgctgta

SEQ ID NO: 83854 - DNA, 844 bp, Homo sapiens
ggagtgtactggtccatacacgtgcgctcggaggtgatgggaacaggaagcatgttctggtcttccatgtgcacacacatttggacacataaacgtgcatgcacaggtgtccaggccaggcgtgtaagcccccaggagtgcatgcgtgtgtttgcgtgcagtctacaaacatgttttcacaaagctcaaggagaagcaatcagtcatctccaaggaatcttagcaacagccatccccagaaaaggctcctgccagctggggcagcgatgagtcagcagaggcgtcgtgggggaggcgggaggcgaggcagcctcagccctggagcctgagccggcctctcccttctcctgggaaggcctccagacccggcctggccgccacgcctgggtcactgctttggcactgatgtccgagaacacattcctggaactggccagcacaggcggctggagggtttttccctcctcctctctctccctctcaccctcctgtccgggccccacacccgcccttttatttttccttcttgctgcaaaaccaaaacaccgtgttcacgagttcaggcgctgtagccaagtggcaggagctggcagagcaattgggaaacaggagctgcctggcccaagcaggccaggggatgaggacacctctggccagccacagagagggccctgctagggcttgctgagccctggttaagtactgcagggcaaaaatgtcatcgcctggggccccagggaaccggagttcaaggtggcagctcccagagaaatggcctgtgtctctctgccccagtagcagagcccgaggtcactagcagaggatggcggctggaaggtgacca

SEQ ID NO: 83855 - DNA, 760 bp, Homo sapiens
cataaaatagaatgtatttctgagactaaacactttgctatttagatgtgctgatttcctaatgaggtcatttttatattctacaaacccagaagattcagaaagactccttgctgcttatgaggcagtgtccagaatgcacagcacagtttctggaacatagcagaagcacagtaaacatttatcaagggaactaatgctctatttggcctgctcaagctagagccagctcctctgtgctctgtacttgtcaacagactttccagccatagaggcaaaccagagcagactgatggatttcacccaaagttgttaatccgttaacaattggctgtaaaagtatgcgtatggaaacaaatggggaaactaaaaaccagatttgcagttgcagtgtaaaaatataattgccatgcgttagcaaaaagaaaggcccctcacagattgcaaatgttattttaatacataaggaaattgtactggatttaatgaatttgctttgaccatcagcaaaatggcatttcagatttcaagcacaaaacttttttttgttattttttttctcattccatcatttgaaaaaaatgggctcctgacaaattgatcaggcagttgtgccacaaggtatgtgaccttgggtaattcacttaactctctgagtcttgatttcctcattggtaaaatgggtgtaaaaatctatatttgtcagatgattggatgagatgatgcatacaaaatatctagcagagtgcctggaacacag

SEQ ID NO: 83856 - DNA, 394 bp, Homo sapiens
ggaagaaccatgtactccataaagcctgtccccactcactgtgagatacctgctcctcataaagtagtggcatagcctcctaggttcgggggaatggctgctgcttgctccccttatagactgaagcaaacaggctctgacttcagactttttttaccaaagaagtaaggaaatgccaattaacgatgtatgatatacatttacaggaaataatttaacgagtctatactgtgtctctagcatcttctacttatatgaagtataacataaagaatttaaggctgggcatggtggctaatgcctgtaatcctagcactatgggaggctgaggtgggcaaattgcttgagctcaggagttcaagaccagcctgggcaacatggtgaaaccccatct

SEQ ID NO: 83857 - DNA, 160 bp, Homo sapiens
ttggtgtcactctagagccacatagcaagtggcttcaagaggtaattcttgatccttttgtagttcatgagcgtgatgattgggtgttcacatgcatgtgtgagctgtgccaccctcgaaccttgttaccatgtaggcacattaccgatctgacatgaag

SEQ ID NO: 83858 - DNA, 273 bp, Homo sapiens
tactgggattacaggcatgagccaccgcgcccagccctattggtatatttttttaaaatatttatccatgttgtagcatgtatcagtaattcatttctttttattactgagtagtgttccatcgtagggatataccacaatttgtttagctatttatctgttggtgaatatttgggttttttcttgtgttgggcagtcacaaataaagctgctatgaatatgttttcatttctcttggataaaactccaagactgggattgctgggtgtcttt

SEQ ID NO: 83859 - DNA, 969 bp, Homo sapiens
  misc_feature (685)..(685): n is a, c, g, or t
caaacccatcagacagcacccacctggccagctccatcctgtcccaggaaccactactattctcattatgtgtatgttacagactttgaagtggtcccacaactccaaaatataaaatatgctattgtcaatacaaaatattggaaagaaaaaaaaaaaaaaaaaaaaaaaaaaaaaaaaaaaaaaaaaaaaaaaaaaaaaaaaaaaaaaaaaaagggggggccccaatccccacggaggcgcgcagagctcatcgccgctccccgccaggttttctttaagaaggcaaagggggcgccccaaaaagaaggaggcgctaataataaaacgaacaagcaagccgcaggcgccgcgcgggtagtaaaaacaacaggcgcggcagcaggagggaagaaaaacgtcgcaacggtggacgaactctttatggaagaagaaagagaccctaactcctcgggggcggaggcagcaataatggtggaagaagcaaactacactacgaaacagaatatataaaacgccatgggaggaaaatatataataaatcttttgcgagagtttgtaatgatggggttaaaacacgaaagcgcataataaatgcatgaggcggacagaaaaaaaatgtgtgttctacagtagaggagatcaatatattctgatctagaaaaaacaatatctttttaatccncgcggcgggaggctcgtgtttctaaatacaaaaacaggagaacagcaataaaaaacacaaacagcacaccagaccgagagccgaaaaaacagcacagacgacaatacacaaatgcaagaccaagaattacaaggaagaagaaaacgacaatgactaacgatcaagtcagcaaaagacacaacacaacaagcaaacacgcaagacacttcaacagaaccacaaaagaaaccaaaacaacaaaaaaccaaggaccaacaacacacaacacacataactaacacaca

SEQ ID NO: 83860 - DNA, 688 bp, Homo sapiens
cgcctcagcctcccaaagtgctgggattacaggcgtgagccaccgctcctggcctattcttttcttttcagagacaaggtctcactctctcctctcgcccaggctggagtgcagtggtgtcatcatagctcattgcagcctcaaactcctgggctcaagcaatcctcccacctcagcctcctgagtagctgggatcacaggtgtgtgctacctcacccagctaatttctaatttttttttgtagagactggatctcactgttgccttgaactcctgggctcaagtgatcctcctgcctcagcctcccaaagtgctgggattccagaccagccattttttttccttaatcatgcattcctgttgctagtttcacatcagtcccctggtttaataagaaataaaatattttcttcacacttttgaaaagacctttcttctttcataccccttctccctccaaaagggacaaaaattctttaatttcataaggagggtaggtaagtaacttgaggatgtgaacctttggtgttcctcagctggaacgtttctctctccgttgatgttgtagctgggactgggcttcttgactttggaagagggatggtatcctggcacctcctgtgtctgggactgaaaggcctgtggtgtctcctttgctcctctccctgtccccccttaagctgtattt

SEQ ID NO: 83861 - DNA, 5871 bp, Homo sapiens
gcaccacagaccagtctgtcctggtgttggatgttaaaagtggagccacaaagaagccatcttatgtgggacaggcttgggtgtgagaccagagctgtgggtagcagcatgttgggtcaggatgaggggcagaggaaacactttccacctcttggatatggattttatcctgccctgattcaggagatccccatctattaagtaaggggaaagatgattttgttgtcttttgtttcagattctaatgtaggaactggtgagaagaaggtgactgaagcctggatttctgaggatgaaaactcacataggacgacgtcagacagactcacggtgatggagctcccctctcccgagtctgaggaagtccacgagcccagattaggggagctcttgggaaatccagaaggtcagagcctggggagttccccctctcaggacaggggctgcaagcaggtgacagtgacccattggaagatccagacaggagagacagctcaagtgtgcaccaagtcaggaagaaaccatattctgaactcagaccttcttctgcttcagagagagctcatagagggggaagccaatccttgcgatatctgtggcaaaaccttcacgtttaattcggacctagttaggcatcggatttcgcatgctggggagaaaccttacacgtgcgatcagtgtgggaaaggctttggccagagctcacaccttatggagcatcagagaattcacactggagagagactctacgtctgtaatgtgtgtgggaaagacttcattcactattcaggtctcattgagcatcagcgcgttcattcaggagaaaagcccttcaaatgtgcgcagtgtgggaaggcgttttgtcacagttcagacctgattaggcaccagagagttcacaccagagagagaccttttgaatgcaaagagtgtgggaaaggcttcagtcagagctccttacttattcgccatcagaggattcacacgggagaaaggccctatgagtgcaatgaatgtgggaaatccttcataaggagctcgagcctcattcgccattatcagatccacacagaagtgaaacagtatgaatgcaaagaatgtgggaaggcattccgtcatcgctcagaccttattgaacaccagagaattcacaccggagagagaccctttgaatgcaatgagtgtgggaaagcctttattcggagttcaaagctcattcagcatcagaggatccatactggggagaggccttacgtatgcaatgagtgtgggaagcgcttcagccagacgtcaaacttcacccagcatcagagaattcacactggagagaaactctatgaatgtaacgagtgtgggaaagctttctttctgagttcataccttattcgacaccagaaaatccacactggagagagagtgtatgaatgtaaggaatgtgggaaagcgtttctccagaaagcccatctcactgagcaccagaagatccactctggggacaggcccttcgaatgtaaagactgtgggaaagccttcatccagagctccaagctgcttctgcaccagattattcacactggagaaaagccctatgtgtgcagttattgtgggaaaggctttattcagaggtcaaacttccttcaacaccagaaaattcatactgaagagaagctctatgaatgtagtcagtatgggagagattttaactcaactacaaacgttaaaaataatcaaagggttcaccaagagggactctccttgagtaaggcccccatacatttgggtgagaggtctgtagataagggggaacacacaggtaacttataaaataattactttcccgcccagtgagtgatgtttggaaatgcgtggaattaggattcatgtggtttctaagatttggacatgtcagaattttgtgagtcatggatggggctgcttttgcagtgggtgccacctgccactgtgcagccctactcggctcagcccttctcctcagctgtgagcactgtcctcaggagagtcacagggcttgacacctgactctgagctggaacagtaggggcagggagaagacaggtctcaagaaaaggtttttaagaagtttcatccccagttaagcagagtccatccttgacttaaatcccttattacagcacaactgtgtatctaatcttacgatttaggagaatgttacctaggacattttgatgtgttaagttgaagaaaggtaactcgtgtatgaaccccgagccatttccctgttgtcctgaggaggaactccaggcctcccatcgtgtgccctaaggcctcctgcgtcctggagccctgcctcccactgcctgacttcctgccacacggttaatgctgcagcaacaccgactgcttcatcttccctgtgctccacgtggcttcctacctctctcgcctttgttcttgttgaagggtctcttctcagctaattaactctgaatcatggttcaagacaagcctcaggcatcatgtcaatgggtgtttccctcaagcttagttggcagcactctccacacttctgtggctcagtgattactgctattactatatttacttgcatatgtcagaatgatgtgatagactatctctgtcactatgctgttgggttcctgaggacagtgatcatatctgattgatttccatgtgtccactgtctagcacagggcaataaaaaatacacccctaaatctatgtgtaattggcatctctcttgctttgtcctttctatactgccattctaaaaattttcagctgttggctgtttttttttgttgtttgttcattttgtatcagtataatctacgattctgttagaagtatcttctcagccctgctactgtctgctgctcctacttagaagttgcaggcaatatcctgtgcacatccacgccctcctgtgtgccaccttacagctcatgcagaactgtctacttgatctggagggcattgacacctggctcagctggaacagtggggacaggaggaggcaggtctcaagagaaggtctttacttacttgtctgtatctttctgtctcactcgaaaggcacagtctcaatgcgctacgtaactcttctgttgtagcagttctgaggttgaactgagctcttgtcattttccatgctctctggctcattgtgtcatttcaaaatgtattgatatctataaggaatagtcctcaatgttgggaaaacagatgagcaacccactaccctgaagtcatccaccgtgtagtggggaagacggagatcacagtagggtgagttaagtatgtgccctcaggtgtgaaggagcacaggtgagggggtgcctgctgtggcacagagctgggaaggccttacagaagaggtgacatttcagctgggccagagatcagtagagagcagctgaagaagaaaatagggtccaggagaggaatctgcagaaacatggagccatgacagatggctttttggctaggactgttcgaaagcaggcgaggtaaatggacagtggacagccgcctcgccaaactgttagtctttacctctgaatttcatctggacatgaaccccaaagtccagttttgtaacgatataatttttttctcatgaggccatattttgagttcttaaatactaccaaccctgaacgtctcaggacaaataattcaaaaaagagatctacattttctggaaaatcagcattactagagatgtttcaaatgtagattttaccagaccattttaatcaactttattgagattcaattttcatatagtaaaacgcctatttaagtgtacaaggttttgaaaaatctatacacctgtgtaaccaccaccacctgtgtaaccaccaccgccagaaccaaaaacgtttctgtcacccaaagaagttcccttttgccttttcctagttaagcccactccagccccagataaccactttctatcctcatagattagtgttgcttggtttagagcctcatacaaatggattcatttactatgtgttcttttgcgtctgatgtctcactttggcatgtttttagactcatccaagctgttttgtgtttcagtagttctccttgctgaatagtattccattgtgtggataagccatcatttgtttattcatccacgtgttaatgggtttccagtctcggctcttaaaactatgagcatttgtgtaaaagtatgtatttgcacatgtgtttttatttctcttgggtaagtacctaggactttaattgctgtgttgtaagtgtcttagttcattcaggctgccataacaaaataccatcaactgggaggcttataaacaacagaaatttatgttttacagttctggaggctgggaagtccaagatgagggtgtcaacatttggtgtctagtgagggcctgcttccttttaagtagatgtctttttactgtgactgcacgtggtggaaagggactagcaagcttaccccattcatgagggctctccccttgtgattctgtcccctccccaagaccccacctcatatcatcttatgggttaggaatttgacatgaattgtgcaaggatgtaaacattcagtccattgcaatacgtgtttctaacttcctaagaaattgtcacacagccctctgtagtggttgaatcattttacactattactacattatgggaagattccagttgctccatatctttgctaacacttggcattgtcagtctcttaaaatttaatccactctagcctccttatgattttaatttgtatttgcccactgaataatgtatgtctatgatttcatctgcttattgcttttccgtgtcgtcttttgtgatgtgtctgttcgtgccttttgcctgtttttaagttgggatgcttattgttgactcaagttctttccatattctgcatgaaaaacatacatgtaatatatagaattctttgtctccatttgtgacaaatattgtgaatattttcatgtttggtttgcctgttcattttcttaatggtgtcttttgaatattttttattaagccaccactcctggccaactgtagttgaactcaggtattggaagggcttccgttttgttcttttcccattttttttttttgacttctagatcctttgcattttcgtataaaatttgaagtcaacttctatcaacttcaggccaggcccgtggctcatgcctgtataatcccagcactttgggaggccgaggcgggcggatcgcttgaggtcaggagttcaagaccagcctggccggggtggtgaaaccccatctctactaaaaatgcggaagagttagccaggcgtggtggcaggcgcctgtagaatcccagctgctcgggaggctgaggcaggagaattgcttgagcctgggaggtggaggtttcagtgagctgggatcgtggcattgcactctagcctgggcaaccaagagtgaaactgtctcaaaaaacaacttttatcaatgtctgcaaaaagaaagtcttctgggatttatagatcaatttagggagaaatgacattttaacaattctgagttttccaattgttgaacatggtgtactgccccatttatttagatctgttaatttctctcagtttgcagctctcacattttgttaaattcatgtatttaatatttctgcatgctattgcaagtggtaaggttttcaaaaagctgttttctagttattgctagtatatagaaatgcattagacttgtacattgatcttgtatcaagcaacttagatcagttaacttattctagtagcttttttctagattctttagcattttctatgtagataatcatgtcatctgtgaataaagtattttacttttccaattt

SEQ ID NO: 83862 - DNA, 1038 bp, Homo sapiens
ttaggctagtacgggcggggttaaatcggcagagccctatgtgtgcagttattgtgggaaaggctttattcagaggtcaaacttccttcaacaccagaaaattcatactgaagagaagctctatgaatgtagtcagtatgggagagattttaactcaactacaaacgttaaaaataatcaaagggttcaccaagagggactctccttgagtaaggcccccatacatttgggtgagaggtctgtagataagggggaacacacaggtaacttataaaataattactttcccgcccagtgagtgatgtttggaaatgcgtggaattaggattcatgtggtttctaagatttggacatgtcagaattttgtgagtcatggatggggctgcttttgcagtgggtgccacctgccactgtgcagccctactcggctcagcccttctcctcagctgtgagcactgtcctcaggagagtcacagggcttgacacctgactctgagctggaacagtaggggcagggagaagacaggtctcaagaaaaggtttttaagaagtttcatccccagttaagcagagtccatccttgacttaaatcccttattacagcacaactgtgtatctaatcttacgatttaggagaatgttacctaggacattttgatgtgttaagttgaagaaaggtaactcgtgtatgaaccccgagccatttccctgttgtcctgaggaggaactccaggcctcccatcgtgtgccctaaggcctcctgcgtcctggagccctgcctcccactgcctgacttcctgccacacggttaatgctgcagcaacaccgactgcttcatcttccctgtggtcagggttctactcttcgcttgttgtggaggggcctttcagtaatactgatcttggttagaaagtcggtctgaaggggtgcccagtttggggctccccttgggcgggtggtatttcgtgtcaaggggactcgccgggcgggggctatttgcggggggacccaaaaatttggggtgttgttctccgtttg

SEQ ID NO: 83863 - DNA, 5878 bp, Homo sapiens
gaccctttcaacatctcatttctcagagagagaccttttgaatgcaaagagtgtgggaaaggcttcagtcagagctccttacttattcgccatcagaggattcacacgggagaaaggccctatgagtgcaatgaatgtgggaaatccttcataaggagctcgagcctcattcgccattatcagatccacacagaagtgaaacagtatgaatgcaaagaatgtgggaaggcattccgtcatcgctcagaccttattgaacaccagagaattcacaccggagagagaccctttgaatgcaatgagtgtgggaaagcctttattcggagttcaaagctcattcagcatcagaggatccatactggggagaggccttacgtatgcaatgagtgtgggaagcgcttcagccagacgtcaaacttcacccagcatcagagaattcacactggagagaaactctatgaatgtaacgagtgtgggaaagctttctttctgagttcataccttattcgacaccagaaaatccacactggagagagagtgtatgaatgtaaggaatgtgggaaagcgtttctccagaaagcccatctcactgagcaccagaagatccactctggggacaggcccttcgaatgtaaagactgtgggaaagccttcatccagagctccaagctgcttctgcaccagattattcacactggagaaaagccctatgtgtgcagttattgtgggaaaggctttattcagaggtcaaacttccttcaacaccagaaaattcatactgaagagaagctctatgaatgtagtcagtatgggagagattttaactcaactacaaacgttaaaaataatcaaagggttcaccaagagggactctccttgagtaaggcccccatacatttgggtgagaggtctgtagataagggggaacacacaggtaacttataaaataattactttcccgcccagtgagtgatgtttggaaatgcgtggaattaggattcatgtggtttctaagatttggacatgtcagaattttgtgagtcatggatggggctgcttttgcagtgggtgccacctgccactgtgcagccctactcggctcagcccttctcctcagctgtgagcactgtcctcaggagagtcacagggcttgacacctgactctgagctggaacagtaggggcagggagaagacaggtctcaagaaaaggtttttaagaagtttcatccccagttaagcagagtccatccttgacttaaatcccttattacagcacaactgtgtatctaatcttacgatttaggagaatgttacctaggacattttgatgtgttaagttgaagaaaggtaactcgtgtatgaaccccgagccatttccctgttgtcctgaggaggaactccaggcctcccatcgtgtgccctaaggcctcctgcgtcctggagccctgcctcccactgcctgacttcctgccacacggttaatgctgcagcaacaccgactgcttcatcttccctgtgctccacgtggcttcctacctctctcgcctttgttcttgttgaagggtctcttctcagctaattaactctgaatcatggttcaagacaagcctcaggcatcatgtcaatgggtgtttccctcaagcttagttggcagcactctccacacttctgtggctcagtgattactgctattactatatttacttgcatatgtcagaatgatgtgatagactatctctgtcactatgctgttgggttcctgaggacagtgatcatatctgattgatttccatgtgtccactgtctagcacagggcaataaaaaatacacccctaaatctatgtgtaattggcatctctcttgctttgtcctttctatactgccattctaaaaattttcagctgttggctgtttttttttgttgtttgttcattttgtatcagtataatctacgattctgttagaagtatcttctcagccctgctactgtctgctgctcctacttagaagttgcaggcaatatcctgtgcacatccacgccctcctgtgtgccaccttacagctcatgcagaactgtctacttgatctggagggcattgacacctggctcagctggaacagtggggacaggaggaggcaggtctcaagagaaggtctttacttacttgtctgtatctttctgtctcactcgaaaggcacagtctcaatgcgctacgtaactcttctgttgtagcagttctgaggttgaactgagctcttgtcattttccatgctctctggctcattgtgtcatttcaaaatgtattgatatctataaggaatagtcctcaatgttgggaaaacagatgagcaacccactaccctgaagtcatccaccgtgtagtggggaagacggagatcacagtagggtgagttaagtatgtgccctcaggtgtgaaggagcacaggtgagggggtgcctgctgtggcacagagctgggaaggccttacagaagaggtgacatttcagctgggccagagatcagtagagagcagctgaagaagaaaatagggtccaggagaggaatctgcagaaacatggagccatgacagatggctttttggctaggactgttcgaaagcaggcgaggtaaatggacagtggacagccgcctcgccaaactgttagtctttacctctgaatttcatctggacatgaaccccaaagtccagttttgtaacgatataatttttttctcatgaggccatattttgagttcttaaatactaccaaccctgaacgtctcaggacaaataattcaaaaaagagatctacattttctggaaaatcagcattactagagatgtttcaaatgtagattttaccagaccattttaatcaactttattgagattcaattttcatatagtaaaacgcctatttaagtgtacaaggttttgaaaaatctatacacctgtgtaaccaccaccacctgtgtaaccaccaccgccagaaccaaaaacgtttctgtcacccaaagaagttcccttttgccttttcctagttaagcccactccagccccagataaccactttctatcctcatagattagtgttgcttggtttagagcctcatacaaatggattcatttactatgtgttcttttgcgtctgatgtctcactttggcatgtttttagactcatccaagctgttttgtgtttcagtagttctccttgctgaatagtattccattgtgtggataagccatcatttgtttattcatccacgtgttaatgggtttccagtctcggctcttaaaactatgagcatttgtgtaaaagtatgtatttgcacatgtgtttttatttctcttgggtaagtacctaggactttaattgctgtgttgtaagtgtcttagttcattcaggctgccataacaaaataccatcaactgggaggcttataaacaacagaaatttatgttttacagttctggaggctgggaagtccaagatgagggtgtcaacatttggtgtctagtgagggcctgcttccttttaagtagatgtctttttactgtgactgcacgtggtggaaagggactagcaagcttaccccattcatgagggctctccccttgtgattctgtcccctccccaagaccccacctcatatcatcttatgggttaggaatttgacatgaattgtgcaaggatgtaaacattcagtccattgcaatacgtgtttctaacttcctaagaaattgtcacacagccctctgtagtggttgaatcattttacactattactacattatgggaagattccagttgctccatatctttgctaacacttggcattgtcagtctcttaaaatttaatccactctagcctccttatgattttaatttgtatttgcccactgaataatgtatgtctatgatttcatctgcttattgcttttccgtgtcgtcttttgtgatgtgtctgttcgtgccttttgcctgtttttaagttgggatgcttattgttgactcaagttctttccatattctgcatgaaaaacatacatgtaatatatagaattctttgtctccatttgtgacaaatattgtgaatattttcatgtttggtttgcctgttcattttcttaatggtgtcttttgaatattttttattaagcctaatttatcaaagatttgggtgtggtggctcatgtctgtaatcccagcactttgggaggccaaggtaggcagatcacctgaggccagaagtttgagaccagcctggccaacgtggtgaaaccccgtctctactaaaaatacaaaaattatctgggcgggtggcacacccctgtagtccctgctactcgggaggctgaggcaggagaatcacttgaacccaggaggcagaggttgcagtaaaccaagataataataataatgatttatgatattttataataatttgagtttaagaaatttgcctactcaaaggacatgattttttcctatgttttttatttttatggaacttttatagttttaccttttacatttaagtctgtgatccattttgagttcatttttgtgtaccatatgtgataagggtcaagattcacttttttatctgtgtggttggttggttcggttctatttgttgagactctactttcccaatgaccaagtcttcacaggtttgtaaaaactgaagtgacatagaagtggtctgttctggacaccattcttcttgtgtgtataactttacaccaatatgacactatattgattactgtagttttatttgaggcagaaatctcattctgttgcccaggctggagcgtagtggcacaatcacagctaatgtaacctcgaacatccgggctcaagtgagcctctttccttagcctcccaagtagttgggactgtaggcatgcatcaccacatcttgctaatttttgtattttttgtggagatgggggtctcactatgttgaccaggctggtcttggaactcctggcctcaagggatcctcctgcctcagctcccaaagggattacaggtgtgagccaccactcctggccaactgtagttgaactcaggtattggaagggcttccgttttgttcttttcccattttttttttttgacttctagatcctttgcattttcgtataaaatttgaagtcaacttctatcaacttcaggccaggcccgtggctcatgcctgtataatcccagcactttgggaggccgaggcgggcggatcgcttgaggtcaggagttcaagaccagcctggccggggtggtgaaaccccatctctactaaaaatgcggaagagttagccaggcgtggtggcaggcgcctgtagaatcccagctgctcgggaggctgaggcaggagaattgcttgagcctgggaggtggaggtttcagtgagctgggatcgtggcattgcactctagcctgggcaaccaagagtgaaactgtctcaaaaaacaacttttatcaatgtctgcaaaaagaaagtcttctgggatttatagatcaatttagggagaaatgacattttaacaattctgagttttccaattgttgaacatggtgtactgccccatttatttagatctgttaatttctctcagtttgcagctctcacattttgttaaattcatgtatttaatatttctgcatgctattgcaagtggtaaggttttcaaaaagctgttttctagttattgctagtatatagaaatgcattagacttgtacattgatcttgtatcaagcaacttagatcagttaacttattctagtagcttttttctagattctttagcattttctatgtagataatcatgtcatctgtgaataaagtattttacttttccaattt

SEQ ID NO: 83864 - DNA, 6397 bp, Homo sapiens
gacgggggcgggcaacgccttagccgcagccccggctggctccggagcccggccgccttgccagggcacagtccgccgagagggccgggcggggtccgcaggccgctgtccccccgctagggcgtccaggagcggggccttggctagtcagtctcccggacgcagccacggccgcccccgcgaggctgcggcgtctctccagcgagccgcctcgggcccgagcctggggtcttgtccctgaggagcgccgtattctaatgtaggaactggtgagaagaaggtgactgaagcctggatttctgaggatgaaaactcacataggacgacgtcagacagactcacggtgatggagctcccctctcccgagtctgaggaagtccacgagcccagattaggggagctcttgggaaatccagaaggtcagagcctggggagttccccctctcaggacaggggctgcaagcaggtgacagtgacccattggaagatccagacaggagagacagctcaagtgtgcaccaagtcaggaagaaaccatattctgaactcagaccttcttctgcttcagagagagctcatagagggggaagccaatccttgcgatatctgtggcaaaaccttcacgtttaattcggacctagttaggcatcggatttcgcatgctggggagaaaccttacacgtgcgatcagtgtgggaaaggctttggccagagctcacaccttatggagcatcagagaattcacactggagagagactctacgtctgtaatgtgtgtgggaaagacttcattcactattcaggtctcattgagcatcagcgcgttcattcaggagaaaagcccttcaaatgtgcgcagtgtgggaaggcgttttgtcacagttcagacctgattaggcaccagagagttcacaccagagagagaccttttgaatgcaaagagtgtgggaaaggcttcagtcagagctccttacttattcgccatcagaggattcacacgggagaaaggccctatgagtgcaatgaatgtgggaaatccttcataaggagctcgagcctcattcgccattatcagatccacacagaagtgaaacagtatgaatgcaaagaatgtgggaaggcattccgtcatcgctcagaccttattgaacaccagagaattcacaccggagagagaccctttgaatgcaatgagtgtgggaaagcctttattcggagttcaaagctcattcagcatcagaggatccatactggggagaggccttacgtatgcaatgagtgtgggaagcgcttcagccagacgtcaaacttcacccagcatcagagaattcacactggagagaaactctatgaatgtaacgagtgtgggaaagctttctttctgagttcataccttattcgacaccagaaaatccacactggagagagagtgtatgaatgtaaggaatgtgggaaagcgtttctccagaaagcccatctcactgagcaccagaagatccactctggggacaggcccttcgaatgtaaagactgtgggaaagccttcatccagagctccaagctgcttctgcaccagattattcacactggagaaaagccctatgtgtgcagttattgtgggaaaggctttattcagaggtcaaacttccttcaacaccagaaaattcatactgaagagaagctctatgaatgtagtcagtatgggagagattttaactcaactacaaacgttaaaaataatcaaagggttcaccaagagggactctccttgagtaaggcccccatacatttgggtgagaggtctgtagataagggggaacacacaggtaacttataaaataattactttcccgcccagtgagtgatgtttggaaatgcgtggaattaggattcatgtggtttctaagatttggacatgtcagaattttgtgagtcatggatggggctgcttttgcagtgggtgccacctgccactgtgcagccctactcggctcagcccttctcctcagctgtgagcactgtcctcaggagagtcacagggcttgacacctgactctgagctggaacagtaggggcagggagaagacaggtctcaagaaaaggtttttaagaagtttcatccccagttaagcagagtccatccttgacttaaatcccttattacagcacaactgtgtatctaatcttacgatttaggagaatgttacctaggacattttgatgtgttaagttgaagaaaggtaactcgtgtatgaaccccgagccatttccctgttgtcctgaggaggaactccaggcctcccatcgtgtgccctaaggcctcctgcgtcctggagccctgcctcccactgcctgacttcctgccacacggttaatgctgcagcaacaccgactgcttcatcttccctgtgctccacgtggcttcctacctctctcgcctttgttcttgttgaagggtctcttctcagctaattaactctgaatcatggttcaagacaagcctcaggcatcatgtcaatgggtgtttccctcaagcttagttggcagcactctccacacttctgtggctcagtgattactgctattactatatttacttgcatatgtcagaatgatgtgatagactatctctgtcactatgctgttgggttcctgaggacagtgatcatatctgattgatttccatgtgtccactgtctagcacagggcaataaaaaatacacccctaaatctatgtgtaattggcatctctcttgctttgtcctttctatactgccattctaaaaattttcagctgttggctgtttttttttgttgtttgttcattttgtatcagtataatctacgattctgttagaagtatcttctcagccctgctactgtctgctgctcctacttagaagttgcaggcaatatcctgtgcacatccacgccctcctgtgtgccaccttacagctcatgcagaactgtctacttgatctggagggcattgacacctggctcagctggaacagtggggacaggaggaggcaggtctcaagagaaggtctttacttacttgtctgtatctttctgtctcactcgaaaggcacagtctcaatgcgctacgtaactcttctgttgtagcagttctgaggttgaactgagctcttgtcattttccatgctctctggctcattgtgtcatttcaaaatgtattgatatctataaggaatagtcctcaatgttgggaaaacagatgagcaacccactaccctgaagtcatccaccgtgtagtggggaagacggagatcacagtagggtgagttaagtatgtgccctcaggtgtgaaggagcacaggtgagggggtgcctgctgtggcacagagctgggaaggccttacagaagaggtgacatttcagctgggccagagatcagtagagagcagctgaagaagaaaatagggtccaggagaggaatctgcagaaacatggagccatgacagatggctttttggctaggactgttcgaaagcaggcgaggtaaatggacagtggacagccgcctcgccaaactgttagtctttacctctgaatttcatctggacatgaaccccaaagtccagttttgtaacgatataatttttttctcatgaggccatattttgagttcttaaatactaccaaccctgaacgtctcaggacaaataattcaaaaaagagatctacattttctggaaaatcagcattactagagatgtttcaaatgtagattttaccagaccattttaatcaactttattgagattcaattttcatatagtaaaacgcctatttaagtgtacaaggttttgaaaaatctatacacctgtgtaaccaccaccacctgtgtaaccaccaccgccagaaccaaaaacgtttctgtcacccaaagaagttcccttttgccttttcctagttaagcccactccagccccagataaccactttctatcctcatagattagtgttgcttggtttagagcctcatacaaatggattcatttactatgtgttcttttgcgtctgatgtctcactttggcatgtttttagactcatccaagctgttttgtgtttcagtagttctccttgctgaatagtattccattgtgtggataagccatcatttgtttattcatccacgtgttaatgggtttccagtctcggctcttaaaactatgagcatttgtgtaaaagtatgtatttgcacatgtgtttttatttctcttgggtaagtacctaggactttaattgctgtgttgtaagtgtcttagttcattcaggctgccataacaaaataccatcaactgggaggcttataaacaacagaaatttatgttttacagttctggaggctgggaagtccaagatgagggtgtcaacatttggtgtctagtgagggcctgcttccttttaagtagatgtctttttactgtgactgcacgtggtggaaagggactagcaagcttaccccattcatgagggctctccccttgtgattctgtcccctccccaagaccccacctcatatcatcttatgggttaggaatttgacatgaattgtgcaaggatgtaaacattcagtccattgcaatacgtgtttctaacttcctaagaaattgtcacacagccctctgtagtggttgaatcattttacactattactacattatgggaagattccagttgctccatatctttgctaacacttggcattgtcagtctcttaaaatttaatccactctagcctccttatgattttaatttgtatttgcccactgaataatgtatgtctatgatttcatctgcttattgcttttccgtgtcgtcttttgtgatgtgtctgttcgtgccttttgcctgtttttaagttgggatgcttattgttgactcaagttctttccatattctgcatgaaaaacatacatgtaatatatagaattctttgtctccatttgtgacaaatattgtgaatattttcatgtttggtttgcctgttcattttcttaatggtgtcttttgaatattttttattaagcctaatttatcaaagatttgggtgtggtggctcatgtctgtaatcccagcactttgggaggccaaggtaggcagatcacctgaggccagaagtttgagaccagcctggccaacgtggtgaaaccccgtctctactaaaaatacaaaaattatctgggcgggtggcacacccctgtagtccctgctactcgggaggctgaggcaggagaatcacttgaacccaggaggcagaggttgcagtaaaccaagataataataataatgatttatgatattttataataatttgagtttaagaaatttgcctactcaaaggacatgattttttcctatgttttttatttttatggaacttttatagttttaccttttacatttaagtctgtgatccattttgagttcatttttgtgtaccatatgtgataagggtcaagattcacttttttatctgtgtggttggttggttcggttctatttgttgagactctactttcccaatgaccaagtcttcacaggtttgtaaaaactgaagtgacatagaagtggtctgttctggacaccattcttcttgtgtgtataactttacaccaatatgacactatattgattactgtagttttatttgaggcagaaatctcattctgttgcccaggctggagcgtagtggcacaatcacagctaatgtaacctcgaacatccgggctcaagtgagcctctttccttagcctcccaagtagttgggactgtaggcatgcatcaccacatctctactaaaaatgcggaagagttagccaggcgtggtggcaggcgcctgtagaatcccagctgctcgggaggctgaggcaggagaattgcttgagcctgggaggtggaggtttcagtgagctgggatcgtggcattgcactctagcctgggcaaccaagagtgaaactgtctcaaaaaacaacttttatcaatgtctgcaaaaagaaagtcttctgggatttatagatcaatttagggagaaatgacattttaacaattctgagttttccaattgttgaacatggtgtactgccccatttatttagatctgttaatttctctcagtttgcagctctcacattttgttaaattcatgtatttaatatttctgcatgctattgcaagtggtaaggttttcaaaaagctgttttctagttattgctagtatatagaaatgcattagacttgtacattgatcttgtatcaagcaacttagatcagttaacttattctagtagcttttttctagattctttagcattttctatgtagataatcatgtcatctgtgaataaagtattttacttttccaattt

SEQ ID NO: 83865 - DNA, 4540 bp, Homo sapiens
tcaacctcagaactgctacaacagaagagttacgtagcgcattgagactgtgcctttcgagtgagacagaaagatacagaccagtaagtaaagaccttctcttgagccctgcctcccactgcctgacttcctgccacacggttaatgctgcagcaacaccgactgcttcatcttccctgtgctccacgtggcttcctacctctctcgcctttgttcttgttgaagggtctcttctcagctaattaactctgaatcatggttcaagacaagcctcaggcatcatgtcaatgggtgtttccctcaagcttagttggcagcactctccacacttctgtggctcagtgattactgctattactatatttacttgcatatgtcagaatgatgtgatagactatctctgtcactatgctgttgggttcctgaggacagtgatcatatctgattgatttccatgtgtccactgtctagcacagggcaataaaaaatacacccctaaatctatgtgtaattggcatctctcttgctttgtcctttctatactgccattctaaaaattttcagctgttggctgtttttttttgttgtttgttcattttgtatcagtataatctacgattctgttagaagtatcttctcagccctgctactgtctgctgctcctacttagaagttgcaggcaatatcctgtgcacatccacgccctcctgtgtgccaccttacagctcatgcagaactgtctacttgatctggagggcattgacacctggctcagctggaacagtggggacaggaggaggcaggtctcaagagaaggtctttacttacttgtctgtatctttctgtctcactcgaaaggcacagtctcaatgcgctacgtaactcttctgttgtagcagttctgaggttgaactgagctcttgtcattttccatgctctctggctcattgtgtcatttcaaaatgtattgatatctataaggaatagtcctcaatgttgggaaaacagatgagcaacccactaccctgaagtcatccaccgtgtagtggggaagacggagatcacagtagggtgagttaagtatgtgccctcaggtgtgaaggagcacaggtgagggggtgcctgctgtggcacagagctgggaaggccttacagaagaggtgacatttcagctgggccagagatcagtagagagcagctgaagaagaaaatagggtccaggagaggaatctgcagaaacatggagccatgacagatggctttttggctaggactgttcgaaagcaggcgaggtaaatggacagtggacagccgcctcgccaaactgttagtctttacctctgaatttcatctggacatgaaccccaaagtccagttttgtaacgatataatttttttctcatgaggccatattttgagttcttaaatactaccaaccctgaacgtctcaggacaaataattcaaaaaagagatctacattttctggaaaatcagcattactagagatgtttcaaatgtagattttaccagaccattttaatcaactttattgagattcaattttcatatagtaaaacgcctatttaagtgtacaaggttttgaaaaatctatacacctgtgtaaccaccaccacctgtgtaaccaccaccgccagaaccaaaaacgtttctgtcacccaaagaagttcccttttgccttttcctagttaagcccactccagccccagataaccactttctatcctcatagattagtgttgcttggtttagagcctcatacaaatggattcatttactatgtgttcttttgcgtctgatgtctcactttggcatgtttttagactcatccaagctgttttgtgtttcagtagttctccttgctgaatagtattccattgtgtggataagccatcatttgtttattcatccacgtgttaatgggtttccagtctcggctcttaaaactatgagcatttgtgtaaaagtatgtatttgcacatgtgtttttatttctcttgggtaagtacctaggactttaattgctgtgttgtaagtgtcttagttcattcaggctgccataacaaaataccatcaactgggaggcttataaacaacagaaatttatgttttacagttctggaggctgggaagtccaagatgagggtgtcaacatttggtgtctagtgagggcctgcttccttttaagtagatgtctttttactgtgactgcacgtggtggaaagggactagcaagcttaccccattcatgagggctctccccttgtgattctgtcccctccccaagaccccacctcatatcatcttatgggttaggaatttgacatgaattgtgcaaggatgtaaacattcagtccattgcaatacgtgtttctaacttcctaagaaattgtcacacagccctctgtagtggttgaatcattttacactattactacattatgggaagattccagttgctccatatctttgctaacacttggcattgtcagtctcttaaaatttaatccactctagcctccttatgattttaatttgtatttgcccactgaataatgtatgtctatgatttcatctgcttattgcttttccgtgtcgtcttttgtgatgtgtctgttcgtgccttttgcctgtttttaagttgggatgcttattgttgactcaagttctttccatattctgcatgaaaaacatacatgtaatatatagaattctttgtctccatttgtgacaaatattgtgaatattttcatgtttggtttgcctgttcattttcttaatggtgtcttttgaatattttttattaagcctaatttatcaaagatttgggtgtggtggctcatgtctgtaatcccagcactttgggaggccaaggtaggcagatcacctgaggccagaagtttgagaccagcctggccaacgtggtgaaaccccgtctctactaaaaatacaaaaattatctgggcgggtggcacacccctgtagtccctgctactcgggaggctgaggcaggagaatcacttgaacccaggaggcagaggttgcagtaaaccaagataataataataatgatttatgatattttataataatttgagtttaagaaatttgcctactcaaaggacatgattttttcctatgttttttatttttatggaacttttatagttttaccttttacatttaagtctgtgatccattttgagttcatttttgtgtaccatatgtgataagggtcaagattcacttttttatctgtgtggttggttggttcggttctatttgttgagactctactttcccaatgaccaagtcttcacaggtttgtaaaaactgaagtgacatagaagtggtctgttctggacaccattcttcttgtgtgtataactttacaccaatatgacactatattgattactgtagttttatttgaggcagaaatctcattctgttgcccaggctggagcgtagtggcacaatcacagctaatgtaacctcgaacatccgggctcaagtgagcctctttccttagcctcccaagtagttgggactgtaggcatgcatcaccacatcttgctaatttttgtattttttgtggagatgggggtctcactatgttgaccaggctggtcttggaactcctggcctcaagggatcctcctgcctcagctcccaaagggattacaggtgtgagccaccactcctggccaactgtagttgaactcaggtattggaagggcttccgttttgttcttttcccattttttttttttgacttctagatcctttgcattttcgtataaaatttgaagtcaacttctatcaacttcaggccaggcccgtggctcatgcctgtataatcccagcactttgggaggccgaggcgggcggatcgcttgaggtcaggagttcaagaccagcctggccggggtggtgaaaccccatctctactaaaaatgcggaagagttagccaggcgtggtggcaggcgcctgtagaatcccagctgctcgggaggctgaggcaggagaattgcttgagcctgggaggtggaggtttcagtgagctgggatcgtggcattgcactctagcctgggcaaccaagagtgaaactgtctcaaaaaacaacttttatcaatgtctgcaaaaagaaagtcttctgggatttatagatcaatttagggagaaatgacattttaacaattctgagttttccaattgttgaacatggtgtactgccccatttatttagatctgttaatttctctcagtttgcagctctcacattttgttaaattcatgtatttaatatttctgcatgctattgcaagtggtaaggttttcaaaaagctgttttctagttattgctagtatatagaaatgcattagacttgtacattgatcttgtatcaagcaacttagatcagttaacttattctagtagcttttttctagattctttagcattttctatgtagataatcatgtcatctgtgaataaagtattttacttttccaattt

SEQ ID NO: 83866 - DNA, 6770 bp, Homo sapiens
gacgggggcgggcaacgccttagccgcagccccggctggctccggagcccggccgccttgccagggcacagtccgccgagagggccgggcggggtccgcaggccgctgtccccccgctagggcgtccaggagcggggccttggctagtcagtctcccggacgcagccacggccgcccccgcgaggctgcggcgtctctccagcgagccgcctcgggcccgagcctggggtcttgtccctgaggagcgccgtattctaatgtaggaactggtgagaagaaggtgactgaagcctggatttctgaggatgaaaactcacataggacgacgtcagacagactcacggtgatggagctcccctctcccgagtctgaggaagtccacgagcccagattaggggagctcttgggaaatccagaaggtcagagcctggggagttccccctctcaggacaggggctgcaagcaggtgacagtgacccattggaagatccagacaggagagacagctcaagtgtgcaccaagtcaggaagaaaccatattctgaactcagaccttcttctgcttcagagagagctcatagagggggaagccaatccttgcgatatctgtggcaaaaccttcacgtttaattcggacctagttaggcatcggatttcgcatgctggggagaaaccttacacgtgcgatcagtgtgggaaaggctttggccagagctcacaccttatggagcatcagagaattcacactggagagagactctacgtctgtaatgtgtgtgggaaagacttcattcactattcaggtctcattgagcatcagcgcgttcattcaggagaaaagcccttcaaatgtgcgcagtgtgggaaggcgttttgtcacagttcagacctgattaggcaccagagagttcacaccagagagagaccttttgaatgcaaagagtgtgggaaaggcttcagtcagagctccttacttattcgccatcagaggattcacacgggagaaaggccctatgagtgcaatgaatgtgggaaatccttcataaggagctcgagcctcattcgccattatcagatccacacagaagtgaaacagtatgaatgcaaagaatgtgggaaggcattccgtcatcgctcagaccttattgaacaccagagaattcacaccggagagagaccctttgaatgcaatgagtgtgggaaagcctttattcggagttcaaagctcattcagcatcagaggatccatactggggagaggccttacgtatgcaatgagtgtgggaagcgcttcagccagacgtcaaacttcacccagcatcagagaattcacactggagagaaactctatgaatgtaacgagtgtgggaaagctttctttctgagttcataccttattcgacaccagaaaatccacactggagagagagtgtatgaatgtaaggaatgtgggaaagcgtttctccagaaagcccatctcactgagcaccagaagatccactctggggacaggcccttcgaatgtaaagactgtgggaaagccttcatccagagctccaagctgcttctgcaccagattattcacactggagaaaagccctatgtgtgcagttattgtgggaaaggctttattcagaggtcaaacttccttcaacaccagaaaattcatactgaagagaagctctatgaatgtagtcagtatgggagagattttaactcaactacaaacgttaaaaataatcaaagggttcaccaagagggactctccttgagtaaggcccccatacatttgggtgagaggtctgtagataagggggaacacacaggtaacttataaaataattactttcccgcccagtgagtgatgtttggaaatgcgtggaattaggattcatgtggtttctaagatttggacatgtcagaattttgtgagtcatggatggggctgcttttgcagtgggtgccacctgccactgtgcagccctactcggctcagcccttctcctcagctgtgagcactgtcctcaggagagtcacagggcttgacacctgactctgagctggaacagtaggggcagggagaagacaggtctcaagaaaaggtttttaagaagtttcatccccagttaagcagagtccatccttgacttaaatcccttattacagcacaactgtgtatctaatcttacgatttaggagaatgttacctaggacattttgatgtgttaagttgaagaaaggtaactcgtgtatgaaccccgagccatttccctgttgtcctgaggaggaactccaggcctcccatcgtgtgccctaaggcctcctgcgtcctggagccctgcctcccactgcctgacttcctgccacacggttaatgctgcagcaacaccgactgcttcatcttccctgtgctccacgtggcttcctacctctctcgcctttgttcttgttgaagggtctcttctcagctaattaactctgaatcatggttcaagacaagcctcaggcatcatgtcaatgggtgtttccctcaagcttagttggcagcactctccacacttctgtggctcagtgattactgctattactatatttacttgcatatgtcagaatgatgtgatagactatctctgtcactatgctgttgggttcctgaggacagtgatcatatctgattgatttccatgtgtccactgtctagcacagggcaataaaaaatacacccctaaatctatgtgtaattggcatctctcttgctttgtcctttctatactgccattctaaaaattttcagctgttggctgtttttttttgttgtttgttcattttgtatcagtataatctacgattctgttagaagtatcttctcagccctgctactgtctgctgctcctacttagaagttgcaggcaatatcctgtgcacatccacgccctcctgtgtgccaccttacagctcatgcagaactgtctacttgatctggagggcattgacacctggctcagctggaacagtggggacaggaggaggcaggtctcaagagaaggtctttacttacttgtctgtatctttctgtctcactcgaaaggcacagtctcaatgcgctacgtaactcttctgttgtagcagttctgaggttgaactgagctcttgtcattttccatgctctctggctcattgtgtcatttcaaaatgtattgatatctataaggaatagtcctcaatgttgggaaaacagatgagcaacccactaccctgaagtcatccaccgtgtagtggggaagacggagatcacagtagggtgagttaagtatgtgccctcaggtgtgaaggagcacaggtgagggggtgcctgctgtggcacagagctgggaaggccttacagaagaggtgacatttcagctgggccagagatcagtagagagcagctgaagaagaaaatagggtccaggagaggaatctgcagaaacatggagccatgacagatggctttttggctaggactgttcgaaagcaggcgaggtaaatggacagtggacagccgcctcgccaaactgttagtctttacctctgaatttcatctggacatgaaccccaaagtccagttttgtaacgatataatttttttctcatgaggccatattttgagttcttaaatactaccaaccctgaacgtctcaggacaaataattcaaaaaagagatctacattttctggaaaatcagcattactagagatgtttcaaatgtagattttaccagaccattttaatcaactttattgagattcaattttcatatagtaaaacgcctatttaagtgtacaaggttttgaaaaatctatacacctgtgtaaccaccaccacctgtgtaaccaccaccgccagaaccaaaaacgtttctgtcacccaaagaagttcccttttgccttttcctagttaagcccactccagccccagataaccactttctatcctcatagattagtgttgcttggtttagagcctcatacaaatggattcatttactatgtgttcttttgcgtctgatgtctcactttggcatgtttttagactcatccaagctgttttgtgtttcagtagttctccttgctgaatagtattccattgtgtggataagccatcatttgtttattcatccacgtgttaatgggtttccagtctcggctcttaaaactatgagcatttgtgtaaaagtatgtatttgcacatgtgtttttatttctcttgggtaagtacctaggactttaattgctgtgttgtaagtgtcttagttcattcaggctgccataacaaaataccatcaactgggaggcttataaacaacagaaatttatgttttacagttctggaggctgggaagtccaagatgagggtgtcaacatttggtgtctagtgagggcctgcttccttttaagtagatgtctttttactgtgactgcacgtggtggaaagggactagcaagcttaccccattcatgagggctctccccttgtgattctgtcccctccccaagaccccacctcatatcatcttatgggttaggaatttgacatgaattgtgcaaggatgtaaacattcagtccattgcaatacgtgtttctaacttcctaagaaattgtcacacagccctctgtagtggttgaatcattttacactattactacattatgggaagattccagttgctccatatctttgctaacacttggcattgtcagtctcttaaaatttaatccactctagcctccttatgattttaatttgtatttgcccactgaataatgtatgtctatgatttcatctgcttattgcttttccgtgtcgtcttttgtgatgtgtctgttcgtgccttttgcctgtttttaagttgggatgcttattgttgactcaagttctttccatattctgcatgaaaaacatacatgtaatatatagaattctttgtctccatttgtgacaaatattgtgaatattttcatgtttggtttgcctgttcattttcttaatggtgtcttttgaatattttttattaagcctaatttatcaaagatttgggtgtggtggctcatgtctgtaatcccagcactttgggaggccaaggtaggcagatcacctgaggccagaagtttgagaccagcctggccaacgtggtgaaaccccgtctctactaaaaatacaaaaattatctgggcgggtggcacacccctgtagtccctgctactcgggaggctgaggcaggagaatcacttgaacccaggaggcagaggttgcagtaaaccaagataataataataatgatttatgatattttataataatttgagtttaagaaatttgcctactcaaaggacatgattttttcctatgttttttatttttatggaacttttatagttttaccttttacatttaagtctgtgatccattttgagttcatttttgtgtaccatatgtgataagggtcaagattcacttttttatctgtgtggttggttggttcggttctatttgttgagactctactttcccaatgaccaagtcttcacaggtttgtaaaaactgaagtgacatagaagtggtctgttctggacaccattcttcttgtgtgtataactttacaccaatatgacactatattgattactgtagttttatttgaggcagaaatctcattctgttgcccaggctggagcgtagtggcacaatcacagctaatgtaacctcgaacatccgggctcaagtgagcctctttccttagcctcccaagtagttgggactgtaggcatgcatcaccacatcttgctaatttttgtattttttgtggagatgggggtctcactatgttgaccaggctggtcttggaactcctggcctcaagggatcctcctgcctcagctcccaaagggattacaggtgtgagccaccactcctggccaactgtagttgaactcaggtattggaagggcttccgttttgttcttttcccattttttttttttgacttctagatcctttgcattttcgtataaaatttgaagtcaacttctatcaacttcaggccaggcccgtggctcatgcctgtataatcccagcactttgggaggccgaggcgggcggatcgcttgaggtcaggagttcaagaccagcctggccggggtggtgaaaccccatctctactaaaaatgcggaagagttagccaggcgtggtggcaggcgcctgtagaatcccagctgctcgggaggctgaggcaggagaattgcttgagcctgggaggtggaggtttcagtgagctgggatcgtggcattgcactctagcctgggcaaccaagagtgaaactgtctcaaaaaacaacttttatcaatgtctgcaaaaagaaagtcttctgggatttatagatcaatttagggagaaatgacattttaacaattctgagttttccaattgttgaacatggtgtactgccccatttatttagatctgttaatttctctcagtttgcagctctcacattttgttaaattcatgtatttaatatttctgcatgctattgcaagtggtaaggttttcaaaaagctgttttctagttattgctagtatatagaaatgcattagacttgtacattgatcttgtatcaagcaacttagatcagttaacttattctagtagcttttttctagattctttagcattttctatgtagataatcatgtcatctgtgaataaagtattttacttttccaattt

SEQ ID NO: 83867 - DNA, 5951 bp, Homo sapiens
ccaatatgtgatgatcgcggaacctgccgtcaaattgcagtgtgggaaggcgttttgtcacagttcagacctgattaggcaccagagagttcacaccagagagagaccttttgaatgcaaagagtgtgggaaaggcttcagtcagagctccttacttattcgccatcagaggattcacacgggagaaaggccctatgagtgcaatgaatgtgggaaatccttcataaggagctcgagcctcattcgccattatcagatccacacagaagtgaaacagtatgaatgcaaagaatgtgggaaggcattccgtcatcgctcagaccttattgaacaccagagaattcacaccggagagagaccctttgaatgcaatgagtgtgggaaagcctttattcggagttcaaagctcattcagcatcagaggatccatactggggagaggccttacgtatgcaatgagtgtgggaagcgcttcagccagacgtcaaacttcacccagcatcagagaattcacactggagagaaactctatgaatgtaacgagtgtgggaaagctttctttctgagttcataccttattcgacaccagaaaatccacactggagagagagtgtatgaatgtaaggaatgtgggaaagcgtttctccagaaagcccatctcactgagcaccagaagatccactctggggacaggcccttcgaatgtaaagactgtgggaaagccttcatccagagctccaagctgcttctgcaccagattattcacactggagaaaagccctatgtgtgcagttattgtgggaaaggctttattcagaggtcaaacttccttcaacaccagaaaattcatactgaagagaagctctatgaatgtagtcagtatgggagagattttaactcaactacaaacgttaaaaataatcaaagggttcaccaagagggactctccttgagtaaggcccccatacatttgggtgagaggtctgtagataagggggaacacacaggtaacttataaaataattactttcccgcccagtgagtgatgtttggaaatgcgtggaattaggattcatgtggtttctaagatttggacatgtcagaattttgtgagtcatggatggggctgcttttgcagtgggtgccacctgccactgtgcagccctactcggctcagcccttctcctcagctgtgagcactgtcctcaggagagtcacagggcttgacacctgactctgagctggaacagtaggggcagggagaagacaggtctcaagaaaaggtttttaagaagtttcatccccagttaagcagagtccatccttgacttaaatcccttattacagcacaactgtgtatctaatcttacgatttaggagaatgttacctaggacattttgatgtgttaagttgaagaaaggtaactcgtgtatgaaccccgagccatttccctgttgtcctgaggaggaactccaggcctcccatcgtgtgccctaaggcctcctgcgtcctggagccctgcctcccactgcctgacttcctgccacacggttaatgctgcagcaacaccgactgcttcatcttccctgtgctccacgtggcttcctacctctctcgcctttgttcttgttgaagggtctcttctcagctaattaactctgaatcatggttcaagacaagcctcaggcatcatgtcaatgggtgtttccctcaagcttagttggcagcactctccacacttctgtggctcagtgattactgctattactatatttacttgcatatgtcagaatgatgtgatagactatctctgtcactatgctgttgggttcctgaggacagtgatcatatctgattgatttccatgtgtccactgtctagcacagggcaataaaaaatacacccctaaatctatgtgtaattggcatctctcttgctttgtcctttctatactgccattctaaaaattttcagctgttggctgtttttttttgttgtttgttcattttgtatcagtataatctacgattctgttagaagtatcttctcagccctgctactgtctgctgctcctacttagaagttgcaggcaatatcctgtgcacatccacgccctcctgtgtgccaccttacagctcatgcagaactgtctacttgatctggagggcattgacacctggctcagctggaacagtggggacaggaggaggcaggtctcaagagaaggtctttacttacttgtctgtatctttctgtctcactcgaaaggcacagtctcaatgcgctacgtaactcttctgttgtagcagttctgaggttgaactgagctcttgtcattttccatgctctctggctcattgtgtcatttcaaaatgtattgatatctataaggaatagtcctcaatgttgggaaaacagatgagcaacccactaccctgaagtcatccaccgtgtagtggggaagacggagatcacagtagggtgagttaagtatgtgccctcaggtgtgaaggagcacaggtgagggggtgcctgctgtggcacagagctgggaaggccttacagaagaggtgacatttcagctgggccagagatcagtagagagcagctgaagaagaaaatagggtccaggagaggaatctgcagaaacatggagccatgacagatggctttttggctaggactgttcgaaagcaggcgaggtaaatggacagtggacagccgcctcgccaaactgttagtctttacctctgaatttcatctggacatgaaccccaaagtccagttttgtaacgatataatttttttctcatgaggccatattttgagttcttaaatactaccaaccctgaacgtctcaggacaaataattcaaaaaagagatctacattttctggaaaatcagcattactagagatgtttcaaatgtagattttaccagaccattttaatcaactttattgagattcaattttcatatagtaaaacgcctatttaagtgtacaaggttttgaaaaatctatacacctgtgtaaccaccaccacctgtgtaaccaccaccgccagaaccaaaaacgtttctgtcacccaaagaagttcccttttgccttttcctagttaagcccactccagccccagataaccactttctatcctcatagattagtgttgcttggtttagagcctcatacaaatggattcatttactatgtgttcttttgcgtctgatgtctcactttggcatgtttttagactcatccaagctgttttgtgtttcagtagttctccttgctgaatagtattccattgtgtggataagccatcatttgtttattcatccacgtgttaatgggtttccagtctcggctcttaaaactatgagcatttgtgtaaaagtatgtatttgcacatgtgtttttatttctcttgggtaagtacctaggactttaattgctgtgttgtaagtgtcttagttcattcaggctgccataacaaaataccatcaactgggaggcttataaacaacagaaatttatgttttacagttctggaggctgggaagtccaagatgagggtgtcaacatttggtgtctagtgagggcctgcttccttttaagtagatgtctttttactgtgactgcacgtggtggaaagggactagcaagcttaccccattcatgagggctctccccttgtgattctgtcccctccccaagaccccacctcatatcatcttatgggttaggaatttgacatgaattgtgcaaggatgtaaacattcagtccattgcaatacgtgtttctaacttcctaagaaattgtcacacagccctctgtagtggttgaatcattttacactattactacattatgggaagattccagttgctccatatctttgctaacacttggcattgtcagtctcttaaaatttaatccactctagcctccttatgattttaatttgtatttgcccactgaataatgtatgtctatgatttcatctgcttattgcttttccgtgtcgtcttttgtgatgtgtctgttcgtgccttttgcctgtttttaagttgggatgcttattgttgactcaagttctttccatattctgcatgaaaaacatacatgtaatatatagaattctttgtctccatttgtgacaaatattgtgaatattttcatgtttggtttgcctgttcattttcttaatggtgtcttttgaatattttttattaagcctaatttatcaaagatttgggtgtggtggctcatgtctgtaatcccagcactttgggaggccaaggtaggcagatcacctgaggccagaagtttgagaccagcctggccaacgtggtgaaaccccgtctctactaaaaatacaaaaattatctgggcgggtggcacacccctgtagtccctgctactcgggaggctgaggcaggagaatcacttgaacccaggaggcagaggttgcagtaaaccaagataataataataatgatttatgatattttataataatttgagtttaagaaatttgcctactcaaaggacatgattttttcctatgttttttatttttatggaacttttatagttttaccttttacatttaagtctgtgatccattttgagttcatttttgtgtaccatatgtgataagggtcaagattcacttttttatctgtgtggttggttggttcggttctatttgttgagactctactttcccaatgaccaagtcttcacaggtttgtaaaaactgaagtgacatagaagtggtctgttctggacaccattcttcttgtgtgtataactttacaccaatatgacactatattgattactgtagttttatttgaggcagaaatctcattctgttgcccaggctggagcgtagtggcacaatcacagctaatgtaacctcgaacatccgggctcaagtgagcctctttccttagcctcccaagtagttgggactgtaggcatgcatcaccacatcttgctaatttttgtattttttgtggagatgggggtctcactatgttgaccaggctggtcttggaactcctggcctcaagggatcctcctgcctcagctcccaaagggattacaggtgtgagccaccactcctggccaactgtagttgaactcaggtattggaagggcttccgttttgttcttttcccattttttttttttgacttctagatcctttgcattttcgtataaaatttgaagtcaacttctatcaacttcaggccaggcccgtggctcatgcctgtataatcccagcactttgggaggccgaggcgggcggatcgcttgaggtcaggagttcaagaccagcctggccggggtggtgaaaccccatctctactaaaaatgcggaagagttagccaggcgtggtggcaggcgcctgtagaatcccagctgctcgggaggctgaggcaggagaattgcttgagcctgggaggtggaggtttcagtgagctgggatcgtggcattgcactctagcctgggcaaccaagagtgaaactgtctcaaaaaacaacttttatcaatgtctgcaaaaagaaagtcttctgggatttatagatcaatttagggagaaatgacattttaacaattctgagttttccaattgttgaacatggtgtactgccccatttatttagatctgttaatttctctcagtttgcagctctcacattttgttaaattcatgtatttaatatttctgcatgctattgcaagtggtaaggttttcaaaaagctgttttctagttattgctagtatatagaaatgcattagacttgtacattgatcttgtatcaagcaacttagatcagttaacttattctagtagcttttttctagattctttagcattttctatgtagataatcatgtcatctgtgaataaagtattttacttttccaattt

SEQ ID NO: 83868 - DNA, 445 bp, Homo sapiens
gtgtctgccatatctttgcatccttcaatgacacttttgtccatgtcacggatctttctggcaaacaaaccatctgccgtgtgactggtgggatgaaggtgaaggcagaccgagatgaatcctcgccatatgctgctatgttgaccacccaggatgtggcccagaggtgcaaggagctgggtatcattgccctacacatccaactccgggccacaggaggaaataggaccaagacccttggacctgggcccagtcggccctcagagcccttgcctgctcgggtatgaagatcgggaggattgaggacgtcacccccatcccctctgacagcactctcaggaagggggtcaccgtggtcgccgtctgtgaacaagattcctcaaaatattttctgttaataaattgccttcatgtaaaaaataaataaaaaaagtgaaacctgtaa

SEQ ID NO: 83869 - DNA, 341 bp, Homo sapiens
gcttcagcctcctgagtagctaggactataggtgtaccactatgcccagctaattaaaaaaaattgtttttagagatgggggtcttgctatcttgcccaggttggtctggaacacctggcctcaaattatccttctgcttcggcctcccaaagcactgggatgacaggtatgaaccactgtgctcagcctattttcttcctttagttgagccatgttgccttgtttttcgttttttttttttaagtgtgctttgttatttttttagtgatttctgcatttgaaaaacaacaacaacaacaacaacaacaaaggagttctcccagtctttacagagtagttt

SEQ ID NO: 83870 - DNA, 759 bp, Homo sapiens
ggcccacccttttccgcccccttgaggcatggcacacagaccagtgcgcccactgcccgagcatggccccagtgggatgtggtggccacgaggggctgtacacacagcaggaggctgtccgccctgctcagggcctgctgcctatgccccagctgtccaaccaagggaggcatggaagggcccctggtgtaagctggagccaggcacccaggcccccggccaccctgcagagccaaggaaaggaagacacccaagtcaacaaggggcagggctgagggctgtcccaggctcttttggcccgaggggctgccagcagccctgacccggcatgggccttccccaaaagcgaccctgtgaggtggcctcacagagaaccccctctgaggacagtgtctgaccctgcctgcctcacacagatgggccccacagcagtgggcaacctggggggcagcagcccaacctgaccctgcagggactgccccctgcagcagcagctgcttctcagtcccccaacctccctgtccccgccagagggtcttccccgaagctgcagccccaacccatggctgcccacctggaaccgggactccctgtccactgccccctccccttcggggccccatctgtgctggggcccaggttcggcctacagattcccatcattgccatggcctcctgaccttgcctatccacccccaaccaccggctccatgctgaccctcccccaggctcccacgcccagctggccggccatcccca

SEQ ID NO: 83871 - DNA, 297 bp, Homo sapiens
  misc_feature (241)..(242): n is a, c, g, or t
gctggagtgcagtggtacaatctcggctcattgcaacctccacctcccaggttcaagcaattctcctgcctcaggctcctgagtagttgggattacaggcacccaccaccacacccagctaatttttgtatttttagtagagacagggtttcaccatgttggccaggctggtctcgaactcctgacctcaggtgagccacccaccttggcctctcaaagtgctgggaatacaggcgtggcnntcgtgcctggtctaaaaaatgtctattagtgttccatcactagatctcttctgag

SEQ ID NO: 83872 - DNA, 408 bp, Homo sapiens
ttcctccagacaggtgatcaggtctggcttagagacagcaatatactcaggaagaccaggtttctgtagttccctaacatcacattcctatataaattctgctgtgcagtgtccaggcattgccattcctccagagataattctatggccacctccctaaatgtcaatgatctcatttctaggcttccagggggtcctgggcatcttagcagtggatctcccaatacctgcaggtcacagggccacagaggctgggcctcttaggaagcagaagaaacagagaagtaaacacaagactgggagctctggctgcagtgagagacaaaggcctgtgtttgtctttttgacagtttgattataatatgtctcaatgtggctatctttgagttcatcatacttggagtttgt

SEQ ID NO: 83873 - DNA, 4235 bp, Homo sapiens
gcgctctcaggcgggctccggcggcagcgacgcgagcgcggcgatggggagcggcggcgtggtccactgtaggtgtgccaagtgtttctgttatcctacaaagcgaagaataaggaggaggccccgaaacctgaccatcttgagtctccccgaagatgtgctctttcacatcctgaaatggctttctgtagaggacatcctggccgtccgagctgtacactcccagctgaaggacctggtggacaaccacgccagtgtgtgggcatgtgccagcttccaggagctgtggccgtctccagggaacctgaagctctttgaaagggctgctgaaaaggggaatttcgaagctgctgtgaagctgggcatagcctacctctacaatgaaggcctgtctgtgtctgatgaggcccgcgcagaagtgaatggcctgaaggcctctcgcttcttcagtctcgctgagcggctgaatgtgggtgccgcacctttcatctggctcttcatccgccctccgtggtcggtgagcggaagctgctgcaaggccgtggttcacgagagcctcagggcagagtgccagctgcagaggactcacaaagcatccatattgcactgcttgggcagagtgctgagtctgttcgaggatgaggagaagcagcagcaggcccatgacctgtttgaggaggctgctcatcagggatgtctgaccagctcctacctcctctgggaaagcgacaggaggacagatgtgtcagatcctgggcgatgcctccacagcttccgaaaactcagggactacgctgccaaaggctgctgggaagcgcagctgtctttagccaaagcctgtgcaaatgcaaaccagcttggactggaggtgagagcttccagtgagatcgtctgccagctatttcaggcttcccaggctgtcagtaaacaacaagtcttctccgtgcagaagggactcaatgacacaatgaggtacattctgatcgactggctggtggaagttgccaccatgaaggacttcacaagcctgtgcctgcacctgaccgtggagtgtgtggaccggtacctgcggaggaggctggtgccgcggtacaggctccagctgctgggcatcgcctgcatggtcatctgcacccggtttatcagtaaagagatcctgaccatccgggaggccgtatggctcacggacaacacttacaagtacgaggacctggtgagaatgatgggcgagatcgtctccgccttggaagggaagattcgagtccccactgtggtggattacaaggaggtcctgctgacgctagtccctgtggagctgagaacccagcacctgtgcagcttcctctgcgagctctccctgctgcacaccagcctgtccgcctacgccccagcccgcctggctgccgcagccctgctcctggccagactgacgcacgggcagacacagccctggaccactcagctgtgggacctcaccggattctcctatgaagacctcattccctgcgtcttgagcctccataagaagtgcttccatgatgacgcccccaaggactacaggcaagtctctctgaccgccgtgaagcagcggtttgaggacaagcgctatggagaaatcagccaggaagaggtgctgagctacagccagttgtgtgctgcattaggagtgacacaagacagccccgaccccccgactttcctcagcacaggggagatccacgccttcctcagctctccctcggggcggagaaccaaacggaagcgggagaacagcctccaggaagacagaggcagcttcgttaccacccccactgcggagctgtccagccaggaggagacgctgctgggcagcttcctcgactggagcctggactgctgctctggctatgaaggcgaccaggagagtgagggcgagaaggagggcgacgtgacagctcccagcggcatcctcgatgtcaccgtggtctacctgaacccagaacagcattgctgccaggaatccagtgatgaggaggcttgtccagaggacaagggaccccaggacccacaggcactggcgctggacacccagatccctgcaacccctggacccaaacccctggtccgcaccagccgggagccagggaaggacgtcacgacctcagggtactcctccgtcagcaccgcaagtcccacaagctccgtggacggtggcttgggggccctgccccaacctacctcagtgctgtccctggacagtgactcgcacacacagccctgccaccatcaggccaggaagtcatgtttacagtgtcgtcccccaagtcccccggagagcagtgttccccagcaacaggtgaagcggataaacctatgcatacacagtgaggaggaggacatgaacctgggccttgtgaggctgtaagtgtgtcagcacatttgccgcagtggatgtgtactgagggggctggaggcgaagggtgggagcatagcataggaacgctgcatagaccatggaggcctttgcgcagagagcagagaggatgacttgcggccaccaagtttctgtctccgcgggagtcccgtgcaagccatcagaatgttgaaatgagggtgaagagctcagatccctctctttggaaagtttagcctggaagcagttggccacactgtgtggagggcacctctctgtcccttccgtgtctcactgtctctggaagcttcagcccatgtgtgtcctggtgttcccagccccaccagagccccgtgccgggagctgacagctttcacgcttaaggcacgtgtgacctgggtagtcagacaccacttgagcccctgcccacatctgctggtttggggcttcagtggggagctgacagctgtgagcacaccactgtcccctcatccacctcggcctgcatggggcacccacttccttctgggtggggcttccatggtaagggggcctgcgtccctgcacactgcgaggactgccttggccacaggcccactccctacgacacgtgactcgttttagagctctgtcccagaggcgttcgtatgtgacccacagatggcgtcaatgtgaacacctctctttgtgctgaatttctgggccattcttttcctgtcttatttctaaatttccttcttccaagatgaaaacaaaagaaaaacttaaaacagaaggtattaaaaaaacaagagattcccaccattatttaggttcacctgcaaaacaaaaatcttactccagcccctcaatgccatcctgacacactttatgcaaaaagaattttcccagataggctagccagaaaaaacttcaagtcctctgtaacatctgaggtgaccaagaggcagaagagcagagcagtcgggggccgtgtcctggctgatcccaactgcagctctgctgtgggggcccgtgggagggaggcagacccctgggctttcctgctggccacggagactctgctcctgcatggaaagggagcctgggagccagcagcccacgcctggggagcctgcctggggccatgtgaccatggcctctccctgggaacgggctgaccacaacacaccctgctgccatccacttctgtttactctgcaaatgtaagaaagaaccacttggccagaagtgtcccccagatgcttttttttttttttttttggagacagttttgctcttgtctccccggttggagtgcagtggcatgatctcaactctcaactcactgtaacctccgcctcccggatactcctgcctcagcctcctgggtagctgggattacaagcacccaaccacgcccagctaatttttgtattttcggtagagacgggatttcaccatgttggccaggctagtctcgaactcatgacctcaagtgatccgcccacttcggtctcccaaagtgctgggattacaggcatgagccacggcgcctggcccccaaatgctcttgaaccggaaacccagggatgggagatgctcactgagctgctgcttttatgtgtgctggtgctatgtgtgttcatgtccgcggcagctgtctttttgctactataagggaattctggccaccctgggtggggtgtggtcggggtgagaacccaagcgttggaactgtagacccgtcctgtcgactgtgtgcccctgggcatgtgtgagcctcagtttcctcatctgtaaggggggcaatgatacctacctcacaggggtgttgtgaggattaaatgtgaggaggatagtg

SEQ ID NO: 83874 - DNA, 814 bp, Homo sapiens
ctacacttttttttttttgtgatttaacgggcttttattcacacagttgtgcttgtcatcacaacaatcaaattgatgacattttcactttccccaaagggacaacacacccctcagctgtcaccctcccgttccccccaacttcctcagcgctagatgacccccagtagtctactttctgtccatggatgtttcccattctgtacattccatataaatggcgtcatcggacaagtggccttctgtgtctaggtgatttccctcgcggtaacgtttgctgggtttgtccatgtggtgtgtgtccctgctttgttctttttcatggctgaataatattcccctgcatggaccacatgtgtttatccatcccgcagctggtggacattttgcctattgtgaacagtcctgccatgaacattctagtacaggtttctgtgtggacatagtttttcctttttcctgggtctttacctagagaggaattgctaggtcctgtggtgactgagtttaaccattcggggaactgcccaggtcagattccagagtgactgcaccattttgcattctcattgctcacttcagtgaactgaagctaaaaatggggtgggggtgcctcacatgtccactccacgtgactctgtttccagcttccatgatgacgcccccaaggactacaggcaagtctctctgaccgccgtgaagcagcggtttgaggacaagcgctatggagaaatcagccaggaagaggtgcctccctcccgccacctgggcgtctcatggggtgctggggtgtgggcgggcctcaccctctggc

SEQ ID NO: 83875 - DNA, 3352 bp, Homo sapiens
ctacacttttttttttttgtgatttaacgggcttttattcacacagttgtgcttgtcatcacaacaatcaaattgatgacattttcactttccccaaagggacaacacacccctcagctgtcaccctcccgttccccccaacttcctcagcgctagatgacccccagtagtctactttctgtccatggatgtttcccattctgtacattccatataaatggcgtcatcggacaagtggccttctgtgtctaggtgatttccctcgcggtaacgtttgctgggtttgtccatgtggtgtgtgtccctgctttgttctttttcatggctgaataatattcccctgcatggaccacatgtgtttatccatcccgcagctggtggacattttgcctattgtgaacagtcctgccatgaacattctagtacaggtttctgtgtggacatagtttttcctttttcctgggtctttacctagagaggaattgctaggtcctgtggtgactgagtttaaccattcggggaactgcccaggtcagattccagagtgactgcaccattttgcattctcattgctcacttcagtgaactgaagctaaaaatggggtgggggtgcctcacatgtccactccacgtgactctgtttccagcttccatgatgacgcccccaaggactacaggcaagtctctctgaccgccgtgaagcagcggtttgaggacaagcgctatggagaaatcagccaggaagaggtgctgagctacagccagttgtgtgctgcattaggagtgacacaagacagccccgaccccccgactttcctcagcacaggggagatccacgccttcctcagctctccctcggggcggagaaccaaacggaagcgggagaacagcctccaggaagacagaggcagcttcgttaccacccccactgcggagctgtccagccaggaggagacgctgctgggcagcttcctcgactggagcctggactgctgctctggctatgaaggcgaccaggagagtgagggcgagaaggagggcgacgtgacagctcccagcggcatcctcgatgtcaccgtggtctacctgaacccagaacagcattgctgccaggaatccagtgatgaggaggcttgtccagaggacaagggaccccaggacccacaggcactggcgctggacacccagatccctgcaacccctggacccaaacccctggtccgcaccagccgggagccagggaaggacgtcacgacctcagggtactcctccgtcagcaccgcaagtcccacaagctccgtggacggtggcttgggggccctgccccaacctacctcagtgctgtccctggacagtgactcgcacacacagccctgccaccatcaggccaggaagtcatgtttacagtgtcgtcccccaagtcccccggagagcagtgttccccagcaacaggtgaagcggataaacctatgcatacacagtgaggaggaggacatgaacctgggccttgtgaggctgtaagtgtgtcagcacatttgccgcagtggatgtgtactgagggggctggaggcgaagggtgggagcatagcataggaacgctgcatagaccatggaggcctttgcgcagagagcagagaggatgacttgcggccaccaagtttctgtctccgcgggagtcccgtgcaagccatcagaatgttgaaatgagggtgaagagctcagatccctctctttggaaagtttagcctggaagcagttggccacactgtgtggagggcacctctctgtcccttccgtgtctcactgtctctggaagcttcagcccatgtgtgtcctggtgttcccagccccaccagagccccgtgccgggagctgacagctttcacgcttaaggcacgtgtgacctgggtagtcagacaccacttgagcccctgcccacatctgctggtttggggcttcagtggggagctgacagctgtgagcacaccactgtcccctcatccacctcggcctgcatggggcacccacttccttctgggtggggcttccatggtaagggggcctgcgtccctgcacactgcgaggactgccttggccacaggcccactccctacgacacgtgactcgttttagagctctgtcccagaggcgttcgtatgtgacccacagatggcgtcaatgtgaacacctctctttgtgctgaatttctgggccattcttttcctgtcttatttctaaatttccttcttccaagatgaaaacaaaagaaaaacttaaaacagaaggtattaaaaaaacaagagattcccaccattatttaggttcacctgcaaaacaaaaatcttactccagcccctcaatgccatcctgacacactttatgcaaaaagaattttcccagataggctagccagaaaaaacttcaagtcctctgtaacatctgaggtgaccaagaggcagaagagcagagcagtcgggggccgtgtcctggctgatcccaactgcagctctgctgtgggggcccgtgggagggaggcagacccctgggctttcctgctggccacggagactctgctcctgcatggaaagggagcctgggagccagcagcccacgcctggggagcctgcctggggccatgtgaccatggcctctccctgggaacgggctgaccacaacacaccctgctgccatccacttctgtttactctgcaaatgtaagaaagaaccacttggccagaagtgtcccccagatgcttttttttttttttttttggagacagttttgctcttgtctccccggttggagtgcagtggcatgatctcaactctcaactcactgtaacctccgcctcccggatactcctgcctcagcctcctgggtagctgggattacaagcacccaaccacgcccagctaatttttgtattttcggtagagacgggatttcaccatgttggccaggctagtctcgaactcatgacctcaagtgatccgcccacttcggtctcccaaagtgctgggattacaggcatgagccacggcgcctggcccccaaatgctcttgaaccggaaacccagggatgggagatgctcactgagctgctgcttttatgtgtgctggtgctatgtgtgttcatgtccgcggcagctgtctttttgctactataagggaattctggccaccctgggtggggtgtggtcggggtgagaacccaagcgttggaactgtagacccgtcctgtcgactgtgtgcccctgggcatgtgtgagcctcagtttcctcatctgtaaggggggcaatgatacctacctcacaggggtgttgtgaggattaaatgtgaggaggatagtg

SEQ ID NO: 83876 - DNA, 4449 bp, Homo sapiens
gcgctctcaggcgggctccggcggcagcgacgcgagcgcggcgatggggagcggcggcgtggtccactgtaggtgtgccaagtgtttctgttatcctacaaagcgaagaataaggaggaggccccgaaacctgaccatcttgagtctccccgaagatgtgctctttcacatcctgaaatggctttctgtagaggacatcctggccgtccgagctgtacactcccagctgaaggacctggtggacaaccacgccagtgtgtgggcatgtgccagcttccaggagctgtggccgtctccagggaacctgaagctctttgaaagggctgctgaaaaggggaatttcgaagctgctgtgaagctgggcatagcctacctctacaatgaaggcctgtctgtgtctgatgaggcccgcgcagaagtgaatggcctgaaggcctctcgcttcttcagtctcgctgagcggctgaatgtgggtgccgcacctttcatctggctcttcatccgccctccgtggtcggtgagcggaagctgctgcaaggccgtggttcacgagagcctcagggcagagtgccagctgcagaggactcacaaagcatccatattgcactgcttgggcagagtgctgagtctgttcgaggatgaggagaagcagcagcaggcccatgacctgtttgaggaggctgctcatcagggatgtctgaccagctcctacctcctctgggaaagcgacaggaggacagatgtgtcagatcctgggcgatgcctccacagcttccgaaaactcagggactacgctgccaaaggctgctgggaagcgcagctgtctttagccaaagcctgtgcaaatgcaaaccagcttggactggaggtgagagcttccagtgagatcgtctgccagctatttcaggcttcccaggctgtcagtaaacaacaagtcttctccgtgcagaagggactcaatgacacaatgaggtacattctgatcgactggctggtggaagttgccaccatgaaggacttcacaagcctgtgcctgcacctgaccgtggagtgtgtggaccggtacctgcggaggaggctggtgccgcggtacaggctccagctgctgggcatcgcctgcatggtcatctgcacccggtttatcagtaaagagatcctgaccatccgggaggccgtatggctcacggacaacacttacaagtacgaggacctggtgagaatgatgggcgagatcgtctccgccttggaagggaagattcgagtccccactgtggtggattacaaggaggtcctgctgacgctagtccctgtggagctgagaacccagcacctgtgcagcttcctctgcgagctctccctgctgcacaccagcctgtccgcctacgccccagcccgcctggctgccgcagccctgctcctggccagactgacgcacgggcagacacagccctggaccactcagctgtgggacctcaccggattctcctatgaagacctcattccctgcgtcttgagcctccataagaagtgcttccatgatgacgcccccaaggactacaggcaagtctctctgaccgccgtgaagcagcggtttgaggacaagcgctatggagaaatcagccaggaagaggtgctgagctacagccagttgtgtgctgcattaggagtgacacaagacagccccgaccccccgactttcctcagcacaggggagatccacgccttcctcagctctccctcggggcggagaaccaaacggaagcgggagaacagcctccaggaagacagaggcagcttcgttaccacccccactgcggagctgtccagccaggaggagacgctgctgggcagcttcctcgactggagcctggactgctgctctggctatgaaggcgaccaggagagtgagggcgagaaggagggcgacgtgacagctcccagcggcatcctcgatgtcaccgtggtctacctgaacccagaacagcattgctgccaggaatccagtgatgaggaggcttgtccagaggacaagggaccccaggacccacaggcactggcgctggacacccagatccctgcaacccctggacccaaacccctggtccgcaccagccgggagccagggaaggacgtcacgacctcagggtactcctccgtcagcaccgcaagtcccacaagctccgtggacggtggcttgggggccctgccccaacctacctcagtgctgtccctggacagtgactcgcacacacagccctgccaccatcaggccaggaagtcatgtttacagtgtcgtcccccaagtcccccggagagcagtgttccccagcaacaggtgaagcggataaacctatgcatacacagtgaggaggaggacatgaacctgggccttgtgaggctgtaagtgtgtcagcacatttgccgcagtggatgtgtactgagggggctggaggcgaagggtgggagcatagcataggaacgctgcatagaccatggaggcctttgcgcagagagcagagaggatgacttgcggccaccaagtttctgtctccgcgggagtcccgtgcaagccatcagaatgttgaaatgagggtgaagagctcagatccctctctttggaaagtttagcctggaagcagttggccacactgtgtggagggcacctctctgtcccttccgtgtctcactgtctctggaagcttcagcccatgtgtgtcctggtgttcccagccccaccagagccccgtgccgggagctgacagctttcacgcttaaggcacgtgtgacctgggtagtcagacaccacttgagcccctgcccacatctgctggtttggggcttcagtggggagctgacagctgtgagcacaccactgtcccctcatccacctcggcctgcatggggcacccacttccttctgggtggggcttccatggtaagggggcctgcgtccctgcacactgcgaggactgccttggccacaggcccactccctacgacacgtgactcgttttagagctctgtcccagaggcgttcgtatgtgacccacagatggcgtcaatgtgaacacctctctttgtgctgaatttctgggccattcttttcctgtcttatttctaaatttccttcttccaagatgaaaacaaaagaaaaacttaaaacagaaggtattaaaaaaacaagagattcccaccattatttaggttcacctgcaaaacaaaaatcttactccagcccctcaatgccatcctgacacactttatgcaaaaagaattttcccagataggctagccagaaaaaacttcaagtcctctgtaacatctgaggtgaccaagaggcagaagagcagagcagtcgggggccgtgtcctggctgatcccaactgcagctctgctgtgggggcccgtgggagggaggcagacccctgggctttcctgctggccacggagactctgctcctgcatggaaagggagcctgggagccagcagcccacgcctggggagcctgcctggggccatgtgaccatggcctctccctgggaacgggctgaccacaacacaccctgctgccatccacttctgtttactctgcaaatgtaagaaagaaccacttggccagaagtgtcccccagatgcttttttttttttttttttggagacagttttgctcttgtctccccggttggagtgcagtggcatgatctcaactctcaactcactgtaacctccgcctcccggatactcctgcctcagcctcctgggtagctgggattacaagcacccaaccacgcccagctaatttttgtattttcggtagagacgggatttcaccatgttggccaggctagtctcgaactcatgacctcaagtgatccgcccacttcggtctcccaaagtgctgggattacaggcatgagccacggcgcctggcccccaaatgctcttgaaccggaaacccagggatgggagatgctcactgagctgctgcttttatgtgtgctggtgctatgtgtgttcatgtccgcggcagctgtctttttgctactataagggaattctggccaccctgggtggggtgtggtcggggtgagaacccaagcgttggaactgtagacccgtcctgtcgactgtgtgcccctgggcatgtgtgagcctcagtttcctcatctgtaaggggggcaatgatacctacctcacaggggtgttgtgaggattaaatgtgaggaggatagtgaaaaaaaaaaaaaaaaaaaaaaaccccggagggccccataggccggggggcgggaaaacaggggcgtacctgacagggcgccatgggcccaatacgcggtccctggacccagcttccctggtcccaggggggaaacacccggcgggggcccccaataaggagaggcggaataaacttccgaaaaaccgcaggttaccgtgtagagccccccgca

SEQ ID NO: 83877 - DNA, 405 bp, Homo sapiens
ttaatttttatttttgaccacttatccaagttctatgtagcactgttttttttgagatggagtctcgctctgtcgcctgtgctggagtgcagtggtgtgatcttggctcactgcaacctccggctcctgggttcaagcaattctcctgcctcagcctcctgagtagctgggattacaggaacctgccaccactcccagctaatttttgtatttttagtagagatggggtttcaccatgtttgccaggctggtctcgaactcctgacctcaggtgatccacctgcctcggcctcctgaagtgctgggattgcaagctatgcagcactgtttttatagcaaaacattggactaactaaacgtctatccacaagagacaagttggttagtaaatggctgtaattctat

SEQ ID NO: 83878 - DNA, 888 bp, Homo sapiens
ctcttggtttccgctatcgggtaagaggtggtaattttgaggtcatattaggtggcctgtctgaaaatggctggaaacccgagtacactttttcttctaactatgtcaagctcttggggtttgtcttaagaagtcccatcccttcgaggcttttgccgtctcaactcttgttgcctgattagtcctagaaaagctcagtcccaagagggcctacctcgtatcacagattcacaggtctgtgactggaagcctccacaaatttgtgggttactggaggcaaacatcatccttaaccatctgtggcctactccttacattgaacttttttcttggaggggagtctttgggattgcctcttctatgcccttcccaggaagttaacctggaaaatgacatcctgggctttccacaaagaggctatttggttgaattgctattggaataattataccattggatattctagttgccaatggcctgaagatggatcccttaaattagacacctgaattaaaaaaaaaaaattagagatctcttatttgaaacagttgataggaagatcaaattaaaagaaaggcacatactagtgtgatagctacccttaaaaattctcttgacaatattatctgtcttgtgtagggaaaaaattctcttgactaaattaaagagcaaaatttgatccaaaacaaagttaaaattcttcataagctcaaactgcctgctctggatcccttccaggattcacaataaagtctgctctaccttgcagtttagtacttaaagttctgtgcttttgctgccatagcctgggttcaatttccagtcagggaaccagtttattttggcttgatatttgtgtgacttttgactttttggaatacccattta

SEQ ID NO: 83879 - DNA, 419 bp, Homo sapiens
ttcagacatctctagcagcgaacactttgaccattaccagacatgctgagacaaagcagctaacagaaatgccacccagtgtcttaaaccagcttggtgtcaacaagcttaaggaaactggcagaagctggatggaaaagtaccacttactattggggaagtggtgatcttgttcagaattttgatgaagcttccaacagtgaggcaaactgaattgattcagcttctaaaaaataatacaatttcaagaattttaactgcttttaaaatttttgttttatatatgataaaatgtaagtctataaattccaagacccttggacactgctttttaattattgattatatacagttatttattggcaattaattagccagaaaatagtttaaaacaaagataaagcctttgcctagttaaa

SEQ ID NO: 83880 - DNA, 193 bp, Homo sapiens
gctataaactgaactaccacagagtctcaatgaagccaaattaacgaaactttatgtatattatccccaaatgcggtgagggagtatttaaatgtaagacattcaaaatattgcccattttagtaacattcttcaaagaccattggtttgacactgaaggagaaaaaaattgaaaaagtcatgattttacttt

SEQ ID NO: 83881 - DNA, 400 bp, Homo sapiens
catttatattcttgagaaaacatataccatacatagattttaaaaaggattttatcagaatatttaaataatttctaaaactcagtaatagcttttgtgtttaaacctatggtctttttcaaattatgtttgagtattgtgagagatgtatttgaagttgttttttcccctcatatggatatccagttgtttcaataccttttgttgaaatgactttccttttggtgtctttgtaaaaagtgactatataattgtgtgtctatttctggactcttaattctattccactgacctatttgtctatccttatgcaacattactgtgtcttggatactataacttttagaataagttttgacatcaggtaatgtgaatactccaattttgttcttatttttca

SEQ ID NO: 83882 - DNA, 460 bp, Homo sapiens
ccttcacttatgaagctaagtttggctggatatgaaattctggattgaaaattcttttctttaagaatgttgaatatcggcccccactctcttctggcttgtagagtttctgccaagagatccgctgttagtctgatgggcttccctttgtgggtaacccgacctttctctctggctgcccttaaaaatgttattttcaaaatgttcaaaagtttatttaatttttagcctttcaattttgtgaacaaagaggctgttcttgaagtttaggctctgtgttggcttgatgaaaggatatcactatttaaaagggctgaaagtttgcctgtacatactgttgagattttctgcatgaaacacaagaatgtaaaataactatagattaaactagatagaatcttaaatttcttgcatgttcaggtactcaagttccttgcaatcaccacctggccatctttag

SEQ ID NO: 83883 - DNA, 573 bp, Homo sapiens
cattgagcatcttcagggtgttactctttccttattttactatccaagagctccagaatccctttattccccatcccaaggccacttaaaaaattactaagtgaacaattactaaaaattgctactagaatgaatatatttaaaaatatgcttaaatttcagtattgtcctatacaaaaccatttctcttcgtaggaagagaactatttcattgggctacattgagcatcttcagggtgttactctttccttattttactatccaagagctccagaatccctttattccccatcccaaggccacttaaaaaattactaagtgaacaattactaaaaattgctactagaatgaatatatttaaaaatatgcttaaatttcagtattgtcctatacaaaaccatttctcttcgtaggaagagaactatttcaagaacctcactatttcaagaaccttattttgccattacttctttgttagcatcttcacatgcacagtgagtctggaaagatttccagcctcttttcttccattttgaattctcagagggcaatattttgcttgattttaaaag

SEQ ID NO: 83884 - DNA, 787 bp, Homo sapiens
caaaccctaaggcttctgaggatagcacttgactggagacaaggtcaccttggccagcaggattgcaacaaaggaagaatgaggttgaaacctcagaattggtcgtcagaattgtatttcaccacagtctccacacagggtcagacttttccagtgagaaagtctgcctttgtcccttgtcttatggtgtaatgtgtacccttggcccacttctcacagtaaatgctagccttggatgagctcatcctttcccggggcttcagtcagcatgtcggtgcaaatgactcacaaaccctcaactccagtcctccggcagctactaagctccacagctgcacttgcagctgctcagtcactcctaggtggatattccacaggcactttacactcaacacatcctattctctcccaacttcttattccccaaactacttctcctttggtttctaatctcaataatcaataccaatatacttctagttactcagtcttgaaaccaccatcttcccccaaaatgtctctcaggtccacttttctgctccactgccctagttaaggccctattgcctggcttggattgtaatacatatctaatatctgtgtcccctttccacctcctccagctcatccttcaaactacctccaggtgtctgatagggttactcctagatcagaagtcctgacaggttccccactgcctaaagtggggactccataaaatggcattcaaggctttccacactcttatcccattcttaccatccgtatcctgttcttagcatcccca

SEQ ID NO: 83885 - DNA, 263 bp, Homo sapiens
gttcaagcaattctgtctcagcctcctgagtagctgggactacaggcacacgccaccacgtccagctaatttttgtatttttagtagagatggcatttcaccgcattggtcaggctggtctcaaactcctggcctcaggagatctactgccttggcctcccaaagtgttgggattacaggcgtgagccaccacgcccggcctattttattttattattaaagtattgttctttattttattagagacaagggtctcactgtgt

SEQ ID NO: 83886 - DNA, 2852 bp, Homo sapiens
  misc_feature (1639)..(1639): n is a, c, g, or t
gcgcgggaggcggtaccaacccctgccgcaggactttcctgggccggctcgcggagagcgtagcgcggccttggtggcggaatggcgttgagtgacggcccggccccgccatctggttaaagggactcgttcaacacggaagtgtcccggggctgcattgtgctacagctagaatgaagcacatcaacctatcatttgcagcgtgtggatttctgggcatttaccacttgggggcagcatctgcactttgcagacatggcaaaaaacttgtgaaggatgtcaaagccttcgctggggcgtctgcgggatcgttggttgcttctgttctgctaacagcaccagaaaaaatagaggaatgtaaccaatttacctacaagtttgccgaagaaatcagaaggcagtctttcggggcagtaacgcccggttatgacttcatggcccgactaagaagtgggatggagtcgattcttcctcccagcgctcacgagctggcccagaaccgactgcacgtatccatcaccaacgccaaaaccagagaaaatcacttagtctccactttttcctccagggaggacctcattaaggtcctcctagccagcagttttgtgcccatttatgcaggactgaagctagtggaatacaaagggcagaagtgggtggacggaggcctcaccaacgctcttcccatcctgcccgtcggccggacagtaaccatctcccccttcagtggacgactggacatctccccgcaggacaaagggcagctagatctgtatgttaatatcgccaagcaggatatcatgttgtccctggcaaacctggtgagactcaaccaagccctttttcccccaagcaagaggaaaatggaatctttgtatcagtgtggttttgatgacactgttaagtttttacttaaagaaaattggtttgaataaaatgcataaaagtttataatgcaaaacacgttttagatagtttttgatggaagtttctaatcaaatcctttttagaaaatctatcatgactcaattgtattactccttgtaatatttgtgtttatttttaatatttgaattattacttagcacatggatataagaggcactttattagaatttgacaacgtcattaagaaggatacacttaggtgataaggaatcatttttggtgaactgttgtgtcctttaaaaaatggaggaggataggttctttgggtaaattgaggaacatggaaaatggagggccaccacttaggttccatggagaatatgtggcatgatcttgacgtgaagcatgggtgtttccgtgacttagctgtgtccctgtagctctggaactgaaggaactaggtaggagaggaaggatttgagaaataggcaactcatggttaaagacctttgatcaggactggaggaacaaaggtttgtgtattagtccattttcacactgctgagaaagacatacccaagactgggcaatttacaaaagaaaggtttaatgggctcacagttccacatgactgaggaggcctcacaattgtggtggaaggtgaaaggcatgtctcacatggcagcagacaagagaagaaaacttgtgcagggaaactcccctttataaaaccatcggatctcttgagacncgttcactatcatgagaatagcatgggaaagacctgcctccatgattcagttacctcccactgggtccctcccacaacgtgtggcaattgtgggagctacatacacttcaagatgagatttgggtggggacacagccaaaccataacagtttgctttccacaggtgtgtgcagttgctcccagtgcagttaggggcagatatccagaagcctaggagattttgaagaggcttatcccctctcatcttcctcccctaaaccccaccccagtttaggagattatcaagctggttgtcattcattctctctctctctctctctctctctctctctctctctctctctctctcgccatacctctctgagtatttagctattgttctatatactggatacatctattatgggaacttaaatagataaaatactactaaacacaaagaaccaagtagcctagtaaataagaattaaatccagaataatcattcacttctcatttttaaatcacgttgtactgatcccaggttttttactttctgagtagttgtccatcactttgaggacttgtgtatgggcttgtaccaatttactgacactgtcttaaatcctaaatctgtttttatgaggttttgccaagcaagaactcttgattactaagaggcagttagagacaaaccaatttaattccatgtcttcaattgtcacgcatttcttcttttactctttgaaactattctttgagtcaattttatggttctcagaagccaaaatacacaacttttagcacataaacaccaacgatggcctctttttgaggagttatgcatagacccactctagagtaatgatggtccctgtggtatatactttctcctactctagcaaacatgtagtttaatcttaatgtgttgtttccataagtgacatgaagtggatagattctcaattgttatgtccacttattcactaggtaaattttcagttttaatacttttctccttaccccttcctttgatcatttcatgtgaatattctatttgtatgatacactgtatttcaataaattccttgttgatgtacccttaaattgaagaaatttaagctgcaaaaccaaatctcattgtataagacttttttgaagtatcttgtatcgactacatatgtatttgaccctgtgggaggatggtacttttctttttaacttttattttaag

SEQ ID NO: 83887 - DNA, 2730 bp, Homo sapiens
  misc_feature (1517)..(1517): n is a, c, g, or t
gagggtaaggcacttccggggcacagaaaatgaggattattaaaggtcagttgctcgcagtgctacagctagaatgaagcacatcaacctatcatttgcagcgtgtggatttctgggcatttaccacttgggggcagcatctgcactttgcagacatggcaaaaaacttgtgaaggatgtcaaagccttcgctggggcgtctgcgggatcgttggttgcttctgttctgctaacagcaccagaaaaaatagaggaatgtaaccaatttacctacaagtttgccgaagaaatcagaaggcagtctttcggggcagtaacgcccggttatgacttcatggcccgactaagaagtgggatggagtcgattcttcctcccagcgctcacgagctggcccagaaccgactgcacgtatccatcaccaacgccaaaaccagagaaaatcacttagtctccactttttcgtcctcctagccagcagttttgtgcccatttatgcaggactgaagctagtggaatacaaagggcagaagtgggtggacggaggcctcaccaacgctcttcccatcctgcccgtcggccggacagtaaccatctcccccttcagtggacgactggacatctccccgcaggacaaagggcagctagatctgtatgttaatatcgccaagcaggatatcatgttgtccctggcaaacctggtgagactcaaccaagccctttttcccccaagcaagaggaaaatggaatctttgtatcagtgtggttttgatgacactgttaagtttttacttaaagaaaattggtttgaataaaatgcataaaagtttataatgcaaaacacgttttagatagtttttgatggaagtttctaatcaaatcctttttagaaaatctatcatgactcaattgtattactccttgtaatatttgtgtttatttttaatatttgaattattacttagcacatggatataagaggcactttattagaatttgacaacgtcattaagaaggatacacttaggtgataaggaatcatttttggtgaactgttgtgtcctttaaaaaatggaggaggataggttctttgggtaaattgaggaacatggaaaatggagggccaccacttaggttccatggagaatatgtggcatgatcttgacgtgaagcatgggtgtttccgtgacttagctgtgtccctgtagctctggaactgaaggaactaggtaggagaggaaggatttgagaaataggcaactcatggttaaagacctttgatcaggactggaggaacaaaggtttgtgtattagtccattttcacactgctgagaaagacatacccaagactgggcaatttacaaaagaaaggtttaatgggctcacagttccacatgactgaggaggcctcacaattgtggtggaaggtgaaaggcatgtctcacatggcagcagacaagagaagaaaacttgtgcagggaaactcccctttataaaaccatcggatctcttgagacncgttcactatcatgagaatagcatgggaaagacctgcctccatgattcagttacctcccactgggtccctcccacaacgtgtggcaattgtgggagctacatacacttcaagatgagatttgggtggggacacagccaaaccataacagtttgctttccacaggtgtgtgcagttgctcccagtgcagttaggggcagatatccagaagcctaggagattttgaagaggcttatcccctctcatcttcctcccctaaaccccaccccagtttaggagattatcaagctggttgtcattcattctctctctctctctctctctctctctctctctctctctctctctctcgccatacctctctgagtatttagctattgttctatatactggatacatctattatgggaacttaaatagataaaatactactaaacacaaagaaccaagtagcctagtaaataagaattaaatccagaataatcattcacttctcatttttaaatcacgttgtactgatcccaggttttttactttctgagtagttgtccatcactttgaggacttgtgtatgggcttgtaccaatttactgacactgtcttaaatcctaaatctgtttttatgaggttttgccaagcaagaactcttgattactaagaggcagttagagacaaaccaatttaattccatgtcttcaattgtcacgcatttcttcttttactctttgaaactattctttgagtcaattttatggttctcagaagccaaaatacacaacttttagcacataaacaccaacgatggcctctttttgaggagttatgcatagacccactctagagtaatgatggtccctgtggtatatactttctcctactctagcaaacatgtagtttaatcttaatgtgttgtttccataagtgacatgaagtggatagattctcaattgttatgtccacttattcactaggtaaattttcagttttaatacttttctccttaccccttcctttgatcatttcatgtgaatattctatttgtatgatacactgtatttcaataaattccttgttgatgtacccttaaattgaagaaatttaagctgcaaaaccaaatctcattgtataagacttttttgaagtatcttgtatcgactacatatgtatttgaccctgtgggaggatggtacttttctttttaacttttattttaag

SEQ ID NO: 83888 - DNA, 958 bp, Homo sapiens
gcgcgggaggcggtaccaacccctgccgcaggactttcctgggccggctcgcggagagcgtagcgcggccttggtggcggaatggcgttgagtgacggcccggccccgccatctggttaaagggactcgttcaacacggaagtgtcccggggctgcattgtgctacagctagaatgaagcacatcaacctatcatttgcagcgtgtggatttctgggcatttaccacttgggggcagcatctgcactttgcagacatggcaaaaaacttgtgaaggatgtcaaagccttcgctggggcgtctgcgggatcgttggttgcttctgttctgctaacagcaccagaaaaaatagaggaatgtaaccaatttacctacaagtttgccgaagaaatcagaaggcagtctttcggggcagtaacgcccggttatgacttcatggcccgactaagaagtgggatggagtcgattcttcctcccagcgctcacgagctggcccagaaccgactgcacgtatccatcaccaacgccaaaaccagagaaaatcacttagtctccactttttcctccagggaggacctcattaaggtcctcctagccagcagttttgtgcccatttatgcaggactgaagctagtggaatacaaagggcagaagtgggtggacggaggcctcaccaacgctcttcccatcctgcccgtcggccggacagtaaccatctcccccttcagtggacgactggacatctccccgcaggacaaagggcagctagatctgtatgttaatatcgccaagcaggatatcatgttgtccctggcaaacctggtgagactcaaccaagccctttttcccccaagcaagaggaaaatggaatctttgtatcagtgtggttttgatgacactgttaagtttttacttaaagaaaattggtttgaataaaatgcataaaagtttataatgca

SEQ ID NO: 83889 - DNA, 858 bp, Homo sapiens
gagggtaaggcacttccggggcacagaaaatgaggattattaaaggtcagttgctcgcagtgctacagctagaatgaagcacatcaacctatcatttgcagcgtgtggatttctgggcatttaccacttgggggcagcatctgcactttgcagacatggcaaaaaacttgtgaaggatgtcaaagccttcgctggggcgtctgcgggatcgttggttgcttctgttctgctaacagcaccagaaaaaatagaggaatgtaaccaatttacctacaagtttgccgaagaaatcagaaggcagtctttcggggcagtaacgcccggttatgacttcatggcccgactaagaagtgggatggagtcgattcttcctcccagcgctcacgagctggcccagaaccgactgcacgtatccatcaccaacgccaaaaccagagaaaatcacttagtctccactttttcctccagggaggacctcattaaggtcctcctagccagcagttttgtgcccatttatgcaggactgaagctagtggaatacaaagggcagaagtgggtggacggaggcctcaccaacgctcttcccatcctgcccgtcggccggacagtaaccatctcccccttcagtggacgactggacatctccccgcaggacaaagggcagctagatctgtatgttaatatcgccaagcaggatatcatgttgtccctggcaaacctggtgagactcaaccaagccctttttcccccaagcaagaggaaaatggaatctttgtatcagtgtggttttgatgacactgttaagtttttacttaaagaaaattggtttgaataaaatgcataaaagtttataatgca

SEQ ID NO: 83890 - DNA, 836 bp, Homo sapiens
gagggtaaggcacttccggggcacagaaaatgaggattattaaaggtcagttgctcgcagtgctacagctagaatgaagcacatcaacctatcatttgcagcgtgtggatttctgggcatttaccacttgggggcagcatctgcactttgcagacatggcaaaaaacttgtgaaggatgtcaaagccttcgctggggcgtctgcgggatcgttggttgcttctgttctgctaacagcaccagaaaaaatagaggaatgtaaccaatttacctacaagtttgccgaagaaatcagaaggcagtctttcggggcagtaacgcccggttatgacttcatggcccgactaagaagtgggatggagtcgattcttcctcccagcgctcacgagctggcccagaaccgactgcacgtatccatcaccaacgccaaaaccagagaaaatcacttagtctccactttttcgtcctcctagccagcagttttgtgcccatttatgcaggactgaagctagtggaatacaaagggcagaagtgggtggacggaggcctcaccaacgctcttcccatcctgcccgtcggccggacagtaaccatctcccccttcagtggacgactggacatctccccgcaggacaaagggcagctagatctgtatgttaatatcgccaagcaggatatcatgttgtccctggcaaacctggtgagactcaaccaagccctttttcccccaagcaagaggaaaatggaatctttgtatcagtgtggttttgatgacactgttaagtttttacttaaagaaaattggtttgaataaaatgcataaaagtttataatgca

SEQ ID NO: 83891 - DNA, 417 bp, Homo sapiens
agattgctttttcttctttagaagtgggatggagtcgattcttcctcccagcgctcacgagctggcccagaaccgactgcacgtatccatcaccaacgccaaaaccagagaaaatcacttagtctccactttttcctccagggaggacctcattaaggtaacaaagccatgtttcctatttgaagaaatcagcaagtgctgatttcaatacttcatataaagtaatgagcattaccacgttctttagatcctgtgtctcttaccaggcccgatagatggttgagtgctcagtaaattacttgtttgatgaaagtattcgccaggatccctcctgaggccgccttatgatgcactgtgatccaaatgctccctgtacttgttcagtgttttcctgcaatgttcagatctcacgttgat

SEQ ID NO: 83892 - DNA, 172 bp, Homo sapiens
gaagaatgcagcatgagagaggaaacagagccctgtggctttcctggactagattcaagtcctgctatcgtagtcacctcaggctgccataaaaaaatatcaaagactgggagccttaaacagcagatacttatttctcacagtgttggagtcttcaaagttcaagatcaag

SEQ ID NO: 83893 - DNA, 1440 bp, Homo sapiens
gaattccccccccccccccctcacttggtgtgtctatatgtctggcagacattatcagcacattctctgttgttacctgtgattcattttttcttcactctccaggtgaatttcaattgctgaaaatttcccactgaaaatatgcagtaatatattttgtggttcagacatttggggcaaatggttcacattcattttagggttagtggtcatgctgtttatttttctctgctatacaaagttcctcttaggggtctgcctcatgacactaaaaaatgaatagagattctactgtaggttatctcctaggcttgagttcaacatttgtttggatttttgaagaaagtcaaatcaagcaatgctcccaaatgatgtctttgtaaattcataccctctggccctattttttttcatagaccctaactctacctttctgctttaaagcaaagtaaactcggtggcctcttcttctccacccctcaaaatgatagcaatctctgccgtcagcagtgcactcctgttctcccttctctgtgaagcaagtaccgtcgtcctactcaattccactgactcatccccgccaaccaataatttcactgatattgaagcagctctgaaagcacaattagattcagcggatatccccaaagccaggcggaagcgctacatttcgcagaatgacatgatcgccattcttgattatcataatcaagttcggggcaaagtgttcccaccggcagcaaatatggaatatatggtttgggatgaaaatcttgcaaaatcggcagaggcttgggcggctacttgcatttgggaccatggaccttcttacttactgagatttttgggccaaaatctatctgtacgcactggaagatatcgctctattctccagttggtcaagccatggtatgatgaagtgaaagattatgcttttccatatccccaggattgcaaccccagatgtcctatgagatgttttggtcccatgtgcacacattatacgcagatggtttgggccacttccaatcggataggatgcgcaattcatacttgccaaaacatgaatgtttggggatctgtgtggcgacgtgcagtttacttggtatgcaactatgccccaaagggcaattggattggagaagcaccatataaagtaggggtaccatgttcatcttgtcctccaagttatgggggatcttgtactgacaatctgtgttttccaggagttacgtcaaactacctgtactggtttaaataagtttaccttttcctccaggaaatataatgatttctgggaacatgggcatgtatatatatatatggagagagaattttgcacatattatacatattttgtgctaatcttgttttcctcttagtattcctttgtataaattagtgtttgtctagcatgtttgtttaatcctttgggaattc

SEQ ID NO: 83894 - DNA, 1373 bp, Homo sapiens
gaattccccccccccccccctcacttggtgtgtctatatgtctggcagacattatcagcacattctctgttgttacctgtgattcattttttcttcactctccaggtgaatttcaattgctgaaaatttcccactgaaaatatgcagtaatatattttgtggttcagacatttggggcaaatggttcacattcattttagggttagtggtcatgctgtttatttttctctgctatacaaagttcctcttaggggtctgcctcatgacactaaaaaatgaatagagattctactgtaggttatctcctaggcttgagttcaacatttgtttggatttttgaagaaagtcaaatcaagcaatgctcccaaatgatgtctttgtaaattcataccctctggccctattttttttcatagaccctaactctacctttctgctttaaagcaaagtaaactcggtggcctcttcttctccacccctcaaaatgatagcaatctctgccgtcagcagtgcactcctgttctcccttctctgtgaagcaagtaccgtcgtcctactcaattccactgactcatccccgccaaccaataatttcactgatattgaagcagctctgaaagcacaattagattcagcggatatccccaaagccaggcggaagcgctacatttcgcagaatgacatgatcgccattcttgattatcataatcaagttcggggcaaagtgttcccaccggcagcaaatatggaatatatggtttgggatgaaaatcttgcaaaatcggcagaggcttgggcggctacttgcatttgggaccatggaccttcttacttactgagatttttgggccaaaatctatctgtacgcactggaagatatcgctctattctccagttggtcaagccatggtatgatgaagtgaaagattatgcttttccatatccccaggattgcaaccccagatgtcctatgagatgttttggtcccatgtgcacacattatacgcaggttatttcaattaccttgttaatttttgattcatacttttaaaatatgctaatactattttggtggacatgcattgtcttagctctgacttctgtaacagtttattggtttattttcacagatggtttgggccacttccaatcggataggatgcgcaattcatacttgccaaaacatgaatgtttggggatctgtgtggcgacgtgcagtttacttggtatgcaactatgccccaaagtaagtaccaggttggattctatttcctggatcctttaaagacgttaaatatccctaggctgatagttatctgtgacaggtaagtgagtaaggcttagctataatggcctctaatcctcaaatccac

SEQ ID NO: 83895 - DNA, 1953 bp, Homo sapiens
gattttagacaagtcaactcttctaaattggcttctcatctatgaaatggggataatagatctgcctaattaggttgatttgagataacggatgtaaaacacctaataaaataagcatccagcaaatgacttgttcactctctgaatacagacttctggtcatgtagttcggtcacactcctgatagcttctagaacatcagggttttaggagaaataggttaaaatgaacatcaagagtagcagaagactactttccttaatatttgagtgccagctatatgccacacagttctagttgctggcagtcagcagtaaacaaaaacttcacctgatgcagcacattccaggtgggggaacaagtgaaaatatagggaatattagtgataagtgcagagggaaaaaaaatagagcagggaagggggatgatttgatgtttttcaggttaagaaagtgacagaaatgaatttaaatgcaaaaaacaatgcataaagattcataatggcaaaacgaagcatgtcccatcataccccttcattcctacctccctgatatgtatctttctaattattcatacaaatgtgtatacccagttattacatatggggttttattctacatattatactgcacttgctttttctaatataatgtgtatcatgagcaccttacaaatttttaaaggtctctcaaatttatcagtaaacatatacagtctaacgttaatgagaagatattttggtgggcagtttgctttaaataaatgggatcatgtacgttctctgcatctcacatttctcatttaacaatgtaggatgagaatttctctaagtctatcatagctcttatttcctttttattattacaataaacattcctgtgtatatgtttgtcaccatgatggttttacgtctgcggaatagattccctggagtaggattgctgcattgaggagtatgtatatttaaatttttaaataaatattgacagattgtttccaaaagtggccggaacagtttttatttccatcagtaaatgtataaaaacacttttcccttaatactcatggcaataactattgtaacattaaaaaatacatagaaaaaagaaaaaaatcctggtggatgtagtgatttttcagtgttattttaatttccattttcctgactactataaatgtagacatcttttcaaatgttttggtcatctggattgcactcagaactgaattatctattcaaagttctgtaggttagaactccagggaaactcaactgggctgtctgttcaaggcccaacaaggctgaaatgaaagtgtcttccagggtgggtactcaactaaagctctgaggaggaattcgcttccagcctcattaaagtcagaggatggaggtccctgtctcctagctgactgtcaaatctgatcctttagaggttgctccgtggtccttgcacgtggtcccttccaccttcaaagcttgccagggtgcatcaaattatttttatactttgactctacttctaccagccagagaaaactgcttttaaagggctcttgtgactagtttaagcacacccagattgttaaggtcaactgattagtagctttaattacatctgccaagtccctctgccctgcaatgtaacatcacccatggaagtaacatgaggggcagagttcatgggggccatcttagaattctgcctaccacaaatattcgtagttatacttttatatacatttttaaatttttcttatttttggtccatatgtttgtaccgtttgtctttttagttaactagtttgtgaaagcattttgtatgttgtacaatatatgttcagattttcttatcttggatgcaaacatttttttccaactcttgtaagttgtctgttgaccacattcaaaagtactttttccaaataaaactttgccttttgaatttcacttga

SEQ ID NO: 83896 - DNA, 330 bp, Homo sapiens
ggtagatatagggtctgcctccctgtgtctcccaggctggtctcaaactccaccctcctcagcctcccaaagtggtgcgattacaggcgtgagccatggctcccaggcctaaatgaaatcatttacaataacatcaggaaacattaaatacctaggagtaaattaaaaatgtacaagtcttctacacagaaaactgtacaatattaagacacagaatccataaagacctttaaaatgacaggatagctcatgttcattgataagaaagactcaaaaagaaatacatatggagtctttctgagcctgctctggctgaggaggctgcccaat

SEQ ID NO: 83897 - DNA, 344 bp, Homo sapiens
aattattagaactaataataatagttctgcaaagttgctgagtttcagatcagcaaccttttgattcaaccatacaaaattataatttatgtaggtcaaaatggtcgttaaatatttatttgcagtttcatatgattaaacctaatacagaaatcaatcacattcctgtctaccagcaataatcatttagtaaatgtatacttttttaaagattctattcatagtagccacaaaaaaactataaagtatccaggaaatatctaaacaagaaatatatatcttggggagaaaacataatcaaaagacctggataaacagagagatagcatgttcatggatgggag

SEQ ID NO: 83898 - DNA, 707 bp, Homo sapiens
ataacagaagaataactgtgtatttggatttacataggtagactttgtgagagtagatgttttaaaaaaatgactcaaattagtaccttttaactgttcagaaaaacaaaacctcaattttctggttttcctgcccattttctctgcttcttcacttggggcagagaaaaagcaagttgcagaatatgcactacatgctgctatttgtttgaaattttaaaagacaatataatactgcatacagataaaggatacatacacatctagtaagagtataaacatgcatgagaataataaacaccaaattcagggtaatagttgcctctggaaggggaggtatggaggggtcacagaggacttcagctttattggtaaaatttcataagttgggtagcaaggacacaaatgtatgttattcattgtacctttttgtatattttaaatatttcataatcaaattttttcctgagaatgaaaactcttttgtgactttcccaatgttagtggaaacaaataagatctgaagctgattccctttagaaactctcaacacttcttagctatgttcaccaaatgcgtgagcattgataaattagactttatcaaaaaaaaaaacttgtgcctcaaaggacaccatcaagaaagtaaaaagacagcccacagaatgggagaaaatatttggaaatattgaatctgataagagactt

SEQ ID NO: 83899 - DNA, 449 bp, Homo sapiens
aaacaaacaaaaaaaacctgctgagtggacatctgtaagaaagaagatgttccctcaattctcttctagctgacataatgaggatgataccactcctcccatgaatgggtcacatgtgttgagcatatgccaggtgccaggcatgattctaggtgtgtacgcagatggactcattttaatcatcacaacaatcctcttcaacaggtattaccaccattccagtttcacagaggagaaaactgacgagttaggtaactttgccagggtcacacatctagcaagtggtggggcaaggagagaactcaggtggtcttggctccaaagccctcaaccacaaggctctgctgcctacaagtttaatgcccagccctccaaggaagctcttttagtgagggctttaggggatgaactgcatggagtctttcatattctccaacctgatccatctg

SEQ ID NO: 83900 - DNA, 324 bp, Homo sapiens
gccaatatggtgaaaccccgtctctactaaaaatacaaaaatcagccaggcatggtggtgggcacctgtagtcccagctactcgggaggctgaggcaggagaatggcatgaacccgggaggtggagcttacagtgagccgagatcacgccacacactccagcctgggcgacagagtgagactccatctcaaaaaaaaaaaaaaagatatagtagaggaagtattgttattattgggattaaatgagtatgttttctgtttctggcatatagttcagagaaattcccggtttgggaatacagaagaggtagtcagaggaaaggtg

SEQ ID NO: 83901 - DNA, 418 bp, Homo sapiens
ttgaaaatgctgcctttcatctcaagaagtcaaacacatttgcagattattcctttttaaatgaagtcaaagctgacatatctatgagagtgcatgacaaatgtaaagaaacaacaatagaaaattgggcccatgatagaggtttgtttacccatgatacaggtatctgaatccactgatcaatgtgatgctataaaaactgatgaggaaggaactgtggcaaaaatgacagcatgctagtctgaggggagctgccaactggttgccacgtggtatggaactagtagttgccagatctcatttttctcaaagacccagaaatctggctttttatgtaaactctcaggattaaacgttaacataatgaaaggcatcttaacccccttctctgcttacttctagattgtgccaaaggcta

SEQ ID NO: 83902 - DNA, 152 bp, Homo sapiens
aaaataataattgataataatgctgtgatgaatatccacttgcataaatctgggcacacatttctgatcacttggtcagacaacatcctcgctttatagatgaggacagcagacccagaggaaagatttgccagcacaggcccatcatccag

SEQ ID NO: 83903 - DNA, 312 bp, Homo sapiens
cttgggtctcctgaaggacaacacttatcaaattcttttttcaaagtggatggtgctcatttttccgcattccactaatctcagtggaggcttcagcattctcttagctccgcattagcacttccaacatcatctctccactaagggaaaaaaaatgcctcctcctttgagattcatgccttctggctagtttacccttgtccctgctatctattaaactaatcataggctgggtgccgtggcttaaatctgtaatcctagcattttgggaggccaaggcgggtggattacctgaggtcaggagtttcagac

SEQ ID NO: 83904 - DNA, 382 bp, Homo sapiens
gggttgtactttaaaaaatgtgtacttttaaaaaaactcatcttctaaaacacaatgtcccctgaagttgcatgaaaaacctcaaggtggtttaaaaacacttgtaaaaaagaagaatctttcaattactagtgagattgaatctatctgaaccagaattactagagtcttaaaaacactgacacttaaaaataactatgtttgtcaatattcctaattggctaatcttaatttttgatgcatgtgggaactcactatagtaagataaaggagtttctgacactcaaggattttttttgtttgttttttaaggcttttttgtaaaggcatgaagaagcggcttagtgtttggtcctaaaaggcaaaagaatgtaagaaagaa

SEQ ID NO: 83905 - DNA, 840 bp, Homo sapiens
gactacttaaacaaacaaaaccagatcaccacctgtaacaacaccaaacaaacaaaaccaagaactaggaaaatgaggaaaaaatatctgactgaatgaaaattattacctgaagcaatacagaaggagtacttaatgttcaaataaagtcattgaccaaagtatggaacagaaaatataaatgcatatttttaaagcaaacatttcatctcctaaagacaagataagacatggaatgagaaggagaaataaattaatcccaccatccaacagtgaaagaaaaaacacagaacatgaggaggaccagaaagcaatgtgaaaaagagttgaaaggagtcactgctgagctattttagattctacaccctctatccagccatgaacctatcagcgatcatgcctaactattgcataccccattagacaacctaatgtgaatgtaggaagcctattcatctaaaggacatggaaccgagtagatgtaactgatacttcactattgacctatagcctattaagatctaccatgagtcatatacatttgacaccgtggttttcatttcataatacatatcttcactaattttgtctatcattttgtcaaagggctaaaactatagtaatgagtacattcttaatgagtttttctttaactaccacaatttgtatctaaattttgtctcatcttatgttctaaaattgtcacagcaaagtgatcaaggaagctagagattttacatatgttcttctcaataagatggctgtatctcttctatatcaagtaaataaatccttgatacatgaatgaagtaatggttcagtaaacaaattaaatatgat

SEQ ID NO: 83906 - DNA, 500 bp, Homo sapiens
tctgcattctcatgaataagttttaagtcgctttgaactaaaagtgtgtatgtgtgtatttatgtcagagttatgtgtatttccatttagcatcgagtgcccaaagaataccactctagagaaccgagagtgaacctgacctttcggacagtctatccagaccctcgaggggcaccctggtgacgtcagagctttgagagagaagcttcactgaaacggagcaaaccttccactgagaagccacttcaagaggctggtgctgctagatctcatgatgtggctgttgggaagatggtggggtttgtttgccagcttggagtcctattaaatgaaagccagcaactcatgttggtaataggtctactgtgggaacagttatccctaaccacagctcaaaatcgctatcatctttaggcaaattaaaatctatgtggcagtgctcatggatgattttgttctaagcagttttcctcctgccctcccccgccccccacacgccc

SEQ ID NO: 83907 - DNA, 410 bp, Homo sapiens
tgctctagagttccctacggaatctagcgacatggaaggtgcgacacaagctgactggcagcatcgagtgcccaaagaataccactctagagaaccgagagtgaacctgacctttcggacagtctatccagaccctcgaggggcaccctggtgacgtcagagctttgagagagaagcttcactgaaacggagcaaaccttccactgagaagccacttcaagaggctggtgctgctagatctcatgatgtggctgttgggaagatggtggggtttgtttgccagcttggagtcctattaaatgaaagccagcaactcatgttggtaataggtctactgtgggaacagttatccctaaccacagctcaaaatcgctatcatctttaggcaaattaaaatctatgtggcagtg

SEQ ID NO: 83908 - DNA, 196 bp, Homo sapiens
agatcgagctcggtccctattctggcaccctgtgctgcgcacactaaagaaccgcattgaagagaacactggccacaccttcaactccttactctgcaatctttatcgcaatgagaaggacagcgtggactggcacagtgatgatgaaccctcactagggaggtgccgatgaataggaggtgccgatgaatagcga

SEQ ID NO: 83909 - DNA, 1560 bp, Homo sapiens
ggatccttaattaaattaatcccccctcttaaggttccgatcacagactgcggagtgggtcaggggctgcgagggctgccccaagtcctaccgggtttgcacgggcgcgcccggctccgcccgcaagtgcgccttcctgacttactgctgggtgcgcggggctgggggtgcgagtaccacccctgaagtctcttcctgggcgacctccggggcctcattctaggcctccttaaagagaaggatctaaattaggaaaaggaagtgcccttatccacgaccaagctcttccacctgcggagctcgcttagtctgcacctcaaccgtgcggaaagtgactgccctgtttactgaggaaaaactggggctcagaaagataccatggagtagtttgaaacaggaacaaaatcttctgaaagctcggagcagaagcctttttggtcaacatggaggaaaaaagacggcgagcccgagttcagggagcctgggctgcccctgttaaaagccaggccattgctcagccagctaccactgctaagagccatctccaccagaagcctggccagacctggaagaacaaagagcatcatctctctgacagagagtttgtgttcaaagaacctcagcaggtagtacgtagagctcctgagccacgagtgattgacagagagggtgtgtatgaaatcagcctgtcacccacaggtgtatctagggtctgtttgtatcctggctttgttgacgtgaaagaagctgactggatattggaacagctttgtcaagatgttccctggaaacagaggaccggcatcagagaggatataacttatcagcaaccaagacttacagcatggtatggagaacttccttacacttattcaagaatcactatggaaccaaatcctcactggcaccctgtgctgcgcacactaaagaaccgcattgaagagaacactggccacaccttcaactccttactctgcaatctttatcgcaatgagaaggacagcgtggactggcacagtgatgatgaaccctcactagggaggtgccccattattgcttcactaagttttggtgccacacgcacatttgagatgagaaagaagccaccaccagaagagaatggagactacacatatgtggaaagagtgaagatacccttggatcatggtaccttgttaatcatggaaggagcgacacaagctgactggcagcatcgagtgcccaaagaataccactctagagaaccgagagtgaacctgacctttcggacagtctatccagaccctcgaggggcaccctggtgacgtcagagctttgagagagaagcttcactgaaacggagcaaaccttccactgagaagccacttcaagaggctggtgctgctagatctcatgatgtggctgttgggaagatggtggggtttgtttgccagcttggagtcctattaaatgaaagccagcaactcatgttggtaataggtctactgtgggaacagttatccctaaccacagctcaaaatcgctatcatctttaggcaaattaaaatctatgtggcagtg

SEQ ID NO: 83910 - DNA, 1827 bp, Homo sapiens
ggatccttaattaaattaatcccccctcttaaggttccgatcacagactgcggagtgggtcaggggctgcgagggctgccccaagtcctaccgggtttgcacgggcgcgcccggctccgcccgcaagtgcgccttcctgacttactgctgggtgcgcggggctgggggtgcgagtaccacccctgaagtctcttcctgggcgacctccggggcctcattctaggcctccttaaagagaaggatctaaattaggaaaaggaagtgcccttatccacgaccaagctcttccacctgcggagctcgcttagtctgcacctcaaccgtgcggaaagtgactgccctgtttactgaggaaaaactggggctcagaaaggtgaagtcatttgccatgggccatgcagctgggaagtgacagatctggattcaaagcgagttctggctggcgccagagtccttgtattttacagcactggttctcaagctttatgtgcattaagaattcctgggttgagggtggcgttagttaacaaattctgggactctacaaattgagtagatctgggatggggctctggaatctattttcaacaattgttccctggcaaataacatatggctccccagtgaatggagcaagaagataccatggagtagtttgaaacaggaacaaaatcttctgaaagctcggagcagaagcctttttggtcaacatggaggaaaaaagacggcgagcccgagttcagggagcctgggctgcccctgttaaaagccaggccattgctcagccagctaccactgctaagagccatctccaccagaagcctggccagacctggaagaacaaagagcatcatctctctgacagagagtttgtgttcaaagaacctcagcaggtagtacgtagagctcctgagccacgagtgattgacagagagggtgtgtatgaaatcagcctgtcacccacaggtgtatctagggtctgtttgtatcctggctttgttgacgtgaaagaagctgactggatattggaacagctttgtcaagatgttccctggaaacagaggaccggcatcagagaggatataacttatcagcaaccaagacttacagcatggtatggagaacttccttacacttattcaagaatcactatggaaccaaatcctcactggcaccctgtgctgcgcacactaaagaaccgcattgaagagaacactggccacaccttcaactccttactctgcaatctttatcgcaatgagaaggacagcgtggactggcacagtgatgatgaaccctcactagggaggtgccccattattgcttcactaagttttggtgccacacgcacatttgagatgagaaagaagccaccaccagaagagaatggagactacacatatgtggaaagagtgaagatacccttggatcatggtaccttgttaatcatggaaggagcgacacaagctgactggcagcatcgagtgcccaaagaataccactctagagaaccgagagtgaacctgacctttcggacagtctatccagaccctcgaggggcaccctggtgacgtcagagctttgagagagaagcttcactgaaacggagcaaaccttccactgagaagccacttcaagaggctggtgctgctagatctcatgatgtggctgttgggaagatggtggggtttgtttgccagcttggagtcctattaaatgaaagccagcaactcatgttggtaataggtctactgtgggaacagttatccctaaccacagctcaaaatcgctatcatctttaggcaaattaaaatctatgtggcagtg

SEQ ID NO: 83911 - DNA, 1532 bp, Homo sapiens
ggatccttaattaaattaatcccccctcttaaggttccgatcacagactgcggagtgggtcaggggctgcgagggctgccccaagtcctaccgggtttgcacgggcgcgcccggctccgcccgcaagtgcgccttcctgacttactgctgggtgcgcggggctgggggtgcgagtaccacccctgaagtctcttcctgggcgacctccggggcctcattctaggcctccttaaagagaaggatctaaattaggaaaaggaagtgcccttatccacgaccaagctcttccacctgcggagctcgcttagtctgcacctcaaccgtgcggaaagtgactgccctgtttactgaggaaaaactggggctcagaaagataccatggagtagtttgaaacaggaacaaaatcttctgaaagctcggagcagaagcctttttggtcaacatggaggaaaaaagacggcgagcccgagttcagggagcctgggctgcccctgttaaaagccaggccattgctcagccagctaccactgctaagagccatctccaccagaagcctggccagacctggaagaacaaagagcatcatctctctgacagagagtttgtgttcaaagaacctcagcaggtagtacgtagagctcctgagccacgagtgattgacagagagggtgtgtatgaaatcagcctgtcacccacaggtgtatctagggtctgtttgtatcctggctttgttgacgtgaaagaagctgactggatattggaacagctttgtcaagatgttccctggaaacagaggaccggcatcagagaggtggcaccctgtgctgcgcacactaaagaaccgcattgaagagaacactggccacaccttcaactccttactctgcaatctttatcgcaatgagaaggacagcgtggactggcacagtgatgatgaaccctcactagggaggtgccccattattgcttcactaagttttggtgccacacgcacatttgagatgagaaagaagccaccaccagaagagaatggagactacacatatgtggaaagagtgaagatacccttggatcatggtaccttgttaatcatggaaggagcgacacaagctgactggcagcatcgagtgcccaaagaataccactctagagaaccgagagtgaacctgacctttcggacagtctatccagaccctcgaggggcaccctggtgacgtcagagctttgagagagaagcttcactgaaacggagcaaaccttccactgagaagccacttcaagaggctggtgctgctagatctcatgatgtggctgttgggaagatggtggggtttgtttgccagcttggagtcctattaaatgaaagccagcaactcatgttggtaataggtctactgtgggaacagttatccctaaccacagctcaaaatcgctatcatctttaggcaaattaaaatctatgtggcagtgctcatggatgattttgttctaagcagttttcctcctgccctcccccgccccccacacgccc

SEQ ID NO: 83912 - DNA, 1261 bp, Homo sapiens
ggatccttaattaaattaatcccccctcttaaggttccgatcacagactgcggagtgggtcaggggctgcgagggctgccccaagtcctaccgggtttgcacgggcgcgcccggctccgcccgcaagtgcgccttcctgacttactgctgggtgcgcggggctgggggtgcgagtaccacccctgaagtctcttcctgggcgacctccggggcctcattctaggcctccttaaagagaaggatctaaattaggaaaaggaagtgcccttatccacgaccaagctcttccacctgcggagctcgcttagtctgcacctcaaccgtgcggaaagtgactgccctgtttactgaggaaaaactggggctcagaaagataccatggagtagtttgaaacaggaacaaaatcttctgaaagctcggagcagaagcctttttggtcaacatggaggaaaaaagacggcgagcccgagttcagggagcctgggctgcccctgttaaaagccaggccattgctcagccagctaccactgctaagagccatctccaccagaagcctggccagacctggaagaacaaagagcatcatctctctgacagagagtttgtgttcaaagaacctcagcaggtagtacgtagagctcctgagccacgagtgattgacagagagggtgtgtatgaaatcagcctgtcacccacaggtgtatctagggtctgtttgtatcctggctttgttgacgtgaaagaagctgactggatattggaacagctttgtcaagatgttccctggaaacagaggaccggcatcagagagggaagagaatggagactacacatatgtggaaagagtgaagatacccttggatcatggtaccttgttaatcatggaaggagcgacacaagctgactggcagcatcgagtgcccaaagaataccactctagagaaccgagagtgaacctgacctttcggacagtctatccagaccctcgaggggcaccctggtgacgtcagagctttgagagagaagcttcactgaaacggagcaaaccttccactgagaagccacttcaagaggctggtgctgctagatctcatgatgtggctgttgggaagatggtggggtttgtttgccagcttggagtcctattaaatgaaagccagcaactcatgttggtaataggtctactgtgggaacagttatccctaaccacagctcaaaatcgctatcatctttaggcaaattaaaatctatgtggcagtg

SEQ ID NO: 83913 - DNA, 1497 bp, Homo sapiens
ggatccttaattaaattaatcccccctcttaaggttccgatcacagactgcggagtgggtcaggggctgcgagggctgccccaagtcctaccgggtttgcacgggcgcgcccggctccgcccgcaagtgcgccttcctgacttactgctgggtgcgcggggctgggggtgcgagtaccacccctgaagtctcttcctgggcgacctccggggcctcattctaggcctccttaaagagaaggatctaaattaggaaaaggaagtgcccttatccacgaccaagctcttccacctgcggagctcgcttagtctgcacctcaaccgtgcggaaagtgactgccctgtttactgaggaaaaactggggctcagaaagataccatggagtagtttgaaacaggaacaaaatcttctgaaagctcggagcagaagcctttttggtcaacatggaggaaaaaagacggcgagcccgagttcagggagcctgggctgcccctgttaaaagccaggccattgctcagccagctaccactgctaagagccatctccaccagaagcctggccagacctggaagaacaaagagcatcatctctctgacagagagtttgtgttcaaagaacctcagcagcagagagggtgtgtatgaaatcagcctgtcacccacaggtgtatctagggtctgtttgtatcctggctttgttgacgtgaaagaagctgactggatattggaacagctttgtcaagatgttccctggaaacagaggaccggcatcagagaggtggcaccctgtgctgcgcacactaaagaaccgcattgaagagaacactggccacaccttcaactccttactctgcaatctttatcgcaatgagaaggacagcgtggactggcacagtgatgatgaaccctcactagggaggtgccccattattgcttcactaagttttggtgccacacgcacatttgagatgagaaagaagccaccaccagaagagaatggagactacacatatgtggaaagagtgaagatacccttggatcatggtaccttgttaatcatggaaggagcgacacaagctgactggcagcatcgagtgcccaaagaataccactctagagaaccgagagtgaacctgacctttcggacagtctatccagaccctcgaggggcaccctggtgacgtcagagctttgagagagaagcttcactgaaacggagcaaaccttccactgagaagccacttcaagaggctggtgctgctagatctcatgatgtggctgttgggaagatggtggggtttgtttgccagcttggagtcctattaaatgaaagccagcaactcatgttggtaataggtctactgtgggaacagttatccctaaccacagctcaaaatcgctatcatctttaggcaaattaaaatctatgtggcagtgctcatggatgattttgttctaagcagttttcctcctgccctcccccgccccccacacgccc

SEQ ID NO: 83914 - DNA, 1621 bp, Homo sapiens
ggatccttaattaaattaatcccccctcttaaggttccgatcacagactgcggagtgggtcaggggctgcgagggctgccccaagtcctaccgggtttgcacgggcgcgcccggctccgcccgcaagtgcgccttcctgacttactgctgggtgcgcggggctgggggtgcgagtaccacccctgaagtctcttcctgggcgacctccggggcctcattctaggcctccttaaagagaaggatctaaattaggaaaaggaagtgcccttatccacgaccaagctcttccacctgcggagctcgcttagtctgcacctcaaccgtgcggaaagtgactgccctgtttactgaggaaaaactggggctcagaaagataccatggagtagtttgaaacaggaacaaaatcttctgaaagctcggagcagaagcctttttggtcaacatggaggaaaaaagacggcgagcccgagttcagggagcctgggctgcccctgttaaaagccaggccattgctcagccagctaccactgctaagagccatctccaccagaagcctggccagacctggaagaacaaagagcatcatctctctgacagagagtttgtgttcaaagaacctcagcaggtagtacgtagagctcctgagccacgagtgattgacagagagggtgtgtatgaaatcagcctgtcacccacaggtgtatctagggtctgtttgtatcctggctttgttgacgtgaaagaagctgactggatattggaacagctttgtcaagatgttccctggaaacagaggaccggcatcagagaggatataacttatcagcaaccaagacttacagcatggtatggagaacttccttacacttattcaagaatcactatggaaccaaatcctcactggcaccctgtgctgcgcacactaaagaaccgcattgaagagaacactggccacaccttcaactccttactctgcaatctttatcgcaatgagaaggacagcgtggactggcacagtgatgatgaaccctcactagggaggtgccccattattgcttcactaagttttggtgccacacgcacatttgagatgagaaagaagccaccaccagaagagaatggagactacacatatgtggaaagagtgaagatacccttggatcatggtaccttgttaatcatggaaggagcgacacaagctgactggcagcatcgagtgcccaaagaataccactctagagaaccgagagtgaacctgacctttcggacagtctatccagaccctcgaggggcaccctggtgacgtcagagctttgagagagaagcttcactgaaacggagcaaaccttccactgagaagccacttcaagaggctggtgctgctagatctcatgatgtggctgttgggaagatggtggggtttgtttgccagcttggagtcctattaaatgaaagccagcaactcatgttggtaataggtctactgtgggaacagttatccctaaccacagctcaaaatcgctatcatctttaggcaaattaaaatctatgtggcagtgctcatggatgattttgttctaagcagttttcctcctgccctcccccgccccccacacgccc

SEQ ID NO: 83915 - DNA, 1033 bp, Homo sapiens
gctagtagcgagctgcggttaatcggccgagggcagacctggaagaacaaagagcatcatctctctgacagagagtttgtgttcaaagaacctcagcaggtagtacgtagagctcctgagccacgagtgattgacagagagggtgtgtatgaaatcagcctgtcacccacaggtgtatctagggtctgtttgtatcctggctttgttgacgtgaaagaagctgactggatattggaacagctttgtcaagatgttccctggaaacagaggaccggcatcagagaggatataacttatcagcaaccaagacttacagcatggtatggagaacttccttacacttattcaagaatcactatggaaccaaatcctcactggcaccctgtgctgcgcacactaaagaaccgcattgaagagaacactggccacaccttcaactccttactctgcaatctttatcgcaatgagaaggacagcgtggactggcacagtgatgatgaaccctcactagggaggtgccccattattgcttcactaagttttggtgccacacgcacatttgagatgagaaagaagccaccaccagaagagaatggagactacacatatgtggaaagagtgaagatacccttggatcatggtaccttgttaatcatggaaggagcgacacaagctgactggcagcatcgagtgcccaaagaataccactctagagaaccgagagtgaacctgacctttcggacagtctatccagaccctcgaggggcaccctggtgacgtcagagctttgagagagaagcttcactgaaacggagcaaaccttccactgagaagccacttcaagaggctggtgctgctagatctcatgatgtggctgttgggaagatggtggggtttgtttgccagcttggagtcctattaaatgaaagccagcaactcatgttggtaataggtctactgtgggaacagttatccctaaccacagctcaaaatcgctatcatctttaggcaaattaaaatctatgtggcagtg

SEQ ID NO: 83916 - DNA, 1322 bp, Homo sapiens
ggatccttaattaaattaatcccccctcttaaggttccgatcacagactgcggagtgggtcaggggctgcgagggctgccccaagtcctaccgggtttgcacgggcgcgcccggctccgcccgcaagtgcgccttcctgacttactgctgggtgcgcggggctgggggtgcgagtaccacccctgaagtctcttcctgggcgacctccggggcctcattctaggcctccttaaagagaaggatctaaattaggaaaaggaagtgcccttatccacgaccaagctcttccacctgcggagctcgcttagtctgcacctcaaccgtgcggaaagtgactgccctgtttactgaggaaaaactggggctcagaaagataccatggagtagtttgaaacaggaacaaaatcttctgaaagctcggagcagaagcctttttggtcaacatggaggaaaaaagacggcgagcccgagttcagggagcctgggctgcccctgttaaaagccaggccattgctcagccagctaccactgctaagagccatctccaccagaagcctggccagacctggaagaacaaagagcatcatctctctgacagagagtttgtgttcaaagaacctcagcaggtagtacgtagagctcctgagccacgagtgattgacagagagggtgtgtatgaaatcagcctgtcacccacaggtgtatctagggtctgtttgtatcctggctttgttgacgtgaaagaagctgactggatattggaacagctttgtcaagatgttccctggaaacagaggaccggcatcagagagggaagagaatggagactacacatatgtggaaagagtgaagatacccttggatcatggtaccttgttaatcatggaaggagcgacacaagctgactggcagcatcgagtgcccaaagaataccactctagagaaccgagagtgaacctgacctttcggacagtctatccagaccctcgaggggcaccctggtgacgtcagagctttgagagagaagcttcactgaaacggagcaaaccttccactgagaagccacttcaagaggctggtgctgctagatctcatgatgtggctgttgggaagatggtggggtttgtttgccagcttggagtcctattaaatgaaagccagcaactcatgttggtaataggtctactgtgggaacagttatccctaaccacagctcaaaatcgctatcatctttaggcaaattaaaatctatgtggcagtgctcatggatgattttgttctaagcagttttcctcctgccctcccccgccccccacacgccc

SEQ ID NO: 83917 - DNA, 704 bp, Homo sapiens
ggaactggaatcgggccctctgtgagaagggagcctgaggcaaggccccaatttgcactgcagtggtgattggaggactaatgagaagtgtgtggcctgcgggccataggggtcagggggtggtggcctttggaactcttgcccactgaactgtggtgagcaattccaagttgtctctgggccaaatagagaaggaggatggaagatttcaattctgccaaaaagaaccatgaacaccagacccgcaatcagtaggagtacccgcggggccctctgctctctctatctagccttccgttggcactccagtgcaccccctctgctctccctgtctagccctccgttggcactccagtgcaccccctctgctctccctgtctagccctccgttggcactccagtgcaccccctctgctctccctatctagccttcccttggcactccagtgcaccttggcttcatgcccagggccccacccaacactgagggcattgccttttcctttgtcgcccccactttgtctacaaggaggaaaccacagccagagggagtgcaggcctcactggagcttcaggcctctccctatttaacacccctagggccgaccatgcttttagaaagacagtgagagactcagggcctgagaaggtatttctttttttccttttcctacctgacttgtaaatgaaagtttgtgaaagtc

SEQ ID NO: 83918 - DNA, 984 bp, Homo sapiens
aagtaaacaagtataagtgaaatttagacccaaagaataagtatttggggctcaattactccttaatattctgacatttcaggattgatttcactaaaactccctttggcatgatttgttattgttatgggttgtccagaaaaccataccaatagttattttcctgtcatgataagcggtcaagccaaggtgccttagtgttttgtttttcagtcaggaggttttgacagcttttccacgtgtcagtggggagggagaagttgagtggttgggacagtggtccccttcgtggtggaaagaacactgcctcagataatgtgtggctttcctctggtcagaggcccaaatgagtggacaagtactgtggtttctcaagcccctatgcagtgttagatgccactatgaaatacgagccattgaaagagatctcttcaacttattattttttatcacgaacgtacatatcagttatttatgagattttttttttaaatatttcattttttttcacgactttttctgccattgaattagcctttttctcatgcactggtggtcaagaaatacatgccataataagatggcagttaaacttcatcagtattttttttttttaaataagattatttagccaggcacagtggctcgcacctgtaatctgaacactttgggaaggccaaggcaggaggatcacttgaggccaggagttcaagaccagcctaggcaacataatgagaccctgtctctacagaaaatgaattcgctgggcatggtggcatgtgcctgtaggaagctgaagtgagaggatcacttgagcccaggagttcaagaccagcctgggcaacatagtgagaccctgtctctacagaaaatttaaaaattaactgggcactgtggcccgtgcctgtaggaggctgaagtgggaggatcacttgaacccaggagtttgaagctgcagtgagccaagatcacactactgcacac

SEQ ID NO: 83919 - DNA, 763 bp, Homo sapiens
tggtaccggccccgccgtttttttgtatgcgagactccatctgaataaacaaaaaaaaaccccaaaaaacaaaaaaacaatgtcatggtattagttaaggcaagtgatattcgctaccataacaaaaatctctaaaaatcttatggcttaatataattagaatgtactatttgccccggagaattcagacagatgtttgtttctgctctagtcactttccatatagtcattccaagtccagtcttcttccatcctgtggctccgacttcttccaagaccttaaaatcctttctccttccagcagatgcagaaggagagaatgtgtggaggattatgtagaaggatttcacgagcctggcctggagaggacacatcacttccaactccattccattaccagagcttagtctatttccagaagattataagcttcatgggggtagatgctttacttcattcatcactgcatctccaacgcctagcacagagtcctgaattacaggctcaataactatttactgaatgtgaaaacagagctgcttgaagatatatgaggctaattgagcttgtgcatttgttggctattgctgctacagtggatgctgttgttcagtattcagatatcaagaaacaactagccaaagtaaggaggaacgaggggcccatgaagctcagtagagcttgtgataatatttgcaagagaagactacctgccaaactaacttcagaaaaggtgttcttggttgaacatcgtcgttgcccc

SEQ ID NO: 83920 - DNA, 522 bp, Homo sapiens
ccgggtgtgtgccctggctggaccgaggggtttcctccgctcagtcggcagggaccctcgctgaggtgcgaggacacatggctgactctgaactcgcagcttcagggaaaccttccagcagtttctccaccgcggctctcacgttccccgtggcgcagcttcttcgtatcaccaatggctcggacacgcgggcgccacccctctcttgcccttgtcgttgttcttccttttgttgggaatgttctttcttcccttccacctgaggatccctcggcttccaggcccagttcagatgccccctcttctaggaagccttccagagtcctctcttctgggtttttacataaaatattaaaacttccccataggcctttgaaaaaaattcatctatttgaagtgcagagtcacatttttgtgaggcgaatgaactaatgggggtgagtctgatgcagagagggaactcgaacccagtgtgtcagacgcccgtgatcagtgtgatcagtgatggtgggtgtgcggccg

SEQ ID NO: 83921 - DNA, 93 bp, Homo sapiens
agagacaggattttgctctgtcacctaagctggagtgtagcggcacaatcagctcactgtagcttcaaactcctgggctcaagggatactccc

SEQ ID NO: 83922 - DNA, 297 bp, Homo sapiens
gtagagttctttcctatgatgacactgttctgcatcctgattgcagtggtagtaacatgaatgaagttaggctgaaactgcatagcaccacagacacacacacacgcacacacatacacacacgagagagagagagaaatggactcaggtaaaaatggtgaacagtgaataatgtcagttatctatttaacagtgtgcaaatgtcaatttcctagagcgaaactagtgaaaatttcatgggactctgagtacttttgttgcaacttcccatggatctaaaactacatcaaaactaga

SEQ ID NO: 83923 - DNA, 442 bp, Homo sapiens
  misc_feature (239)..(239): n is a, c, g, or t
tccttactctctatgctacagtaacactggcctcctttttgttcctcgaacacacagggtatgctcctatgcatgcactggctatttcctctatctggaatactctttcccctagataccacatgactcactacatcaccttctttagctcgttgatgaaacgtcactttgggcttggccggtggctcacctgtaatcccaacactttgggaggctgaagcaggagaattcacttgagncccaggaattcaagactagcctgggcaacatgatgagacctcccctctacaaaaggtaaactaaattagctgggcgtggtggtacatggcggtggtcccagctgctcaggaggaggctaaagtaggagaatcacttgagcctgggaggctgagggtgcaatgagtcatgattgtgccactttactccagcatgagtcacaaag

SEQ ID NO: 83924 - DNA, 346 bp, Homo sapiens
  misc_feature (106)..(106): n is a, c, g, or t
  misc_feature (328)..(328): n is a, c, g, or t
  misc_feature (330)..(331): n is a, c, g, or t
  misc_feature (334)..(334): n is a, c, g, or t
  misc_feature (338)..(339): n is a, c, g, or t
  misc_feature (341)..(343): n is a, c, g, or t
  misc_feature (346)..(346): n is a, c, g, or t
gaggagttttacattgcagcttagaagcctttcttccaatagcagagatttggtgtcatgtggtgttcatcagtttgaaaagaagtatttctgctgtttgcctcangatgtacatacagagatgtgctgattctcagaacttctatagaattccattagccagtcctgccaattgaaatttggcatttaattatttgcatttttctattcttgcctaggaaaggagctcgtcacatacctagtttagtgatggaaagtatttggagaaagttttagagagtggggctcaggctcaagaatacaatgaagtaataaagttgttaacctnannatnaaanncnnnatn

SEQ ID NO: 83925 - DNA, 386 bp, Homo sapiens
acaggttatagctactatgtggtaaacagaggtacagctctgcagcctgtttccttgggggaaaacaaccttttctttctgctgcttctgccttctctctccactcccgagaatgaccttattcatgagaacaatataaaatacctaagatcaaatagcaagaaatgcacaggattcagttgaagaagaatgatcaaactttgatgcagaatatgcactgaaatgtatatacatgtaaatttttgcacaggaaattgcaatattcaaataggactaattttccaggtgttctggtgaaaattgcaccacagtcccctcttcatgtctgatttcagctttgctcattcacaaactcttatttttctatttgtcattccatttccaca

SEQ ID NO: 83926 - DNA, 744 bp, Homo sapiens
caccactgtgtatgtagtctggtcattgaaacatccttatgcggtgcattactgaaatcttgaaacttgaaatacccataatatcttgggcaatgtcagggaaatgcactaatgggaagggcagtccccaagctgtaaacacaaagaaaaacaatgatgacacattgtggaccggcaagatgatcccttgataactgagtggaaatcggaagctgcaggggagatttgttgttctcaggcatagagtggctgctggttggcctgatgtcaatggcaggactctacaggggtaagagaatccagggaggcttctgtgcactgcttggtcaggtgggtactcaatgtagaagaagttctgcccaagtgccagtttttccttccagacatttttttttttttggaattttttggttgtgatcatagtggtgtgatgaattgggaattatgctggatatctgcagagtgttgctgtgcttagagtacaaaaccctgatagaagatgaagcctgcgggtggctcctaagacccttccaagggtccctccctcctagttttcatgcccgagtgtcatctcctcttcttgagtgtgggctggactccatgagtagcttctgatgacaagaatatggggatctctgtgttccgattgaaggttgaaacaacagtagctttttttttttttaactgccactctgtggccctgttgcttgatgttttaaaataaaaaaaaacctattatttatt

SEQ ID NO: 83927 - DNA, 158 bp, Homo sapiens
atgagaaagccctggctcagagaagtgattttcccagcgtcacagaggcagggaatggccgagctgggagaaccaaaaggagcttgactcgtccagcaagtattagtggcccacactggaggctcaacccactccaatccgagggcacgacgtcgacc

SEQ ID NO: 83928 - DNA, 1103 bp, Homo sapiens
cacattgccaccatttgaaggagatgatttaaggatcctggcccaggagatcaccaaggccagaagcttcctctggcaggcccaatccttcagatcccaactccagaagaaaaatgatgcagaaccaaaggtcactctttcctagagaagtgttctcagaaaagtcatcctgcaaaggaccactcactgagcaaatctcagccccgagggcaggatgggatgaaatgctgtgacctgcaggaaacatgattcctggtaccaggactctctggaagctgaggaaggaaagactttgtcttttgtgtgaggggccattcccgggtcttaatctaactctccagccctgtcccgcagcgcactctactctccagccactagattgtccctctctgggaagccctaaaccaaccccctgcctaaatggtggtgcttcttgcaaaccaaccccctgcctgaacggtgcttcttgccccctctgcctggagactcctgctcatccatcaaggcacagctcaaatgacatcagctccctgggacctatctagagcgaggggcctccagtctttctcttgcagcatcctgaccacgcagacctctcgcactcagcactctatgtcacgccaccttgctcgctgatctaactcttctccttgatggtgagctccttcgggatgagactggtgtcccaggatctgcaggtccccagaagctgccacataggagacacatggtgaacagtgagcaggcggctgagctgtgagagcctagctctggaaagcagctgatggggtggtctccaccctggttcataagaggctaatgcagagtcacagtcagcccatcctgggggaagaagaaacaagtgagcctcagcaccaccctccatccctgcccaaccaaactgaagtgaaggctgctcatctgggttcattttctaaaattaaaaacaattaattttattctactaataggatcaacatgactttaactgtttgaagtgatcattggcgtgtgtgtgtgtgcataaatttttagtgacataaaactttattaaaagactcataccataataaagaatttcaataagaaaaagataaacatcc

SEQ ID NO: 83929 - DNA, 2801 bp, Homo sapiens
tttttttattatagctatgctagtggatgtgaagtggtatctcattatggttttggttttcatactcctcatgtttaaggatgctgaacttcttttcatatgcttattggccatttgtgtatatatcttcttttagagaaatgtctatttaagtcctttgacccatttctgtgtccttacccctggtgaggtctcccttattctgttgcttggctggtccctatcctgccaatagtaatgggcccttcttcaccctgatgatggccctgttggcctgtcagcaatccctgggacctcttcttgggtgtgaattcctgggtaacatttctaatgaagtcaaccattcccaccaagtggaattcttagttaactggcatttctctactttcaggttcttggcatggagtagagggtgagggggcccatcccaagcagaatgtttctgtagaagtgttacaggtcaggatccctaatgcagatccttccaccaagaaagctaactcctgtgacatgtgtgggccattcttgaaagacattttgcacctggctgagcatcagggaacacagtctgaggagaaaccctacacatgtggagcatgtgggagagacttttggttgaatgcaaaccttcaccagcaccagaaggagcacagtggagggaagccctttagatggtacaaggacagggacgcacttatgaagagctctaaagtccacctgtcagagaaccccttcacttgcagggaaggtgggaaggtcatcctgggcagctgtgacctcctccagcttcaagctgttgacagtgggcagaagccatattccaatcttgggcagcttccagaagtctgtaccacacagaaactcttcgagtgcagcaactgtggaaaagccttcctgaagagctccactctccccaaccatctgagaactcactctgaagagataccatttacatgcccaacaggtggaaatttcttagaggagaaatcaatccttggtaataaaaagtttcacactggggaaataccccatgtgtgtaaggagtgtgggaaggcctttagtcactcatctaagctgaggaagcaccagaaatttcacactgaagtaaaatattatgagtgcattgcatgtgggaaaaccttcaaccacaaactcacatttgttcatcatcagagaattcactcaggagaaagaccttatgagtgtgatgaatgtgggaaagccttcagtaacagatcacacctcattcggcatgagaaagttcacactggagaaaggccttttgagtgcctgaaatgtggaagagccttcagccaaagctccaatttccttcggcatcagaaagttcacacacaggtaagaccttatgagtgcagtcaatgtggtaaatccttcagccgaagctctgctctcattcagcactggagagttcacactggagaaagaccgtatgaatgcagtgaatgtggaagagcttttaacaataactccaaccttgctcagcaccagaaagttcacaccggagaacggccttttgagtgcagtgaatgtggaagagacttcagccaaagctcccatctccttcgacatcagaaagttcacactggagaacggccttttgaatgctgtgattgtggtaaagccttcagtaatagctccaccctcatccagcaccagaaagtacatactgggcaaaggccttatgagtgcagcgaatgtaggaaatccttcagccgcagctccagcctgattcagcactggagaattcacactggagaaaagccttacgagtgtagtgagtgtgggaaagcctttgctcacagctccactctcattgaacactggagagttcacacaaaagaaaggccttatgagtgcaatgaatgtgggaaattctttagccaaaactccattctcattaagcatcagaaagttcatactggagaaaagccttataaatgcagtgaatgtgggaaattctttagccgaaaatccagccttatttgtcactggagagttcacactggagaaaggccttacgaatgcagtgaatgtgggagagcctttagcagtaactcccacctggttcgtcatcagagagttcacacacaagaaaggccctatgagtgcatccagtgtggaaaagcctttagtgaaagatctacacttgttcggcaccagaaagttcacaccagagaaaggacttatgagtgtagccagtgtgggaaactcttcagccatctttgtaaccttgcacagcataaaaagattcatacctgagtggagccttatggaagtggtctttgtgagaaaatcttcagccaagtcaaacttcatgcagcagaatccccataccagaaaaattacctccatgctattagctaatgtggaaaagccttcagaagctactctgtttctgaccagcccaggaacctttgcagggccatctcacccatgcagcataaggcagaagccatagtcactttccatcttgcctggatccaaaaatttgcagcagtcctgtcctcatgcatggggaaaacagtaccctgagccttccttcctgtgttctctagggattcaggactgtgctcagctgaaccgatgctggttgaggggccttgagggaaatctaatttgagctcaggaagatgcacattccttgtggatgtggtcaagtctgtgtttaacccctaagatgtgtccattgaggccacaaatcaccctccactggaatcacctaccttgcctgcactaactggtgataataaagaccttattgatcaggtcacctttaatct

SEQ ID NO: 83930 - DNA, 1110 bp, Homo sapiens
tttttttattatagctatgctagtggatgtgaagtggtatctcattatggttttggttttcatactcctcatgtttaaggatgctgaacttcttttcatatgcttattggccatttgtgtatatatcttcttttagagaaatgtctatttaagtcctttgacccatttctgtgtccttacccctggtgaggtctcccttattctgttgcttggctggtccctatcctgccaatagtaatgggcccttcttcaccctgatgatggccctgttggcctgtcagcaatccctgggacctcttcttgggtgtgaattcctgggtaacatttctaatgaagtcaaccattcccaccaagtggaattcttagttaactggcatttctctactttcaggttcttggcatggagtagagggtgagggggcccatcccaagcagaatgtttctgtagaagtgttacaggtcaggatccctaatgcagatccttccaccaagaaagctaactcctgtgacatgtgtgggccattcttgaaagacattttgcacctggctgagcatcagggaacacaagcataaaaagattcatacctgagtggagccttatggaagtggtctttgtgagaaaatcttcagccaagtcaaacttcatgcagcagaatccccataccagaaaaattacctccatgctattagctaatgtggaaaagccttcagaagctactctgtttctgaccagcccaggaacctttgcagggccatctcacccatgcagcataaggcagaagccatagtcactttccatcttgcctggatccaaaaatttgcagcagtcctgtcctcatgcatggggaaaacagtaccctgagccttccttcctgtgttctctagggattcaggactgtgctcagctgaaccgatgctggttgaggggccttgagggaaatctaatttgagctcaggaagatgcacattccttgtggatgtggtcaagtctgtgtttaacccctaagatgtgtccattgaggccacaaatcaccctccactggaatcacctaccttgcctgcactaactggtgataataaagaccttattgatcaggtcacctttaatct

SEQ ID NO: 83931 - DNA, 350 bp, Homo sapiens
  misc_feature (270)..(270): n is a, c, g, or t
tccatggtgagcttattccaatcttaatggccttatatacagacttttttttttttccatatcccacatccaattcatcaggatgaattagctttgccttacaaatctttctagaatcgcaccacttcttacaacctccacagcttctagcctaagagtgttctctcatctctactaaaaatacaaaaaataaaaaataaatttgccaaatatggtggtgggcacctgtaatcccagctactggggaggcaggcacaagaactgcatgancctgggaggcggaggttgcagtgagccaggatggcgccactctactccagcctgggtgacagagtcaagactctgtctca

SEQ ID NO: 83932 - DNA, 507 bp, Homo sapiens
atggaaggcggggagcgtggaggggcgaggagaggctggagaccgccacggcgtcgagggaccccgctctcaccaggacccggggaccccggagacgagccccccgccaggccgcgccaccgcgcccatcctccctgcgggtcccaggcacccacagcgcggccgagcccacctgcccgccggctccccaggacgcagggtctcggaggctggggcggcggccggcctgaagcctcgcagccctgggcgcccccaccccggcccggctgtcgggtgcaccccgcattccctgcggtagcggctccctcgcgggcacccggggccgaggcctgcactcaccggccagcgtccgcaacacctcggccatggctccgcgtctggtctcggcctccgccttccgcccggcggccctggggcggggtgagcccgaggcgccccctcccggcccgcgccgcccgccgccccgacttcccgaggccgaacacgggaggggacagaggggcgcgg

SEQ ID NO: 83933 - DNA, 395 bp, Homo sapiens
gaaagtctaaagggggtaaagtgagtagctatgctgatattctctggtggaaataaatgttctctagccacactccaaattagagaaatttctccaattagatgcaacttggtgtaggacatttaacaaaatctcaaaagctaacagaattggggtcttacaagaaaaatgacacacttgcctgtagcctctaccgagatctcttccaacacccttgccagctattgctcaggcacaaaatgtgatgagaacacaaaatagccagacctccactcccactgtaacttggcgtgggaaaacaaaataattctaggcacaaaggacaaaggtaaaccagtcacatgcgttatatcagagcaaatagaatgtccaattgagctgcccaatcatgagca

SEQ ID NO: 83934 - DNA, 465 bp, Homo sapiens
agatctaaaggtatgatcagattcagctttacttttgtcaagcaaacttcttaggtaagtaggcagaaatgattagtagtctttgttcgcagcccttgattgtcagtgcctacagtcatttcagcaagcattgaatatattgatatttgaattctataacttcttttattaaatagaatatttttataaagataatttttcatgcctccactatttggttatcttgaggtatctcttacagaaaagggaggataaatgcttaattcttctccattatttactaggtttcacataatgaattgtttcgctaatatccttcaaaagtagccaatgaagctgggcatgctaggatgggcctgtaatcgtagctgctcctgaggctaagatggtacgaacctgtgagcctgggaggtcgaggctacagtgagccatgatcacttcactgcactactctgtctctttaaa

SEQ ID NO: 83935 - DNA, 227 bp, Homo sapiens
aagtatatttaagagatataaatcatacctattaacctttattgaatgtgtgaaatatactaggtacgatgccaaggaactttatgatacactgtttcatttaatcttcataataaccttatgagattattattataccccttcaaagactcagaaaggataagtgacttgcccagggttatacatgtattaagtgggagaatatgtcttattaggggaaggggtga

SEQ ID NO: 83936 - DNA, 865 bp, Homo sapiens
ctttactcaaatccttcttctcgctgaggctccctgagtatccacacataccttacctcctccacttttcctttttctcatggcactcgtcaatttttaacatactatatgatcgacttttatattatgcctgttgttcctttcctctccaccctgactcacaaaacatttgctccacaaggacaggagtctgttttgttattgtctatatgtctaaaatggtgtcaggcccataggaggcatccaaacttgtattgaaggaaagaatggaaataataggaaaatctccctcatatggttacagtgaagctcccgtgaactgataaacctaaagtgccggcacagaggaagtaccaaaatataagcctacgatgctcttgattttgcgatagtgaaatcccattataaaattctgcaatgccctgtcattttgtgactcagctataaatgcaaactcagtcctacccatcttggcttactaaaattggtaaatgtgagctccttgagggcaggattcacatatcctttgccatccttgaatcccaacacctagcacaagcctgacctctgggagaaatgttccttgacttgaaatagcttatcctttaattctgaaagcctaggatgtaggaagtgtcagtgttacaacagaacttttttcatttgactcagactttgaaaaacagtttgtgtattttgcatcagtatttctcaacctgggctacccactggaatcacctgggaagctggatcctaccttcagaaattctgactcgttggtcgaggtggggccagaacatcagaatttttcaaaggtcttcaggtgtttggaatgtgcagccatggttgagatacacagtctaga

SEQ ID NO: 83937 - DNA, 785 bp, Homo sapiens
atggcgttgaggaggctgtcaacatctcggagttcttcccatgtgcaaggcagggtgctgagcctgtgatgcgtatgtatgaagccgtgtcatgctcaccactcccctattgagcagtgtgcgatccccaacctctgatgttacacggaaccagctacccaacgagttgttttttacatttcccttttggtgttctatttatctggccttaaacaggcctggctgagaatatttaaaatcagagaacgcacggctggacacaaggcaaaccgtattccacacgcgcatttgcttaggagcagagttcagcaacgtgacgctgcctcccaagggcttgggttgttcccccatcctctctccacgactccgtcccaccttcccagtacttaaaagacgacggcagtaaccaacaatgaatgccccagctcaggagagcagctttgtgaccggaaggccacggcttccaggagcctgaggagggaaggtcagccctgaggagggaacagcacaagccaggctcgcgtgttgacatgaagggttctctgagcccagcctgagcaaatactaacacacaccgcctgtgctggctactgtctagcagccactggtcccgaaactccacacagtcaggccatctctgaagccgccaacacgcacctactttctgggcaagaacacaaatctgtcatttgcactcgtgtatttgcaatcggtgcgaacactcacagtctctatgctgcatgtggggaacacgcagccatttcaactatgaaaaaaaagaagac

SEQ ID NO: 83938 - DNA, 138 bp, Homo sapiens
  misc_feature (52)..(52): n is a, c, g, or t
gatcaagtcactgcatgttgagaagtataggtataacttgtgaccatatcanagctcctttatttatgtagtttcttcacattttatgtgtacaatcaagcatgcctgctgaccaaggccagaggtggagtggaagcg

SEQ ID NO: 83939 - DNA, 496 bp, Homo sapiens
aattgaagttaaggcattttaaagacaattaacataagttgttctcctccatcatctccaacatggtatcaataccacttgatgagggcttggcttacaccaattttattaggggccttacaaacatcatctcatttaatcttgcagcctcaaaaagtaggtaccataattcctattttatatataagaaaatggggccattcatagtggctcatgcctataattcccagtgctttgggaggactgcttggggccagaagtttgagacaacctggacaacataacaaagccccatctctacaaaaaggtaaaaattaaaagattactcaggcatactgctgtgcgcttgtagtcccagctacctgggaggctgagggaggaagatcccttacagccaggagttcaaagctgtatttagctatgatcatacctgtgcacagccacaggactacagcctggacaacatagcaaagactcttgtctctacaaaaaagtt

SEQ ID NO: 83940 - DNA, 307 bp, Homo sapiens
gaagcatttccattcttgctaataaagccaattggtccctcctgtgttttttgttgagatcttgaccctttccagatgatcttctttgacatgaccagatgtgaccccattctgactccttcttacaaaatgcccacaactggtccgtagggaaacactcacatattatgaaccccagagtaatttgggcattggtgattccccactcagcaaatttctctttgctcagcataagtagagctagacagtcacttggactttaggtttctcatatacatgggtcagacaccagtctatacgcacatca

SEQ ID NO: 83941 - DNA, 189 bp, Homo sapiens
atcagtgtcaatgtggactcatgtttttttaaataaatatataggtacagataagtaaagaagtaattatggatactcaacatctgtgaaaaaaaggaaaagataaaaataagaaaaagaagtaattatggatatgtatgtatacatgggtttgtatacatacatgtatttcctagctctgtctactgt

SEQ ID NO: 83942 - DNA, 172 bp, Homo sapiens
gtgtatgtgtgtatgcttatatatataatacatatttatttgtacatatgtgcatgtacagatataaacacacaaggatgtttatcatagagttgtttataaaagcatccaactaacatttctgtatctatgcaattgaaaacaacatagccattcaaagggatgaggcaga

SEQ ID NO: 83943 - DNA, 442 bp, Homo sapiens
atccatgtattgaacttcagttcagttccagtatacaaatatagcagtatcagaattacatactggtaccctcctgggaacaattttatcaagtagagtgtacacacacacacacacacacacttctgaaataatcagtaattttttaattgccatcgtatagaaactgaatatttggccttaaggaagatgggatttagatgaggagtagaatatagagaacttgctttctctctcactgccttattagaaagaaagaaaagaaaaaaaaaaaaatgccgggggggtttccatttgggggggcatgtttgtccccatcacttaaaaggctgtggccaagtgcgggtccagggaagcagagttggaaggggagggttagggacagggcttgggggaaagatccacgaggggaatagaagagttctaaatttgagaaggctga

SEQ ID NO: 83944 - DNA, 911 bp, Homo sapiens
ggaaggacccctgtccccgcaggctcgagggtatccgttccctccgcctgacctcttcctgcttaggacacctgctcccatgtcagagtggggcggagcctggacactgtcacagtccagccaggtgtgcccatgcttagggcaatgctgacaccccaggctgacaccccagccccctgtcaccttctccccctccagactttgggcactcgcaagtgtgaaaggggaagcctagaggaagctgagggtggttccggaactggcctgcaggtgccccttagtgccagcagcctgggtaccatgaatagccgcaggaggcagtctcctgggtggaagagggcgggtcccgggcaagggagggcctgaagactggggccatgctgtcagacccgcagacaggaatgggagcttgtggtacattttccaggcccacccatggcaccccatgaaccaatcagcacgcgcttcttccccctctgaggcccataaaagttccaatctcagccagagcaaagaagaggacacagagatgctggaacgaccaggtgcacacaggagctaccctccctactgaaagctgcagacgacctgcctgccaagtggagccacccactctagtgcctcctctcgctgagagctgcagacaacaagatgaccagcaacagagaggagctaccttgtctgctggtagctgaacacttgtgggaacgacctgcctacagagaggagctaccctttctggcaggagcttaatattcgttggtacaccctggctgtggagagaagctgcctccagcaggtcttctctgagctgttctatggctcaataaatctcctgtttgtcttgctcaccctccactttcttcctggtcgcaggacaataactcaggacccattgaacggtgaggcta

SEQ ID NO: 83945 - DNA, 959 bp, Homo sapiens
cttacgggccactttgttatgatgagtcctgggccctatggagccattgttgaggatttccagcagcacccagtctgcatcaacaacttctggaagcagagagtccctgaaccttggagcaaggagaggtatttgagattaggttgtttctgcttcctccgtttaccaatagggagagtcggatggagagaggcctgcatcaccctctggggcacatggcttgtgtggagggagcagcagctccttgggagttgagggtgcagaatcaggggcagcgtggatggccttggggtcaggccaccctgggctcaaatcctgactgttgctgtgccactgagcatgtgcctgagctctctgggccgcagtctcatgctggctggatgagtggcatctcagggctgccgtgtgccacgaaggcaccgagagcaggacttgtgcaggatgtgcgtccaccagtaccacacaccatcttcctgatgagggccagggcaaccaaggtcctttgtagacaccagcaccttctaacttggtgaggtcctggctgccgtgccgtgcatggagtcacctgcctgcaaacagccactctctatcctgctccagtccagtttgaaaaacaagcaaggtctattccagtgaagagccaccagggaagagtcaaggagggcatctgctgttcaaaccctgaccccctcttgctaatgatggcatcacgcttacttttagatgtaacatacagcctcggaggggttggaggagaggtccatggagatcacctggctcagccttctcgttttccagatgattttttttagtccaaagagactaaatgacttgactaaggccacacagcatgtcagcgggccagctaggactccacccacagcccctgagtctggggatccctgtgctcttggctctgagcaaggctgcctcacttcattttagtttagtctgtgtga

SEQ ID NO: 83946 - DNA, 647 bp, Homo sapiens
ggatcactctgtcgcccaggctggagtgcagaggcgtgatctcggctcactataacctccacctcccaggttcaagagattctcctggcttagccttccaagtagctgggattacaggcacccgccaccacacccagctaatttttgtgtttttagtagagatggggtttcaccgtgttggccaggctggtgttgaactcctgaactcaggcaatctgctcaccttggccccccaaattgttgggattacaggtgccacccggcctgatgacatgtttaatggacgtcactaccagcaattttagctgaaatctaggaccttttaaacaactttgaagtgtgtgatggatgcccctagtctagtgggcagaatggatcggaggtcggaaggtctggatctccttcgcagccgtcgctctgactcacatgacaatatttagaaaagcagattcttctgtcttgactccgttgatctctgctggacttccacgcttagactttgatggttgctattccacacattgctcccaggctccacatcccttcccaggaatcctgaatatggtagttggagagattcttgaacatcttgggttatatggaactctctacctctcaagatattcttttctaccttcggatagctc

SEQ ID NO: 83947 - DNA, 177 bp, Homo sapiens
ggcacattcaaccttcaaacctgggaaagatccaggtctggcgtggtctcagctatgaattcactcatgtgcctcactttcctgccccaccttcaagggctggcaccaggactccacagcccatgagtcatagacagcactgaaaccatggcccgggacctccatactgcaccatga

SEQ ID NO: 83948 - DNA, 658 bp, Homo sapiens
atggcttttctctggggggggatgggggagcttagttcatgtcctaagagaaaattcaccttcttaagtcaacaaaatgatgttttaaaagcctgaaggagcaaatcgtcagtagcacatctagaaccacaccaccccgatgccaccagggtggcctggtggcctcaagcatgatgtcaggtggagctctctgcactttgctggcagcagatcttcgcggagagaagcacggggagggtgacatgtggtacagagcaggaacgatggctctgtgcgatagcagcagacaaaggttgccatggcaagcctgctcaggaggtaggaggggatgctggtaaggtctgacgcttctggctgctgatgccgtgagcagaaatgtcctttcatcttcagtttttttcgaagcaaaaaattgtcttttcttccacaagaactttaaaacccaattaagagaccattttcccagaccacatttgtccagcctcacaacaacagtttgccatttgactcagacacgcatcactgcgctgacgcccacagctgtgattacagctctgaggggatcaataatgcaggctggctcacaggctgtcaccaggctcctgtgctctttggggcctcaccaattacagacaatcagccttgtctgctgagaagg

SEQ ID NO: 83949 - DNA, 228 bp, Homo sapiens
gctcacaccccgggagatctgaagtccaagatcaaggtgctaacaaggtcaaaatctggagagggccccgtccttggggtgcgcgatgtccaacttgtttttatgttctcacatggtctttcctgggtctgtgctcacagagagcactctggtaactcttcttataagagcctcaatcccataatgagggccccaatcccatgatctcatttaaacccaattatctcc

SEQ ID NO: 83950 - DNA, 277 bp, Homo sapiens
ttccttatatctacccataacatttatgctatgtttgtaagagaatatgaacatgaaacttaacactttataaggtaaaaatgagatggtttccaagatttaataattggatcaagttcttgttatttccaaatagaatggacttggtctgttaagggctaaggagaagaggaaggtaatggtaaaaattgtcaatgactggccgggtgtggtggctcacgcttgtaatctcagcactttgggaggccgaggcaggccaatcacctgaggtcacaag

SEQ ID NO: 83951 - DNA, 604 bp, Homo sapiens
ttctggggaacttatttatacacacatgccatatttcacagaggcacgcagtataactaagaaaaataagcaattttacaaatattatatgaagacggatttgttgattttaatttccaatttgtatacaattgagtggtgagataataaataataattcatttctccagtatcattggggacttaagtgaatttacaagaaaattagtttattctttctgttgctaaaatattttttgcttataaatttgagagagaaacatttttgaatatatagagaaacattttctgttttattaaacagagttctgagcataaacatttgtggggaatttaagaccactactctaaaaattaagtgttgtggcatgttataatatgagatcttgcttccagactctttgaggttcattgggtttagtacattcattcatttatcctacaaatgtttttagagtacgtgccaagtaccattgttcagatcactggagagtaagcattaggccaactaaaacttcatttcagatagagctttctatctagtgggagagaaagacaacaaaacaattaaatgagtaacaacataacatatatgtattatgac

SEQ ID NO: 83952 - DNA, 253 bp, Homo sapiens
ttttaagagttggcatctagttctgtcgcccagactagagtccaatgatgcaatcacagctcactgacctcaagcgaccctcccctctcagcctcccaagtccctgggattgcagcatgagccagccatcacacctggcagattagacacttcctctattttttattttatgtatttatctatgtattttttgagacagagtctcgcttgtcgcccaggctactttgcagtggcactatctcggctcactgca

SEQ ID NO: 83953 - DNA, 788 bp, Homo sapiens
cgccgccgccgctggccaaaaagcggagcccaggggaagcgtgtcctgctcagaccgccttccttctccattgccacccgtgccgaacagccaggctgcccaattgcaactgtagaccaatgaactaatccatcgcccgcagcccgactctcagcagcggttcgtcccggtgcccacccccgcgaagcggagcgcccgggcacctagcctccctgccggccacctagcctccctgccggccacgatgccgaacgtgctgctgccgcccaaggagagcaacctcttcaaacgcatcttgaaatgttatgaacagaagcagtacaaaaatggcctcaagttttgcaagatgattctgtcgaacccaaaatttgctgaacatggagagactttggctatgaaaggattaacactgaactgtttaggaaaaaaagaagaagcttatgagtttgttcgtaaaggacttcgtaatgatgtcaagagtcatgtctgttggcatgtatatggactcttgcagcgttctgataaaaaatatgatgaagctataaaatgttaccgaaatgccctcaaattagataaagataacctgcaaattttgagggatctctcactgttgcagatccaaatgagagaccttgaaggttaccgagagacaagataccagcttcttcagttgcgccccacacagcgtgcctcctggattggatatgctattgcataccatttgctgaaagattatgatatggccctaaaactgttggaagaatttagacaaactcagcaagtaagaa

SEQ ID NO: 83954 - DNA, 385 bp, Homo sapiens
tcaaacatggatgttttcaattttcactcatctagtagtatctttattttcaggtactgagaaactataatactggcttgattatgtagtcagagtaagcatattcaaccagaagggtctcattgcccttgtggttttatcttaatgaccgtctcttgataaggtaccatgactaaaaattatttgaggatttgagtagatcctatagccaaataagcccatagtaaaaatagcaaagattattttgaaaataaagtgtctttcttatacttaaagaaacagttcataatctttaacccatacccaaaatgaaacaagtgataggtgaatagttccacagagctatattgtcagataaataattttttcagagtaagtttaaaat

SEQ ID NO: 83955 - DNA, 455 bp, Homo sapiens
ccatctgcggtggaccgaccaaaatgcagattttcgtgatcacgctgctcctctgggagctggcaggaaatgcagtcgtgaacaagacacgttcccacctcacagccttagtgatcctccaggagctgagctgcttatacaagtacctttgacaccaggaagaagtgacgcagtctctgcaagaggaacacacagagccagggaagagaattctgggcctcaggctccccagccgcacaacctctgcagcaacccttgccctcctggacagagcctgggctggctcagagtccctgacttggcgagcactgcacccctcgttgtgggtaacacaaggtccgtccttgagtccatggtcagcatggactcggcctagccccactgagaggagaactgaggaaaggaaatgagtatttatttagggaccactttgtgccagcacatgtggcctcttc

SEQ ID NO: 83956 - DNA, 638 bp, Homo sapiens
gacgatgcagcaaagcaggactccttcctccatggaatgtgctgatttcagatgaggtggcagccagtgtagaaaacgtttcctagctcattttattgtaataatgcagaatataataacacaaaatatgtatcaattgatggtttatgttattggtaagggttttggttaacagtaggctatcagttgttaagattttagggagtcaaaagttatacgtgaatttttgactgcatagtcagtgctcccaagctgcacattgtttaagggtcaactgtatattgatcttatattaccatatatgtaatcttatagcatagagacttggtaatacgtactttgaaattgtgtgtgttccttgaatttgaagtgctgtttatgtttatatattctctgtacaacatattttatatatagaaaagccttgctgagttaagtataatgtatctgagataattatgggaatatttgttattttcttgtacaatctttgcagaccccaaaagtttttagaaaaattgaacacaagtgatccttgtatagattaaaatcttcatttattaaaggacctaagtatttctcttaaaaaaaaaaagcatgaacacacgcgcaaaagaccccggccctgaaaaccgagg

SEQ ID NO: 83957 - DNA, 351 bp, Homo sapiens
gacagactgaaggaatatatgcagcttaatttaacattttttgaaattttatattgcagaagttgtacatatttactgttgtgaaattagaaagaattgacaggcaaggagggtggtctacaaagcactccatagatccaccatactgagacaatgcttaatgctttgatggatttatttattttatactttctatgcatatgcatgtattgtataaatacgtatgcatggttaaatagaaatggttctccttggtgttctgtttatccatttattgttgtgaagtaaatccccaaagagtaggtttgctttgcctgaggagtcttttgctacatactgctgtacataatg

SEQ ID NO: 83958 - DNA, 338 bp, Homo sapiens
tagagtggtttcttttccccagtgtggactgatataacacaagataaaaaggaatttgaagacttagggagttatataaaacagatgtgaaatctgaataaactatgacatacagtgttgttaaggccttgagaattactctcaaacagaacttactgcagatagctgttagttttaggagatgtcttagtctattttctgttgctatagcagaatacctgagatagggtaatttataagagaagagtattttttttttcttatagttctaggggctggaaaatccaagatcaggcagccacatctggtaggcttccggtaagggtcttgtgctgtgt

SEQ ID NO: 83959 - DNA, 595 bp, Homo sapiens
ttagggtcgctgtcaatctacagaagttaacctgtccatccatgcacacattccaaccagtggtgatgtacttaagggtaaatctcaatgcccttagttttgaatagctcccagtatgtcccacacattaccattgatccttaattatagtaactgtgtgagtgatagataactgtcatctttgcagttagggcagaaggtatgtggctttcccagggtcattgggtaggcagtcactgattgggctggaaaagagacttgatgtgtagcttatacatgcccttctgcaccttctttccaaagttagtttcttccctagttggaattggatgtcctcaggtcttaaaacttgtgcagttgatgctacttctatctagactttgaatgatttttaactcggaccttggcagtaactcctagatagaaaatactgttaatttttttttttttaaacctcagggagctaattggaacctttccatttttcctatcctctgctgacagcttgtgatgtggaattaccttctctgaggaatgctaatgttaacatcatcaagagcaaggaatgtctctttgcctacttttatgaaacaag

SEQ ID NO: 83960 - DNA, 701 bp, Homo sapiens
tctcactagctgttttgggcatttaatactcttgagccagcagctctaccctgagtccgctggctttttccactgtcatacattttgagccccatgatccatttggctctccttgaatatattctcttctgatacttgccagctttgggctctaggtgtttgagattattgttgtacttaagggtaaatctcaatgcccttagttttgaatagctcccagtatgtcccacacattaccattgatccttaattatagtaactgtgtgagtgatagataactgtcatctttgcagttagggcagaaggtatgtggctttcccagggtcattgggtaggcagtcactgattgggctggaaaagagacttgatgtgtagcttatacatgcccttctgcaccttctttccaaagttagtttcttccctagttggaattggatgtcctcaggtcttaaaacttgtgcagttgatgctacttctatctagactttgaatgatttttaactcggaccttggcagtaactcctagatagaaaatactgttaatttttttttttttaaacctcagggagctaattggaacctttccatttttcctatcctctgctgacagcttgtgatgtggaattaccttctctgaggaatgctaatgttaacatcatcaagagcaaggaatgtctctttgcctacttttatgaaacaag

SEQ ID NO: 83961 - DNA, 325 bp, Homo sapiens
ttagggtcgctgtcaatctacagaagttaacctgtccatccatgcacacattccaaccagtggtgatgtacataaggctcatgttagcgtcagtattccccaaggaagcaagactgtctctgttttacaaaagggaaaataaggcaaagatgctgggattttcttatgatctgcaaggcactatgcagagccaagaaaaaaaatttgcaggttttgctggcctcagcaaaatctctggtggttctgtgctaggtttcaaccaatttaacataggaagtttaacatataccaggtgcgtgactcacgcctgtaatcctagcatttt

SEQ ID NO: 83962 - DNA, 207 bp, Homo sapiens
aatacattggatgccatcaaaagataaatatttttgcaccacaaggacggctatcaacaaagtgaaagaacagtctacataataaaggaagaaaagatttacaaatcagatatctgataagcatctagtatctagagtatataaagaactttttcttcaacttttattttagaatcaggcagtacatgtgcaggtttttcacatggg

SEQ ID NO: 83963 - DNA, 611 bp, Homo sapiens
ttcttcctttcttctttctttctttctttctttctttctttctttctttctttctttttctctttttccttcttttggcttcttagtggtttgaatacaaggcgtggtgaagagatataaattacacaagaaactacaagctatgtcatatgtctacctctctagctgacaagggaagcaggggaaatttctcttccaattgtctgctctgaaggtcatccaaacataattatcaggtggggtgggtgaactcttttattcttttaatcatccaacaaatatttctcaagcgcataccttgttaagagactgttttgggtacagtaattcacagtgaataaaacacagatattctcacctttgtgatactacgtcatagttgcaaggagtggggagaaacagacaggaagcaaagaagaaaaataaacaagaagtcatgtgataatatctactgggagggactcattaggcagtaaaggactcggcagtgtggaggtgacacattcagttttcagtagaagaatcagggaagttgtcactttgaagctatcatttagcttccctttctttcaatcttctttctttacatgggaaataaggattgtgggata

SEQ ID NO: 83964 - DNA, 443 bp, Homo sapiens
tcaggaggctgagacagaagaatcgcttgaacctgggaggcagaggttggggtgagccgagatcgcgccactgcactccagcctgggagacagggtgaaactatgcctcaataaaaaaagaaaaaaagaaagaaaaaaaaagaaagatggcaagatggaaaatgagaaaataaatgggaaacaaaagacacacatgcaggtggacagtgagaaaaaacacctcgatttctgaaaagactgagcaagatggcgattgggagacagaaggctgggggctggggtcaggaggaggacggggagtggtgtggagacacatgtagattattaccagaaaaaattcatgttcctaatacctaagtctatcagtgtgagccaaaataagtggaataaagacatcttgacaaggatggcttagaatcaaataccatgtttataatatatca

SEQ ID NO: 83965 - DNA, 797 bp, Homo sapiens
tccataaacagtcttgcgtcttcagatctgtgttagttttctattgctgctgcaattaattactgccaatttagcggctgaaaacaagaaaaatttgttatctgacagtctggaaatcagaagtcctaaaagcaaggtgtcagcaaggttgtgttatttctggagatgctaggggagaatccatttccattccttttccgatttcttggccttcgttcttgtccttgcatgtagctccctacgttgtagaaccagcaacaacgtgtggaatcctgaggctgccatcactcaggctctctgcagttgaggaatgttccccacaatttcaaagactcacatgattagatcaggttcccccggacaatccccatcccaagatccttaacttgaatcattactgcaaagtcccttttggccatgcaagctaacatgttcacaggtaaccagagttaagggatgggcatctttggaggcttttattcagcagccaccatatgtgaaaatgagaatgagaaaagggttgaatttctcctgactaggcatttacgaaactcagagccatgaaatatatctagttgtcttaacttcaagttttgctttgccttcttgacctcttctctgctattgcctctttcctatctatttgctgtttttaatgtgttaagtttcttattatacctgtgcttttactacaaatgaatagtggttttattttttccttcactaacaagtaaacaaaaataatatttgcagtgcatatttaatacttcagccttttaacttgccaaacagtaatg

SEQ ID NO: 83966 - DNA, 2108 bp, Homo sapiens
ggatatattcctttacctcacatgaccccagcaactgtggtggtatctagaggtgaaacaggcaagtgaaatggacacctctgctgtgaatgttttagagaaggaaattcaaaaaatgttgtaactgaaagcactgttgaatatgggtatcggctttctttttcactttgactcttaacattatcagtcaacttccacattaatgaaagttgaccatagttatttccaaataaaaagaaaccaactcttaccaggtcttggactgtgatgtcatattattcagttttatgcttgttcctgagcagaactcataagagtgacatagtcagctgctgacggcacctcagccacgccactcttactcagttcagtgggtgtgcttgcgtggtaggatgtggtgcagccctctctacgctcttctatttttggtatatttcctatctaaccttcaaatagcttccaattctttttttcttggactggcttcattctgaatttgtgctaaaataatctttcataaagagacctcagtttatagcgtaacagactacacaatgcactgatgttttcataatgtttaagggacccactgcaagaaggttgctgcctccttttaattgtattcatttagattttgattttccatgttaagaaggtgaggtccatgttggtgcccttcagagtagagaaccatgtaaacattaggaatgaacagaggccttaggaatgaatagagagtttgccttatacaatttcctgttacaaagctctccctctcatgcaaagtagggaacaccttttgagcatctttgaatttgacaaatggtgctgttgcaaacactttttttttgagatgaagtctcgcggttgtcacccgggctggagtgcagtggcgtgatctcggctcactgcaacttccacctcctgggttccagcagttctcctgcctcagcctcccaagtagctgagattacaggcgcctgccaccccacctggctgatttttgtaattttagtagagacggggtttcaccatgttggccaggctgattaactcctgacctcaggtgatccacctttctcggcctcccaaagtgctgggattacgggtgtgagccaccgtgcccggcctgcaaacacattttaattgacaacactagggctgttgtacaaaatagtaatgatagccatggaagttttaccttattctgtgagaagtgttcttaaacttattaagtgtctaaactaaggtttagtgcttttttaaaggaaagttgtcccaggattcatcctaaagaaagcaaaagttaattcaactgatccaccaatggaattagatgggtagaagttgggttcttgagtttttaccaccacttagttcccactgaattttgtaacttcctgtgtttgcatcctctgttcctattctgcccttgctctgtgtcatctcagtcatttgacttagaaagtgcccttcaaaaggaccctgttcactgctgcacttttcaatgaattaaaatttatttctgttctagtgggaatgtgtcctttgttttagttcacaagtagtaattttgacaagatgctttcttctgatgcagtttgttttaatcactcacctagtactagaaatgggctttctagtcagatcctatagtctctacctgtatagctcttacatacatggcccctactgataacccctgaatgaagcaccatgtagaaaatatttcctgataaatctgtatgtatttacaaaaaaaaaaaaaaaaaaaaaaaaaaaaaaaaaaaggggggggcgcgcggctcaaaaatttctcccttggggggcgcccaagttaatagggtatccccaggtttttttgtcacaaggggggctcccatataaggaggaggcggtattaataaaggcatagagaagagggccgcgttgttaaaaaaacgttctgtagacgtgggaaaactgtgatcgctggggaattctgggagaagggaccgctattctcggggggggggaacattgtggacaacttccattacaagaaatttaaaggctcaggcggaattataaaatttcacgtgtatatggtgttaaaccaggtgattttg

SEQ ID NO: 83967 - DNA, 583 bp, Homo sapiens
ggggattcatgggattcaggaaaccagagttgcagccagtgaaacagcaatcaaaatgacctgagcacacaagctaggcagagcctgctgccctcagtccaactggaacgagttccagtccaactggaatgagaggatttcggggaggaaagtggaaattctatattacttattcattgactgcatcagacaatatattaatccatatgtgttttgaaaatctagaagtgttttacagatttggagaaaattagcaattggtcctgagaaaataatcaaatttaaaagaccttaattaactgcaagaaaaagtcgagtagaaagtataatcataatacactactttgctcaacagtcatgaatatttacataatgataacgttgaatacctctaaaatatgatatttatactctaggtttggagagaatagaactatttaagttagcataaatacttatacatgaaagtaaaaaggtaatatatagtatctaaaatttagaagtcaaaaattacaataagagtatgttatctgaaaatatggagttaaattacagaagagatagctgaaagaattgaaaatgt

SEQ ID NO: 83968 - DNA, 338 bp, Homo sapiens
ctactgtcccataagagacagcccctgtttgtggccatttctggacatgtttttctcaataaagtaacatggatgtgggcttttagggtgagtaaagtacagttttataaaaattttgtaatgtgctagtgttcccgtactttttactgtctggtatcctaagcatgaagcatgtccaagtttaaagtaggaaaacaatagtcctagtgatgccgagaaactcaattattcctcagaatgccatggtcatctgcacacaaaatgtacctttaatgtgactgtgtaatttgtaaagttgacaaataaagtgctatgaatactcctctcctctttgtgga

SEQ ID NO: 83969 - DNA, 463 bp, Homo sapiens
tgcatttgagtggaacagaaatagaacttgttctctgaaggaaaaggtccaaattaacaaggataaaaatcccaacatctcagccttgaggaccagattcaaatgaataagaactctggctatgtatcattaagaaaagccagataatggagaaaggaatcctttgatttcactatcagctgcaagcataaaaaccacatgaccaagtaattccatggcgggctctgagacagcgacttccaaagctgcctgcggtccagaggtagaacaggagggactagaactctggaactgaaacggtggggccttacaagccacttaacctctctatatcccttcttctaaactaagagcagcagtgtctaccttacaaggctgctgtgagaattagggagatatacggtaaagttaatcaaactgtaaatttagcttaggtgaatttgtgtaaggtagaaaggcagga

SEQ ID NO: 83970 - DNA, 1905 bp, Homo sapiens
gaaagagtaaaggcagagtggcagttaaggaggtgatttttccatcaggggttaggtgaggaaggcctgaattagggcagtggccataagtctcgggggcggtaggtaagctgatgagttctttgggaaataaagttttcagatcttgacacttctttgagttatgagtgagggagaatgagttgtcaaggatggcatccaagtttctggcttgtagggtttactagatagaaatgaaagcaagtctctgaaaacaaacctaatctaatagtcatcctacatactacagctgcagcctcccttccccagctggtcacagcccaaatgccaagggtgaggtcacagggcctctgtggtcaaaatccaggatctccacttcccaattccatcctgactccatctcaccattctgcaagctggtgtcaattcaaccaccctccatatactctgctcaagagaaggaaaagatgaggaatgagaaaggaaaaacattaaagacagtaattcttccttcaaaaaatggggaaaggtaaatattccatagggctctggcagtaaggaagggaaaaaagatgggaggccagtcatgcagccatcggccatgtggctacagcttccttcttccacctgcccagtccttattctcctgtcttcaggcaggctctcactggttggggttctggatccagagcggcaactctaacctctgttcctgaggctcttcaacccttggtgggactctgattagagtagcagcttcttcagcccaccgttccgcggggcattgtgccccaggtgttctctggttcctcctgtacctttcctggccacaccagggtgtggtaacaatcacaggacaccctgagtctcagggtcggtcatcagcctgacattctgacccccttttctgtctcttcctaatgccacagggagcctcaaatggcacggtagaaatctcagcttctaaagggattatgacattgtgccctgtggcttccttccctcctttctttccttctttccttccttccttccttccttccttccttccttccttccttccttctttccttcctttctttcttctttttttctgagacacagttttgctcttgttgcccaggctggtgtacaatggcctgatcttggctcactgcaacctctgcctcctgggttcaagtgattctcctgcctcagtcttcccaagtagctgggataacaggcatgcaccatcacgcccagctaattttatatttttagtaaagatggggtttctgcatgttggtcaggctagtctcgaactcccgacttcaggtgatccgactgccttggcctcccaaattgctgggattacaggtgtgagccaccgtgcccagcgggcagcattcctttcttgcatgcccagaccttcacactgttgattaggaggacaagaatgataattctgagagtgggtcattgatgccatctgagccatcctttccctcctctagcctatagatccttgagttttttagccatgaagggaaaacactgtaagttgtttctggttccattcatagcacagccagcaaccttcctgacatcacttagtctttgcaaagtggtgtccacctacctggcaccaccctgggtctttactaggacagcctatcactcagccacttgcttctagataacagacacatggtgagatcagcaaatcctgtggacagtagccccaaccttatttctttgtgtttctttggtagttttattttgaagaattttagatttacagaggcattgcaaagttagtacagagagttcccatatacccttaacctggcttcccctaatgttaacatcttcataaccatggtacttttaaaattaaaaaattaacatttgtataaaaaagttaac

SEQ ID NO: 83971 - DNA, 589 bp, Homo sapiens
actttaccagcaacaatgaaaagtagaaaacaatgtcttcaaaattcagaaggaatatgattatcgagtagacttacaaagctatttgaaaatcaaaatgggccgggcacggtggctcacatctgtaatcccagcactttgggaggctgaggcaggtagatcatcagaagttatgagatcgagaccagcctagtcaacatggcgaaactttgtctttactaaaaatacaaaaagccaggtgtggtggcgggcgcctgtaatcccagctactcgggaggctgaggcaggaaaatcacttgaacccaggaagcggaggttgcagtgagccgagattgtgccactgcactccagcctgggtgacagaatgagaccccatctcaaagtaagtaagaaaataaaataaaatcgagatggttacccaattgttcaaacatcttttaatggcttatctctcttttctctttggatttaaaatgccacctttagcatatataattatatattactgttttgcttacctttaacagaaaacttaattgctttagatggtagtggtcttcctgcataagtgtctgcattactttcattc

SEQ ID NO: 83972 - DNA, 1740 bp, Homo sapiens
  misc_feature (577)..(577): n is a, c, g, or t
  misc_feature (579)..(579): n is a, c, g, or t
actaagtggtgatgagcatgagtaacaattggaaatctcatacattgctggtagaaatacaaaatggtaaagccatttggaaaaacaataggcaatctcttataaacatactcgtccatttgacatagcaatcctatttttaggtatttatccaagagaaatgaaagcatatccatacaaacacccgaatgtgaatgctcatagtagcctaattcaaagtagccctaaactagaaacaatccaaaagtctaacaactggtgcatggataaacaaattgtggcccatccacataatggaaagctacccagcaatggaaaggaacaaacaagtgatacatgcaacaacatggatgaatctcaaaagcactgtggtcagttgaaaaaaaaaaaaggcaaacacaaaggagtacataccatatgattccacttatatgacattctagaaaaggcaaaactatagggacaggaaacatcaatggttgccagggactgtgggtgaggagaggagacttgactataaaggaacatgaggaaatttttcagggtgacagaaatgttctgtatcttgatatggtgntntaaaagtgaggtataatttatatacagtaaaatgcacaagtcttaaatgtacaactcaattaatttttacgtatgtatacaccatgaaaccttcacccacttcaacatacagaccatttccttcaccctggaaggacccttgcaccttattgaatcaatacctagtcctccggaggtaaccattattctgatttctaccaccatagattagttttgcttgattttgaatgtcatatgaatggaatcatatacttttttgtttggcttttttttttttaatctcagcataaagtttttgagattcatccatgctgttctgcatattacaacatttttttacttttattattgctggtgatattccattctctgattatatcacaaactgttctatgtttttcttgatggatatttggattttgtcaagtttttggctattagtaattaagtggctatgaatattcttgtataagacttttggtggacatataaactaatttttcttgagcatattcctggatgtggaattgctgggtcctatagttggctttataagaaactgctggccaggtgcagtggctcacacctgtaatcccagcactttgggaggccgagatgggtggatcacttgagctcaggagtttgagaccaacccggcaaacatggtgaagccccgtctctactaataatacaaaaattagccgggcatggtggtacactcctgtaatctcagctactcgagaggctgaggcacaagaatcacttgaacccaggaggtggagtttgcattaagctgagattgcaacactacactccagcctgggtgacagagtgaaactgtgtctcaaaaacaaacaaacaaacaaaaaacgaaacaaaggccaggcgtggtggctcatgcctgtaatcccagcactttgggaggctaaggtgggcgggtcacctgaggccaggagttcgagaccagcctggacaacatggtgaaaccccatctctactaacaatacaaaaattagccaggtgtggtagcacatgcctgtaatcccagccacttgggaggctgaggcaggagagttgcttaaacccgggaggcagaggttgcagtgagctgagctcaccactgcactccagcctgggcgacagagtgagactctgtcttgg

SEQ ID NO: 83973 - DNA, 831 bp, Homo sapiens
  misc_feature (760)..(760): n is a, c, g, or t
  misc_feature (764)..(764): n is a, c, g, or t
cgacatcagagatgaggacagcattgctgctccttgcaaccctggctgtggctacagggccagcccttaccctgcgctgccacgtgtgcaccagctccagcaactgcaagcattctgtggtctgcccggccagctctcgcttctgcaagaccacgaacacagtggagcctctgagggggaatctggtgaagaaggactgtgcggagtcgtgcacacccagctacaccctgcaaggccaggtcagcagcggcaccagctccacccagtgctgccaggaggacctgtgcaatgagaagctgcacaacgctgcacccacccgcaccgccctcgcccacagtgccctcagcctggggctggccctgagcctcctggccgtcatcttagcccccagcctgtgaccttccccccagggaaggcccctcatgcctttccttccctttctctggggattccacacctctcttccccagccgcaacgggggtgccaggagccccaggctgagggcttccccgaaagtctgggaccaggtccaggtgggcatggaatgctgatgacttggagcaggccccacagaccccacagaggatgaagccaccccacagaggatgcagcccccagctgcatggaaggtggaggacagaagccctgtggatccccggatttcacactccttctgttttgttgccgtttatttttgtactcaaatctctacatggagataaatgatttaaaccagcagaaaaaaacaaaaaaaacacncaanaaaacacacacaaaaaaaaccggggtcttcttgggggggagaaaaatttaaggcagatatgttccac

SEQ ID NO: 83974 - DNA, 2111 bp, Homo sapiens
tggtcaccaaatactaggagcctggagctgacgacatctaggcacagagaaccccgacactgtgggtgctagactcttcaaatttaaaacaacatggagcccgaatcttaacgagtgtcagatttacaatgtttcagaatctgaggatcttagaactgactcctggagtcacggaccctgagagagtggagcagggggttgtcttgagatgcttctcactgggagagcggccatctagtccctgccaccagcccctcccggtccccaggtctcccccagcacagcccaggacagcccaaaggccaccaagcccttcctgtcataggctcagagcagccaagctggctgcccccggggccttagctccgtcaggccctcagaaacatagccatctcctccagggacatcccctggggtggggacaagagccagtgtcctcttggcagtcgcagagctccctgagaccttggaggaaaggcttgcaacacaccctagacaggggcagggcaggacacctcttccaagccggcccaggctggaatacatgtcccctgaggctgcactcagggcacatgccctgccaggacccagagcccgggtttgggggcctagggcaagggcagcagggcctctgtccaggaggggtctctgcaggtgggggagcaggccctgctgagtcaccaggaggcctctgttgggcccgctgagccggactccctccccgccagcccttaccctgcgctgccacgtgtgcaccagctccagcaactgcaagcattctgtggtctgcccggccagctctcgcttctgcaagaccacgaacacagtggagcctctgagggggaatctggtgaagaaggactgtgcggagtcgtgcacacccagctacaccctgcaaggccaggtcagcagcggcaccagctccacccagtgctgccaggaggacctgtgcaatgagaagctgcacaacgctgcacccacccgcaccgccctcgcccacagtgccctcagcctggggctggccctgagcctcctggccgtcatcttagcccccagcctgtgaccttccccccagggaaggcccctcatgcctttccttccctttctctggggattccacacctctcttccccagccgcaacgggggtgccaggagccccaggctgagggcttccccgaaagtctgggaccaggtccaggtgggcatggaatgctgatgacttggagcaggccccacagaccccacagaggatgaagccaccccacagaggatgcagcccccagctgcatggaaggtggaggacagaagccctgtggatccccggatttcacactccttctgttttgttgccgtttatttttgtactcaaatctctacatggagataaatgatttaaaccagaaaaaaaaaaaaaaaaaaaaaaaaaaaaaaaaaaggagcggaacaacaataaccgagggggggcgcagcaaaccgggggctactgaacaacgggcgccgggtccacacagggcgttcccgagcccccagtgttcgttcgaaccacagggtggaacaacccggcggcggctgccaccaatgggagggcaccctgatgaagtaccccaacaagcacggggattacccgtgatgttagaaaccgcggcggcaggcagccgggctaagaataaccggcgcaacacacggcgcgcgaaccatccgagccagcaagagaccctgccagtaggaagcggacccgagtacgaggggccgcgtacacccgagggccgagcacccgcaaaaaaccacgcaccggccagccgcgagacaaccaaggtacgcccacagcacgacagcacagtcagaccgcacgcaccgaacggaaacaaaggcaggaaaaccggatagcagcccaaccgccgataccgcagggacgacacccagagcaaagcgagccgaggcaaccacacacaaccggaagcaacaccgcgagcgcacaggccagcaaggagacgagggaactgacacaccacacaaacgacccaggacgggccgcaaacacggggcacacaaccgcaaccgcgaacgaacccaaccacggacaacggacaccgcagaaccaccagcccgt

SEQ ID NO: 83975 - DNA, 1961 bp, Homo sapiens
tggtcaccaaatactaggagcctggagctgacgacatctaggcacagagaaccccgacactgtgggtgctagactcttcaaatttaaaacaacatggagcccgaatcttaacgagtgtcagatttacaatgtttcagaatctgaggatcttagaactgactcctggagtcacggaccctgagagagtggagcagggggttgtcttgagatgcttctcactgggagagcggccatctagtccctgccaccagcccctcccggtccccaggtctcccccagcacagcccaggacagcccaaaggccaccaagcccttcctgtcataggctcagagcagccaagctggctgcccccggggccttagctccgtcaggccctcagaaacatagccatctcctccagggacatcccctggggtggggacaagagccagtgtcctcttggcagtcgcagagctccctgagaccttggaggaaaggcttgcaacacaccctagacaggggcagggcaggacacctcttccaagccggcccaggctggaatacatgtcccctgaggctgcactcagggcacatgccctgccaggacccagagcccgggtttgggggcctagggcaagggcagcagggcctctgtccaggaggggtctctgcaggtgggggagcaggccctgctgagtcaccaggaggcctctgttgggcccgctgagccggactccctccccgccagcccttaccctgcgctgccacgtgtgcaccagctccagcaactgcaagcattctgtggtctgcccggccagctctcgcttctgcaagaccacgaacacagtggagcctctgagggggaatctggtgaagaaggactgtgcggagtcgtgcacacccagctacaccctgcaaggccaggtcagcagcggcaccagctccacccagtgctgccaggaggacctgtgcaatgagaagctgcacaacgctgcacccacccgcaccgccctcgcccacagtgccctcagcctggggctggccctgagcctcctggccgtcatcttagcccccagcctgtgaccttccccccagggaaggcccctcatgcctttccttccctttctctggggattccacacctctcttccccactgcatggaaggtggaggacagaagccctgtggatccccggatttcacactccttctgttttgttgccgtttatttttgtactcaaatctctacatggagataaatgatttaaaccagaaaaaaaaaaaaaaaaaaaaaaaaaaaaaaaaaaggagcggaacaacaataaccgagggggggcgcagcaaaccgggggctactgaacaacgggcgccgggtccacacagggcgttcccgagcccccagtgttcgttcgaaccacagggtggaacaacccggcggcggctgccaccaatgggagggcaccctgatgaagtaccccaacaagcacggggattacccgtgatgttagaaaccgcggcggcaggcagccgggctaagaataaccggcgcaacacacggcgcgcgaaccatccgagccagcaagagaccctgccagtaggaagcggacccgagtacgaggggccgcgtacacccgagggccgagcacccgcaaaaaaccacgcaccggccagccgcgagacaaccaaggtacgcccacagcacgacagcacagtcagaccgcacgcaccgaacggaaacaaaggcaggaaaaccggatagcagcccaaccgccgataccgcagggacgacacccagagcaaagcgagccgaggcaaccacacacaaccggaagcaacaccgcgagcgcacaggccagcaaggagacgagggaactgacacaccacacaaacgacccaggacgggccgcaaacacggggcacacaaccgcaaccgcgaacgaacccaaccacggacaacggacaccgcagaaccaccagcccgt

SEQ ID NO: 83976 - DNA, 1446 bp, Homo sapiens
cgacatcagagatgaggacagcattgctgctccttgcaaccctggctgtggctacagggccagcccttaccctgcgctgccacgtgtgcaccagctccagcaactgcaagcattctgtggtctgcccggccagctctcgcttctgcaagaccacgaacacagtggagcctctgagggggaatctggtgaagaaggactgtgcggagtcgtgcacacccagctacaccctgcaaggccaggtcagcagcggcaccagctccacccagtgctgccaggaggacctgtgcaatgagaagctgcacaacgctgcacccacccgcaccgccctcgcccacagtgccctcagcctggggctggccctgagcctcctggccgtcatcttagcccccagcctgtgaccttccccccagggaaggcccctcatgcctttccttccctttctctggggattccacacctctcttccccagccgcaacgggggtgccaggagccccaggctgagggcttccccgaaagtctgggaccaggtccaggtgggcatggaatgctgatgacttggagcaggccccacagaccccacagaggatgaagccaccccacagaggatgcagcccccagctgcatggaaggtggaggacagaagccctgtggatccccggatttcacactccttctgttttgttgccgtttatttttgtactcaaatctctacatggagataaatgatttaaaccagaaaaaaaaaaaaaaaaaaaaaaaaaaaaaaaaaaggagcggaacaacaataaccgagggggggcgcagcaaaccgggggctactgaacaacgggcgccgggtccacacagggcgttcccgagcccccagtgttcgttcgaaccacagggtggaacaacccggcggcggctgccaccaatgggagggcaccctgatgaagtaccccaacaagcacggggattacccgtgatgttagaaaccgcggcggcaggcagccgggctaagaataaccggcgcaacacacggcgcgcgaaccatccgagccagcaagagaccctgccagtaggaagcggacccgagtacgaggggccgcgtacacccgagggccgagcacccgcaaaaaaccacgcaccggccagccgcgagacaaccaaggtacgcccacagcacgacagcacagtcagaccgcacgcaccgaacggaaacaaaggcaggaaaaccggatagcagcccaaccgccgataccgcagggacgacacccagagcaaagcgagccgaggcaaccacacacaaccggaagcaacaccgcgagcgcacaggccagcaaggagacgagggaactgacacaccacacaaacgacccaggacgggccgcaaacacggggcacacaaccgcaaccgcgaacgaacccaaccacggacaacggacaccgcagaaccaccagcccgt

SEQ ID NO: 83977 - DNA, 1077 bp, Homo sapiens
tggtcaccaaatactaggagcctggagctgacgacatctaggcacagagaaccccgacactgtgggtgctagactcttcaaatttaaaacaacatggagcccgaatcttaacgagtgtcagatttacaatgtttcagaatctgaggatcttagaactgactcctggagtcacggaccctgagagagtggagcagggggttgtcttgagatgcttctcactgggagagcggccatctagtccctgccaccagcccctcccggtccccaggtctcccccagcacagcccaggacagcccaaaggccaccaagcccttcctgtcataggctcagagcagccaagctggctgcccccggggccttagctccgtcaggccctcagaaacatagccatctcctccagggacatcccctggggtggggacaagagccagtgtcctcttggcagtcgcagagctccctgagaccttggaggaaaggcttgcaacacaccctagacaggggcagggcaggacacctcttccaagccggcccaggctggaatacatgtcccctgaggctgcactcagggcacatgccctgccaggacccagagcccgggtttgggggcctagggcaagggcagcagggcctctgtccaggaggggtctctgcaggtgggggagcaggccctgctgagtcaccaggaggcctctgttgggcccgctgagccggactccctccccgccagcccttaccctgcgctgccacgtgtgcaccagctccagcaactgcaagcattctgtggtctgcccggccagctctcgcttctgcaagaccacgaacacagtggagcctctgagggggaatctggtgaagaaggactgtgcggagtcgtgcacacccagctacaccctgcaaggccaggtcagcagcggcaccagctccacccagtgctgccaggaggacctgtgcaatgagaagctgcacaacgctgcacccaccctgcgctgccacgtgtgcaccagctccagcaactgcaagcattctgtggtctgcccggccagctctcgcttctgcaagaccacgaacacagtgct

SEQ ID NO: 83978 - DNA, 493 bp, Homo sapiens
ttctgggattacaggtgcaagccactgcacctggcccctgaacatctcatattccacaagaaggtctatttcaggacttggtagacaggactgcatacccctaagccactggtgtgctggaaaatgtttaattaccagctcttgagaggatggagatctcccctcttgtggtatttgctaatttcccaccacagccaatgtcaagctgccaacatgacctcactgaaagtggaccagaggaggggaatgccattggctgtggtgagctgggaggagcaattctggtaccatggccaccagcagtcccagtgctctacagccaagccctgagatctttgcacctgatagtcttacgcctgatcacgttacttatttattttattttgttttttcttttgtcagacctggtcaacaggaagtaattgcctgagctctttaaagcaactgagctgaatgtcaggaaactggagtcctaatccaggcccttttttga

SEQ ID NO: 83979 - DNA, 665 bp, Homo sapiens
ctatgacagccaccaagcttggtccaaataatagatcttattcagaggagagaaagaatcctgaagactgagaaaggcataaaacctttcctatagaagaggaatgtggggcgggtggcagagggccataggaagctgcctgtgcttttcagcagaagggcagcaagaccaatcaagtgtgagaatgacttaggggcggtgtgtacagtacactgaaatgacgtagagatgaaggggcaaattgcttccaataattatacagccatgaaaaaaaagtattatatttctagatccagaaaagcaatcatagaagctaagtataaagaagtcgactacaaaacaatatagataacataatcatgatttgtaagacatgtttcacatttggatagatgaggatattttgatagatacacgggaaaaagtctagagggataactatcacagctcaatagggacattatctgaatggtgaaatgtgtggttttcccgtccctcccttccttccttccttccttccttccttctttctccactcccgaaggaaggaaggaaggaaggacggacaggaggaaggaaggagagatagcaaagtggctccatcaataaaatgtatatttccttcaacctaagctcaatcattctctcttccactccccgggtac

SEQ ID NO: 83980 - DNA, 759 bp, Homo sapiens
atgcttcatattaacatagaaaagaaatttcttcacctatctcctgagtcttttgaaatcttcacatatattattttctaaattattattatttaaaattttcttaaagatggagtcttgctctgtctcccaggctggatagagtacagtggcatgatcttagctcactgtaacctcagacttctgggatcaaacaattctcccctcagcctcctgaatagctggggctacaggtacatgccatcatgcatggctaattttttaaaatttttcgtagagatagggtctcgctacgtagtctaggctgttctcaaactcctgggctcaagcaatcctcccacctcagcctcccaaagcgctgggattataggtgtgagtcaccatccctggctctatttttattatttaaaaaaaaattatatgtatatataaattccagtgaattgatagaggcagtacttcctatttgaagcatactagaatggctgaactctcagttgctgatgcctgaaattttatattggagttcattccttaggttaacaatttaaatcttaaatatctaatgaagggataatttggggggccttagcagtcattttcacttagatctttgtctgaaggtaggttcttaatatgcgggaaggcagagagagcttgagggcctgcctgtaccccaaacccctgtcttctcactcaggccttatattatgaagggtctggactttaatattatcttcaaataaggccatgtatgta

SEQ ID NO: 83981 - DNA, 310 bp, Homo sapiens
ttatacagatgtggttttgccatgttgcccgggctggtcttgaactcatgcactcaagtaatccacctacctcagcctcccaaagtgctaggattataggcatgagccactccgcctggctatgtgaagaattttaaggccttgttacatattatttaaacattttttagaatgacaaaaaagtttgggaaatagtgatgatgattgaacaacattgagaatgtacttattgccactgaaccatatggctaaaaattattaaaatggtaaattttatcctaggtatatttactataataaaaaggtcaaa

SEQ ID NO: 83982 - DNA, 514 bp, Homo sapiens
tatttgataatggactctcatatttttacattttctctaactagaacatatgctttagaggggtagaaaccatgtcttacattttccagtttattgcctgcagcatctggctcactgaaggacacaccgtagatgctcagtaatgtctcactgatcagtgtgagaaggaggtatcaggaggagattatcgggggtatctgctgctggagatggttgtattctgcttaggaatgatacagaatagcagacaatcctgaataggaagaatttattgtgtcagggggacaccagggtataaggctgaggccccaatgagaaatgcatgcctacttcctccttctcttcatggaatgagtaattgaacttcaagtgtcaggcattaagcgaagacagctgtggcaatcattttgttaatatatgagatgctggagccaaggtaaccagaaagagaaccaagcctttgagtgacagaaacaaaggcaggagccaccagtcgctgggtccaactagtcct

SEQ ID NO: 83983 - DNA, 869 bp, Homo sapiens
cagccctaggagagctgctcagggagcctcccctgtgggtgtttgctcctccccaggctgtggcccatttccccttcctccttcctgctcagcccaaaggcaggagtcatggaaccccaggaaaggacggaacagaacaggacagggcccccagccccatctttatctcaccggctgctgctggctgccaagcctcccctgaatgggggagggtggtctgtgtgagtcagcggaggcacgaagtggaggaagacgggagcctctgccaggcccgttgatgcgtggcctcagaaatgcgccgctgggttagggtctccccgaccgaggctcgaatccaggtcgaagggtcgccggagcgatggttggagaatgtggaaggagctggaggacacccgagtattcttaaagcaatccccatggccaaaatcaacagctgatctggataccatcaagacacctgaaatcttatcatgagccagatgctgaggaagagactccgggaggatcccgaggacggcccagttgcagccatgttgagactgacgctgaggaggaccccaactgtcacgagcaacacctgtcgaacacagccacccacctggggacagatcaagaagctgtcacagatggcagaagaaaacctgaggaaagcgggacaaccagtcacaatgagtaatttcatggtagctatgatagcagttatcaccactgctgtgagtattccttcaacaagggctgacacacagaacaattatacttattgggcatatttatcaaccttggctggcaataatgcctagatgtaatcactctatgacacagttacacatgctttctgatctcagtatttaccataatctgctcctata

SEQ ID NO: 83984 - DNA, 1099 bp, Homo sapiens
  misc_feature (487)..(487): n is a, c, g, or t
cagccctaggagagctgctcagggagcctcccctgtgggtgtttgctcctccccaggctgtggcccatttccccttcctccttcctgctcagcccaaaggcaggagtcatggaaccccaggaaaggacggaacagaacaggacagggcccccagccccatctttatctcaccggctgctgctggctgccaagcctcccctgaatgggggagggtggtctgtgtgagtcagcggaggcacgaagtggaggaagacgggagcctctgccaggcccgttgatgcgtggcctcagaaatgtatgcgtccagctgtgcgttagggtctccccgtagccgaagtgctctgtaatccatgcgtcgcataagggtcagcgcggcaagcgcatcggttgggaggaatggtggataggagcttggattggacaacccgattgtattccttatacatgcagatctcccactgggcgcagtactgttcatcgagctatngctgaatcagacattctcctagttaaacgcatactgccgaagcacaagtagatgcacgtatactagaacgtgagctttgagtgtgagcagatctgataacaaaaagttgggaaacaggtaaaataataacttggggtagaagttatgcttgtgtttctccaggccaaaatcaacagctgatctggataccatcaagacacctgaaatcttatcatgagccagatgctgaggaagagactccgggaggatcccgaggacggcccagttgcagccatgttgagactgacgctgaggaggaccccaactgtcacgagcaacacctgtcgaacacagccacccacctggggacagatcaagaagctgtcacagatggcagaagaaaacctgaggaaagcgggacaaccagtcacaatgagtaatttcatggtagctatgatagcagttatcaccactgctgtgagtattccttcaacaagggctgacacacagaacaattatacttattgggcatatttatcaaccttggctggcaataatgcctagatgtaatcactctatgacacagttacacatgctttctgatctcagtatttaccataatctgctcctata

SEQ ID NO: 83985 - DNA, 469 bp, Homo sapiens
ggtagtggaaacatttcaccaagagcaaatacgaaggatagaaaaagttaaacaacttaaaaaaaaacgtattcataattttaacagtgaatcaggaaatgtaacctgaaatgtttatgggtttttcaggacatatcatttatttagtagcacttttatttttgtatgttagcttatataacagcttctggaaggaaacaaaacagaattaactctgaacttaagtacagtcagaagttcttcacaaatataaattgctatttttgagtagtataatttatttatttagagatggagtctcactctgtcatccaggctgaaatgcagtggtgccatctcggctcactgcagcctctgcctcctggattcaagcaactctccagcctcagcactttgggaggctggggcgggcggatcacgaggtcaggagatgggagaccagcctggctaacacggtgaaaccccgtct

SEQ ID NO: 83986 - DNA, 385 bp, Homo sapiens
taatctttgtctctatggattcccaagacatttcatagaaatagaatcaaagtatgtggccttttgtgtctgacttctttattgctagtacttttagagtttcattttaacattttacatcatactctttatggaatttactttgatgaaagaagtagagttatacagcttgactctttttttctcccagatagtcctgccatagtctcaacactgttttctgaataattcatctttcctctgatggatcagaaatgtcaccattatcatctactaaattctcagtttatttctggatttcctattttattccattatctatctaaatctttgctagaatcaaactcggttttttttcacttatttacttattttagtgatggag

SEQ ID NO: 83987 - DNA, 726 bp, Homo sapiens
taaatttgaagtcaacttctatcaacttcaggccaggccgtggtcatgtctgtaatcccagcactttgggaggccgaggcaggcggatcacttgaggtcaggagttcaagaccagcctggccaagatggtgaaaccccatctctactaaaaatacaaaaaaattagccaggcgtggtggcaggcgcctgtagaatcccagctactcgggaggctgaggcaggagaattgcttgaacctgggaggtggaggtttcagtgagctgagatcgtggcattgcactctagcctgggcaaccaagagtgaaactgtctcaaaaaacaacttttatcaatgtctgcaaaaagaaagtcttctgggatttatagatcaatttagggagaaatgacattttaacaattctgagttttccaattgttgaacatggtgtactgccccatttatttagatctgttaatttctctcagtttgcagctctcacattttgttaaattcatgtatttaatatttctgcatgctattgcaagtggtaaggttttcaaaaagctgttttctagttattgctagtatatagaaatgcattagacttgtacattgatcttgtatcaagcaacttagatcagttaacttattctagtagcttttttctagattctttagcattttctatgtagataatcatgtcatctgtgaataaagtattttacttttccaatttatatggactt

SEQ ID NO: 83988 - DNA, 716 bp, Homo sapiens
taaatttgaagtcaacttctatcaacttcaggccaggccgtggtcatgtctgtaatcccagcactttgggaggccgaggcaggcggatcacttgaggtcaggagttcaagaccagcctggccaagatggtgaaaccccatctctactaaaaatacaaaaaaattagccaggcgtggtggcaggcgcctgtagaatcccagctactcgggaggctgaggcaggagaattgcttgaacctgggaggtggaggtttcagtgagctgagatcgtggcattgcactctagcctgggcaaccaagagtgaaactgtctcaaaaaacaacttttatcaatgtctgcaaaaagaaagtcttctgggatttatagatcaatttagggagaaatgacattttaacaattctgagttttccaattgttgaacatggtgtactgccccatttatttagatctgttaatttctctcagtttgcagctctcacattttgttaaattcatgtatttaatatttctgcatgctattgcaagtggtaaggttttcaaaaagctgttttctagttattgctagtatatagaaatgcattagacttgtacattgatcttgtatcaagcaacttagatcagttaacttattctagtagcttttttctagattctttagcattttctatgtagataatcatgtcatcagacaatgtatgtggatcctctagagacag

SEQ ID NO: 83989 - DNA, 422 bp, Homo sapiens
atttgcccttttgatcttcttttttatgtttttaataattttgaagatttttaaaaatcttttaataaattaatttgaattatataaatatatagaaacaaaatatataaatatataatatgtaaattaaaaattaaatacacttgattgttctaatatctaaagctgttgtgactaattttacttattccatggtggaatattcccttctgttttataatattggttacaaatttcagcagaccagtttttgtagggtttttgtacagattggattgaaagttcattcttccactactctattgcaattgccaatcatctacagagaaatactggttcagaatgactgtattaatttcttcattgattttcgggtaactcgagtagttactaaaaccaaatcaatggagattggggagtag

SEQ ID NO: 83990 - DNA, 349 bp, Homo sapiens
gagaactcaagtatattataacacggtctcacatgaagtacatcagttacagatacaagcaggaaacaaattagcttcaaaataaaaacaaatcaacataaatgaaccttcaaaccgctcggatgactgtttctcccccaaagggaaagatgaaaggagattagaaggaagagaagagaaaaagatgaggaacgagtagggagatgcttaaatccctaacacagcatgtctcacacaaacacagcaggctgccgagggtgtctggggctgtccagcacacagcggacaggcgtttatacccagtcatgcaggatcagctggagaaacgtacagcatgtacttcagggca

SEQ ID NO: 83991 - DNA, 344 bp, Homo sapiens
tgatgcttaattttatgtattttgatatgattaaatgtatgtaaaaacaattttaaagacaaattttcacatcatccataattttaaaatgcctattgtgatcaactttctttgaatccttgacttaatctgtatatcaacatgtattaatcatttatgattttaatatagtttttgtattatatttaatattgcaaacttttgtgttactttataactgcacattttgttggatcagtgtaccaatgtttacattaatcctttattaggatttttttctattttagaggtgttgttattcagtaaatagctttgtacacttggatttttttccctctttaaaa

SEQ ID NO: 83992 - DNA, 280 bp, Homo sapiens
tgcctgctttggcctcccaaagtgctgggattacaggtgtgttgtgaataataaatgagttgatatgtaaaatgcttacaatagtgcctgacacatcatgctgtgtgtgttagcactttttgctggagaagtttttagtggtttaggaacaaggtatatttgattgcttgtacagggttctggtaagtctgaatagagtgggagatccagccaggggccaaagttttcagtgcctcaaagttagctgccagaggcctgcagatgtcagcagcaggaaggg

SEQ ID NO: 83993 - DNA, 557 bp, Homo sapiens
tcactgattcctatcaattttaaaaattaaattagacatcatggcagtgttggtcttaatttgcttattttgtaaagcagtctgttaactacgatggctaagcataactgtattctttcttaaggcctgggaagttattaacaggcaacttgtaaggaaaagagacatttctctatgactcagaaacaaaaaaatgaatcaataaatcaaaagaaaaagggagagagaccattctcatagtgacaggcattagggccattttatgtctccaggagcctaccatatctaaattacagtaactgaagcaccctacaacagaccatgctgcaattcttcattccttcaacaaataattattgtgcactgaaaagtggctacgtaccaagcacctaagtgctggggtgagactgagtccagacaaacttgctccctaatggagctaagggtctaataaggagacaatcaaataaatataaaattccacctataaaaaaatgctataaatgagaggtgcacagtatcctcagagtgaaacataaggatcagacctagttaga

SEQ ID NO: 83994 - DNA, 105 bp, Homo sapiens
tgctgggattacaggcatgagccaccaagccaggccccaaggtcacctttcaaggtcaatgagctggggacagccttcccaccctctcctctctttggctctccc

SEQ ID NO: 83995 - DNA, 763 bp, Homo sapiens
ctgttggcatgtttgtatgtgtaactagggaaggcatacttaaggataatacttagacttgatagaatttttttctgacttcactgcacttagtcaataaagttttgtgaattctatcacattatgactgaatctctcctttttttttcgtccccctttgttacagttcaaggatttctttgattaattaagataattcccctgatttccatatgttcgtttctttcttcctttagtccatcttttctatatagttgccctgtggtgatttttctaaaacacgcatctcctcatgtgcctttcagtggctctgtatttcctctattctgtttgataaaccttttcttgctttagctttccagaaaactcctacacagcttccaagatcccatgtaaatatttcctcttctatgaagcctttcctaacctttctggacatacagttaagttgaatcatccgctatgatcccataaaattttgtatatgctttaaacatggattttaacacatcttaccctttgtgtttcagattttccttatgaatgttaactcctcacacttagagagcaggtcttattcctctctagattctttattctagcacagtgtttggcacagagtagtgcttgttgaggaaacaaatggctcaataaatgagtatatgaatatatgtgtatatattaattcatccatcacaggaaattttaaaaatgtacactcattaaagtttatgtgaccagcaatagaattattatagatata

SEQ ID NO: 83996 - DNA, 384 bp, Homo sapiens
cagctttggaaagactttgacctctgaacaaaaagccagaaggctgcttaaagaaatagtaagggtttcacttgccctggatagtcacaaatctaggagtactggttcactgccttgggttaccaggtatcagctctttcacaatctctcctcttcccatgcttccccttaaagtccagttgacaaatgaaaaagaaaaaaaggccttgatttatagtattgccaaacaacctcataagaatgggtaaaattacatacacacatacatagagaaggagataatgctgtgaatctactgagctggaatgcatgctccctaggaacacgtgcccaacctgtaattttatttctaacttttataaatatactcctttttcacgtatg

SEQ ID NO: 83997 - DNA, 706 bp, Homo sapiens
  misc_feature (698)..(701): n is a, c, g, or t
  misc_feature (703)..(703): n is a, c, g, or t
  misc_feature (705)..(706): n is a, c, g, or t
gctataaaattctgagactaaatatcaaattaaagaaagtactaattgtcagcgatgggggatgtactgctatttgcttctagtggtactcactgctcatttcctatattcactggtataaaaaaatttcaaacaccctcaaaaaagcatatactggtggtaccaggaaaacgctgaaaatcattactttctgtgtggtgtccagctcttttggttacatcatcacttcgaccattcacttttaaagaaaaacttttgtggaacaaaaatataaagatttattttttttcttggtggcttagcacagtggcctaatgtggctgaccatgtgcacctgttgtgtgagtcacttagacgtgctttgtttcttggtcacagttgatccctcaactcaagcatctcaccctcaaaatgtttgtttgggacccaagaggcaaaccttgagatgggttatttctttcaccttggattggctcatctgctgggagtggagccaagctgacatttcctttcctttttgtctgcctatcactacgtagaggcagcacataagagagggaaagccatgcgcgtggagtccagcacatcacccagaaggcagatgttctatctccattttactcattaaaacaaacaaaaccacacctggattgcctggtacttaaataaaatgcactatgatgattgaagaaaaatannnnanann

SEQ ID NO: 83998 - DNA, 103 bp, Homo sapiens
gaggagtttccctgctcaagctctctgcctgttgccatccccgtaagatgtgacttgcctctccttgacttccgcaatgattttgaagcctccccagcaatgt

SEQ ID NO: 83999 - DNA, 829 bp, Homo sapiens
accttgattctgaaccgctctcagctgctactccatttctctgttcctcttcatatcaaaattcctcaaaaagaggagttgatcccaactggttccacttcctcagtccattcattcttaaacccattttaatcagatttctatcctctccactccactaaaggtcagcaagcctcctcaatggcaataccagtgggcaattcccagacctcatctgaacctctcagcagcatctgacacaattgatcacctcctccttcctgaaactctttcttcactttgactccaaataccacactcccgtagttttcctcctacttcactggctctgcctcctcagaatcctttgctggacactcttcccttcccaacctataaagacatgtgtcccagggatggggaccttgggcctcttgccatctctgcctacactccctctttaggtgactcctatcctaacctcttccttaagtaccgtcagtaaactgagggttcccaattttgtatttccaggtcctacctttccctcatcctcagactcacatatccaaatacttatgtgacaaatcctttaggatacataataggaatcttaaacttaagctgtacaaaacggctgaggtgggcggatcacttgaggccaggagtttgacagaagcctggccaaaatacaaaaattaaccaggcatggtggtgcatgcctgtaatcccagctactcgggaggctgaggcacaagaatcacttgaacccgggaggcggaggttgcagtgagctgaggttgtgccattgcaatccagcctgggcaacagagccagtctctgtctcaaa

SEQ ID NO: 84000 - DNA, 818 bp, Homo sapiens
gccctgaagcccatttgtcatctaaatggtccgtccccttcttaaacatcattttggcccaaggtccattcatggggcctgccgggtgttcctgggaagatgggcagaaaatcccaaggccaccatttagtgccaataaacagaaggcctggtttcttcaaaagaaacacaagaaattgtttcctggttttgccacagagattgggtcacagagtgccacctaaatggtattaccatatttgtgttgtcgcctcttggtttgaaatttattcctggtatgacttgtgtctccccttgttccatctctgacacccaagcccatgggatgacaacccaggctgagatgtcccatgtgtcacaaaggagtccttcagtatttccaggaatagttggaaccagcactccatcccctacctggacctggcaccctctctactcttgtcaattctacactaatcacaggaagaaggtggaattagtccaagctgggttttcagaaataacttgtagacatgcaacagatgtttataaccctcagaagcggaaggaaacttggaaaccctctctttcggtgactttttttctaatgattgtctctgccatgaaattctaacttcaaatgaaatctttggcaggaacccagggctgttctgtcaaggttcagctgcaggaccagagccccttccacctaacccccactcctatcctgatgcttcctgaggcacatctgctgtggtttctcaccagagaacagtctgcaaaatcactgcaccttgtccaactccattttccaactgagaagacttggcccagagaag

SEQ ID NO: 84001 - DNA, 313 bp, Homo sapiens
ctgcactccagcctgggcaaaagagcaagactccatctcaaaaacaaaaacaaacaaaaagaaatgagagttgaacgatttccaggggttcctggcagtatcatggcctaggccctgtgcctccaacagcccggggaggagctcctctgcacacagctggatgagcatgaagcagggggagagagcaacaacccaccctaccaccccctccttggttgttttgaacctcaaagagacagccagcagtagatggtgaccagcagaacctcgcaggcgcacgacgggttcatccacccatttccatgacattttt

SEQ ID NO: 84002 - DNA, 879 bp, Homo sapiens
cgcggccccgctgcctgccctgctccaggctccacctgcgccgccgatcgcccgggtatcgcgggggcccaggccagctgagtccgttttccgcgccggggtggcgcccctccaaccgtcctaacgccgggccggcagcaaggagtgttcctgggacctcagagaccaggctcagagcctgacatccctgcgaggggacagcctcatccgcccaggccagtgggggtctctacaagtgcccaggctcaggtgcagcccccagcaatgcatcgccggagactggccctgggtctggggttctgcctgttggcgggcacaagcctcagtgtcctgtgggtgtatcttgagaactggctgccagtctcctatgtcccctattatctcccctgcccagagatcttacccatgatgatggctctttcttgcctctgccaccagcaacatgaagctgcactacaagagggagaagccactccagcccgtggtatggtcacagtaccctcagcccaagctgctggagcacaggcccacacagctgctgacactcacaccctggttggcgcccatcgtctccgagggaaccttcaacccagagcttctgcagcacatctaccagccactgaacctgaccattgggggtcacgggtgtttgccgtggggaagtacactcatttcatccagtccttccttggagtcagccgaggagttcttcatgcgtgggtaccgggtgcactactacatcttcactgacaacctgcagacgttccggggtccgctgggtcccacgggttctcagtcatccccatcaggtcactcccacgggaagagaatccatgggcgatggaaacatagcagaatggtagaaggtcacggaaggtg

SEQ ID NO: 84003 - DNA, 273 bp, Homo sapiens
agaatacataaacttcaggaggaagagttgtcttggtccagtatcaacaggatgtgggccagtgcttcagtggagtgggaaatgtcaggaataagccaaaaacatgggtccagataaataaatagatctggaaagacaatacaacatggtatgaacagtggtggacttgggaatgtttgcagtttgcattcttttgttacattttgctaagagaaacatttattactttcatagtaaagaacttaaaacccaatgtaaattatacttaaaaaa

SEQ ID NO: 84004 - DNA, 184 bp, Homo sapiens
gcggccgcctactactactactgctcgaattcaagcttctaacgatgtacggggacatggtatgaacagtggtggacttgggaatgtttgcagtttgcattcttttgttacattttgctaagagaaacatttattactttcatagtaaagaacttaaaacccaatgtaaattatacttaaaaaa

SEQ ID NO: 84005 - DNA, 527 bp, Homo sapiens
gtgacatcccattgaagtccaggttcctagtgtgtctttgccactttgggctctgtttgagcactgtggctagtaatgcctggtgaaatgtaattttggggaaatgtgggtcattcagtgactttgctgagacagagttcacctatcacaggactaagctccatgtacgcaggaatttgttgaccaatgaatcctagagcactggaataatgactagtgcctagtagacatccgataaatattattgagtgaatgaattgttgacaacttaaaacataccactgtacatattataaagatatgtgggttctttttcctgttgggttttaatcaaattgctggcgtttattagcagcaaaaattggggttctgcatttgcactgttcagatttatagattaagcaggatgggcattccagaggtttctgtcttctagagttatgtctcagaaaccagaagctggatgtgcaatcgttttttactacattacccaggcaagaattaattcatcatttttatttcaccat

SEQ ID NO: 84006 - DNA, 431 bp, Homo sapiens
tgaggagagagaaggataccatcagtgacgctaaatttcccttcatgtcttattaaataaaagtatctttcatgaacttccatatctgaggttcttaatagtagtgtattcttaaatatctattatttatttatttttgagacagaattgctcattgagtcctatgtgcttggcatgtattaaggccttccaatacctcttaagatatgtagggttttgtttgtttgagacaaggatgtgcgctgtcacctaggctggattgcagtggcacaatcaaggctccctgcagcccagacctcctcagtctcaagtgatcctcccacctcagcctcctgagtagctgggaccacaggtctgcaccatcacacccagctaatttttatttttttgtagagatggggtcccactatattgcccaggctggtctcgaa

SEQ ID NO: 84007 - DNA, 835 bp, Homo sapiens
gcatgggaaaaggaggaaaaaagtaaggtctatgacatttggaaagtgaaatgtaagataaacatggtgatcagagcataggaagcttataactaactgaagaagaaaggtcctgcaagaaataaacaacgttttacctctgggccctggaattggaggcaacaaaaatcactgaaacaaggaagaagagagaaggctgaaattctgcagcagcaattcatctttcagatttcctccacagccaaatgacaactcctcctaaatcctgatataaggcaggagacttacctattggtaaaattaaatcagaaatattctagacttcaggatatcagacacaatagagggcctgaaaacaagataattgatgaaaaatctagataccaagtagagaagccatcaactccttctttacccaggatgctatattccaagatttagctctctaggcaggagcataatagattcctatttcaaggaagaggtgtgtatatgggaatgaggggtatagaattaatttctagatattgacatttgaagcttgttgaaaacattcaggctctacccaattattctaagacctgtgaacaagtaaactctacttagtaacacaaacctcactctctactttttaagcctcactttaacatatagattgctaagtatcccagggaatttgagaaattcctttaatgtaagacaaaggaaaatgggaaaatcaggaataataactcagaagaaattgaaacattcacaatacagttagcaaaagaaaaactttttaaaaagcaataactgatatgctcagaggaaaaataaaagacacaggaaagat

SEQ ID NO: 84008 - DNA, 937 bp, Homo sapiens
caaaactggaaactcactcagaggcccatcagtaattcagtgactcaccggagtttggaacatccaaagggtattatatgattccatgtaacaatttacactggtgatgtctgagctgccgagtaaaagctatgaggcccattgaggaggattgtgaatccatcctgagcttcgaaaacgatttcatacatatatatatgttgagaaaaatttagagacagacatgatcacactgcagctcgccaacatcgcaaaaccccatctctacaaaaatcagctaggcgtggtagcacttgtagtcccagctactcgggaggttgaggagggaggatcccttgagccccagaggtcaaggctgcagtgagtcatgattgcaccactgcactccagccttgagacggtatctaaaaaagattctctacacggttgcttgtgacataccagtactccctggccacgcttccatttctccattagtttccaaaatatgtgctaccccagtccagtccccttatgtgcacttttaaatggcatagtttctactagaaatacaagtgaaactatcactggccgtaagtaattgtaaaatgacaaaagcaaagctgttcgattctaataagctgcagtggctgctggaggtgagtcccaggcccacccagagcagggcagggcccccgggccagggtgagccccaggccagggtagaggtggcatagacagcggttatggggacagacatgtagcacagctggcgctaccgccacgtgtagtaactagatgccaggagcgggtacagctgggcctggcccataccagggtaggttcacggccgtatcacgcccttggccctgctggcagctgaggtcggcagagtctggggctctcccttcactcctcctccctcctctccccgctgtgtgtcccgcagacttgcctc

SEQ ID NO: 84009 - DNA, 667 bp, Homo sapiens
ttattttttgtgatggagtctcgctctgtcacccaggctggagtgcaatggtgccatcttggttcgccgcaacctctgcctcccaggggcccagaccccctcccagcctcggggctgaagatctccaggcctctcaaagccaagagctctgcgaggggctcctcctcaactccctccgggacctggatctgtctggtgtgacggatgaaggtggctctgagagaccgggccctgggtgcccgcgggggcggctgacactgtcccgaggaggcgccagcaccctctcgtctccccaccagctcctcctggtgcccctcccaagccccggggaacttcccaggttggcctgaggggggtcctggagagctgcaagcaagggggaggggagcccacaggcctgcagcccatggtgagtttcacacctgaagccagccaggtggggtgtgctgagccgaggggtccctgtccccattctgtggggttccccagcacggggctccatggttgaggctctctgggggtggccagaatttgtggagacctctcggggactcgcagataccacccggaggcagtgggatggaggagtgattggctgacccccgccctccaaggggcccccatgggacaaggtgctataaacgccgccccctgcactggggacacc

SEQ ID NO: 84010 - DNA, 2599 bp, Homo sapiens
aaagctaaatagccatacagcagctctgacaatgttgtgctggatattgcagtttgctttcaaggtgcagatgtaaggatttaaaaaaataataatttggcaccaaataaatatgagtagcattcattgaatctgcggatttcatgacgtctctctgcgtggtccaccacttttctcctaaccggggatttttttttttcttctgccactcttatctttccccacttcattccacccagtctccctcccccgtccctgcccaaacgcgcgcccctccgcccctcccttggccccagcgcccagccctgctctccgcgctcggccagagggagccagtccggagacggccgcacctggctggagaggctgggcgggcggaggggtggagacccgcggacgccgggaagccggacctggagccggagcagccgcgagcagaatggagtctcctaacagcctctcggtgctgatgtgaaatttgaccatctgattccagtttttttcttttccttttcttttttgcatttccttccctcgccatccgtcgtgtagtgaattgttcagtcttgctccgtttcaagagaggagatcatgattgagtgaagccaccccgtccgcagccaggaaaagcacaaagaagaaactgcaacaatggccaagctgacagaatccatgactaacgtcctggagggcgactccatggatcaggacgtcgaaagcccagtggccattcaccagccaaagttgcctaagcaggccagggatgacctgccaagacacatcagccgagatcggaccaaaaggaaaatccagaggtacgtgaggaaagacggaaagtgcaatgttcatcacggcaacgtgagggagacctatcgctacctgaccgatatcttcaccacattagtggacctgaagtggagattcaacctattgatttttgtcatggtttacacagtgacctggctcttttttggaatgatctggtggttgatcgcatacatacggggagacatggaccacatagaggacccctcctggactccttgtgttaccaacctcaacgggttcgtctctgcttttttattctcaatagagacagaaaccaccattggttatggctaccgggtcatcacagataaatgcccggagggaattattcttctcttaatccaatctgtgttggggtccattgtcaatgcattcatggtgggatgcatgtttgtaaaaatctctcaacccaagaagagggcagagaccctggtcttttccacccatgcagtgatctccatgcgggatgggaaactgtgcctgatgttccgggtaggggaccttaggaattcccacattgtggaggcttccatcagagccaagttgatcaaatccaaacagacctcggagggggagttcatcccgttgaaccagacggatatcaacgtagggtattacacgggggatgaccgtctgtttctggtgtcaccgctgatcattagccatgaaattaaccaacagagtcctttctgggagatctccaaagcccagctgcccaaagaggaactggaaattgtggtcatcctagaaggaatggtggaagccacagggatgacatgccaagctcgaagctcctacatcaccagtgagatcctgtggggttaccggttcacacctgtcctgaccctggaggatgggttctacgaagttgactacaacagcttccatgagacctatgagaccagcaccccatcccttagtgccaaagagctggccgagttagccagcagggcagagctgcccctgagttggtctgtatccagcaaactcaaccaacatgcagaactggagactgaagaggaagaaaagaacctcgaagagcaaacagaaagaaatggtgatgtggcaaacctggagaatgaatccaaagtttagtgccctagctgggcaaacccttctcttctccccccaacacaatctttccttgtctctcattctctttctttttctgtctctcttgctttgttctttatttgtttatatttaatttttacatgaccagaaaacaaatcttcaaggtgtaaaatatctacctgccctctctcagttattcagattgacaaggtagacatggatttgatgaaagtgcaaagtgccctcatttgtggcccaagcctggtctcctcccaaaatactacacatccaactcctggagatttcagttacttacctgcatgtgttgtacaataccagatcactcaaaaaggtgtgtcaaagattttacctgggatatgacaagcaaggtttctggtgcctatttattcattcagtgagacacagagtggagccctcagttttatggatcccaattcatttcatctactacagggtgaggtgcttgcccccatgtgggtgtggcagttacagggcccaggtgagctgaagacaaaccactgtacatatatatgccttatgtaattattttctttttgtaattagtaataaaacccagcatgtacaaaagtaccatagaacagaactgctaaatactgtacatagatgtatcattaatgtaggtttagatatataactttagaaataagaagcaaaa

SEQ ID NO: 84011 - DNA, 2537 bp, Homo sapiens
ccacttctgagccacccgctgcccctccgcactgctggcaaacccagttcctgcctcagccaggtctccttccctggtttccagtcacacagagcccagcagctttctctttcagtcccataagggcagccttgtgtccctggccactcttatctttccccacttcattccacccagtctccctcccccgtccctgcccaaacgcgcgcccctccgcccctcccttggccccagcgcccagccctgctctccgcgctcggccagagggagccagtccggagacggccgcacctggctggagaggctgggcgggcggaggggtggagacccgcggacgccgggaagccggacctggagccggagcagccgcgagcagaatggagtctcctaacagcctctcggtgctgatgtgaaatttgaccatctgattccagtttttttcttttccttttcttttttgcatttccttccctcgccatccgtcgtgtagtgaattgttcagtcttgctccgtttcaagagaggagatcatgattgagtgaagccaccccgtccgcagccaggaaaagcacaaagaagaaactgcaacaatggccaagctgacagaatccatgactaacgtcctggagggcgactccatggatcaggacgtcgaaagcccagtggccattcaccagccaaagttgcctaagcaggccagggatgacctgccaagacacatcagccgagatcggaccaaaaggaaaatccagaggtacgtgaggaaagacggaaagtgcaatgttcatcacggcaacgtgagggagacctatcgctacctgaccgatatcttcaccacattagtggacctgaagtggagattcaacctattgatttttgtcatggtttacacagtgacctggctcttttttggaatgatctggtggttgatcgcatacatacggggagacatggaccacatagaggacccctcctggactccttgtgttaccaacctcaacgggttcgtctctgcttttttattctcaatagagacagaaaccaccattggttatggctaccgggtcatcacagataaatgcccggagggaattattcttctcttaatccaatctgtgttggggtccattgtcaatgcattcatggtgggatgcatgtttgtaaaaatctctcaacccaagaagagggcagagaccctggtcttttccacccatgcagtgatctccatgcgggatgggaaactgtgcctgatgttccgggtaggggaccttaggaattcccacattgtggaggcttccatcagagccaagttgatcaaatccaaacagacctcggagggggagttcatcccgttgaaccagacggatatcaacgtagggtattacacgggggatgaccgtctgtttctggtgtcaccgctgatcattagccatgaaattaaccaacagagtcctttctgggagatctccaaagcccagctgcccaaagaggaactggaaattgtggtcatcctagaaggaatggtggaagccacagggatgacatgccaagctcgaagctcctacatcaccagtgagatcctgtggggttaccggttcacacctgtcctgaccctggaggatgggttctacgaagttgactacaacagcttccatgagacctatgagaccagcaccccatcccttagtgccaaagagctggccgagttagccagcagggcagagctgcccctgagttggtctgtatccagcaaactcaaccaacatgcagaactggagactgaagaggaagaaaagaacctcgaagagcaaacagaaagaaatggtgatgtggcaaacctggagaatgaatccaaagtttagtgccctagctgggcaaacccttctcttctccccccaacacaatctttccttgtctctcattctctttctttttctgtctctcttgctttgttctttatttgtttatatttaatttttacatgaccagaaaacaaatcttcaaggtgtaaaatatctacctgccctctctcagttattcagattgacaaggtagacatggatttgatgaaagtgcaaagtgccctcatttgtggcccaagcctggtctcctcccaaaatactacacatccaactcctggagatttcagttacttacctgcatgtgttgtacaataccagatcactcaaaaaggtgtgtcaaagattttacctgggatatgacaagcaaggtttctggtgcctatttattcattcagtgagacacagagtggagccctcagttttatggatcccaattcatttcatctactacagggtgaggtgcttgcccccatgtgggtgtggcagttacagggcccaggtgagctgaagacaaaccactgtacatatatatgccttatgtaattattttctttttgtaattagtaataaaacccagcatgtacaaaagtaccatagaacagaactgctaaatactgtacatagatgtatcattaatgtaggtttagatatataactttagaaataagaagcaaaa

SEQ ID NO: 84012 - DNA, 764 bp, Homo sapiens
  misc_feature (696)..(696): n is a, c, g, or t
  misc_feature (699)..(699): n is a, c, g, or t
  misc_feature (734)..(734): n is a, c, g, or t
ccacttctgagccacccgctgcccctccgcactgctggcaaacccagttcctgcctcagccaggtctccttccctggtttccagtcacacagagcccagcagctttctctttcagtcccataagggcagccttgtgtccctggccactcttatctttccccacttcattccacccagtctccctcccccgtccctgcccaaacgcgcgcccctccgcccctcccttggccccagcgcccagccctgctctccgcgctcggccagagggagccagtccggagacggccgcacctggctggagaggctgggcgggcggaggggtggagacccgcggacgccgggaagccggacctggagccggagcagccgcgagcagaatggagtctcctaacagcctctcggtgctgatgtgaaatttgaccatctgattccagtttttttcttttccttttcttttttgcatttccttccctcgccatccgtcgtgtagtgaattgttcagtcttgctccgtttcaagagaggagatcatgattgagtgaagccaccccgtccgcagccaggtaagcggtgcgctgagctgctcgcaggcgaggagctggcgtccacctgggcgaggcgttccgtgctctcgggtccccgcgtccccttccccagctccgccgtcgccgcaggcatctccactctcatgagaaancanttttgatgtctcacagagggtcagtcctcagatanatggtcggacttcctccggggataaatgtc

SEQ ID NO: 84013 - DNA, 1735 bp, Homo sapiens
ttgggggttagagagaagcgagctgctgtctgaccagcagcttgggattggtggaaggaagcaggccaggccctgtgaggagtcaaggttctgagcagacaggccaaccggaggacaggattccctggaggccacagaggagcaccaaggagaagatctgcctgtgggtccccattgcccagcttttgcctgcactcttgcctgctgccctgagcagagtcatcatgtcttctgagcagaagagtcagcactgcaagcctgaggaaggcgttgaggcccaagaagaggccctgggcctggtgggtgcacaggctcctactactgaggagcaggaggctgctgtctcctcctcctctcctctggtccctggcaccctggaggaagtgcctgctgctgagtcagcaggtcctccccagagtcctcagggagcctctgccttacccactaccatcagcttcacttgctggaggcaacccaatgagggttccagcagccaagaagaggaggggccaagcacctcgcctgacgcagagtccttgttccgagaagcactcagtaacaaggtggatgagttggctcattttctgctccgcaagtatcgagccaaggagctggtcacaaaggcagaaatgctggagagagtcatcaaaaattacaagcgctgctttcctgtgatcttcggcaaagcctccgagtccctgaagatgatctttggcattgacgtgaaggaagtggaccccaccagcaacacctacacccttgtcacctgcctgggcctttcctatgatggcctgctgggtaataatcagatctttcccaagacaggccttctgataatcgtcctgggcacaattgcaatggagggcgacagcgcctctgaggaggaaatctgggaggagctgggtgtgatgggggtgtatgatgggagggagcacactgtctatggggagcccaggaaactgctcacccaagattgggtgcaggaaaactacctggagtaccggcaggtacccggcagtaatcctgcgcgctatgagttcctgtggggtccaagggctctggctgaaaccagctatgtgaaagtcctggagcatgtggtcagggtcaatgcaagagttcgcattgcctacccatccctgcgtgaagcagctttgttagaggaggaagagggagtctgagcatgagttgcagccagggctgtggggaaggggcagggctgggccagtgcatctaacagccctgtgcagcagcttcccttgcctcgtgtaacatgaggcccattcttcactctgtttgaagaaaatagtcagtgttcttagtagtgggtttctattttgttggatgacttggagatttatctctgtttccttttacaattgttgaaatgttccttttaatggatggttgaattaacttcagcatccaagtttatgaatcgtagttaacgtatattgctgttaatatagtttaggagtaagagtcttgttttttattcagattgggaaatccgttctattttgtgaatttgggacataataacagcagtggagtaagtatttagaagtgtgaattcaccgtgaaataggtgagataaattaaaagatacttaattcccgccttatgcctcagtctattctgtaaaatttaaaaaatatatatgcatacctggatttccttggcttcgtgaatgtaagagaaattaaatctgaataaataattctttctgttaaaaaaa

SEQ ID NO: 84014 - DNA, 379 bp, Homo sapiens
cggatgtgatgccactgacttgcgcactgggggttagagacaagcgagcttctgcgtctgactcgcagcttgagactggcggagggaagcccgcccaggctctataaggagacaaggtgagatgctgagggaggactcaggaggacccccaccccacatagacgaccacaaaaaatccaacaccacccctgctgccagccctgggccactcctggagacttctcagtctgtggtgggggggccaccaccccactgccacttaagcctcaggggattctgaagtcagagcttggggtgatcagtgcaagactggtgggggcaggctctgccaggcatcaacctcaggaccctaaaagccagctgagcgtaccacaccgct

SEQ ID NO: 84015 - DNA, 1849 bp, Homo sapiens
agggaagcaggcgcaggctctgtgaggaggcaaggcaggatccccggttccgcccccgctttcaaccaaggaaagccccagctgcccggatgtgatgccactgacttgcgcactgggggttagagacaagcgagctgctctgtctgaccagcagcttgggattggcggagggaagcgggccaggccctgtgaggagtcaaggttctgagcagacaggccaaccggaggacaggattccctggaggccacagaggagcaccaaggagaagatctgcctgtgggtccccattgcccagcttttgcctgcactcttgcctgctgccctgagcagagtcatcatgtcttctgagcagaagagtcagcactgcaagcctgaggaaggcgttgaggcccaagaagaggccctgggcctggtgggtgcacaggctcctactactgaggagcaggaggctgctgtctcctcctcctctcctctggtccctggcaccctggaggaagtgcctgctgctgagtcagcaggtcctccccagagtcctcagggagcctctgccttacccactaccatcagcttcacttgctggaggcaacccaatgagggttccagcagccaagaagaggaggggccaagcacctcgcctgacgcagagtccttgttccgagaagcactcagtaacaaggtggatgagttggctcattttctgctccgcaagtatcgagccaaggagctggtcacaaaggcagaaatgctggagagagtcatcaaaaattacaagcgctgctttcctgtgatcttcggcaaagcctccgagtccctgaagatgatctttggcattgacgtgaaggaagtggaccccaccagcaacacctacacccttgtcacctgcctgggcctttcctatgatggcctgctgggtaataatcagatctttcccaagacaggccttctgataatcgtcctgggcacaattgcaatggagggcgacagcgcctctgaggaggaaatctgggaggagctgggtgtgatgggggtgtatgatgggagggagcacactgtctatggggagcccaggaaactgctcacccaagattgggtgcaggaaaactacctggagtaccggcaggtacccggcagtaatcctgcgcgctatgagttcctgtggggtccaagggctctggctgaaaccagctatgtgaaagtcctggagcatgtggtcagggtcaatgcaagagttcgcattgcctacccatccctgcgtgaagcagctttgttagaggaggaagagggagtctgagcatgagttgcagccagggctgtggggaaggggcagggctgggccagtgcatctaacagccctgtgcagcagcttcccttgcctcgtgtaacatgaggcccattcttcactctgtttgaagaaaatagtcagtgttcttagtagtgggtttctattttgttggatgacttggagatttatctctgtttccttttacaattgttgaaatgttccttttaatggatggttgaattaacttcagcatccaagtttatgaatcgtagttaacgtatattgctgttaatatagtttaggagtaagagtcttgttttttattcagattgggaaatccgttctattttgtgaatttgggacataataacagcagtggagtaagtatttagaagtgtgaattcaccgtgaaataggtgagataaattaaaagatacttaattcccgccttatgcctcagtctattctgtaaaatttaaaaaatatatatgcatacctggatttccttggcttcgtgaatgtaagagaaattaaatctgaataaataattctttctgttaaaaaaa

SEQ ID NO: 84016 - DNA, 1782 bp, Homo sapiens
aacccaagaaagtcccaggtgcccggatgtgatgccactgacttgcgcattgggggttagagagaagcgagctgctctgaccagccgcttgggattggcggagggaagcgggccaggccctgtgaggagtcaaggttctgagcagacaggccaaccggaggacaggattccctggaggccacagaggagcaccaaggagaagatctgcctgtgggtccccattgcccagcttttgcctgcactcttgcctgctgccctgagcagagtcatcatgtcttctgagcagaagagtcagcactgcaagcctgaggaaggcgttgaggcccaagaagaggccctgggcctggtgggtgcacaggctcctactactgaggagcaggaggctgctgtctcctcctcctctcctctggtccctggcaccctggaggaagtgcctgctgctgagtcagcaggtcctccccagagtcctcagggagcctctgccttacccactaccatcagcttcacttgctggaggcaacccaatgagggttccagcagccaagaagaggaggggccaagcacctcgcctgacgcagagtccttgttccgagaagcactcagtaacaaggtggatgagttggctcattttctgctccgcaagtatcgagccaaggagctggtcacaaaggcagaaatgctggagagagtcatcaaaaattacaagcgctgctttcctgtgatcttcggcaaagcctccgagtccctgaagatgatctttggcattgacgtgaaggaagtggaccccaccagcaacacctacacccttgtcacctgcctgggcctttcctatgatggcctgctgggtaataatcagatctttcccaagacaggccttctgataatcgtcctgggcacaattgcaatggagggcgacagcgcctctgaggaggaaatctgggaggagctgggtgtgatgggggtgtatgatgggagggagcacactgtctatggggagcccaggaaactgctcacccaagattgggtgcaggaaaactacctggagtaccggcaggtacccggcagtaatcctgcgcgctatgagttcctgtggggtccaagggctctggctgaaaccagctatgtgaaagtcctggagcatgtggtcagggtcaatgcaagagttcgcattgcctacccatccctgcgtgaagcagctttgttagaggaggaagagggagtctgagcatgagttgcagccagggctgtggggaaggggcagggctgggccagtgcatctaacagccctgtgcagcagcttcccttgcctcgtgtaacatgaggcccattcttcactctgtttgaagaaaatagtcagtgttcttagtagtgggtttctattttgttggatgacttggagatttatctctgtttccttttacaattgttgaaatgttccttttaatggatggttgaattaacttcagcatccaagtttatgaatcgtagttaacgtatattgctgttaatatagtttaggagtaagagtcttgttttttattcagattgggaaatccgttctattttgtgaatttgggacataataacagcagtggagtaagtatttagaagtgtgaattcaccgtgaaataggtgagataaattaaaagatacttaattcccgccttatgcctcagtctattctgtaaaatttaaaaaatatatatgcatacctggatttccttggcttcgtgaatgtaagagaaattaaatctgaataaataattctttctgttaaaaaaa

SEQ ID NO: 84017 - DNA, 409 bp, Homo sapiens
aagaagttaggaagtattccctccttcagtttttcggaagagtgtgagaaggcttggcagtaattctttaaatgttcggtaacatgccctaatgttaccatctgcatgtttctttgttgggagatttttgattactgattcactctctataacagactagttgtatgtctgttcagattttctgtttcttcacgattcagtcttggtaggttgtatgtttctaggaatttatccatttcttctatgttatctaatttgttggcatatgatttttcatagtagtctgttataattatttttaatttaatttttctgtttttttcttactctagataaaggttgatgaacttggttgatctttaaaaaaaacactcagtattgttgatttttttcctattatttctgtata

SEQ ID NO: 84018 - DNA, 396 bp, Homo sapiens
cgctgatacatgaaatcaattttcagtcattgatgttcatgcaaatttaggttggaaacgctagtttttctctgtggagagttttctataagttttcctaatagcttgtacgtatgacttcaactaactgttagttttgaacttcttacataaggtattttgaaatgatctgagaaaatctagttaaactcttcaaatacagactttgaaatatacatgaaaacttcagcagccccatttgtggctttttcattcttgtctcttaggttattttattaaaaaaaagatttctgatttgtagctagaacatggttgatgcccaacaaatactgattgaataagtcatattttcacataaatctcaggtcatggggattaataaactcgctattaatt

SEQ ID NO: 84019 - DNA, 406 bp, Homo sapiens
ggcgcagctcgcaggcgtggcaacttgaccttgggggaatatttcacatccatccagagctcggaatctacagcgtccagccatttccagcaagagcgcttcccattccggagacgtttcaaccctgcagcgggaaaggctgactgggaaatccattttgggtgggcaatttccttcaacgaagccggaaggcgagaagccgcggcggggccagcttgcctgccggttttcaggaatctaaactctcatcttgtgcaatttatcaggtgtggaactgttctactgtgcgtgtggtgtgctcgtggtgaataagatgaaatgtatatcagaaaaaaatctatctctaatttagagtgcggtacataattatatccgcaaataaagaagagacaaaggcttgcgcggc

SEQ ID NO: 84020 - DNA, 350 bp, Homo sapiens
cgcagtcctcagccgcccgcgccctcggcccggggcgcccggctgcgggcccgaagcgaggggctggcggagctgcgaccaatggggcggcggccgagcggcgggccccgccccgtcccgtccggccccgccccgcccgcagctcccgggagtctttctctccatacgatgatcaatatttctaatgaatagttaggtatcaggccggttgtctaaggttccatgctccgtttctcctattgtcgccgcggcggcaggcgcggggccgcgccgcgaggcctgatccctgcagcgcgggcaggcggcgtcgcagagcggagctagctggatgcgtccggactcctgcaggt

SEQ ID NO: 84021 - DNA, 606 bp, Homo sapiens
tgctggcagaagggcctcaggtggaatgctgggcatgggtttgccccacagcagtctgattcaaaagcacctgagagatgggaggagtactagggttactaaacacaagaaggtgtttcaggagaaacacatcaaaccatttgtttttgacccttaatacttaacatgaatgatgagttgcagaacagtcagtctttccaagatgtattgttctatcctcaatagctgcagcctctccaagccagtgggctggtgacatccaggatgatcctcttccttgcctggaggtgggatctagtgccacagcttgttcggggaagctggcatagaagatgatttgctcaacaaagtcaccgctaaactatcgcttaggtctagtccccggcctatggcaccaagtactcctggtagtacttgtacacagaatttctctataataaccagaacatgtcatccatggtaatgtctgctacatatccaaccacagcatcaaattctgtctgatgaagggcaccagccccttcatctttatcatgcctaatattgtgaaggccatgtgctaaatccagcaatccgctccagtaggtgtccttcaggatacttttc

SEQ ID NO: 84022 - DNA, 542 bp, Homo sapiens
agccccacatttctagcccaattcgcattgggatgcggggtcccagagccgccgtgcaagagctctcagagatgaatcaagcagtgcccaggctgcactgctgcttgtgcaaagccaccagtggccttgctgtatcttcctcagtccttgcttttctccccccttacccagctttgttcactaattagcagttctctaggggattcagtaggcgagggatcagaatcccttgggataccttgacaagttcccattatgaccccaggaatctccccctttgccccattttgaaaactgctgtccaaccacctcatggccttgtactctgcctactactcaagactacatctggttcctgggcctgtgctctgggctgcagctgttcctttggcatatttagtggttccaggtaacccagagtccctagtgaatgggcctcatctaagaattttaaaccagtagaaataaagataaaatacacatatatgactgtaaatataagtgcatatttaaggttttcaaaaatgtacactctattctta

SEQ ID NO: 84023 - DNA, 771 bp, Homo sapiens
cggacgcgtgggtcgacccacgcgtcctggccaacatggtgaaacccccgtctctactaaaaatacaaaaattagccgggcatgttagtgggtgcttgtactcccggctactcgggagcctgaggcaggagaatcgcttgaacccaggagccagaagttagcagtgagccaagattagcaccattgcactgccagcctgggtgacaggagtgaaactccatctcaaaaaacaaaacaaaacaaaaaaacacggctcttgggcaggtaggccaatatctttgaatagcatggaattgtccacccagatttcctgtccttgtctttctgtccccatccacagagtagaccagcactccttctctgtgacatcaccccagggagacagcccattctcatccatctccaccatagcctgtctgtatcaggtggagaatgtattagaaaaacacaatttacaatactgtagataccatttatgcaaaaaagtgtgcacaaaatgactaaggatatatatatatatttgtgtatgaagaagtgcttgctgttttgttttgttttttattttcaagcctgaaagatgacacataggtctcaaaactgtaacttctgcttgaaatctggggtgccagagctgcaaaagcactttggcacgtgctgcagtatcggaaactagtgagctaaatccttgaagcaggttctgtttagactgaaacgggcgaagctgatcatgtttctgaataagcaagacgtgttgtgttcatttaaaccact

SEQ ID NO: 84024 - DNA, 303 bp, Homo sapiens
tttagcatttcttgcaagatgggtctgaggatggtgaattctctcagcttttgtatatctgggaaagactttaaccctccctcatatttgaatgacagttttgctggatacggtattcttggatggcaatgttcttcatttagcactttgaaaatgtcactctactccctcctggcctgtatggtttccactgagatgtctgttgccagatgaactggaactcctttatatgttatttgcttcttatctctcactgcttttaggatcttctctttctccttcacctttgagagtctgattatt

SEQ ID NO: 84025 - DNA, 944 bp, Homo sapiens
gccgctcatgatgctcagagattttgtgtgccggggactgagagggtgcagtgggcattgcctttctgcccctgatgtctgtggcgggtgtcacatggaatgatgagggctcactcacatttctggcgagtggtgctggctgccagaagctctactcctctccatgggtaacttctcacagcatggtggcaggactgtccctcctcagcctctgaagtcaggcagcatcatttctgttcaccaaggcagcaggtgcagggacataggtgagcagaaagcatttagacacgtgtccagggtcttgacaacaggctggagtttggaagaagtccggataagcagctacagtgccctctgtcttcctcatccctggacacatcccgcccagcccagaactgagagcattaactcagctcctccgatggaagactccctcgtacagcctcagagtctcaggtttcccaggtgccctatagattctcccagagtcccaagggcagtgggaaagcctgctcctctctcccaggggccttgcccagactgcagtcttgctgccagaggcctaatagctggtgttctgggtgtaccactgtggtgcagtttgtctcacccccaaccccctgatggtttgggtctctacagctttccacttcccactgggttgggccctagtcctgactccagaagtgaagtgacttttgttccagaaggtgcggtattcacagtctcccctgggcctttgcacatgctgttgttcttctgcctggaatgttcttcctacttgcccacattgcatgtaaaaccctatcttggcttagatattacttcctcaaggaagctttctcagacctctccctgccaaggtgggcacacagtacctgacttgcccctgcggtatcagatctcactgaactgtaattgtatttactttgtgttttcctccc

SEQ ID NO: 84026 - DNA, 714 bp, Homo sapiens
ttgacattttaggaagcatcccccttgagaactggaacaagacaaggatgcccactcttcccactcctgttgaacacagtaccggaagtgcaagccagagcaatcaggcaagagaaagaaagaaaaggcatccaaataggaaaagaagaagtcaaactatctctcctaggaatccctaaagactgccaaagacttttggaactgaaaaatgacttcagtaaagtgtcaggatacaaaatcaatgtacaaaaatcagtaccatatctttacaccaataatgttcaagctgagagccaaatgaagaacatagcctaatttacagtacacacacacatacacacacaccccttggtttcacctctaaccaaggaagtaaaaggtctctacaaagaaaactacaaaacgctgctgaaataaatcatagatgacagaaacaaatggaaaaacattccatgatcatggattggaagaataataaaatggtcaaactccccaaagcaatctacagattcaatgctatttctatgaagctaccaatggcatttttcacagaatcagaaaaaactattctaaaattcatatggaagtaataaagtaataaagagcccaaataggcaaagtaatcccaagaaaaaagaacaaagccagaagcatcacattacctggcttcaaactatattgtaaggctacagtaagcaaaacagcatggtactg

SEQ ID NO: 84027 - DNA, 526 bp, Homo sapiens
ggccccctgggtcctcttataaagcacggttccggtgggctttccggcctcacgtaatgtctccatcccacaggccaaattcccccagcctcattattccctcttctacatgttccggggcaactaagtcaggtctagcttgtgagataccggcatcattttttcccagtctacatggatcaccccagcagtgggtttgccccatgccctggggtctttgaaaaacccatgtgatacggttggctgtgtccccaaccaaatctcgtcttgaatttccacgtgttgtgggagggaccaggagggaagcaattaaatcatgggggcaggtctttcccatgctgttctcatgatagtgaataagtctcatgagatctgatggttttaaaaggagaaatccctttcgcttggttctcattcttctcttatctgctgccacgtgagacatggctttcaccttctgccgtgattctgaggcctccctagccacatggaactgtgagtccattaaacctcttttggtaaattg

SEQ ID NO: 84028 - DNA, 545 bp, Homo sapiens
acttggaaaccatgcaagtattttatatcattaagaaacaaaattaaatcaaaatagaaaaaaaatctctaaatattgaaaagaaacccaattatatatcgagttagtggtacaatcatatagaaagtaattacttcaaataaattatttggaagtattttgactgtacaaatatcctagaatgatacaaatatctttttaaaatgtgacccatctatccacataaaggaatatatacagccataaaaaggaagctctgatacatacaacacggatgagccttgaaaacatgctaggtgaatgaaacaagcagcgatatgaggccacatattgtatgattccatttaatgaaagggagtggagagagaatgggctacctgcaaagaggcaggggctggaggaaagttttatagggtcctgctgaagggtgctacgtgtggaatgaggtcattgtgcccgcaggttgtttgtgattagctgtctctaacaattgttcatacagtaattgttcattatggttctcaactgggggctctccccaacct

SEQ ID NO: 84029 - DNA, 480 bp, Homo sapiens
tcccagccttcaagttccctgcagggttggttgaggccttgtgactgcagctcagcccactcctctctgccatcctgcttctctccctttccccatgcaggtgtcaattctacaaacactctctgataaatgctcacctctgtctcagaagctgattcctggggaacccaatctgtgatgatttctaatagaaggagattccatttcttattggtctataaatgaaagataggaacctcatcccctcatctagtcatgtatgatgggttgtgattatctagatgtattactcaatgatgagcctctcccaccctctgctcctaactggccatggggcactggcagccatttaacttctttgctcctcagtttcatcttctgtaaagtaaggaacaatttaatcaaacgggatattccagatttttttcaaattttgtgatgaaattcattagaaatattaaaagtatctaaaaaccaaaa

SEQ ID NO: 84030 - DNA, 1511 bp, Homo sapiens
cagacttgtgtcataattataatgatatcgttcctgccgttttcttttgaaatactgatttcctcccaccatttttttgtctccagttatggccaaagccttttgttttgaattctatgttcaatagtaagttgcagtttatttgcaatttgagcacttgcatgttttctgatgtatcacttgctccccttttaactgcatggttaattgtgaatttaaagtagcgcagagcagcagttaactatgattggctgtttttgataaaatgtattgctcagaattttttaatctattagaaagaacagaccaaaatcaataggatttgcagtgtgtcattatattaaggacaaaattgtaaaagtgtctttgaaaatgatcttggggaaattgttaattttgtagattttgaaatgtagtttttacacagctatttgtggcttttaagggaggaggtgtgattaccttagtatattctttaaaagtaaagaacatgcacaataattttggcaacaccagggctttaagaaaacaacattcgtgaggacattttaggttagaatatacattttagaattggaaggaatcattatgtttacactcctacacttttcaaatgaaaagaaacaaacttggatttctgaaaaaggaagtgacttttcctttttgcctaacattacacagaggactagtggctttttccagtacctccctgctattcaagaaatttgaaatatcaaggacagtaaagtaacctacctgaagttttcagatgctactactactatgactgtattaaccaaatgtctgtccgcacccatctgccttgtcatcagtgaaacatcttacaaattgtcaaacaaaatatgggtagagcttagttatccaagaaatagaaatcatgttattcctgttagatattggcataaggaaatagatacaaacatgttcttgcttgttaggtttctgctttttctttgaattgttgcttaaggggtgttaattgcaaaccagactacaaacaaaaacagtttatgttaatttcagagaaatgtctgtgtgtgtgtgcgcgtgtgtgtgtgtgtatggcaaaaaacagtcccaaaattatatgtatgtaaactttaaaggtgaaaattaaatttaataccctgctttttaaaattctaagcacttcaaaactaaaaatactggatttttatgcttacaagataatgggactttttttctttgattgttaaactagtatggcactttcagcagagaagtaagctgcccagaacagtcttggacatatagtaaatactatataggtgttagttgctggggtagttctttctttaaaaaaaaaaaagaagttatgtttttcaaatattactaagtttaggcctacaagacattccaaaataatggaaaaattcaatcctgcctctttggaaacattttggaaataagccccaaacactggaagccagtcaattctttttttgcaattctttctgaaatctttcttt

SEQ ID NO: 84031 - DNA, 399 bp, Homo sapiens
aaatataaatgaggacattctgttgcattgtgaacctgtgagatttggggcatgtcggatggttttctaaatgatacagacttattttaggcaaccaagagaagctttggattaaaatttgtattttaacctgcttaaatttgaaactacagaagataaagttatataaaaaaattcaaagttttatatttattcctaatgcccgtctataattttacctatgtatagagatgttagagaatttagaaacttaacgcaggattggacctgttagaaaatgttgtagtggtagaaacacataaaatgaaattgaaggaacatttgggaagaatggatggtgacagaatataagcactgactcctaaataacacttcactagaaaaataggacaggcccaa

SEQ ID NO: 84032 - DNA, 639 bp, Homo sapiens
tatagagatagggtctcactatgttgcccaggctggtctcagaactcctgggctcaagctatcctcctgtcttggcctcccaaaatggtgggattacatgtgtgagccactgtgtctggccagttgttatttttattagtatctccgggagcctaataataataactaacatctcttgagtgtattatgacgtgctaggtattatgctcaatgcttacatgcattactcagtttaatcctctcaacaaccctatgagagagaaactgtcatgctgactctacaaaacatcgaggccccagagaagtaactagtcgtagttcccatagttaggaagagtcaggattccaacccaggagttgaccttacagtctacattcttggcccccaggctcacctgcctgccaggcaggaagttcaagtggttgcatgttgaagggttgaatgcaagaagtggaggaaagagttggtggaaattagtgagctaaagctaggctcggcctgctctgaagcagtctgggtttgcccttagggcaaaatcacctggggtaggtgacagagaagtggaagccatgctcagtttttgacaggctgtgtgaccttgggcagattcttgcttctgctgaaacctccttttcccc

SEQ ID NO: 84033 - DNA, 443 bp, Homo sapiens
aattagccaggtgtggtggcacacgccagtaatagctactccagtggctgaggcacaagaattgcttgaacccagaaggcagaggttgcagtaagccgaaatcactccactgcactccagcctgggtgacagagggggagaccttgtctcaaaaaaacaaaacaaaacaaaaaaacaaacaatgcacgtagtcaactggatgccaaggaaggcatttgacaaaatgtaataccttttcatgatgaaactactaaacaaactagaaatagtaggaaattacctcaatatggtaaaggccatatatgaaaagcttatagctattatttttctcagtaacaagtgaaaaactgtaagcttttcctcttaagattggtaacaagggaaggatgccctctctcaccacttctattcaacgtagtgttggaattccagattaattaggc

SEQ ID NO: 84034 - DNA, 337 bp, Homo sapiens
ccaagtatttattattgttttgttatttgttgttgttgtttagagacagggcctcactctattgcccaggctggagtgcaatggcacaatcatggctcaatgcagccttgaactcctggcctcaagcaatcctcccatctcagcctcccaaagcactgggactacaggtgtaagccaccaagcctagccttataattgttgtgttattactattacatgtcacttagtgcacatgtacaagaaagagtttagggtgtgtacatgcccaggagagggatgtgaaggacaaaagcgtggactgaaagattggcccttcctggcttctgtggcatcccag

SEQ ID NO: 84035 - DNA, 710 bp, Homo sapiens
cggaccttcaacttgcctggggctgtctctgtccctcgggcgaggggctcctggggacccaggacacctggccacggggaggcggggcatggggggcagaaagccagatggagcgggtaggagaaggggggtgctgggaggagtcaaggagggagagagggggcgtgcatggggcgcggagttaagagccaccgagcctgggcgcggtgtgcaggcgagggccacggccttcgcagcagcggggaacgcggggagtcgaggcacccagcgggccggggaagaaggtgggggactccgcggacgccgaggagagggcactgcggagtcagcaggccctgtagggagtcggagaggggctgagcagatcctgaaggcgggcgggggacgcacctttcggcggggcagggtgcccccggacacggcgagcgcgcggtacagctcggcagggtgatagtcctccagcgccgcgtacagctcgtccgctgggggcccaggggtggcggctgcggcagggggtcccggggtcgggaccggagcggcgggcgcgacttccgagtcgggagtccgggcggcggggtccggggtggccgccgcctcctccttctgctgcagcttcctgagtcggcggagggtcatggctccggcgccggacgcccctcagagacggcgctggctcccctcggcggggctggcggcggctgggggatgcc

SEQ ID NO: 84036 - DNA, 336 bp, Homo sapiens
acccatcaaatacccaggaaaataatctcacaaaatatgtgtaagatggttacacagagaatcataaacattgctgagagaaattaaagaagacctaaatcaatagagggacataccatgtttatagattagagactaaatattgtaaagaggaagattcctcctaaattgatctatatatttaaatctaattctgataaaaatcctgcataaaattttgtggaaattaaaaagttgttttttaaaatgtatatggagatgcaaaggagcaagaatagttcaaacaatcttgaagaaaaaaataaaattgggagacttatactctcagatatcaag

SEQ ID NO: 84037 - DNA, 1264 bp, Homo sapiens
ttttttttgtatttttagtagagatggggtttcaccatgttggccaggctggtttcgtactcctgacctcaagtgatccgcctgccttggcctcccaaagtgctggcagatcacttaagcccaggagttcgagaccagccttggcaccatggcgaaatctcatttttactaaaaatacaaaaaattagccaggcatggtggtgtgtgcctgtaatttcagctcctcaggcggctgacgtggatcatctgagctgggaagtcaaggccacagtgagctgtgaataggccactgcactccggcctgggcctggatgatgggtgtgagaccctgtctcattaaaaaaaaaaaaaaaaaaattgtaggtaatttagagatgatttaaagtatatgggaggatgtgcataggtaatatccacatactatgtcattttcatatcagggacttgagaatctgcagattttagtatcaaagggaagtcctggaaccagtcttcagataacaagggacaaatctagttcttcctggggactgtagccgggagtagagcagaaaacaatttctttcgtttaatccacattagatttttatttatatttattttgagacaagagtctcactctgtcacccaggctagagtgcagtggagcgatctgggctcaaagagattctcccacttcagcctctgcactagctgggaccaggtacgcaccaccatgcccggctaatttttgtatttttttagtaaagatggggtttcaccatgttggtcaggctggtcttggactcctgacctcaagtcatccacctgcctcggcctcccaaagtgctgggattacaggaatgagccaccacgcctggccttagatttttaaaagtaacatgcaacactttaaacataaagaaaacgtacttttaagaaaaggaacagtatggactttgtacaaatttccagaaagcaggtaaaagattatatactcttggtaattatgaactactggagttaaatattttacctttttgtctcaccactatttactgagaaactgaggactaaagtatgctttgccaacaccctgacagctatcagacatagctttctttgatttgaggatggcatcacagagatatacttactcaatgtaacaaacacttactgcctactaggtgccaagcactatgaatcataggtaaaataacctctttcaaaccccacagtaataaacttagtcacctattatgactatattcaagataggtccctc

SEQ ID NO: 84038 - DNA, 398 bp, Homo sapiens
gaactaaccgtccttcccagggcacagattcttaccagagtctggctcccaagatcatctatccattccctttttgccttccttcatttcacaaaagctttgaggaagcagtaccagtgtttgcgttaatgggtctgcttcacttattcataaacctctggcctatttcaatactgtgttcaaaatatatatatatttttaaacttaacctccaactggtctccaatttcacatcagtatatttctttatcattagattctttcattttcttattttctgtgtaactacttgggaggctgaggcagaaaattgcttgaacctgggaggcggaggtttcagtgagcggagatcaagcacctgcactctagcctgggtgacagaaacggactctgtctcc

SEQ ID NO: 84039 - DNA, 433 bp, Homo sapiens
ctgggaagtgcccaggaaagctgaggaagttgtgatcatacttagctctctcttttccctgggggagaaaccacaggctgagggaacctctctaggcatggagctgtgatggcctgcagaagggataatgctcataggcagaaggaacttgccttgtcttagatgaaactttggacttgaacttgttgggttaatgctggaataagctaagaccttgagggactgttggaaagactctcctacctacaaatgctgccactgctggatgctgtcaccaggaccaaatcatgagccactggcagtaattctgcaacccccaacactggggaagccacacatttacaaataccccaaggacagatgaactcacccacagataacacctgcagccaaagcatgcactccccagctgcctgcctacagttgctccaac

SEQ ID NO: 84040 - DNA, 340 bp, Homo sapiens
gtcgatctaaggatcccatccccggtctggatatggataaaatgtttggcctgttagatgaatgaaaaggccaatggggttgaaataaaagcatcagtgagggaagaagtattaatagaatgagctgacatcagagaggtagccagaagtcagagagattgtcaggagattgaagcctgctagtactaggagttcaaagaaaggggagatcaatgcatattgagggataacacacagaaagcttctagcataatactgacaccctgtaggcactgtgcatagtgtttattgctattatttttagctattattatttttttgagacagactcttgctctgt

SEQ ID NO: 84041 - DNA, 587 bp, Homo sapiens
aaactgttcatttcattcaaaggttaaactaacaaagaactaagtattttacaacattgtaatacttttgttgttagcacactacaagacttcctgtgaggaaataatatccactcctacagtaaaaattcctgctatttagaaagtttgaggaatgagtccatttgagtagctgttttctaagaaattattttgactagcaaaaaaagaaaaaaaaagtagctattctttattctcagccctttcagaggtaaaatcattacagaagtgtaagcttatcactggctagctgacattttactgtacttgggccagaactccagtaataagtcaaaggaactgaggatgtgcaggtttcttctctcaaggtaacgccaaatgacaatacattatcttacacttgcagctgttctataagcaaagagatagacttcaatgatgtgttggtaatttttaaaagctggcatttccccctacattatttaaaacttcaaatacaacaaaacaggcctggcacagtggctcacggctgtaatcctaacactttgggaggctgaggtaggtggatcacctgaggtcaggagttt

SEQ ID NO: 84042 - DNA, 5915 bp, Homo sapiens
  misc_feature (2)..(2): n is a, c, g, or t
  misc_feature (6)..(7): n is a, c, g, or t
  misc_feature (9)..(9): n is a, c, g, or t
  misc_feature (2833)..(2833): n is a, c, g, or t
  misc_feature (3943)..(3943): n is a, c, g, or t
  misc_feature (4040)..(4040): n is a, c, g, or t
  misc_feature (4193)..(4193): n is a, c, g, or t
  misc_feature (4195)..(4195): n is a, c, g, or t
anactnncngctcgtctcaatttggccctgctgtatttcaagtgctcggtagccacatgtggcaagtggccatcactgtggccattgcagctccaaagggacaggagagttgatggaaattagacactgcattctacagcctcatgagcccaagagagcaaaccttggtttgctgaaaatcagcagataaggcaattgaaagggaagaagaacaacgactatcgtctattccacaagatgagtaacagccaccctcttcgcccctttactgcagtgggggaaattgatcatgtgcacattttgtctgaacatattggtgccttgttgattggggaagaatatggcgacgtcacattcgtggtggaaaagaaacgttttcctgcccacagggtaattttagcagccaggtgccaatattttcgagcattattatatggtggaatgcgagagtctcagcctgaagcagaaattcctctccaagacaccactgcagaagcattcacaatgctactcaaatatatctacactgggcgggcaacgctgacagatgagaaggaggaggtgctgctggactttttgagcctggctcataaatatggatttccagagctagaggattctacctctgagtatctctgcaccatacttaacattcagaatgtctgcatgacttttgatgttgccagtctctactcacttcccaagttaacttgtatgtgctgcatgtttatggataggaatgctcaggaagtcctctcaagtgaaggtttcctctccctttctaagacagcacttttaaacatcgtgttaagagactcatttgcagctcccgaaaaagatattttcctagccttattaaactggtgtaagcacaattcaaaggagaatcatgctgaaatcatgcaggctgtgcgtttacctctcatgagcctcacagagcttctgaatgttgtgaggccttcaggactgctgtctcctgatgccatcctggatgccattaaagtgcgatctgagagccgggatatggacctcaattatagaggcatgctcataccagaagaaaacattgcaactatgaagtatggagcccaagttgtaaagggggagctgaaatcagccttattagatggtgatactcaaaattatgatttggatcatggattttcaaggcacccaattgatgatgactgccgttccggcatcgagattaagctaggtcagccatccattatcaatcacatacggatactcttgtgggaccgagatagccggtcttactcatacttcattgaagtgtcaatggatgaacttgattgggtcagagtgatagatcattcacaatatctgtgtcgttcttggcagaaattatattttccagcccgtgtctgcaggtatattcgaattgttgggactcacaacacagtgaacaagatttttcacattgtggcttttgaatgtatgtttacaaacaaaaccttcactcttgagaaggggctgatagttcccatggagaatgttgcaacaattgctgattgtgccagtgtgattgaaggagtcagtcggagccgaaatgccttgctgaatggggacactaagaattatgactgggattctggctacacatgtcaccagctaggaagtggtgcgattgtggttcagttggcacaaccgtacatgattgggtcaatacggttactactttgggattgtgatgatcgaagctatagctactacgttgaggtttctaccaaccagcaacagtggaccatggttgctgacagaactaaagtctcctgcaagtcctggcagtcagtaacttttgaaaggcagcctgcctccttcatccgtatcgttgggacacacaacacagcaaatgaggtgttccactgtgtccactttgagtgtccagagcagcagagcagccagaaggaggaaaatagtgaggaatcggggacaggggacaccagcctggccggtcagcagctcgactcccatgcgctgcgggcgcctagtggcagctcactaccctccagcccaggctccaactcacgctcccccaaccggcagcaccaataaaggaggcagcgggcctggtgtgacttggtgggctcgggcaacggcaggaaacggtctcctccctgagcaggggtctctgttgactgcccccacctctgcccctttccagggaggagccgacctagctgcaaaagcagacaccgaacaggttttctcccaaggacagaaaggggctgctttgttcttctcaatttatccaaatcaggcaggtctcaagggggagaaaatgggtcttcaatcttcatcaagtccaccattaacaccctacctctctaatctagcccaggcgcagggaacaggaggaagtcatagacaggcctgtgttggaatacaaaaatggcacgcaaacactcaggcggaggagaaagccattgggcctttgctacctggaggcaccctttaggaatgggcctccatagagtgttcattctgctggaatacattgccctggcaactaaatgattttttatttgttttagttattctccactcagtgaatcataggtgttccggatctatttgaaatgctcaaacagcaaatcactagttttaatcccttttgatgctataattttccttccttggttttgaacggttcagcttgcggggacagagacccatcgtgcatgtctcctaaatgagacacggatgcagctcatcctggcacttgggccacagaggaagtgccacaaatgcacacaagcaaatcaacctgtggacactggagttaatagtcactcgtgtggctgagttactnacctgtcattcctgacatggatccagcctttaagcttgggaggctgacaaggaaatagttactatgcccgctgctaattcactgttccgaagtccatgtagataaacatataccgagttctggcgtggccaaacctgccggggactgccgtggcttagctgcccctccagttgtgtttatcgaagcattggagaggcagccacctgcccatcagcgtcaggaacgcagaactgggactccgtgcttcccccacaccacagtactcaactggggactgaaaaatagcagttccaagaagcttttctcctaatcctcatcaaaaggacctcatttgacgatggtggcttgatgtggctccgtctcctacttagtgatttccattccagtgctgcctgccctgggtaactgcgcacaacattgcctgcccctccgctgtccccagagctccggcctctgtcgccatcagcatcagcctgggagtctccccaggacggcatggcacgtgagcagcactgcagtccttgggtcttcggcgccaacctgcaaccctgatcaaaggagggtgagggcgtgggagtttcctttcaggtgtgtcaaagacatatcagctgcgctctagaaagagccaacgggtcagccgcttcctcctagtttaacttgattttgagtgatttgtccatatggaaatagtagggtactccagctgcagggctgagctgcttcctatcccctcagctctgatctctgccacttccctgttgtgtgggagagtggaacactcctgggatgccaggcatttcataatgggaggaggctcctgtaaggaacggtgggcgcccgctcacagtggggggccctccagcatggttgctgactctgtcagcccccagccccgggttgccaattagccagagagctcctgcacacacagcacttccttccccagtgtgttttctacccagatggggacaaaggagccagacagtcatatcaagggcagagttcaaacattttgaaatgagccattcacatgcttctttttaaacatgggcatcacctgcccagaggcccttggcctgaagcagcatgctgctgaccttgggaagaganggtgggctggtgggggtgctggaggagctgcccggccctgcatctgcaaccctccagtcccctgcccacagagcacgcagagccctcctgtgctccnggaacgagatagcagcttggcagctcggcctcgcatctgaaaaggaatacgctgcaaagcctcggccctagacccacatctgcagctccctggcctgtggcggttctttccttcggggcatgcccttccagatctctgtccctcctgtcttcnancactttaaagatgccccttatcatcagataaagagaagtatggggacgatggggtggcactaacagtagatgtcattggtgaggactgatggcaaagtctcattccctcacagccgcgctgccagctcgcctccccctcgctttgctgggagcctgccctggactccaaaaggacacgggttcacctcctttcccaggctggaggggtactgcccttccctgaggggccttctgactggggcaggaactcttttcgtgtgtccagctgggcctggaggccaagtcaaggtgtgtcacaccacacaccagggcaaggacctcatctccagggaacagggacaagtgagtggctaccagaaagtccccgggcagcctggagttccccagagcctggctggtcctacagagcacttctcccctgggccaccaggaccaaagcgacctaaacacttgaagctaaaagcaagtgctgatgatgggatgggctggcacgtggctgggagggctcctgggcaccacagagccctcagcccagcagagagtggaggctcagtccgcggggagtgggggttgtgaaggagacatggccaagcccctggtcggggagataagctcccccatgcccaggccagccccaggggcaacaagccaacatggagagaggtggcaggtgaggctgacaggtgggtgcctgtggcctgggcccatgagggcaatggtcctcagtaaccaatggaaaggacacaagggcgccgtggtcaccaccacccaggcaaagaaatgggaggtggccagcacccccacccttcacttttcattattattattattattattattattattattattttttttttttttttttttggagagtagaaaggcaacttcattggagcttttggggaaaaaagccttcaaagtcaccttctggcagctctggggagggtcatttggggtggactgagagtgtagggcaggtagggtgtgtgccgggcagcagctgtgtccgtgcagccagcacccagcagggcagtctcacaggagccgttgtgagcactttggacttgaagcagctatgaaccaccccccgcccccaccgtctctccctctcacacacacacacacacacacacacacacccgttttaccattttctcagtgctttttctgctttcattcctttgattttagttagaagcacaagccatgatggatgtgggactcttctcaattgctctttaaattgtcactttttaaatcctattaaatgaagtgtcgattcctgacaaatacattaaaagtgttttattcctagaagagttgggaaaagaaattattttcagcaagagtaggatgtttgttaaactgattccttggcaaaaaagagaaaaaaagcttttgaattgtgcaaaaaattgcccagtattatgctgtcgccccagttgtcaaactgctgtgcagatggctccagcccagtcaacttcaccttctttttaatttagaagataacaaaattgtaatcacttatcctttccagagccaagggggaaaaggaaggtataatctacaataaaaagcgagcgttctgtgtactgaggccacttggtgataaagagatggagcgctcccctcacagacttcaattaagaacctccctttggacagggaagaaaggtgtcaaagaggaaaagaaaattaaatttgcttccttccagga

SEQ ID NO: 84043 - DNA, 2682 bp, Homo sapiens
  misc_feature (2)..(2): n is a, c, g, or t
  misc_feature (6)..(7): n is a, c, g, or t
  misc_feature (9)..(9): n is a, c, g, or t
anactnncngctcgtctcaatttggccctgctgtatttcaagtgctcggtagccacatgtggcaagtggccatcactgtggccattgcagctccaaagggacaggagagttgatggaaattagacactgcattctacagcctcatgagcccaagagagcaaaccttggtttgctgaaaatcagcagataaggcaattgaaagggaagaagaacaacgactatcgtctattccacaagatgagtaacagccaccctcttcgcccctttactgcagtgggggaaattgatcatgtgcacattttgtctgaacatattggtgccttgttgattggggaagaatatggcgacgtcacattcgtggtggaaaagaaacgttttcctgcccacagggtaattttagcagccaggtgccaatattttcgagcattattatatggtggaatgcgagagtctcagcctgaagcagaaattcctctccaagacaccactgcagaagcattcacaatgctactcaaatatatctacactgggcgggcaacgctgacagatgagaaggaggaggtgctgctggactttttgagcctggctcataaatatggatttccagagctagaggattctacctctgagtatctctgcaccatacttaacattcagaatgtctgcatgacttttgatgttgccagtctctactcacttcccaagttaacttgtatgtgctgcatgtttatggataggaatgctcaggaagtcctctcaagtgaaggtttcctctccctttctaagacagcacttttaaacatcgtgttaagagactcatttgcagctcccgaaaaagatattttcctagccttattaaactggtgtaagcacaattcaaaggagaatcatgctgaaatcatgcaggctgtgcgtttacctctcatgagcctcacagagcttctgaatgttgtgaggccttcaggactgctgtctcctgatgccatcctggatgccattaaagtgcgatctgagagccgggatatggacctcaattatagaggcatgctcataccagaagaaaacattgcaactatgaagtatggagcccaagttgtaaagggggagctgaaatcagccttattagatggtgatactcaaaattatgatttggatcatggattttcaaggcacccaattgatgatgactgccgttccggcatcgagattaagctaggtcagccatccattatcaatcacatacggatactcttgtgggaccgagatagccggtcttactcatacttcattgaagtgtcaatggatgaacttgattgggtcagagtgatagatcattcacaatatctgtgtcgttcttggcagaaattatattttccagcccgtgtctgcaggtatattcgaattgttgggactcacaacacagtgaacaagatttttcacattgtggcttttgaatgtatgtttacaaacaaaaccttcactcttgagaaggggctgataggttactactttgggattgtgacactcaaagtggacacagtggaacacctgggagagaaaaggaaaagaccccatgagtgaagggtcagcatgcggccctggagttgccgcaagttgggatactgccctgcccagctttgggggccaccacgagggagttagaggaggtccttcccactgcccacgcctgccccggcgcagacacctgatggcaactagcatgctgtaaacacattttgatcagtcaagaggaaaggaaatgagccagtggcccaaaagttagagacaccatgacacggattcccacaaaatcttcacactggattactccgtttttgccaacctttgtctaatgggctctttttttcttttttaattaatttttgtatttggcagttgggttaaaagtcaacaggagttgactggtggtggtggtggtggtggttcgattctgtgaggttgtggaaagcaggtccacagataacgtccaccatctgtgtggcatctgcgtgggttgtctctgggtattctggttttctcccgcgtcccaaagctgtgcacttgaggttcattggtgtgtctgcagggtcccagtctgagtgcatgtgaatgtgtgtgagcgtgccctgcaatggcatggtgtcctgtcctgagctggttcctgatgcatagttctcctggccctgcaatggttgagcacagaccctgctaagcagccgtgctggggagtggacttcaacctcatgtggctccagccagcctggaacaaacgcccccaatgtgtagaagccagccacctggccgacagtcaccctctaggagctaagaagagtttgcatacctgacagcaggtcagcctggaagcaccatgaactctgtgccaacaccgtgccagcactgtgcagacagggcacagcaccgagctcagcgccccgcaagcaagggtaagccatggccctgacctggagagtagacaacgtgcttcggggggtcctgacatgcatgtgtgagctgtggggtgcaggagagaagggcggggtgggggctgtcgttgccactgcacgagcatgtgtgcacatacatacacacggccttctaccgtagaatcaagttcacagagacaaatgtagtatcaactgcagaattatattgaaaatataaattccacgcttaaaaaaaaaa

SEQ ID NO: 84044 - DNA, 2851 bp, Homo sapiens
  misc_feature (879)..(879): n is a, c, g, or t
  misc_feature (976)..(976): n is a, c, g, or t
  misc_feature (1129)..(1129): n is a, c, g, or t
  misc_feature (1131)..(1131): n is a, c, g, or t
aaaaggagagaaaaaccattcaataccagaggagtgagcttgagaaaaggtaataaggagtaggacaaacgtaagtcaattccaggattagtgtcagcctgaggctctggggagcggcctccggagatattgaccgagcagggagagcagggattacacaaataaccaattaaagaacatggtggggccggataaagagctctgtccccagagctccggcctctgtcgccatcagcatcagcctgggagtctccccaggacggcatggcacgtgagcagcactgcagtccttgggtcttcggcgccaacctgcaaccctgatcaaaggagggtgagggcgtgggagtttcctttcaggtgtgtcaaagacatatcagctgcgctctagaaagagccaacgggtcagccgcttcctcctagtttaacttgattttgagtgatttgtccatatggaaatagtagggtactccagctgcagggctgagctgcttcctatcccctcagctctgatctctgccacttccctgttgtgtgggagagtggaacactcctgggatgccaggcatttcataatgggaggaggctcctgtaaggaacggtgggcgcccgctcacagtggggggccctccagcatggttgctgactctgtcagcccccagccccgggttgccaattagccagagagctcctgcacacacagcacttccttccccagtgtgttttctacccagatggggacaaaggagccagacagtcatatcaagggcagagttcaaacattttgaaatgagccattcacatgcttctttttaaacatgggcatcacctgcccagaggcccttggcctgaagcagcatgctgctgaccttgggaagaganggtgggctggtgggggtgctggaggagctgcccggccctgcatctgcaaccctccagtcccctgcccacagagcacgcagagccctcctgtgctccnggaacgagatagcagcttggcagctcggcctcgcatctgaaaaggaatacgctgcaaagcctcggccctagacccacatctgcagctccctggcctgtggcggttctttccttcggggcatgcccttccagatctctgtccctcctgtcttcnancactttaaagatgccccttatcatcagataaagagaagtatggggacgatggggtggcactaacagtagatgtcattggtgaggactgatggcaaagtctcattccctcacagccgcgctgccagctcgcctccccctcgctttgctgggagcctgccctggactccaaaaggacacgggttcacctcctttcccaggctggaggggtactgcccttccctgaggggccttctgactggggcaggaactcttttcgtgtgtccagctgggcctggaggccaagtcaaggtgtgtcacaccacacaccagggcaaggacctcatctccagggaacagggacaagtgagtggctaccagaaagtccccgggcagcctggagttccccagagcctggctggtcctacagagcacttctcccctgggccaccaggaccaaagcgacctaaacacttgaagctaaaagcaagtgctgatgatgggatgggctggcacgtggctgggagggctcctgggcaccacagagccctcagcccagcagagagtggaggctcagtccgcggggagtgggggttgtgaaggagacatggccaagcccctggtcggggagataagctcccccatgcccaggccagccccaggggcaacaagccaacatggagagaggtggcaggtgaggctgacaggtgggtgcctgtggcctgggcccatgagggcaatggtcctcagtaaccaatggaaaggacacaagggcgccgtggtcaccaccacccaggcaaagaaatgggaggtggccagcacccccacccttcacttttcattattattattattattattattattattattattttttttttttttttttttggagagtagaaaggcaacttcattggagcttttggggaaaaaagccttcaaagtcaccttctggcagctctggggagggtcatttggggtggactgagagtgtagggcaggtagggtgtgtgccgggcagcagctgtgtccgtgcagccagcacccagcagggcagtctcacaggagccgttgtgagcactttggacttgaagcagctatgaaccaccccccgcccccaccgtctctccctctcacacacacacacacacacacacacacacccgttttaccattttctcagtgctttttctgctttcattcctttgattttagttagaagcacaagccatgatggatgtgggactcttctcaattgctctttaaattgtcactttttaaatcctattaaatgaagtgtcgattcctgacaaatacattaaaagtgttttattcctagaagagttgggaaaagaaattattttcagcaagagtaggatgtttgttaaactgattccttggcaaaaaagagaaaaaaagcttttgaattgtgcaaaaaattgcccagtattatgctgtcgccccagttgtcaaactgctgtgcagatggctccagcccagtcaacttcaccttctttttaatttagaagataacaaaattgtaatcacttatcctttccagagccaagggggaaaaggaaggtataatctacaataaaaagcgagcgttctgtgtactgaggccacttggtgataaagagatggagcgctcccctcacagacttcaattaagaacctccctttggacagggaagaaaggtgtcaaagaggaaaagaaaattaaatttgcttccttccagga

SEQ ID NO: 84045 - DNA, 837 bp, Homo sapiens
ctatatctataccacagcccccaatcctttcaaaggctttgcatgtatttcagctacaagtgacaaggatattaaggatttaaaaggataagagagtgggaaagatgtataaggaagtgcctttgtcaaaaggcagcaaaaagtataatgatataaacataatatgaaataagcaaattttagaatactttgaaacagatttatagaggaatacatagtaaatagttatagacacacacacacacacacacacacacacccgttttaccattttctcagtgctttttctgctttcattcctttgattttagttagaagcacaagccatgatggatgtgggactcttctcaattgctctttaaattgtcactttttaaatcctattaaatgaagtgtcgattcctgacaaatacattaaaagtgttttattcctagaagagttgggaaaagaaattattttcagcaagagtaggatgtttgttaaactgattccttggcaaaaaagagaaaaaaagcttttgaattgtgcaaaaaattgcccagtattatgctgtcgccccagttgtcaaactgctgtgcagatggctccagcccagtcaacttcaccttctttttaatttagaagataacaaaattgtaatcacttatcctttccagagccaagggggaaaaggaaggtataatctacaataaaaagcgagcgttctgtgtactgaggccacttggtgataaagagatggagcgctcccctcacagacttcaattaagaacctccctttggacagggaagaaaggtgtcaaagaggaaaagaaaattaaatttgcttccttccagga

SEQ ID NO: 84046 - DNA, 3046 bp, Homo sapiens
  misc_feature (2)..(2): n is a, c, g, or t
  misc_feature (6)..(7): n is a, c, g, or t
  misc_feature (9)..(9): n is a, c, g, or t
  misc_feature (2833)..(2833): n is a, c, g, or t
anactnncngctcgtctcaatttggccctgctgtatttcaagtgctcggtagccacatgtggcaagtggccatcactgtggccattgcagctccaaagggacaggagagttgatggaaattagacactgcattctacagcctcatgagcccaagagagcaaaccttggtttgctgaaaatcagcagataaggcaattgaaagggaagaagaacaacgactatcgtctattccacaagatgagtaacagccaccctcttcgcccctttactgcagtgggggaaattgatcatgtgcacattttgtctgaacatattggtgccttgttgattggggaagaatatggcgacgtcacattcgtggtggaaaagaaacgttttcctgcccacagggtaattttagcagccaggtgccaatattttcgagcattattatatggtggaatgcgagagtctcagcctgaagcagaaattcctctccaagacaccactgcagaagcattcacaatgctactcaaatatatctacactgggcgggcaacgctgacagatgagaaggaggaggtgctgctggactttttgagcctggctcataaatatggatttccagagctagaggattctacctctgagtatctctgcaccatacttaacattcagaatgtctgcatgacttttgatgttgccagtctctactcacttcccaagttaacttgtatgtgctgcatgtttatggataggaatgctcaggaagtcctctcaagtgaaggtttcctctccctttctaagacagcacttttaaacatcgtgttaagagactcatttgcagctcccgaaaaagatattttcctagccttattaaactggtgtaagcacaattcaaaggagaatcatgctgaaatcatgcaggctgtgcgtttacctctcatgagcctcacagagcttctgaatgttgtgaggccttcaggactgctgtctcctgatgccatcctggatgccattaaagtgcgatctgagagccgggatatggacctcaattatagaggcatgctcataccagaagaaaacattgcaactatgaagtatggagcccaagttgtaaagggggagctgaaatcagccttattagatggtgatactcaaaattatgatttggatcatggattttcaaggcacccaattgatgatgactgccgttccggcatcgagattaagctaggtcagccatccattatcaatcacatacggatactcttgtgggaccgagatagccggtcttactcatacttcattgaagtgtcaatggatgaacttgattgggtcagagtgatagatcattcacaatatctgtgtcgttcttggcagaaattatattttccagcccgtgtctgcaggtatattcgaattgttgggactcacaacacagtgaacaagatttttcacattgtggcttttgaatgtatgtttacaaacaaaaccttcactcttgagaaggggctgatagttcccatggagaatgttgcaacaattgctgattgtgccagtgtgattgaaggagtcagtcggagccgaaatgccttgctgaatggggacactaagaattatgactgggattctggctacacatgtcaccagctaggaagtggtgcgattgtggttcagttggcacaaccgtacatgattgggtcaatacggttactactttgggattgtgatgatcgaagctatagctactacgttgaggtttctaccaaccagcaacagtggaccatggttgctgacagaactaaagtctcctgcaagtcctggcagtcagtaacttttgaaaggcagcctgcctccttcatccgtatcgttgggacacacaacacagcaaatgaggtgttccactgtgtccactttgagtgtccagagcagcagagcagccagaaggaggaaaatagtgaggaatcggggacaggggacaccagcctggccggtcagcagctcgactcccatgcgctgcgggcgcctagtggcagctcactaccctccagcccaggctccaactcacgctcccccaaccggcagcaccaataaaggaggcagcgggcctggtgtgacttggtgggctcgggcaacggcaggaaacggtctcctccctgagcaggggtctctgttgactgcccccacctctgcccctttccagggaggagccgacctagctgcaaaagcagacaccgaacaggttttctcccaaggacagaaaggggctgctttgttcttctcaatttatccaaatcaggcaggtctcaagggggagaaaatgggtcttcaatcttcatcaagtccaccattaacaccctacctctctaatctagcccaggcgcagggaacaggaggaagtcatagacaggcctgtgttggaatacaaaaatggcacgcaaacactcaggcggaggagaaagccattgggcctttgctacctggaggcaccctttaggaatgggcctccatagagtgttcattctgctggaatacattgccctggcaactaaatgattttttatttgttttagttattctccactcagtgaatcataggtgttccggatctatttgaaatgctcaaacagcaaatcactagttttaatcccttttgatgctataattttccttccttggttttgaacggttcagcttgcggggacagagacccatcgtgcatgtctcctaaatgagacacggatgcagctcatcctggcacttgggccacagaggaagtgccacaaatgcacacaagcaaatcaacctgtggacactggagttaatagtcactcgtgtggctgagttactnacctgtcattcctgacatggatccagcctttaagcttgggaggctgacaaggaaatagttactatgcccgctgctaattcactgttccgaagtccatgtagataaacatataccgagttctggcgtggccaaacctgccggggactgccgtggcatcgataaacaccggtgtttatcgatgccacccccccgactagccaaccgtgtactagt

SEQ ID NO: 84047 - DNA, 229 bp, Homo sapiens
catagagcgagaccctgtctcaaacgataggacaggacaggacaggacaggacaggacgaagagaagagaggagaaaagaagcgaagcgaagagaagtatccgcatatactttaagcatcacaagaagaaatacctaccaatatatggcccaaatttggggtttaaaaaaaagaaaactctaagctagagacatgctttccaaatgtacctttttaaacataggcagtg

SEQ ID NO: 84048 - DNA, 708 bp, Homo sapiens
cccgcgcaggctaccgcagcatagatcgaggtatctgagaaggattcggcggcaactctgggccaaagaggtggcctgacagtctgggagggctccgcactcaccggactccaggattcctgcgcgcagaaatccaggcccccagcctcgctagggcgaccttccgcgcgacctcacttcggccctcctagaggaaagactttgccttcacacgcgattactttcactggagatcacgacccggagacgctggcgactgggccagcgcctcccatttcggttcacctccagttcaccgccccctctgagtaagaaacccttggggaggggtggcgagggagtgggggataggcattctctgctcagtgcagaacggcaatgaaatgattggcaaaggtcacagggattctggtccatccgcgtaccacctctccccccatgtatataccgctgtctgtgtgtgggctcgtggggagctgtctcggcgtttctgataagcacagctggtggaagcccacagcgacgatccagcgagctagcgagcgcccgggaggctgggttcctgctttttaaaatataaatatatatatatttttaaatctctgtgtgtatgtgtctctgtgcgtgtgtgtgtgtgcgtgcgcgtgcaaacgtgtgtgtgtagatagctgtgtgtatcgcgttactatgtacaaaaacaaaaagtac

SEQ ID NO: 84049 - DNA, 446 bp, Homo sapiens
ctagaccaggctatttggcactggttgattgaatgtgaactgcactggggctgctgtgagcccgcatgggtctctgtgaccctgcagatgcagccgtgcccagggactgggcagtgggtgtgggctggtgtgagccctgtctgccacccagggcctggccctctgtctgtgtcggccatgactatggtgagtcttgtaggcttgagactgtgcctcgggttcctgcgggttctctgtaggtcagttgacagtttctcctgttgtttgggtaactgtggaaacgaacactggcaagtgctgaagcgagcatgtggacgtgcgatatgaaataacgacctggctttcaaaggcagtgaggctctctggaaaggaccttgctgagctagggatgtgggtgtgtagccattcccagtgggcctcatggcgtactcgttcatgatcatgtt

SEQ ID NO: 84050 - DNA, 721 bp, Homo sapiens
cagcacttctggcagttaagaagtccagttcttcaactcactaagctgccttctggagcccgaaccaggaatgcagtgataaagagatgcaggctggaaaagtttgaacaacctggccccagattccccatctgtgaaggggcactgaggctaggtcgtacttgggcaatttttgtgctgcccttagctcatgagccccttcaccaaagctaggtgacctctgagtcccttcatattagaccagagatcccaatcgtggggcattgcagccccatcatgtgtgggttgtgggcctcccatgctcctaaaagcccagtgcaatcaaaatagctaatgattattaaaaactttttggattgcagatgactgacaggtatattcccacatgagctagttattattatcttgtttatacagtcaagacatttgaagtccagaaatgtgaccgattcacacagctagactggaacttcaacccaggccccttacactccaagttcaaggctttttccatcgtgatatgctattttaaaatccgagtggattaaaattaaatttttttttttttttttttagacggagtctcgctctgtcgcccaggctggagtgcggtggtgcgatctcggcttactgcaagctccacctcccaggttcatgccattctcctgcctcagcctcctgagtagctgggacaacaggctaaaattaaaattttaacttg

SEQ ID NO: 84051 - DNA, 346 bp, Homo sapiens
aaattagccaggtgtggtggtacacacctgtaatcccagctactcgggaggctgagacaggagaattgcttgaacctgggaggcggaggttgcagtgagctgagattgtaccactgtactctagcctgggtaacagagcaagactccgtctcaaaaaaaataaaataaaaacacaaaagcactcttaagaggcttttctttgttttttgtttttacaggtgtgagatctttttggttactggttattgttacagtaaatttattgttggaaattttactgtaaattggctaatgtctgaaaagactcaggtcctcatttgtttccctgttgtcattgttccacagc

SEQ ID NO: 84052 - DNA, 599 bp, Homo sapiens
ggcaaaggggaatctggcgctccctgggaaggcggccaacgcggttctcctctggagtggttgagtccagctgcaggcctttccccatccacaggggctgttccatgatggggtcaagatttgggtcacccacccatggtccggggagaagtgactccccaaggtcacaaggccaccaccaatagagccaggatggggttccaggtggcttgacttggcagccagcgcctgtgcccatggcaccccctcaccccagctgtctgggttattttgggcttcctcccgtgccagctgtctgctggcatccctgcccgggactgtctggttggaagtaactggcgtggtgctgttggctcctcctgtgagggccagggctgggtcttcaatccccgatgagccgtgctgggtccagctcctttgctgggagggaagagtgttcctgcccagactccccgctgcccaagtacagcaagagggcgaaagcacctgataaaaattgaggttcacattgttaatatcccaaaagcctcctccttctatactccctgaaacctgttttaaatttggctctgccattgaaccccgttgctctcacgtta

SEQ ID NO: 84053 - DNA, 404 bp, Homo sapiens
aatttctaaaattgaatagttgtgtattgaaattccacagagcatcatttcctttgagacaaaaggaaactgtgttcactttagctgtcatttttttcaaagtcaatcccagtacttttttatgttaacattttaataatgcataacattctataccatattttatcagaaacaaatttgttctattgccccaaaaaatcacttacatgagatatttgttgtcatgctttgtcaatatacagatgtaaatatatttatcatttacatataaatgaatgttcgaacacagacacttggcttttgacatatacataaatgtgtctgtgaatgattacagaagtgatcagggcctcggcatttcccttggaggtagcaaagtgtctcctagactttcagctgttttt

SEQ ID NO: 84054 - DNA, 297 bp, Homo sapiens
gctggaactcctacaatgtatatattggtctgcttgatattgtcccatgggactcctaggctgtgcttacttttcttcaatctttttcctttctgttcctcagacttgctaatttccattgtcctatctttgagtttgctgattttcttctgcttgctcaaatctgcctttgaatccctctagtaaatttcttatttcaattattgaacttttcagcttcagaatttctttttcctttctaggttttctcttaatattcctattttgtttctacatagttttcttaactttctccat

SEQ ID NO: 84055 - DNA, 585 bp, Homo sapiens
gaggaactcagagcagccttgagaagaagctaaaacatttggtaacaacaatcagaaagaacaatgtcaggtctgccatacaaaagtgaaaatatttgcagtggggagcaagtgggtaagtaatagactgaatacttcctgtcttaggctgatcaggtgccataacaaagtactgtagactgggtgacttatcaacaacataaatgtattttttacagttttagaggctggaggtctgagatagatcagggtgccaacatggttgggctctgatgagggccttcttctgggttgcagatggctgtcttctttttgtattctcacatggaggaaagagagcaagctagttccctggactcttcttataagggcattaatctcattcctgagggctccatcctcaagacttaattacctcccaaaggttccacctcctaatataatcatatttggattaggggtttcaatatatgaattttgggggaacacaaatagtcagtccattgcaccccggccatgccccgcaggcctttctttcacgacatgaagatttccttacaaccaactcagttgatgggtccatta

SEQ ID NO: 84056 - DNA, 329 bp, Homo sapiens
gattttaaatagttaaaacatttttttaaatccataagtaattcttactctactcatttatacacacatatactcacatgtacacagacatacctacacacacacttataaatacatgtatacacagaatatagcaaggtcttttatcccttttcaatgaaataaatattgtattctatatttagaataaataatgttgaaaaagtgattttggagaaaggttgaaatgattgagtcttaagtgtgtcaatgtataatctacccctttctaaacatcgtgttttaagtagtcatcttacttcagaaattagaggttcaatgtgtttaga

SEQ ID NO: 84057 - DNA, 508 bp, Homo sapiens
aaaggtttcatttacaaatctcaatttctggcttatgagatctagccactgggggtcttcatacccacgaggacataagggcttccagtttgtctggtccccacccactccccaggcctccctggagcttgctggagggacactcgggaaaatgcaaagcaattacctcctgcagcaggtagaacctgtgcaagtattcctctcaaggttgttcaggctgtgactggacagattcaggctgagattgcgaactgctgggtgcccactgggtgacaggtgtggtgccactcccaccagcagccccccagagggcatgctgggcctcagccactgccaggggactgtgaggaggagccgaggatgcagcctcgtgttgggcccatgcccgttcccagccactcagtctttcccactgtctacctcctgccccggtgcttgcttccaactttgcatctcatcacagaggatgctgtccgttctgcagatgggacaattgaggcatggcagt

SEQ ID NO: 84058 - DNA, 2284 bp, Homo sapiens
gcggccgcgagttgtgactggagccacgatgcacggccaggcgcggtgagaagccagcccgtagtgcctcccgaaggagcccgggcgcagggagggtcgccctgaggacacggaggccgccaggcaggccaagggccgaggtgactgggctggggcggtagggaaggagcgagtgcgcctggctgcctccgcacggagttgtccctctctgttttcgattgacacaaacacttctccaaaagcggggaaacctaagcaacaacagcaatcaacaccaagatcttcctcctaccctcccctctttcccttctcccgcggtcggccctcgccccctcccccaggcccagcgcgggcgctcggcgcgtccagacccgcggcgcgatgccggcagtttaggatccaaagcttctctgctccttttgttctttccttcccttttttaaaaaaagaggggggaaatcccagtggtgggcagcctggcacgcacacagtcgccctcataccccgacaaaagcagatgcactttgacttctgacagctctacctcaagccccggagaactcagcggcgctttcctcgcaacccgagctcggcgagtcgtcgtcttcttcttctccgtttttatttatttatttccgttcccgccgccgttctcgctgaccttcactcctccgcgggctctgagcagaagggtcgcattctctcccgcctgagacttcttttcctcgccccgggagctcaggcggcgccgctccagcccggggccccgggactccccggctgcacacttcactgagacgcccccccaggccccgatcagcctcgtttcctccaccctactttgatttcctggtgcgagttttggcttgcacggccgagtgtgtgtcctctttttggagagactggggagctcgtgccgattgtcttcaggagtcatcccctgggctctactttgcccctctctctctctgggcctcatcagaccaaaccaaagaccatggttcactgtgccggctgcaaaaggcccatcctggaccgctttctcttgaacgtgctggacagggcctggcacgtcaagtgcgtccagtgctgtgaatgtaaatgcaacctgaccgagaagtgcttctccagggaaggcaaactctactgcaagaacgacttcttccggtgtttcggtaccaaatgcgcaggctgcgctcagggcatctcccctagcgacctggtgcggagagcgcggagcaaagtgtttcacctgaactgcttcacctgcatgatgtgtaacaagcagctctccactggcgaggaactctacatcatcgacgagaataagttcgtctgcaaagaggattacctaagtaacagcagtgttgccaaagagaacagccttcactcggccaccacgggcagtgaccccagtttgtctccggattcccaagacccgtcgcaggacgacgccaaggactcggagagcgccaacgtgtcggacaaggaagcgggtagcaacgagaatgacgaccagaacctgggcgccaagcggcggggaccgcgcaccaccatcaaagccaagcagctggagacgctgaaggccgccttcgctgctacacccaagcccacccgccacatccgcgagcagctggcgcaggagaccggcctcaacatgcgcgtcattcaggtctggttccagaaccggcgctccaaggagcggaggatgaagcagctgagcgccctgggcgcccggcgccacgccttcttccgcagtccgcgccggatgcggccgctggtggaccgcctggagccgggcgagctcatccccaatggtcccttctccttctacggagattaccagagcgagtactacgggcccgggggcaactacgacttcttcccgcaaggccccccgtcctcgcaggcccagacaccagtggacctacccttcgtgccgtcatctgggccgtccgggacgcccctgggtggcctggagcacccgctgccgggccaccacccgtcgagcgaggcgcagcggtttaccgacatcctggcgcacccacccggggactcgcccagccccgagcccagcctgcccgggcctctgcactccatgtcggccgaggtcttcggacccagcccgcccttctcgtcgctgtcggtcaacggtggggcgagctacggaaaccacctgtcccacccccccgaaatgaacgaggcggccgtgtggtagcggggtctcgcacggtctgcggagttcgtggttgtacagaaatgaacctttatttaagaaaaatag

SEQ ID NO: 84059 - DNA, 2023 bp, Homo sapiens
gcggccgcgagttgtgactggagccacgatgcacggccaggcgcggtgagaagccagcccgtagtgcctcccgaaggagcccgggcgcagggagggtcgccctgaggacacggaggccgccaggcaggccaagggccgaggtgactgggctggggcggtagggaaggagcgagtgcgcctggctgcctccgcacggagttgtccctctctgttttcgattgacacaaacacttctccaaaagcggggaaacctaagcaacaacagcaatcaacaccaagatcttcctcctaccctcccctctttcccttctcccgcggtcggccctcgccccctcccccaggcccagcgcgggcgctcggcgcgtccagacccgcggcgcgatgccggcagtttaggatccaaagcttctctgctccttttgttctttccttcccttttttaaaaaaagaggggggaaatcccagtggtgggcagcctggcacgcacacagtcgccctcataccccgacaaaagcagatgcactttgacttctgacagctctacctcaagccccggagaactcagcggcgctttcctcgcaacccgagctcggcgagtcgtcgtcttcttcttctccgtttttatttatttatttccgttcccgccgccgttctcgctgaccttcactcctccgcgggctctgagcagaagggtcgcattctctcccgcctgagacttcttttcctcgccccgggagctcaggcggcgccgctccagcccggggccccgggactccccggctgcacacttcactgagacgcccccccaggccccgatcagcctcgtttcctccaccctactttgatttcctggtgcgagttttggcttgcacggccgagtgtgtgtcctctttttggagagactggggagctcgtgccgattgtcttcaggagtcatcccctgggctctactttgcccctctctctctctgggcctcatcagaccaaaccaaagaccatggttcactgtgccggctgcaaaaggcccatcctggaccgctttctcttgaacgtgctggacagggcctggcacgtcaagtgcgtccagtgctgtgaatgtaaatgcaacctgaccgagaagtgcttctccagggaaggcaaactctactgcaagaacgacttcttccggtgtttcggtaccaaatgcgcaggctgcgctcagggcatctcccctagcgacctggtgcggagagcgcggagcaaagtgtttcacctgaactgcttcacctgcatgatgtgtaacaagcagctctccactggcgaggaactctacatcatcgacgagaataagttcgtctgcaaagaggattacctaagtaacagcagtgttgccaaagagaacagccttcactcggccaccacgggcagtgaccccagtttgtctccggattcccaagacccgtcgcaggacgacgccaaggactcggagagcgcccggcgccacgccttcttccgcagtccgcgccggatgcggccgctggtggaccgcctggagccgggcgagctcatccccaatggtcccttctccttctacggagattaccagagcgagtactacgggcccgggggcaactacgacttcttcccgcaaggccccccgtcctcgcaggcccagacaccagtggacctacccttcgtgccgtcatctgggccgtccgggacgcccctgggtggcctggagcacccgctgccgggccaccacccgtcgagcgaggcgcagcggtttaccgacatcctggcgcacccacccggggactcgcccagccccgagcccagcctgcccgggcctctgcactccatgtcggccgaggtcttcggacccagcccgcccttctcgtcgctgtcggtcaacggtggggcgagctacggaaaccacctgtcccacccccccgaaatgaacgaggcggccgtgtggtagcggggtctcgcacggtctgcggagttcgtggttgtacagaaatgaacctttatttaagaaaaatag

SEQ ID NO: 84060 - DNA, 988 bp, Homo sapiens
accgtgaaatggaaacgcggtgtgtgtctgacattattttggagaggcgtagtctctatgtgtgtacagccccagagaagcggtaactgtgatagtgtgactgttagaaaaactccagctataccacaactctccccctccagacacggcggcctgtccaggtcctcctgtgggattcctgctcaccattggctcagggtccgccctgagtggtcctagtcagagatcgcaccgtcaccactaccctacacacacacacaagcgcgcgcgcgcggtgtcggctagccaggcggtgaaggggtgctggctaggcccggagcaccccggggtcgggggtggagtctcggtggcctcaccccgccgccatgtgctgcaggtctggttccagaaccggcgctccaaggagcggaggatgaagcagctgagcgccctgggcgcccggcgccacgccttcttccgcagtccgcgccggatgcggccgctggtggaccgcctggagccgggcgagctcatccccaatggtcccttctccttctacggagattaccagagcgagtactacgggcccgggggcaactacgacttcttcccgcaaggccccccgtcctcgcaggcccagacaccagtggacctacccttcgtgccgtcatctgggccgtccgggacgcccctgggtggcctggagcacccgctgccgggccaccacccgtcgagcgaggcgcagcggtttaccgacatcctggcgcacccacccggggactcgcccagccccgagcccagcctgcccgggcctctgcactccatgtcggccgaggtcttcggacccagcccgcccttctcgtcgctgtcggtcaacggtggggcgagctacggaaaccacctgtcccacccccccgaaatgaacgaggcggccgtgtggtagcggggtctcgcacggtctgcggagttcgtggttgtacagaaatgaacctttatttaagaaaaatag

SEQ ID NO: 84061 - DNA, 421 bp, Homo sapiens
gctcatccccaatggtcccttctccttctacggaggtgggtgcgcgccgaatggcggggcacggccaggtcggggcgggcttcgttggaagcgggtggcagcgcgggggggcacgcctcgctctctgtaagccactggagagttggggcgagtagggagaaggctgggagtaaatcaaggggaggcggcgagaccgaggacccaattcacggccctgaataacgggggtagctggtaaggggcagctcccgggcttgcgcccagcctcctccctgcacccaggcccgcgagggctccccgcgatccgcgagttccccgcgtggccttcctcagcccgccgaggtcgcgtcttccctccctttcggtcccgccggcccccggccgggccctgacgtcctgcgccctccccgccgctccgcag

SEQ ID NO: 84062 - DNA, 2282 bp, Homo sapiens
gcggccgcgagttgtgactggagccacgatgcacggccaggcgcggtgagaagccagcccgtagtgcctcccgaaggagcccgggcgcagggagggtcgccctgaggacacggaggccgccaggcaggccaagggccgaggtgactgggctggggcggtagggaaggagcgagtgcgcctggctgcctccgcacggagttgtccctctctgttttcgattgacacaaacacttctccaaaagcggggaaacctaagcaacaacagcaatcaacaccaagatcttcctcctaccctcccctctttcccttctcccgcggtcggccctcgccccctcccccaggcccagcgcgggcgctcggcgcgtccagacccgcggcgcgatgccggcagtttaggatccaaagcttctctgctccttttgttctttccttcccttttttaaaaaaagaggggggaaatcccagtggtgggcagcctggcacgcacacagtcgccctcataccccgacaaaagcagatgcactttgacttctgacagctctacctcaagccccggagaactcagcggcgctttcctcgcaacccgagctcggcgagtcgtcgtcttcttcttctccgtttttatttatttatttccgttcccgccgccgttctcgctgaccttcactcctccgcgggctctgagcagaagggtcgcattctctcccgcctgagacttcttttcctcgccccgggagctcaggcggcgccgctccagcccggggccccgggactccccggctgcacacttcactgagacgcccccccaggccccgatcagcctcgtttcctccaccctactttgatttcctggtgcgagttttggcttgcacggccgagtgtgtgtcctctttttggagagactggggagctcgtgccgattgtcttcaggagtcatcccctgggctctactttgcccctctctctctctgggcctcatcagaccaaaccaaagaccatggttcactgtgccggctgcaaaaggcccatcctggaccgctttctcttgaacgtgctggacagggcctggcacgtcaagtgcgtccagtgctgtgaatgtaaatgcaacctgaccgagaagtgcttctccagggaaggcaaactctactgcaagaacgacttcttccggtgtttcggtaccaaatgcgcaggctgcgctcagggcatctcccctagcgacctggtgcggagagcgcggagcaaagtgtttcacctgaactgcttcacctgcatgatgtgtaacaagcagctctccactggcgaggaactctacatcatcgacgagaataagttcgtctgcaaagaggattacctaagtaacagcagtgttgccaaagagaacagccttcactcggccaccacgggcagtgaccccagtttgtctccggattcccaagacccgtcgcaggacgacgccaaggactcggagagcgccaacgtgtcggacaaggaagcgggtagcaacgagaatgacgaccagaacctgggcgccaagcggcggggaccgcgcaccaccatcaaagccaagcagctggagacgctgaaggccgccttcgctgctacacccaagcccacccgccacatccgcgagcagctggcgcaggagaccggcctcaacatgcgcgtcattcaggtctggttccagaaccggcgctccaaggagcggaggatgaagcagctgagcgccctgggcgcccggcgccacgccttcttccgcagtccgcgccggatgcggccgctggtggaccgcctggagccgggcgagctcatccccaatggtcccttctccttctacggagcctcgagaaccattctccttctggggagaccggatggaaaagggggacacgaaataggatccaaatcggcctcgaggtgggactgggatccgcgcactggctgtcgacgtgcagaactggggctccccaaaggaaacgcagacctctccccaactcccacctggacccggatccgtagacagaccccgcgggcgtgtgcgcctggcaggcgggcggcgaaaagacgtccagggcagccgcgggtgcgcacagccgttggcaatgccaggagccgtggggagggaggccgtgagcacagccgggtgaaggaagtgaagcggcccagggcgctcccgggccagccaggagggttctagctctgggatatcccttattagtgttgtctcagagttcaacaacagcgacaaaaaactcttatagcttcagaaacgccgacctgccgtg

SEQ ID NO: 84063 - DNA, 790 bp, Homo sapiens
  misc_feature (18)..(18): n is a, c, g, or t
gccggacgccgtcttacntccccgcgctgtctcggcggcccaggaattcactgtctgtagcatctgctcctccacagagggaccctggaatggcgatggcactcccgatgcctggacctcaggctttcttgttgccaaaccagcactgatctccctattggagcaaggagaggagccgggggccttgattctgcaggtggctgaacagagcgtggccaaagccagcctgtgcacagaggaccctaatacactgcccagcagaagccaggaaggaagccctgccagctcagaaggtgggccaggagagaagggtgtggccggaagggtagccggtgggggtgctgcatcctcttggccccacggggagcaccctgtcacccctaacagatgaagagaagggtttctggtgtctccagatttttcaggcgcccaccatgttcctctcatccagacgtcggcaccccaaggtggaagcaggtcatggcatgcccggcccagctgcagtccgagtgcagatcccatggcgagcgtgggatccagcccaaagcacaagccacgcacagcccgcccaggttgagtgggcaggtacctccaacagccagcccaggttgagtgggcaggtacctccaacagcctggagccgtgaggccttgcgcagggcgttgccggccgtggaggtctctggctggcaaagtggcaccgaaagagtcctgtgtcataaccagactcacttgtagcttctgttgctctccctagctatttgcaaagcatccaggataggttcatctaa

SEQ ID NO: 84064 - DNA, 499 bp, Homo sapiens
ggcagctggcgaagcattgtttctgagtgtgtgaggatgttttcagtggactcagtgaagatctgccctcagcgtgggcaggcacatccacttggttggggacccagatggaacacaaagggagaagacaagcaaattctcttttctggagggagacacccatctcctgcccttggacatcaggactccaggttcttcggcctttggactcaggcttgccacagaggcctcccagggctctcggccagtcagcctcagaatgagagttacaccactggcttccttggttcaaccaccttcttacctggactgagcctcacttacagcttctctaggtctccagcttgcagacagcctatgggaggacttctcagcctccataagtgtgtgggccagttcgcctaataaatcccctctcctggccgggcgcggtagctctcccctgtaatctcagcattttgggaggcagaggtaggtggatcacctgaggtcaggagtt

SEQ ID NO: 84065 - DNA, 628 bp, Homo sapiens
  misc_feature (18)..(18): n is a, c, g, or t
gccggacgccgtcttacntccccgcgctgtctcggcggcccaggaattcactgtctgtagcatctgctcctccacagagggaccctggaatggcgatggcactcccgatgcctggacctcaggctttcttgttgccaaaccagcactgatctccctattggagcaaggagaggagccgggggccttgattctgcaggtggctgaacagagcgtggccaaagccagcctgtgcacagattccaggatggaggctgggatcatggagtctcctctgcagagaaagctctccaggcaggcaggactgccgggcaccgtgtgggggtgcctcccctgggggcaccctgtgggggggcaccctgcaccatcccacccgcatggcggtcctgaggacgggtcagataaacccacccaccccgggtcttcgtgcagaaccattgggcacagccaggccttagcgccaggctccgtgtggcggtcaattccaggtgctgtaaagccgactaacagggtacagggagccttagctggctgccatgtctcctgcctgtaatcccatcactttgggaggctgaggtgggaggtttgcttaagcccaggagtttcagaccagcttgggcaacatggtgaa

SEQ ID NO: 84066 - DNA, 446 bp, Homo sapiens
aggagttcaagaccagcctggccaacatggtgagacccccgtctctactaaaagtacaaaaagtagctgggtgtggtgctgggtgcctgtaatcccagctactcgggaggctgaagcaggagaatcacttcaacctgggaggtagaggttgcagtgagccgagatcgagccactgcactccagcctgggtgacagggcaagactctgtctcaaacaaataaaaatcccctctcctaaactccattattggttttgtctctctagaggaccctaatacactgcccagcagaagccaggaaggaagccctgccagctcagaaggtgggccaggagagaagggtgtggccggaagggtagccggtgggggtgctgcatcctcttggccccacggggagcaccctgtcacccctaacagatgaagagaaggtgaggggggattgagttac

SEQ ID NO: 84067 - DNA, 774 bp, Homo sapiens
tctgtcttcacttgattgtggtatcatttcacagtgtagatgtttattgaatcatgttgtacaccaaaaatatatacaagttttgttttaagacagtctcactctttcgcccaggctggagtgcaatggctcgatctcggctcactacaacctctgtctctgggttcaagcaattctcctgcctcagcctcctgtatacaagttttatttgtcatttatacctcagtaaagctgggtgttgggggaagacttgggaataaaaaggttatgtcttcaaacaagaagttcgtttgtgagtgtagaggctggatcatccttccgttttctgttccttctctcagattccaggatggaggctgggatcatggagtctcctctgcagagaaagctctccaggcaggcaggactgccgggcaccgtgtgggggtgcctcccctgggggcaccctgtgggggggcaccctgcaccatcccacccgcatggcggtcctgaggacgggtcagataaacccacccacccccgggctctgggagcacagcgcctccccaagggttctgcaggaacgacctgggccggcgcatttgggggagactacagcctcgagcgtctacactgtgcagggtgccgcccatggttggtgcagtataccatctacgccttgctgcatccaggcgtttcctatcattccaatcacccggagcgcaagcaacttgccagtgactccggattgcgggaaggccctactagcccacgctcgattcctgcataggaaga

SEQ ID NO: 84068 - DNA, 584 bp, Homo sapiens
tgggcttcctgatgacggggacgacaggccgaggattcacgctggaagcccacccaagccggcggggccctagcgcagaaattcagaagccccctgtcctgaaggtgaagcaaagtctaaagaaagggccagctcccatcaggagctcggcttcttgctccagccgggcactggggagggaaagggcaccaggcagcccgtggtgtggcctcaggaaccactatcagccaccatttcctggggccttccggaaatgtccaggagcgggcagaagggagagagggaggggcagctatgctcagtccccaaagagcagggcacatgggggcgccacagacgcatatgcagctgagctccccacaggccggcccgggtcttcgtgcagaaccattgggcacagccaggccttagcgccaggctccgtgtggcggtcaattccaggtgctgtaaagccgactaacagggtacagggagccttagctggctgccatgtctcctgcctgtaatcccatcactttgggaggctgaggtgggaggtttgcttaagcccaggagtttcagaccagcttgggcaacatggtgaa

SEQ ID NO: 84069 - DNA, 884 bp, Homo sapiens
  misc_feature (164)..(164): n is a, c, g, or t
  misc_feature (576)..(576): n is a, c, g, or t
  misc_feature (701)..(701): n is a, c, g, or t
  misc_feature (761)..(761): n is a, c, g, or t
gtaaccctcaagcactaggaccgtgcggaatccaggctgcgatggcaccttcatttaccgcccgcattcagttgttcctctggcgggcgctaggctttctcataggcttagtaggccgagcagctttagtcttagggggtccaaagtttgcctcaaagaccccncggcggtgactgaaccattgcttctgctttcggggatgcagctggccaagctgatccgacagagaaaggtgaaatgtatagatgttgttcaggcttatatcaacagaatcaaggacgtgaacccaatgatcaatggaattgtcaagtacaggtttgaggaagcgatgaaggaggctcatgctgtagatcaaaagcttgcagagaagcaggaagatgaagccaccctggaaaataaatggcccttccttggggttcctttgacagtcaaggaagctttccagctacaaggaatgcccaattcttctggactcatgaaccgtcgtgatgccattgccaaaacagatgccactgtggtggcattactgaagggagctggtgccattcctcttggcataaccaactgtagtgagtngtgtatgtggtatgaatccagtaacaagatctatggccgatcaaacaacccatatgatttacagcatatgtaggtggaagttctggtggtgagggctgcacactggcagctgcctgctcagttantggtgtgggctctgatatggtggtagcattcgaatgcctgctttcttcaatggtatattnggacacaagccttctccaggtgtggttcccaaacaaaaggtcaggtatcccttggctgtgggagcccaggagttggttcctgtgcactggtcctatgtgccgtattgcggaagacctgggacc

SEQ ID NO: 84070 - DNA, 273 bp, Homo sapiens
gcccaaactgctaaatttttttttattgatgatagtatgaaattggacagataaacagaaaactttgtgaattaagccgattaatcatctcagctttctgcagatcagttcaacatcatatgctcttcactcctcatctggttattttgaagttcaaatgcaaaagtatacatgaaagcactttgttatacaagtatgaggtataattcctaccggtaataagtaggataaagaagttgaatacatattggagacagatcaatactacttcac

SEQ ID NO: 84071 - DNA, 364 bp, Homo sapiens
cttccgcgcagtgagccatcactacggatacgggctgctggacgccgggctgctggtggacaccgcccgcacctggctgcccacccagccgcagaggaagtgcgccgtccgggtccagagccgccccacgtgagacccctgcgcgcccctccgctatccccgctgggggtgtgggggacaggcctgaggcctcagtttacccatctgtaaaacgagggctggaccccgtgacctctgagccccgacctcgcctgctggccgcccacccaccccccagcaggccgcaggagggtcctcacccctcgaccccctcagccccatcctgccgctgatctacatcagggaaaacgtatcggcctgcgcc

SEQ ID NO: 84072 - DNA, 1410 bp, Homo sapiens
cgccaaggtgcggcggggccgggcgggggcggggacccggggcccacggggcgagtgactgctgcccttccgcgcagtgagccatcactacggatacgggctgctggacgccgggctgctggtggacaccgcccgcacctggctgcccacccagccgcagaggaagtgcgccgtccgggtccagagccgccccacccccatcctgccgctgatctacatcagggaaaacgtatcggcctgcgccggcctccacaactccatccgctcgctggagcacgtgcaggcgcagctgacgctgtcctacagccggcgcggagacctggagatctcgctcaccagccccatgggcacgcgctccacactcgtggccatacgacccttggacgtcagcactgaaggctacaacaactgggtcttcatgtccacccacttctgggatgagaacccacagggcgtgtggaccctgggcctagagaacaagggctactatttcaacacggggacgttgtaccgctacacgctgctgctctatgggacggccgaggacatgacagcgcggcctacaggcccccaggtgaccagcagcgcgtgtgtgcagcgggacacagaggggctgtgccaggcgtgtgacggccccgcctacatcctgggacagctctgcctggcctactgccccccgcggttcttcaaccacacaaggctggtgaccgctgggcctgggcacacggcggcgcccgcgctgagggtctgctccagctgccatgcctcctgctacacctgccgcggcggctccccgagggactgcacctcctgtcccccatcctccacgctggaccagcagcagggctcctgcatgggacccaccacccccgacagccgcccccggcttagagctgccgcctgtccccaccaccgctgcccagcctcggccatggtgctgagcctcctggccgtgaccctcggaggccccgtcctctgcggcatgtccatggacctcccactatacgcctggctctcccgtgccagggccacccccaccaaaccccaggtctggctgccagctggaacctgaagttgtcagctcagaaagcgaccttgcccccgcctgggtccctgacaggcactgctgccatgctgcctccccaggctggccccagaggagcgagcaccagcacccgacgcctggcctgccagggatgggccccgtggaaccccgaagcctggcgggagagagagagagagaagtctcctctgcattttgggtttgggcgggagtgggctggggggagaggctggagcaccccaaaagccaggggaaagtggagggagagaaacgtgacactgtccgcctcgggcaccgcgtccaacctcagagtttgcaaataaaggttgcttagaaggtgaaaaaaa

SEQ ID NO: 84073 - DNA, 373 bp, Homo sapiens
actggcatgctctttctttgtcttcttttgaatgtagctttgccactctagatgggagaaaatgcagctggtcattgatggctgtggcttttctcctacacccttgctgggcagaggtgatgcttttcccacctgttcctgaggatggcttgcagaaatcctgctaattctctctgctgcactgctttccctcaaagaaggctccggctccgtggagaccaggggctgggtggaaaggaagaggccagccaagctgtcatgggaatttggtgactcatttcatcagtttactgctctgaaaatgaggtgacttccccctttgcttgacaactgattgatgaacatttcctgagtatttgcagaatagatgttt

SEQ ID NO: 84074 - DNA, 441 bp, Homo sapiens
ggaaatactttcctatgtgttgtgaacactacaaccctttcccacatcctcctatgcttcgtaattttgataatttcacatttgtcatttgagccaagtttatttttctctaaaacagcttaaaatttctgttaaaaaacagatccccatctattctagcttatagaggttggaaaaatgtttaaaatctaaacgtgattaaaggtttgtagaaatcacaaaataaagattttggctgggcacagtggctcacacccaaagtaatcccagtactttgggaggccgaggccggctgatcacctaaggtcaagagtttgagaccagcctgggcaacatggcgaaaccctgtctatactaaaaatagaaaaattaaccggatgtggtggtgcatgcctgtactcccaactacttgggaggctgaggcatgagaatcacctgaat

SEQ ID NO: 84075 - DNA, 436 bp, Homo sapiens
ggaaatactttcctatgtgttgtgaacactacaaccctttcccacatcctcctatgcttcgtaattttgataatttcacatttgtcatttgagccaagtttatttttctctaaaacagcttaaaatttctgttaaaaaacagatccccatctattctagcttatagaggttggaaaaatgtttaaaatctaaacgtgattaaaggtttgtagaaatcacaaaataaagattttggctgggcacagtgtcacacctataatcccagcactttagaaggctgaggcaggtgggtggcttgagcccaggagttccagaccagcctggacaagggaggctggggcgggacagtcacctgagcctgggaggccgaggctgcagtgagctgtgattgtgccattgcactccagcctggacaacagagtgagatcttgtctca

SEQ ID NO: 84076 - DNA, 657 bp, Homo sapiens
ataaaatagtatataaaatacattttaaaacattcaaaactcaacattttaagaatattcaaattaggccgggcgcagtggctcacgcctgtaatcccagcactttgggaggctgaggcgggaggatcacctgaggtcaggaattcaagaccagcctggccaacatggcgaaactctgtctctactaaaaacacaaaacttagctgggcctggtggcaggcacctgtaatcccagctactcggaaggctgaagcataagaatcacttgaacgcgggatgcggaggttgcagtgagccgagatcacgccactgcactccagcctggatgacagagcaagactctgtttcaaacaaacaaaaaaaaattcaaattagaaaatggacaaaagacatcaacagacattttactgaataaaatatacagatggcgaataagcacaagaataagcacaagaaaaggtgtccaacttcatccactattagagaagcacaattaaaatcacaatgaggcccagtactttgggaggctgaggcaagtagatcgcctgaggtcaggagttcaagaccagcctggaccagcctgggcaacacggcgaaaccccacctctactaaaaacacaaaaattagccgggcatggtggtgcacacttgtaatcc

SEQ ID NO: 84077 - DNA, 393 bp, Homo sapiens
tggccttgtctgttcacagatgagactgaagattatttcccggggtgaggtgggcaaggcaagtggagggtcaacacccatgggtggctgtgagtcttccttcagtgttcccagaaaaaaaagcaaaggctcaacggatgactatactaacatctatacttctgtaagccatgccactctttaattcattccaaaaatatttattgagtgcataccatttagcaggctgccctctagtccctgaggagatatagtccagaacaagatgagcacatctcttgctgatagagaactcagtttctggcaatggacattggctctaacatcgcagccatgctaactgtgttgccttatttgcttaagcatatattcggcactatgaaaatctccacg

SEQ ID NO: 84078 - DNA, 427 bp, Homo sapiens
agacaatacagcacattccccaggatggcaacagctactggcttgtgcttaaataccatttcattctgactgaggtcatcatctttgagctcctgcaatgaggagctcaatagggtgggggatgctgtcctttgcctcaggtgctctttgggtgctttcataaaagagggtcagagccgccgatggggtctaggagaccctaagagttctgatggtcaggctgagaattgtgtcctcagggagtgggagctgctgcaggtctgagcaccaagggctccagcaccaggacaggagcctccagccacctccaccttgcagcccctgaaggtagcatatgtggaccctctagatggggtggggagtgacctctgcccagttcctttctgtcccgtggccttcccatctgcaggttgtagaggggaaacag

SEQ ID NO: 84079 - DNA, 591 bp, Homo sapiens
tcctcaggtctccctagcaatgcagaactctgagtcaactaaacctctttcctttataaattacccagtctcgagaatttcttcatagcagtgtgagaacagactaatacaacatactattgagttatcactgtatatcttatggttttatacaatttagaataatttatttttagccatgacatatgtaactataaatatgaatgtgtatttttctttgtctgtttatcattgtaactagttccagggttcttttttagggagcaacttcctttgttaaaaaaaaaaaaagcctgatacttgttttttggaagttgtggggtctctgagatcacggtttggtagtggtaagaacaaagcaaaacaaaaacagaggaaagtattaaaattttttggcacaagatactagacatttagaagagagagcagaatagtgaggctgaagcaaggtaaaactgagacatttctttttttttttttttttttttgagacggagtctcactctgtcgcccaggctggagtgcagtggcatgatcaaaatgaaacatttctgatgtcagctgaatgttctgagaaaatgaaatatttgc

SEQ ID NO: 84080 - DNA, 382 bp, Homo sapiens
tttctgttactttgtaagtgcagataagaactctattcctcacactttggggacagaacagagtaagctggggtacactgagcttggagaaggggaagtacgggtctggctaaatatttataaaatcttgattttttttcctaaggacagaagtcaaatagaatatatacactgattacaaccacttattcattcattcattttataatgaatatagaatatgaccagcaatgtgctgggcacttgatcttattcacttccacagaaaccctgggagcaaagtactgttatcttcattttacaaacaaggagatcaatgcttagagaagtgaattatcttgattgggtgctgtaagaaatcaaaatagatctatctgagtct

SEQ ID NO: 84081 - DNA, 344 bp, Homo sapiens
cacgttgaccagactggtctcaaactcctgatctcaggtaatctgccccctcggcctcccaaagtgctgggattacaggcgtgagccaccgtgcccagccacctttgtgcttcctgcagacggagctttctacttgtttctgaccacactatttactggtaaagaatccaagaaagattatgaattatttagtgttattgacttcctaaaagggtgagcagttcatcttccagagtccggtaattttctaaagtgagagggcagagtttgtgcatgtagagatgtgcatatagaatgaactttcagatgtagcggctgtaacacacactgggaccatttattac

SEQ ID NO: 84082 - DNA, 373 bp, Homo sapiens
atacagggttagaccaaagagggaattcaatgaggcctgatggatttatggaccagaacaacagaggggtcttgaaggaaggaagatatagaaaaggcaaggttgtggttagagaggaaatcccagagttttagctctgggaggtgtaataatttcaaaagaataagtccaggcctggccatgacatgggaagctgaatctctgcaatgttttttcaaatagcataatggatatctttgactcctaccctgaaaccagaaaatattaaacttgcatgtataatcatacaaatgtatgcatacctatttatacatacatttacatattttatacttatgctttcatatattctacgtgagtacaatatactcca

SEQ ID NO: 84083 - DNA, 349 bp, Homo sapiens
ctgcccttagggtttctgcaggctggtcagggagacgatgtggtaagctggagctcagctcctaaggatgtgcaggggcagttgagaggcggaagggtgggagatcattccagggtgtgggcagcacaggaacctctcttcattgggatataattgccattctgataacacgtgtttgaggtgtctaaagtaggaagttgtaccatggtgggacagatatcctgtggttatcatacacagatctcagttttcttctcattgtttgtactttttataaagggtaacaggagatataattcaataaacctttgtggtgtttgggtgtgattttattgtttctttcttctca

SEQ ID NO: 84084 - DNA, 1052 bp, Homo sapiens
caagcaactactcccctaccggcgttccgtccttgtcctcactgccaaatccactccaaagccgaggatggtgagactgtgaagttgcaaagaaacacagagcccacccccttaaagaattacgatatatttaaagtttgcctctttcaggtttctctccttggctcctgcccctttcccctcccggctccttgtccttgactgaacctcatgggacagagaacctcctgtcccccacgaggcaaggcgcgaacccgcagagatctggggtgccctttggttccctgcgctgccctggaggcgtccatagaggcctttgccgccaaggacagcaattgttttattttcgatggttgctcgccaggcctgcgggtcgcgggcccacccagccgtcgaactttccagtcgttatcagcgctgctcctaacttaatggaataatgcaaattatagcctgcccagctgacacgtccctgcgaatgcgccggggctgagctctggccagccgctctctcgacgtcctggacggccggagggaatgaagctctgaattgtgacaaaagtggggggggggcaccccaaattctcaaagcaatgttcttttttttttcttttttcttaagcaattgagccttaccaaatgtcggggccgcacggaagccttgcatattttaaagtgtaacctgagccttcgcggtttcagcttcacttaaaacatgcaaattcttgaaattgaaaaatctgaaaaacttccgaagagttctatctgaataaatccaaatccattgggagtcgctttgaggagacaaaacgcacagcgatttggggtgagggatatttgtggggaggcaggacgtgctggattgggtttccagggtcaaggtgtctctgggccttcgacgatagccttagcgcagagcagggaagtggcaccgctaggcagcaagctcagttgctctacttttgtgacccatccccccaccccccccaccgccacccttgcctccgggccactgcccctctctgcaagctttgtccgctggactccgttgc

SEQ ID NO: 84085 - DNA, 541 bp, Homo sapiens
tatgatttctaagccactcaataagaggtagcttatataatcattagaaaccatggaacactgccttgcatatcaatatttggagcctgaaggatttagtaggccttaatagtcacttctgacatttacagatagcaaacgtggatacatttgaaaattatgccaatacactacgcaaccgtgttagaggtcaccaaggaaatgttgaggaaggcagtaaaacagtggtctatttagggcactctgttattaaccatgtgggtatccaccaccatctttcctaagctcattgacacacaaagcactggcatgtttgtgtgtaagaagcttcttttgaagctgacatgactgttgaacataattagtggacaaggcaacattctctattgagttactacttggagggtagagttgttttcttttaatactttgcacttaatagtaatattgggtatgtgtatatgagtgtgtagtgtgttgaactcatgtggcatccctggggaaatttcaccatgacatttttaaaaatggaaaatgttac

SEQ ID NO: 84086 - DNA, 521 bp, Homo sapiens
atgcaatctgaaagagggagaggagaaagcagaaaaaatgaacagagtcttaaaggaatatgggaaacattaagtgtaccaacatatgcataatgagtaccaggagaagatagaaaggaaaaggaaaatcatctgaagaaattatggctaaaagtattccaaatttgatggacaacattaacctacatatccaagaaactcagtgaactccaagcaggatacatacaaaggcatccatacaaagacgcatcacagtcaaaacattaaaactgaagaaaaaaaatcttgaaaacagcaagaaaaagtcatcctatgtaagagaaacctgataaggttaagagctaacttctcaccagcaacaagaaggccagtgagatgacatattctaaatgcagtgagatgacatattcaaactgctcaaagaaaaaaaaatctgtcaactaaacattgttttttcttttgaaacagggtctggctctgtcaccctggctgtatagcaatgtatcgatctatactcactg

SEQ ID NO: 84087 - DNA, 287 bp, Homo sapiens
tgttgttgctgtttttcacataacgtataagccaaataccaattgttattacttatggattgattagtttcattttcatctggatttcttactatcttgaaatttcttcacttcctaaactcttaggacaaatgacttaagtccatttaaacttatcataaacaaatgtaaaataaactatttttggaatttgctttttgttctcctacacccgactctacaatcaatgttattttaaagtatatattttgtataaagtggagagtacactactatttttttaattg

SEQ ID NO: 84088 - DNA, 227 bp, Homo sapiens
gtgaaaccagtgttactgattggtaagaggaggttgaggaaaatttcttaggcatgtatatatgtgaaccaaaatgttacttaatgcaaatacataagagagtaaaacaaaacaaaaacaactggaaggaatatacaaaatccaaaataggaagagctaccatacatttttaaatttaaataagaagaatttaaatacagtagagcataaaatctgaagttgggagc

SEQ ID NO: 84089 - DNA, 702 bp, Homo sapiens
ttcatgaggacaggggctgacctagtctctcttcttcacctctgcagctctaagacttagaatcatttaataaatatttatgggataaataaaaaaaaaaaaaaaaaaaaaaaaaaaaaaaaaaaaaaaaaaaaaaaaaaaaaaaaaaaaaaaaaaaaaaaaaaaaaaaaaaaaaaaaaaagaaagaacatatcaaaatttgagcccgccctagcgagagcacctcgagcttccgcatgacacctcatgcatcatgagcgatcttgctcaccttcaacctagtgaggcagttctcacattgtatccctgggccgatgtagtactactctagaaatactgcgcgccaggccatcacagacaggcacgtatgcatgacagtggtacatgtgtcacatcacacactccagtatgttgctcgagcaggatagtgaatactttgccatcagaagtgctcttcaatgaaagggtacttatacaggacatccatgcatgggcaatgaaaacaaaacgactgcggcgtatcaatatacttgatgccctacgagcaacctgcactattattacatgaaccaagattgaaatagaacctgacatggaacgtcacattcagaaagattgccaatgaaactatcgtttgataccctggactacgtaattattatatacctaaccaagcgttagagaaaataaatgcaaaggaaa

SEQ ID NO: 84090 - DNA, 804 bp, Homo sapiens
gaaaaagaatccatttgtaatacaatgccctattactctccacttgtagaaagaaagatgcaaagttcagttagtaaaagagtattttgttttctcaataaaaataatctgaattttctaagaaatttcaagttttactattaaccaatccactatgtgatgtccagaatttgtacagacagacctttcctgctgttattttccttatattttctaattagttcctggtaaaaaaaactctttgtcgtgcagatagtttacctgctttagctcactcaggatgacctccaaggtcctcatctggaggtctacttagtgtcctacctgtgtttttgtttttctctttttaaagcctgtccttcatgaaatgcacttccctttttgttctttcttgtccaaaacctatctgtttttaaggtccagctcagatttacttccttcgtgaagtcatttcagtgtattttgtttagcttgtatttggtgtttagttacttaaagctgttaaaataaacaaaacttataatagcttcatctccccaacttgtaagcatagttacagacagagttgtcatttttcatgttcttgtagcacatagtagatacttaagtatttttaatttggtggcatattttatgttttgattattaaattttctgtgtttaattatgaaacactgtaggaaaactcccataaagctgtacagttggggaagattgtgctagaatgaaaaaataaactaaaacattttacttacctagcttgaaatttcacttcatagcacaaatactgagtctgttatttta

SEQ ID NO: 84091 - DNA, 920 bp, Homo sapiens
gagactctgggtagggcccagcaactgcacatctcacactcttgccaaagtgtgagaacccctggaataaagaaatgtcaatggtgaaaaaaaaaaaaaaaaaaaaaaaaaaaaaaaaaaaaaaaaaaaaaaaaaaaaaaaaaaaaaaaaaaaaaaaaaaaaataagaaaaaaaaaaacagaaaacaagacaagatactacaacacaagtatgaaacaaagacgtaaagcaagcgacagcaccatactaacggcgaactagctcggaagagtcgcgaccgacccttaccacacaacacaacaaacacaccacaaacaaacacaaccacaacaacagacatcacacagagcgcaccagcacacaccagcaccgagcagcagcagagcagaaccacgagcaccacgacacacaacacaacacgcgcgcacgacaacacacacagagacacacaaagcaacatacaagagcaccacaagacgaagcgcacaaaaccaagaacggacagaaagccataccacagaaagacccagagactcacacaaacgaacaatcaaaccaacacggcgcgcgacacgaagcgcaagacctgtcaaaatcagaaagcagcagaagaataagaaagaagggagacatgggtcgcagactgcgactgatatatcgtatcatatgacgtatatatgctaggcaaaggtagaggagtgataagttaagaagaagtatgagtggacagaaagcagcgacagcaggtaacgtcatggcgctaggccggaatgagcgtcgagcacaagaggataggatttaggtatacgtggagatggaagggaggaggagaaggaagaagagaacagagtagatgaagaaaatggaagtagagaagcggagagagatagggatgtgaagaagagaagagaggagagcgc

SEQ ID NO: 84092 - DNA, 98 bp, Homo sapiens
ttcccacctatgagtgagaatatgctgtgtttggttttacccttttaaaattttgaaccatgttaattatattttttaaataaattttttaaatgaaa

SEQ ID NO: 84093 - DNA, 767 bp, Homo sapiens
aggttcagggttctttcttgggtatatgacagtgagattgtcaacgttttttagggcacactgcctcctcctaacagaaatatcgccttaccctttgtgattaatggtacaatcataatagatatgatgaatccaaacgtggtgagggggaggtctttatatctttttcatatcttttttgtttgttttcttgtagcttatgatctgatgtgtgtcttgtcatatacagaaaaaaaaatattttgggtggtattttcaaaaatttgtttagattttatatgattctaatgaaaatatttgttttatatttaatgtcagtaattgtggtttctattaaagaatatcaatttaacaataattcatcaatatatacttagaaaatagtttaaaaagcaatgatctgaataaatatattcgttcgttataatggtgtattctttcttttttaatacaacttgattactttaataccaatcacattgcctttgctctggacattctgttttattaaaactaagataagaccaagattgtttgctaaaattgccaaattattttgaatttcagtggaattgattagaagtacagattgttggtattataatttttcatgttaggattgtgtgtttttaatgaatattctaggtaactttctcatcagacagttttaggaaacagtggtttaaagaatatacatgcaaacaattagagtgaagttataaccaaatgaaattgtcattagccaataaaaagcgctttaacccatt

SEQ ID NO: 84094 - DNA, 512 bp, Homo sapiens
agtggacaacaaatccacagcccaaaatgtggaaggcattatcgtcagcgccatgtttaaatccctcatcacacgctgcgcttcaaccacacatgaattgcacagccctgagaatctggtgagaagctctcctctcttcccacaggagctctcagtctctgccctgagaaaagtactcattgtcgtggccatgagtaagagaagctgaaatctaaaagtctacactttaaagtttaaatatctattttccccggtgtcaccagtaagtcataatggagccttaacaacacttttcttctccttgttactcattatcctatttgcaaattcagctatcttcctctcccatctcaaaggttatagagtgtttggtgaaataattgtaaagtatgctgagcccttcagaaagtttctagagcacagcttgttggctcgtaaaatactaaagaatgttatcccaagtattatttgaagccatatttactttaaaaattaatgcaaatatgttgctg

SEQ ID NO: 84095 - DNA, 254 bp, Homo sapiens
atattgcccaggctggtcttgaactcctgggctgaagggatcctcctgcctcagcctcccaaagtgctaggattacacgcatgagccaccatgccaagcctgtggttagttttagtgtctaaattttcagtgggaatataagtttaaaggcagaaataactgaacctatcactaagttggaggcagtttttgctattgtgtattcggagtttctttttattacatgatataatttaataagcttctttacctaa

SEQ ID NO: 84096 - DNA, 435 bp, Homo sapiens
atggttaatggtttctgcagaaaaggaccaattgatttctttctaaaacgttgcttcagggtgtagagacctttataggtcatgtttcaacttacagaaaatttttatagttcaaatataaattaagttcaatgtggaatttgtaatataatttcaggtgaagtaaaatttccacttaggctgtttgcagtgcccagcaggccccatgatatcgagatggaagttctgttaaaggaggagattgatcagggatgggcagaataaggaatatgggcagctcaggctaatgatacaatgattgagatgtagaaagagggtcaggcacgggataacgcctgtaatcccactgccttgggaggccaagacaagagaatcgattgaggtcagaccagcctggtcaacagagtgagacctaacctgtacaaaaaaaaaaaa

SEQ ID NO: 84097 - DNA, 422 bp, Homo sapiens
tgggcactgctgcagccatgggcactttgagagtttcaggcactgtttgagctccaggtactgactgatctgtcagccccccttgagccacgggcttcccttgccctgttggcagcactggagcgggtccctcttccagtcccttaaaatctaactgcatactcccttgatcccccggctcacctccagcctgtagttggggtgtagaggtcaagggtggccctatctgtgggagatccgagctaactttgtcttttacatctgagctcccagggaccaccaataaactcgtaacttttgggagtggggactggccaaagcgctccaggccgcaggcgccgagtgccaggtggccattaggtgggagtgtatgggaagcaggagagggaaagggatgacaggggagctggttgggtgaatag

SEQ ID NO: 84098 - DNA, 341 bp, Homo sapiens
atcctcccacctttgcctcccaaagaaaaatcagtcttttgttatgtcttcattttattcacatgcatgcttgattcatgttctgttgcttctattgattattaaatctggtttcagagtactagacagactgtcttgctgtgttgcattctactgttttgaccacgaaaggacaggttaaatattgtgttctgttacaaaatgaaatggaaaactaggatcattcacaaaatatttgatgtactatggctcattcttttcatggttgtctttgtatttcagaaatgcttctttactgtttgaatgaccatatatggaaaatagacaccgtacaaactctt

SEQ ID NO: 84099 - DNA, 249 bp, Homo sapiens
atggagcataatggaatcacaagataccatgcagccacctgaggctacgggctgtggataaagtgtgaagtgtccctacacctagatctggaagggtcagaagaaggagcagttcctgggcctgaacaaaaaatggtgtggagaaggtcactgggagaggcacactgaccctagatgaaaggacatgtccaacccagggccacctcacagggaggagaccagaagactacacaccttctctctctctct

SEQ ID NO: 84100 - DNA, 995 bp, Homo sapiens
taacttctttccaagcgtccgcttgtacatacgttgaacgtggttctccgttcccaccttcgccctgccagcctagagggaccgcgctgccgtccctttccttgccttttttaacttcccctccccgttttaaaatcggtcttattttcgaagtatttataattattatgcttggtgattagaaaagaaaaccttggaggaagccccttctttccccagccggggtccgccctcagtcgcgagtcacagcatgagtcgctcgccaggaggggcccggcccctgcctgccccctccccgcttgcccccgaccctgctaccggcgttccttggaggtcgaagccagggacgtcacccgtgctgtgtccaggcctgctgtcctactatgctcaaccgggggtgggggaggggggtgagtcctgtgctcagtcgggtgggggctggcccggatcccgagctgctgtctctctatgcaccagaacatatctgtaactcctggggaaatacatcttgttttaaccttcaagagaagtgaaagaaaaaagtaatgcacagtatttctagcagaaaatttttttttttaagaggaggcttgggccagagccttctggcatggggcgggtggagaaagtgtttttattttaatttaaattgtgtttcgttttgtttgtggaatctttctttaatgcttcgtcgctctttggactagccgggagagagggcgaggaggcgggtgctccgggccctgtaggctgggccaggcgcctgggggatctgcccgttttcggaggccctcaggggccatcagtgggattccagccgctccacacccctcccctgagcactcggagtggaaggcgcgccgactcgttgaaagttttgttgtgtagttggttttcgttgagttcttttttcatttgctacgaaactgagaaaaagaaaaaaatacacaaaataaatctgttcagatccacccattattctcctactttcttta

SEQ ID NO: 84101 - DNA, 836 bp, Homo sapiens
  misc_feature (41)..(41): n is a, c, g, or t
tatgtcgtgtggaaacaaagttagagctaaaatccgtagangaaggtgacaacgaaaatcaaccatcatgacaaaatcaatggaaagaggaagaccgccagaaaacagaaaatgtttcaacgtgcgcaagagttgcggcggcgagcagaggactaccacaaatgcaaaatccccccttctgcaagaaaggctctttgcaactgggtcagaatggcggcagcggagcatcgtcattcttcaggattgccctactggccctacctcacagctgaaactttaaaaaacaggatgggccaccagccacctcctccaactcaacaacattctataactgataactccctgagcctcaagacacctcccgagtgtctgctcactccccttccaccctcagcggatgataatctcaagacacctcctgagtgtctgctcactccccttccaccctcagcggatgataatctcaagacacctcccgagtgtctgctcactccccttccaccctcagcggatgataatctcaagacacctcccgagtgtctgctcactccccttccaccctcagctccaccctcagctccaccctcagcggatgataatctcaagacacgtgccgagtgtctgctccatccccttccaccctcagcggatgataatctcaagacaccttccgagcatcagctcactccccttccaccctcagctccaccctcagcagatgataatatcaagacacctgccgagcgtctgcgggggccgcttccaccctcagcggatgataatctcaagacaccttccgagcgtcagctcactccccttccaccctcagctccacc

SEQ ID NO: 84102 - DNA, 355 bp, Homo sapiens
gattttcatctccatcactaagtattgtggatactatagtcagtgtgtcttgtagtgatcttctttcacatatggggaaatgggctacagtcccaaaggaagtgtgatttaatgtggggagaatgatatgtgataaggtgagtgttgcttcaacgccctttttagagactgcagaggtttcatttattctctcagtatcatctgtctagatactccttccttttccaagtctggtttaaggctgggatgagtacttctcaaactttaatggtcatcagaattacttggggcagggctttttaacctctttgatattgacatgttgggctggataattctttgttgtgggaggctg

SEQ ID NO: 84103 - DNA, 330 bp, Homo sapiens
acttccttcctcaggctcctgtaccaatcttcaattcacttgggatgtcctagtctaaaacatttatttcatttgaaaggaaaaatatcaatttctatctaaattggagtaagattccattcagatgtgttatttacaaaacataagttgttatttatctgtgtttaattgatcctggaacattccatgtaaagaacattccatgtaaagaaccaggcaacttggccaggcatggtggctcacacctgtaaccccagcactttgggaggccaaggcaggtgaattggttgagaccaggagttcaagaccagcctgggcaatatggcgaaa

SEQ ID NO: 84104 - DNA, 523 bp, Homo sapiens
tattaggtctggtgtaagtcaaaccttgccactatctctactggaagaaagggaacacttaaaactgactccccctcacttcaattttctctgtttttactaatctgttttcactcaaaaatcaaaggtcactaatgatgttttcagtcatgaattgaatagtcaatgtgattaatttctagaatttacaaacttgtgtgcttcagtattcttaacatgagtattattttaacgaacaatttaagacaatgctcctggccacctgttcatgtttcctctattacgtctaggtaataaaggaattcctctcagatgattctaatttcaaggatgaagttcctacatttaaaaacacgaaacacaaagataaaacatatgctacttagtaaaaacaaacattaaagaatgctcatataattttatatgaaagactccatacttaaaatcgtagcagtgggcttttaacctgaccataataagtggcaaatttctcaaaagaatgagaagggttgcgaaaaattta

SEQ ID NO: 84105 - DNA, 408 bp, Homo sapiens
taattcttagtttgggccttttcaggtagttttctacatcttatgggcaatcttcatggcttttcatcattttttatttaacttggcaaatataatgtcttaaaaggcatctcttcttgaaagtttctaattgccgtgcactactatgaagacatttggataggattatttcagagacataatttctgtgtgattagggttttttgtctattttatcaagattttaatttctagcagtgggataattatattaataagttcttgggaaatttgtggcgcttagagtctgttgaggtgctgaacagagctgggggtcttgctgtagccagtgatctcaggacattttaaacgctgccactgttgtaggccaaaaccagtgtgccttatatcagtgaagactctgaagcc

SEQ ID NO: 84106 - DNA, 356 bp, Homo sapiens
tctcattttcctgtgggccacaggccggctgcaccccaaagtcttgctggaacagcaggcccctccctgcccctgtggtcctgcagcagcaaggggccctgactctgaggccacagacctgcatccaggagatctggtcagggcaggcggctgccagcgatgggctggaagcaggccactggcctcaggcagcaggcccagcaaagatggaggcgggaggttggcagcagccctgcctgtggatgccacacatgggggaccccaaaactgtttttaaaaacttgggcctttacaaggccgggcgtggtagctcatgcctgtaatcccagcactttgggaggctgaggcaggcggat

SEQ ID NO: 84107 - DNA, 713 bp, Homo sapiens
ctattttgaattagagtaataaggaagaatggtatttatggtccttaatttttctgatcatgtcattttggcctctgcttgtttttgtccagatgccaaggttcaaattcaaggctctagtcctttttaaaaatgcctcttcccggccaggcatttttaaaatcccagcactttgggaggccaaggcgggtggatcatgaggtcaggagatggaaaccatcctggctaacacggtgaaaccccgtctctactaaaaatacaaaaaattagccgggcgtggtggccggcgcctataatcccagctactcgggaagctgaggcaggagaatggcgtgaacccgggaggcggagcttgcagtgagccgagatcgcgccactgcactccagcctgggcgacagagcgagactccgtctcaaaaaaaagcctcttccccgaaactatgtgtatatacattgcagcatctttgatggcaaactatatatttttaaaagttgcatattttaaatacaattaattgatctaagtataattgtaatcaatattttcgactgagtcttttctctgtgcaaagaaatttaaattcatcagagtccctctcaaagtgttctgttatgcatctctttatgagctcatttgcatacattatctcatttaatttccttaacaaccttgtgaactaagcagggcagatattatcattgactgaatgaga

SEQ ID NO: 84108 - DNA, 958 bp, Homo sapiens
gaaagagcattccatcatgacccttggactgggtgagagcatcatcctttaattaatgtctgcgctgggtcagataaccatcactgtctccaggtgctggaatacagagaggaaccaaacagataaaaatccttgcctgcacggagcttaccttcagctaagggagacagtcaaaaacaagtcaacacatctaaagaagccactgatgaaacaggctcccccttggaaagaccatctcaccttccaacctctccatcctgcagagaggaaaacccaagtttggcgttggcagtcaggtaattcatcagatctggaaaccacctcatcagcatccccctggccaactggaagcaaccgtgacgttgtgctgaatacacttgcagagtcgtgctgtggtctctccgagctcatcacggcacctccctatgcaggagtttcaattcaaggatttagccaaatttgggtgctatttcccttttgtggagggacttttcatcacaatgagaaggacgtcttaggactccaggactttgagaggcttgcccatggctgagcatgaaccaatcagcacacacttccctgcttctgagcccattaaaacgctggactcagccagactcagacagaagtcaggactaacagctgtgggaaggagctacccacttccggtatccttgactcttcaggattacctgcctgcaggtacgagctacccaccatgggtctcctctccactgagagctggacacttgccaggacgacctgtctgtggaaaggagttacccactttgtgtctcctgagagctcctctgttactcagtgaagctcctctccaccttgctcgccctccagttgtccaggcattccattcttcctggacgcaagacaaaaacttgggacctgccaaatggtggggctgaaggagctataatacaaacaggggtaaaacacaaacccc

SEQ ID NO: 84109 - DNA, 233 bp, Homo sapiens
taaatcttctaatatctatgggttctttgatattgttcccattttcattcctgattttgataatttgtgtcttctctcttttttccttattcatcatgaacttttatcaattttgttgatcttctccaagaatcaagattagttttaagtattattttttctatatatttgtgttttcaattttactcgtttattttttgttctttattattttcttcctcctacttattttg

SEQ ID NO: 84110 - DNA, 131 bp, Homo sapiens
ccatgtagctctggagttttatcagtgttttatttatttgccaatatgagaggaaagaaatagtgttatttaatttcttaaattgagcaattttgtatcttaatagaccataaatatttctcttattgtct

SEQ ID NO: 84111 - DNA, 643 bp, Homo sapiens
acttatttacctggcatttccttgaagtcagcacttgtgcttcatttatctttgtattttcaagtacttagttcaagactttccagaaaatgagcttgtcttagtccatgcaggctgctataacaaaaaccaaagactgggtggcagaaacaatgaatatttatttctcacagttccgcaagctgagaagtcctagatcagggtgccagcaaattgtgtctaatgaatgtctgcttcctagttcataaacagctatctttgcactgtgtcctcaacagggcagaagagggccagggagctcttggggtctcttttataaagggcactaatcccattcatgaagattctactcttatgacctaattaccttccaaaggccccacctcctaataccatcacattgggggttaggatttcaacatacgaattttgaggggggggacaggaacattcagtacataacagaggtttaaaaaaataatcaaatgaattaataattcttctttttaaaagttacagtgtttaatttcaatcttaggtttattaataacatttatttttcattaacttgtattataaattacaaaaactttgttgtaataattgtcatttatttaaatgccaggtaacggggtaccttgct

SEQ ID NO: 84112 - DNA, 766 bp, Homo sapiens
ccttgcctgccccatcggagccgccggaggtggagtccgccccccggacccccgaactcctgtgcgtgcccctccatggtgctctaggctgtggagggcaaggccagtccccgggagcagggtgaggaaggggcccccacgcagccctgctgtggattggcgggaggaccccaggctgggccaacccagcagcccgcggccaggagcgggcatcccaatggggaaatcggccaggaggggctggggaagctggtgccttcgcccgcgccccgtgagctttacctccgtgcgacaagagcggtggctccgggcggggcccacgcagctggagcctccatctctcctgcgggaccagagcaccgggaagacctgaccgagacccaacgtccctgcccccgttctggggctctctgcaggccccaacttctgcgggactctccagtgggagcagcaagggttctcaggaacaacccctatacaaaccgggacagaggcacctcactactccttctgtgccccaccttctccactgaccctgccggagtgcagcacacacagcaagcatttaataaatcgcttgaagtggggaacatctgtactcggtaaagaaaccacaggaattgggaactgccggttgaagattatttaccagttccagcaaaattgactgcacctgccatactgcaggccggtgcagcatcaggagctggagaccaggggcaacaggcagcacgcgtgctccagctcagagtggaaggccctggga

SEQ ID NO: 84113 - DNA, 906 bp, Homo sapiens
tctaaggctaatgaaaagtgtttttaatatagttccattcaaatacaattagatgttagaaatatcttttcatcgaaagctaaccaaaaatgtgttagaaatcattgcttttttctgaaaaagattctaaggcacatgtcctcatccattcctatgtcaggattctcaccaaagagcattagcctgggatgacgtttcctgagcttcctggggggatgccttttgaatcgggacttaatagcgggcccttggtcttaccattgaagtctttctgcatcttctgcagaccgaaggccatgtcgcctgattttattcattaccacccttgtaaaggaaaggactgctcttgaagagcttttccttccttttattggacaagaactgtgtgcctcagctctgagctcccgctgctttagtcaacagcactgtagcaaaagcacaagtatagcctttatctcattcactgtcctcatcattttcttttccgtagttctgtatggtcccaccatcattcattctataaagatttgtcagccactctctgcctgtcagatattgccacaaagtaatatccttttgtgactgtatttattggaaactatagtgcattcttgttgtcttctaaaccttcttaaatctgtcgaacagtaagaatgtaagccattgcaataagtaaggcatggtagaattcctagttaacaaagatacatgaaaatgtgtatactactcttcgtgtataagtaaactaattttttaggaagattttcaatgtcaaaagttaaagctggccaggcacagtggttcatgccttaaatccttatgcttcgggaggccaaggcagaagaatggcttgaggccaggagattaagaccagcctggaaaacgtagcaagacactatctcctta

SEQ ID NO: 84114 - DNA, 178 bp, Homo sapiens
gacgcgagggcgaggcggccacgcggggccgggaatgcccgcggtgcggggccccagagccgcccggtggtcgtgtccgggcgatggctcttcgcctggtcgccgacttcgacctcgggaaggacgtgctcccgtggttgcgggcgcagcgggcagtgtcggaggccagcggggccgg

SEQ ID NO: 84115 - DNA, 509 bp, Homo sapiens
aaggagagagaacaaacaaatgattttagaaggacagcacattacgggtgccctaccggattcaggctcctaatgaagaagacatgtttaggggaactgaagaattgtggattcagtcatttgccatttaccttgaaagacacgtccagataaatgattacatcttcagaaacttgaagcgtttccttcattctcgactatgggtacctagatagggttatgaacgtgaaaggcagaaactgttttgcccatactgcccttccatccaaagccatgaccctctgtctaggtggcactggctacagggaacagaaaacagatgcctgcaactgagaagcctactgccaactacaagctgtttgtaaacacttctctccatgtttacctaagaaagatgcaggctttccaaggaaagcctccttttgaaaaatgtgcctttttatttctctgtgctgttaggtccctaaaataaaaactaatgcccataattctttataagtctcccatct

SEQ ID NO: 84116 - DNA, 642 bp, Homo sapiens
tccggtagagcgccctggagaggccctggataggcacaggcgcctgtcagggggctcttcacatgctgtgtgctgctgctgggagaagagggggccagagactagggggcttctaagaagaggtggcatttctgcctcagtgttgaaggatgaataactttgacaggctggaaaaaggtgacatttcaggtagagcgtgtcacatggatgtaaataccaaaggtcaaggacatgggcttgagagatggtgagaaggatggaggtgactgtggcttgcattctatccgtatcactattaattaccttctaaatgcctttggctctaggtggtggaacaagtaaagtaatggacaaatactttttctaccaatatttagtgaccaaatgcagagttatggagagggccagggacctcatgaaccatactctttctagtctagggacataactccaatgcctttcctgtcccagtaagaggccatggatttcaagaagccagacaatccattctttcagataatgataaaaaagaaaccatttattttatttctaagtatagaatgaaacatttatagttgcccaaattttggtaccttttaggagaaaaatacagatttttttgttgttaaaaataaacttaaa

SEQ ID NO: 84117 - DNA, 261 bp, Homo sapiens
ttcccgggagccatgcttgtgcctgcatctggaccttgcctttttcctgtttatggctcgctgcctggatgaatcttgaccttgctttttcccgtttatctttcacgtgtgtttttaggcagcaaaggtttattttctggcacttttcggtgtgaaatctgaagggaaacttatgcaacaacttagcttactttgctttgttgcttttttgattccccaggcagagagggtctccttaacaaagctaagatatatttaata

SEQ ID NO: 84118 - DNA, 792 bp, Homo sapiens
tatggcatacactaactctgaaagttcagtaatgatgttttaaaatgttactttttgtgaagtaagggaaaagcaattttaggtaatcattggcttttaaaaaccgaaatgtcattgacaaccgggattagaatagaagtatccccaaactggaggaatcccctccccatccaggtcacatagccaatctctcaggaacccctcttactgcaaaacccagcctctactcaaacagttccggtgatggggagcatttattccataacagtggttttttgttttttttttccccagtgtctcttttaaagaaaacatactttattttggtctaaattgtgaaaatacccaaaacatttgatagaaattgaactctgtcaacagtgttatttatactaagatcaggacagttccttgagatcatactgttttattactaagtttggcctttgttttacaaatgtaatgttcatatttatttgaattttaagattggttaaatgttaatgaaaagcaatccaattgttaatttttagtagtgccttttctctgtatgccttaattttattttatattaataattcaagttacccaccaaaatgaagattttttccaaaatcagtaggcttcacaagttcatttggccttagactgtgtattggtccttaaatgtttcttaatgcctgcctcctcctacccttttctacctcctttttaaaaaaataaataaataaataaataaatgttaggagagaaacattaggatttgtctgtgatagacatgctgcagcttcc

SEQ ID NO: 84119 - DNA, 580 bp, Homo sapiens
atacccttacatatatattcacagaaaatcatattgcatatactctttctccacatcataaaaatgggtgttgggctctctaggacacaagggaagcaggccaaatttctcatattttcaggaataaactgagtgccccgaaggtgtaataggaaccttttactaacctcatctgacttcatcctcacaccagcattttgtgtgtaaggaaactggccgagagtggttaagaaacatatccaaagacgtatagttccaaatggaacacggatctttttatttaaattccaatcatctttccattatatcagccaatgatggagcagaaagctggtccaggcaatcccagaatagatctttctaggcacccgttcagtgtgaggaggggaagtggccttgccaaggggccagtgagctcaattaggttaaacgctgcttcttagccctaccccaagaggacaccgtcactaagattgttttgtgcccagccttggacaggaaagcaattccctcctttcacagcattctcagccttgacgttcaataataatcgtgatgataatagtggctttcttttatt

SEQ ID NO: 84120 - DNA, 890 bp, Homo sapiens
gagataccatgatcacgaaggtggtttttctcagggcgaagcttatccattgcgttccggatgtgctgacccctgcgatttccccaagtgtgggaaactcgagtgcataatttgtgatagtagggaactacgttcgcgctttctcttggtgcttctgtggtgcgaatagtaggtgagccgtaagtgtttttgtaattcagggtgcgggctcgtgttttgtggctgtgttctgtccggtcagttgtttccgttcgcaacggttagttttcctttgtgaggccatgtttggggacagcttagaactatccacttgctctcttgggaggcgaatttcagtctctgttggttgggttgttctcccaggttagctgccgcggtacttgctaggtggagctcagggatcaagggtcgggagctttctggtttgttcagtgctcccagggcttctaacatctcttaaaaactctggtgttttctgtcatcctcggagttacctcttagcctctgtttttttgttgttgttttttccccccctccctaagacaagtctcgctgtaccgtccaggctggagaagtggcgcgatcttcccatctcaggctcccgagtaggacaaccgcacgccaccacacccggctagttttttctctttttttttttttcttttcttttctttctcttcctttccttttttcgtagcggtttcaccattctgctcaggctgggctccaactcctgggctcaagtggtccgcccagccttctgaagtgctgggattacaggtgcgatccatcttgccctggcagctcctgcttttcaccacagcattcacgggagtttgtaggatttctgtgctggggaaacgtgtactcagttaatagagccaggtgga

SEQ ID NO: 84121 - DNA, 874 bp, Homo sapiens
gagataccatgatcacgaaggtggtttttctcagggcgaagcttatccattgcgttccggatgtgctgacccctgcgatttccccaagtgtgggaaactcgagtgcataatttgtgatagtagggaactacgttcgcgctttctcttggtgcttctgtggtgcgaatagtaggctcttcaaaggactaaaagctaaaaggatggattcattcgacaagtcctagtcctgcgccctggtgagtgccagaccctgctccccgtgagggggacccacgagccaccctcaccacgatccctgccctggtggagcccccgtgcggaacacaggatccgaagatggcagcggaagctccgcagcggcccaaaagcgactgggcagggagggcacaggctccctcactgggtgaaggcggcgcaaagaatgggaagagccatcccgggagccaccgggcgttcagcctccctagggcccccaggcggctcgggccggggtctcaaccggggcgtttccgggggtttctgaagcaggcgaggggcagggcgggcgaaggccattcggctatccttctggctccagaatctcccaacgcgcaggtgtccaacgtgaccagcgcgacttaccgctccaatctctccagttttccaaggccttgctcagtcctcctgccgggcgggccctgaggatgcaagggacggaggaagtttcgtgcgtgcgcccttcctatagcgcccagtagaactaacagtacctgtctctgtggcgcaatcggttagcgcgttcggctgttaaccgaaaggttggtggttcgagcccacccagggacgcctctttgagcttttaaagtattcatgcattgtcaatcactagataaat

SEQ ID NO: 84122 - DNA, 501 bp, Homo sapiens
tgtaaatagcgctgcaatgaacattcacggcataaaaaggaatgagagcatgtcttttgcaggagcatggatggagctggaggttatcatccttagcaaactaacacaagaacagaaaaccaaataccgcaagttctcacttataagtgggcactaaatgatgagaacacatggacacaaagagaggaacaacacacactggggcctatcggagaatggaggttgggaggagggagaggaggaaaaaactctattgggtactaggctttgtacctgagtgatgaaataatctgtacaataaaccctcgtgacatgagtttatctgtataacctacacatgtaatcctgaacctaaaataaaagttatttttgttttgttttggttttttaaaaaacctgcttgtaacaaaggctgtaggaagctcacagccaagggtatctgggacagagtctttcaggcagttgtcctcgttttggttcaagtaaactctttaaattata

SEQ ID NO: 84123 - DNA, 305 bp, Homo sapiens
  misc_feature (130)..(130): n is a, c, g, or t
  misc_feature (135)..(135): n is a, c, g, or t
atcgcaggtgggggaggggagggctgggggagtgggagtgcttacatagtagaatactggtgccagcgggttcccaaacaccaggccggggtcagacgagcaactatccccagaccaggcagccccatcnggtangattcactcatctccctttctgtgaacgtgttgtctttcctgctcacctctgccccgagggacggggagggtaattatctgccgtggtgtcagaacttttatttcttgctgctgctgggcttccgccacagggagagtaagacggaacagagataccagaagaaaacatc

SEQ ID NO: 84124 - DNA, 753 bp, Homo sapiens
cttggagaggtgtctaaatgttgctccccaaatgacatattgtgcctcaacaacaaacactgacaaaccattataatcacaaatgggacaactgaattgtcagggctccttgtagggttgaaatttcctcagagctaatcagcctacagaattataactaggtccacaaggaaattacggtattttttccatgtagtcagatctggaagaaaacaaaaatctgacggaagtctgtggccagccaagtctgagcagagctaccttcattacttggggaaattcctggggaaggaaagaaggtggaatcagtgctgtcagtggacctgaagaatccttctgcgctgtgtgttttctattcctattttattaatgcggaatccttgttgatacaacctggaaaatatatcctaataccctatcagctcttccattcttgtcatgtagtgggtgaggggatatgatctggacactacagatatttaatcacttagagctattgtgtgatgctagagcaacagtaccaaagtgtccttgtccttaaaggcccccaacccagccatgagaggacaagcagagaagtcactgctgctgtggtcaaccaattatattggggacagaggagggaacaattctgccagctggagaaggcatgctggagccatgacttctcaattgggccttgaaaatgactagcttttgccaagggatgaaagaggggaatggcagtcctggcagagacgagtgtgggcaaag

SEQ ID NO: 84125 - DNA, 1544 bp, Homo sapiens
gtatccctgccagatttccccaagacctggactcttctagtttttctcttgttttggatatgaagaatcccaagaataaccaatgctatatattacctgaaagtcccacctctgttctgcatttctaaggctgtattttatcttgtttgccctatctgatctggatctatactttatctgctcttatccttagggttgtagtcctggagtgttggtccctcttccttgcacaggttacaaatttaccactgccacacagtgttcttgttgacttcctcagaattcctcatcggtaggggtttagttcccatcttaaccaggatgtcagatggctgccaggaatgtattcaaattctgcacagtttttcagttgataacaaacaggcccacagatcttctagacaaatggtttgtaaactctccctcaagaaacctttgcggttctatagtgaagggaaatgtaggaagtagaggccgaataaatggagttcttggttgcccattttccctctttaactagagcagctccagttttatttgatctgtttatatttctgcgtgtgatttttttgaacaaaggtaaagctattaaaaaatctttgaaaaccatctgtccagaccaaagtttctcatattgttttcaatatttttgttttaaaaattcctctatgaccaaataagcttgagaagaaactatttaaaggaaattaaatgtattttcactggagaacttcttagaacctttaatatactagactatattactaaccttcaagaagaataggcatgtaaataaagcatttcccaaactttcttggtcttggaggtctttttttcagacattctcataagactaatattctttaaaacttcactttatggataaggaaactgatacccaaacaactatgggatttgagtttcctattagacagtccagggacttttttattacaccacactttctctaagacttttgtgctgcttgctaattttactcctatagtaaaattgtgagagatatttttttctgtctttgaatgaagaattttttttctgtcaccatagaaattatattacctatctaataattgcccatattacatataaaatcttcatccctttaaggtttagcatttagttctctttattatagtggatctttattgttcatttatgtatgaaacctgtgctagggattatagaagatacaaatttgaataaaatatttgatctaggagctcttatctaaaatgccataaccatttgcttaattataaaatgaaagaaggctataaaatgatacatagtaaaaattttaacagctatgagagtttaaaggaaaaggatacaaattatgactgcattgaaaaatagcactttgaagctgagcatggtgatgcatgcctttagtcccagctactcaggaggctgagatgggaggactacttgagcctgggaggtcgaggctgtagtgaggcatgattgcaccactgcagtccaacctaggcaacagagtaaggccctacctcaaaaaaaaaaaa

SEQ ID NO: 84126 - DNA, 178 bp, Homo sapiens
ctcaggctcacagggaaatactggatattcttcgagttaataaagtgtgaaatgattttaattattcaagggaaatatagtataccagtcttgcaaatggtttttttagacagcatggtctgtcttatcccatcctacatcagaaaatttaattggcttagttatttcctctttccca

SEQ ID NO: 84127 - DNA, 596 bp, Homo sapiens
gcgaattcactagatgattatccccggctcctgggtacaagtaaccgtcctgcctcggcctcctgagtagctgggatcacaggtccgcaccaccacacccggctgatttttgtatttttagtagagatggggtttcaccatgttggccaggatggtctcgatctcctgacatcgtgatctgcccatctcagcctcccaaagtgctaggattacaggcttgagccaccacacccggccagccttccctattattaatatgactatggttcatttgtgatacctagtgaattgatagtgatacattagttactaaagttcatacttgaggtttctttagtttttgtgtatgttctttttctgttccaggatttcatccaggatatgttattacatttagttgtcatgtttccttagggccctctagactgataaaatttcttagacttttcctttttcttaatgatcctaaaggtacttttgataaacagaaattcctaattttaatgtatttagatgtatcagtcttttaccttctgttgttagcctttgtttgttgtatttagtctttatctaccccaaggtcagaaaaaaatata

SEQ ID NO: 84128 - DNA, 652 bp, Homo sapiens
atcatatacaaatgtattctctgagaatgagaaaaagcagaaagtcaaaaaaggaattttcccagccattcgttctccatgtaggctttcgggaagtcctttttacaaacttctgcttatatatgattacccagaacttaccacatgaccaaatttagctgcaaaggcatctggaaaatgtagtcttttaaatgggcacattgcccccacttcttaataacatagaactgcagttctcaaccttttcggtcttgaaaaaggttgatacctcttataccctaaaaaattgttgaggaccccaaagagcttttatttatgtgagtaatatctattagtatttgccatattagaaattaaagccaaaaaatctgaaaatatttgtttattcatttaaaaagtatatttatatgccctttacatgttaaataacatatgctttccaaggaaaaaaaataaagtgaaaagagtgatattgtttgacatttttgcaaatttattcagtgtttgacttaataggagacagccagactcttttatatctgcttctacactgactctgttacaatacgacatcttgcttgaattatatggagaaaatctggactcatgcagatatgtaactgaaaaatataaaagtgtttttaaaactttt

SEQ ID NO: 84129 - DNA, 536 bp, Homo sapiens
ttaatgttcaccttccatgtattaatttatgtcttcgcttataattcctatctccctaaaatgtataaaattaaactataacttgactacctcgggcactttctcaggacctcttgagactgtacctgagccatggttattcatattggctcagaataaacctctttaaatattttacagagtttggctcctttggtcaatagctgggtggtagctggccaaggtgaatctgggctgggtaatttactgatttacaggagtcctgttcgacactagattctcatcttaacagcacagatgcagtgactagttccagattaatacttgcagctaacttggaggtatggctggccgctagtgctagctgtgcccttttgcatggcgccatccaggagaagcccaaagccccagctcagtcccctcctgcttccgtaccctgttgtgccctctttgaagggcctctctgccatgcttcctccaagcctcagcctctctcagcctctaaatctcacctccctgtatacttcctcagagat

SEQ ID NO: 84130 - DNA, 818 bp, Homo sapiens
aaaacatagaggttaggattacattgataaataaggattcttatatttacagttgacccttaacacaaggggtattaaggcaccagctgccagcaccccctcaaaaataaaaaatccacatattactttgaactctccaaaaactttactgatgagctcctgctgagtagaagccttactgataaagttaattaacacagattcagtatattatacattatatactgtattcttacaagaaagtgagctagtgaaaagaaaaagttattaaggagcagaagatatattgactttgttaagtagaagtaaatcatcacaaatgtcttcttcattgtcctcacattgaataggctgaggggaagatgaaggcttggtcttactgtcttgggtggtttagctgagaaatttctgttgcctagtgacatcttgctgatcctgaacacctataggcttaggctaatgtttatgtcttagttttttcaaagtaaaaatgttagtaaactaaataaggttagtatattaaagaaaagaaaaatttgttttacaaacttactgtagccttaagtgtaccatgtttataaagtccacagtagtgtatggtaatgtcttagggcttcaaacccaccactccagccttagtgacagagggagactcctcaaaaaaaactaaaaagtaaaagagattataatggagctgagaaatttctgttgcctagtgacatcttgctgatcctgaacacctataggcttaggctaatgtttatgtcttagttttttcaaagtaaaaatgttagtaaactaaataaggttagtatatt

SEQ ID NO: 84131 - DNA, 448 bp, Homo sapiens
aaaacatagaggttaggattacattgataaataaggattcttatatttacagttgacccttaacacaaggggtattaaggcaccagctgccagcaccccctcaaaaataaaaaatccacatattactttgaactctccaaaaactttactgatgagctcctgctgagtagaagccttactgataaagttaattaacacagattcagtatattatacattatatactgtattcttacaagaaagtgagctagtgaaaagaaaaagttattaaggagcagaagatatattgactttgttaagtagaagtaaatcatcacaaatgtcttcttcattgtcctcacattgaataggctgaggggaagatgaaggcttggtcttactgtcttgggtggtttaggctgaagaaaatccatgtataaacccatattgttcaaggtcagttgtaatt

SEQ ID NO: 84132 - DNA, 1094 bp, Homo sapiens
agctctgcctcccgggttcacgccattttcctgcctcagcctcccaagtagctgggactacaggtacccgccaacacgcccggctaatttttttgtttttgtatttttagtagagacggagtttcaccatgttagccagcatggtcttgatctcttaacctcgtgatccaccagcctcggccttccaaagtgctgggattataggcatgagccaccgcgcccagcctttgaggcatcatttattttcatagatggctaggatggggaagagtttgaatgaaatgttttgtcaaagaaaaatatagagccgtgtgctgcatagatgttttggtgaatgacagaccacatatattatggccccttaagattataatggagcaggccaggtgtggtggttcacgcctgtaatcccagcaatttgggaggccgaggcaagcagatcccctcaggtcaggaatttgagagcagcctggccaacatggtcaaaccccgtagtcaggcgtggtggtgcacatctgtgttcccagctactcaggaggctgaggtggcaaaatcgcttgaacctgggaggtggaggttgtagtgaactgagactgcgccactgcactccagccttagtgacagagggagactcctcaaaaaaaactaaaaagtaaaagagattataatggagctgagaaatttctgttgcctagtgacatcttgctgatcctgaacacctataggcttaggctaatgtttatgtcttagttttttcaaagtaaaaatgttagtaaactaaataaggttagtatattaaagaaaagaaaaatttgttttacaaacttactgtagccttaagtgtaccatgtttataaagtccacagtagtgtatggtaatgtcttagggcttcaaacccaccactccagccttagtgacagagggagactcctcaaaaaaaactaaaaagtaaaagagattataatggagctgagaaatttctgttgcctagtgacatcttgctgatcctgaacacctataggcttaggctaatgtttatgtcttagttttttcaaagtaaaaatgttagtaaactaaataaggttagtatatt

SEQ ID NO: 84133 - DNA, 1136 bp, Homo sapiens
cgggtgttggaaagcaaagggctggaacgtcccgggctgcggagctcgctgggttgggatggactcgttcagacctgagtgctaggacgccgaagggggcggtgaggcgtcccggcgaggagctggggtcgtctggagtttaaaagacaggtggctctcggagatgtgcgggctgcatgcccacgcttcaccgctaggggaggtcagggctgtgcgatggggaaggaagagagtgtcggggcggtgcagtcgggatgggagaagggtgtcagggccactggcccccagctcggcagagggcagtgtcgggccgcgcgcaggcagggagtgggtgtggtgtgaggctggcgctggagcggtctgggaatgttaggaggtctagggtatcgcggccctgcgtcctcttgtctggactaaaagtccgggcagttctccccggacctggattgtgggcccagcgacaggtgcttggcgatctgtgcccgctgtgcctgcggggctgtggtgggagtcctgtctgcacggtattctgtgtggctgtgcataacccagaagaggagagaactgctgtgcgtctgaagtgatggcggagggctttctgatactaagccaaatgtgatctccttattggagcagaagaaagagccctggatggttaagaggaaggagacaaaagaatggtgtccagattgggagtttggaagagaaaccaagaatttatctccaaaggaaaacatttatgaaattagatcaccacaacaggagaaggccagagttatcagagaaatcagatgccaggtggagagacaacagggtcatcaggagggacatttcagaccagctgtaataccatttacttccatgcagtgcacagcccatagagaatatcagtggcttcatactggagagaaatcctgtgaatgcaggaaatgtaagaatgcttttaggtaccagtcatgtcctattcaacatgaaataattcataataaggaaaaagaacctgaatgtggagaatgtaggaaaatctttaatagtggatcagacttgattaagcatcagacgcttcatgaaagcaaaaaacatagtgaaaataacaaatgtacctttaatcatgattctggaattactcaacctca

SEQ ID NO: 84134 - DNA, 1507 bp, Homo sapiens
cgggtgttggaaagcaaagggctggaacgtcccgggctgcggagctcgctgggttgggatggactcgttcagacctgagtgctaggacgccgaagggggcggtgaggcgtcccggcgaggagctggggtcgtctggagtttaaaagacaggtggctctcggagatgtgcgggctgcatgcccacgcttcaccgctaggggaggtcagggctgtgcgatggggaaggaagagagtgtcggggcggtgcagtcgggatgggagaagggtgtcagggccactggcccccagctcggcagagggcagtgtcgggccgcgcgcaggcagggagtgggtgtggtgtgaggctggcgctggagcggtctgggaatgttaggaggtctagggtatcgcggccctgcgtcctcttgtctggactaaaagtccgggcagttctccccggacctggattgtgggcccagcgacaggtgcttggcgatctgtgcccgctgtgcctgcggggctgtggtgggagtcctgtctgcacggtattctgtgtggctgtgcataacccagaagaggagagaactgctgtgcgtctgaagtgatggcggagatggagttttgcccttgttgcccaggctggagtgcaatggcgcgatctcagctcaccgcaacctctgcctcccgagttgaagtgattctcctgcctcagcctcccgagtagctgggattacaggcatgtgtcaccacacccagactaatttagtgttttatagagacggggtttctccatgttggtcaggctgtgtctcaaactcccgacctcaggtgatccgcctgccttggcctcccaaagtgctgggattacaggtgtgaaccaccgcacctggcctttaactgtctttttaaaactgctttttattaaatattgaatagtagaacatgtgtaatatattaagggggactgaacacccatgttaagaggtagaatgctaatgttagaaatcccatgtgtgctttgatcttcccaatctaaatccccttctttagctgtcagaggtatctgttattccgaatcttgtgtttggcatttccttgtttttctttacagtcttaaccatatgtgtttattttcctgttctaatttgatgtcaagaaatcatactgtttggatttttctgcaactctattacttgtcctccaacgagtgttcaagagatccattcacattgcaaacttatcctactgtatagccatccattgtaagaatacattttttcatttatattgtgtacattactccagtgaacattcttgaactcctctttttgtatcctgtgcaagaatttctgtatgtaactaaaaaaggaattgctagctcataggttatatgcattttcagccttactcaacattgcccagttgttttctaaagtgtttattatactcatttactattccttttacttcgtatcctcaccaacacttggtattattaaattttaaatttttacgcacttgggtatga

SEQ ID NO: 84135 - DNA, 802 bp, Homo sapiens
tcctcggaaacgtcgctggcgcggagggatggttcggcgctttaggcgtctgtcacagacctatctgcgggtcgccttcacccagcatctcagaaactgcgcgcgggatgaacattcgggtgtttccggcaggtgacgctgccgagtccccgcagcagggggcgagcaagggactcgcggttgacgggacacggatcctctaaggcccagagtgtcccgagtagcggcagtggggagtgctcagggtacgctaatgatctgtgtcttgtaaagagcatattgctgggcttacatccgtttatcttgtttgactgttattttaataggtcctggttccacaaggataaaacacatctgcagtgcaaatagaagtctgaggaacaggtgtcttatcatggaaggagacctgacctgagacctgccttagaggctggagagtcctgaaagagagtggaccctggagttgctggagcttgtcttgacccttctgcccagagcaggcagggtctgaatgacatctcaatcttcagtgatcagcaatagctgtgtgacaatggagcgtttgagccacatgatggaaaggaaagcttggtgttctcaagagtctgccctttccgaggaagaagaggatacaaccaggcctcttgaaacagtgacatttaaggatgtggctgttgaccttacccaggaggagtgggagcaaatgaaacctgctcaaagaaacttgtatcgagatgtgatgctggagaactacagcaacctagtcacagtgggctgtcaagtcaccaaaccggatgtgata

SEQ ID NO: 84136 - DNA, 1260 bp, Homo sapiens
cgggtgttggaaagcaaagggctggaacgtcccgggctgcggagctcgctgggttgggatggactcgttcagacctgagtgctaggacgccgaagggggcggtgaggcgtcccggcgaggagctggggtcgtctggagtttaaaagacaggtggctctcggagatgtgcgggctgcatgcccacgcttcaccgctaggggaggtcagggctgtgcgatggggaaggaagagagtgtcggggcggtgcagtcgggatgggagaagggtgtcagggccactggcccccagctcggcagagggcagtgtcgggccgcgcgcaggcagggagtgggtgtggtgtgaggctggcgctggagcggtctgggaatgttaggaggtctagggtatcgcggccctgcgtcctcttgtctggactaaaagtccgggcagttctccccggacctggattgtgggcccagcgacaggtgcttggcgatctgtgcccgctgtgcctgcggggctgtggtgggagtcctgtctgcacggtattctgtgtggctgtgcataacccagaagaggagagaactgctgtgcgtctgaagtgatggcggagggcttgaagttcaaagatgtggtcatttacttctctcaaaaggagtgggaatgcttgcactctgctcagaaggatttgtaccgagatgtaatgttggaaaattacggcaacctggtcttactggggctttctgatactaagccaaatgtgatctccttattggagcagaagaaagagccctggatggttaagaggaaggagacaaaagaatggtgtccagattgggagtttggaagagaaaccaagaatttatctccaaaggaaaacatttatgaaattagatcaccacaacaggagaaggccagagttatcagagaaatcagatgccaggtggagagacaacagggtcatcaggagggacatttcagaccagctgtaataccatttacttccatgcagtgcacagcccatagagaatatcagtggcttcatactggagagaaatcctgtgaatgcaggaaatgtaagaatgcttttaggtaccagtcatgtcctattcaacatgaaataattcataataaggaaaaagaacctgaatgtggagaatgtaggaaaatctttaatagtggatcagacttgattaagcatcagacgcttcatgaaagcaaaaaacatagtgaaaataacaaatgtacctttaatcatgattctggaattactcaacctca

SEQ ID NO: 84137 - DNA, 1049 bp, Homo sapiens
tcctcggaaacgtcgctggcgcggagggatggttcggcgctttaggcgtctgtcacagacctatctgcgggtcgccttcacccagcatctcagaaactgcgcgcgggatgaacattcgggtgtttccggcaggtgacgctgccgagtccccgcagcagggggcgagcaagggactcgcggttgacgggacacggatcctctaaggcccagagtgtcccgagtagcggcagtggggagtgctcagggtacgctaatgatctgtgtcttgtaaagagcatattgctgggcttacatccgtttatcttgtttgactgttattttaatagcttggtgttctcaagagtctgccctttccgaggaagaagaggatacaaccaggcctcttaacccagaagaggagagaactgctgtgcgtctgaagtgatggcggagggcttgaagttcaaagatgtggtcatttacttctctcaaaaggagtgggaatgcttgcactctgctcagaaggggctttctgatactaagccaaatgtgatctccttattggagcagaagaaagagccctggatggttaagaggaaggagacaaaagaatggtgtccagattgggagtttggaagagaaaccaagaatttatctccaaaggaaaacatttatgaaattagatcaccacaacaggagaaggccagagttatcagagaaatcagatgccaggtggagagacaacagggtcatcaggagggacatttcagaccagctgtaataccatttacttccatgcagtgcacagcccatagagaatatcagtggcttcatactggagagaaatcctgtgaatgcaggaaatgtaagaatgcttttaggtaccagtcatgtcctattcaacatgaaataattcataataaggaaaaagaacctgaatgtggagaatgtaggaaaatctttaatagtggatcagacttgattaagcatcagacgcttcatgaaagcaaaaaacatagtgaaaataacaaatgtacctttaatcatgattctggaattactcaacctca

SEQ ID NO: 84138 - DNA, 629 bp, Homo sapiens
gcgcgccggcggcggatccgcagttaaaatggtccgagcgggacccggcctttccccggccgctccgctgactgactgagccggctggccgggcccggactggtcgcctagccggcaggctcgctcgctccctccctcgcgtccccaaagctcgcgcccatcgttctcccggcttccctgggcaaagcatgtagcccccgtcgggcactccggcggcccgcagctgacgcccaccccccaccgtcgcgtgtgtgcccgtgtgtgcgtgtgtgtgcgcaggaagggcgacccctccgggggccgagccagcgagcggcctgccccgctgccgggagcccgcctctctgggtctccctccctcccgtcccggtccccctcctcggggccttctatatgggccaccttctctcgaaggagccgcgtaaccgcccgagccagaagaggcctcgctgttgcagttggtgccgccgccggcgccctctcctcaggctgccccgccggaccccagccaaggtgccccctcagccggcggcgccccggagccgggactgcttcttccgcgggccctgcatgctctgcttcatcgtgcacagtcccggcgcgcccgcccccgccggcccagaggagga

SEQ ID NO: 84139 - DNA, 685 bp, Homo sapiens
tatatcatactcttgttttctcttctcccaatattttatatagaatgtttagggatacattttaacattttcagtttatgtattagaaaacttagagataagactgcagacattctgcacttggagttgaatgcaactattcataaaactttaggttgcctttctttggggtggccataaagcagtacacttgtagatgtatgcaaaacagttcaagtgtgttagagatatttttggaaaaacaactatgaaaagtgaagcatattcatttaacacatacttgttgaacttcaggctttggggagactcacccgcacaccgtccgcgcacgcctgaggctgggatcccgcgcttgctcgccggcgatctgtctgaggtttcttcctcctggggtttcttcctgctgctggaccctccgcgaatcccggcctccggagaccgtcctggtaaggtgccctggccaggacttggtctcagcccagactcagacgcacgatcacacagggctcctacttccccaagtgtcagggacccatccccgggcaacggtggctttcactgtgacccaagcggcggctcgggcctcgcgcatgcgcgctggcggggccgactcccccgttccacccccttttactccgcagagtcaggctgcggaccctttaaaaaaggggcggccgttgggtac

SEQ ID NO: 84140 - DNA, 744 bp, Homo sapiens
aacaaggaattctctctctagcaaaactcttctttaaaaatgaaggcaagtgatatgggaaaccacagcaaattttgatcagaagagtaatatcaactaactccacttggaccgcatggaaacgaggaaggagaatactacagcaacctggaagccagtgaaaaatgatggcaacactatctaagatggtaaaaaattgacgaagaaaagctcatttcgaactgttgaggagagaaatgtatttgcagagagagcatgaaaaatcatgaaccactccatgggttttgccttgtgcaagtggaagcaagggaagaagataaagagatgtttttatggggcttctctacttaacacaatcctgagatttaacacaggatggaaaagaaggcattataaaatttcagtaaggactgtgacctctagagagcagaggctgtatctttttcatttgcatattctgagcatctattacaatgcttcatacatatatagtgtctcactacatattaatatttattgttcaataaatgaatccatgaactcattttatgtgaaactatggaaagtaggacaatctctcctacaagaaatattgatgggatcttgccatgttgttcaggctggccttgaattactggactcgagtgatcctccaacctcggcctcctgagtacatattccctggtctatagatgaagaaatgaaggttcaagaatactggacatctggactaattaaatgaca

SEQ ID NO: 84141 - DNA, 736 bp, Homo sapiens
agaagaggccagggaggatctgagatggccttcttcaacttgtatctattgggatatcaaaattcctttcagaacaagaaaaggaacacaactgaagaaacaaaccagaaggaaccagagcctactaggcttccccccattatctcaaaagatgggaattattccgtgcaccagaatagccacacaagataccacgaagctgtccggaaggtgttgttgaagacgtttcccaatcaggtcttcagaatccccttgactgatgctcagaacttcagcttctggtggtcccatgatccaggagtgcgtccagaggaaaccatgccatggatccggagcccacgccattgtctcataaaaagcgcgatgaccaggtttatggatcactctattctcaatgacaggaccttcagtctgtattaagaagatatggctgcagaaagacaagatgaattgtggcaagagtgcagagggggaaagaaggaggtttcccagttccgatggctgactaatgggaggaggagatggagaaagcacagtaaacagactggactaaaaaacaaaaaaaacaccaacaaaaagaaaaaaggaaaaagaaaacaggggaacgaccgaataacacaaagaaagagagcgacaagagaagggacagtcaaaaaagaggaaaagacaagaaagaaagacgaagcaaagcagaaaaaagacacagaaacaaaaaacacaaccgagaacacagcca

SEQ ID NO: 84142 - DNA, 653 bp, Homo sapiens
tttctaatgcttctaaacacttgtcattctgctgtctgaaatgctcttcctgattctactgtaacctacctccttcttttcctccaagacttagctcaaacatgacttccactattagaccatttgaagttctgcaaatatgccaatcccaggaaaggaatgtctacccagataagggcctttttcacttggactaaccctaagtatgtgtccaatatcctgattccagaagttggcctcttaaaatccaggagtcagggagaagcaagagagtggtaagggaggtcttgtgatcactgtgttctctctccctcccctctgtcacagccatggtgattggattcctgaggtcctgaaaattggatgtgagtggctaggagagatccctgctatgcatctggttagcatggagaccagggaatcagagaatcaaatagtcatttgccaagtactcagaacgagtctactctaatttcagaccagaaggaaccagagcctactaggcttccccccattatctcaaaagatgggaattattccgtgcaccagaatagccacacaagataccacgaagctgtccggaaggtgttgttgaagacgtgtaagtaccttggggtgggcatcatgctaggagaaaaaaagatatgtctgag

SEQ ID NO: 84143 - DNA, 1111 bp, Homo sapiens
tttctaatgcttctaaacacttgtcattctgctgtctgaaatgctcttcctgattctactgtaacctacctccttcttttcctccaagacttagctcaaacatgacttccactattagaccatttgaagttctgcaaatatgccaatcccaggaaaggaatgtctacccagataagggcctttttcacttggactaaccctaagtatgtgtccaatatcctgattccagaagttggcctcttaaaatccaggagtcagggagaagcaagagagtggtaagggaggtcttgtgatcactgtgttctctctccctcccctctgtcacagccatggtgattggattcctgaggtcctgaaaattggatgtgagtggctaggagagatccctgctatgcatctggttagcatggagaccagggaatcagagaatcaaatagtcatttgccaagtactcagaacgagtctactctaatttcagaccagaaggaaccagagcctactaggcttccccccattatctcaaaagatgggaattattccgtgcaccagaatagccacacaagataccacgaagctgtccggaaggtgttgttgaagacgtttcccaatcaggtcttcagaatccccttgactgatgctcagaacttcagcttctggtggtcccatgatccaggagtgcgtccagaggaaaccatgccatggatccggagcccacgccattgtctcataaaaagcgcgatgaccaggtttatggatcactctattctcaatgacaggaccttcagtctgtattaagaagatatggctgcagaaagacaagatgaattgtggcaagagtgcagagggggaaagaaggaggtttcccagttccgatggctgactaatgggaggaggagatggagaaagcacagtaaacagactggactaaaaaacaaaaaaaacaccaacaaaaagaaaaaaggaaaaagaaaacaggggaacgaccgaataacacaaagaaagagagcgacaagagaagggacagtcaaaaaagaggaaaagacaagaaagaaagacgaagcaaagcagaaaaaagacacagaaacaaaaaacacaaccgagaacacagcca

SEQ ID NO: 84144 - DNA, 1435 bp, Homo sapiens
catggtggaaaacagtttcctcagataatcatcatatcagaggtcatcatgtatccttagatatcagcattgccaagaccagggatatagttattagtaatttacaggaaaggctcaaggtttcatttacatgggaaatgagaactagacagtgtggtgactgtttttgttgttaaccttacctcagtgttttatctcgggtggtccccaagaccaccttcaggatcagtgattcactggagggactcacagaactcagaaaagctgttaagttatggttatggtatattatagcaaaagaatatatattaaaatcagcagctgaaaaaaggcacatagggcaaagtctgggggacaccaggcacaagcttccagttgtccttcacctgtgaagtcatgtagacagaccataattctctcagcagacagaccataattctctcagcaacaatgtgtgacaacattcttggagaattgctaaccagggaagctccaccaagccttggtgtccagattttttcttgagggttggtcacgtaggcatagcatgactgatagcccatgtggctgaccttcagttttcagcccctccaaagatggagctgatactacatggcctaaggacttcaccattaatcacattgttagcttagactacctggtatggcctaaggcccccaagtaaattaaaacattcatatcaggcaggatagtccaaggacttagaggttatcttgaatctggacacaggacaaacatttctttggaatgtgaaaagtttacacaatcaagacttgctatgttgatcctttactgcggtattgttttttgttttctgacccaaaagtgatgtgcattgcttacctatcatggcctctggttaaggtgtcagtcttgcctccaaatttcctcctaaagcatggaattggccataaatttgcttagtgattttctgatttagtatcattagtttgatgactagttttattatgtgagtgtgataaaaggttacgcttagtatacaaagaccttcttataagtctagttaataaaactagggccatgtgttactacaacataggagttaactttgtctggaggctttttcaagcccaagaggttgtcatttctttatgtgtaagatactgcccacatactatactgaagtcaggaaccaagaaccggtcaatttacctcagccaagttgcttggactgctttgcttaataatgggtttgccatatctactttaatgagatgtgtggcatggtgatggttacaaaagtgatttgttaattattgcctggtaggaaggagaacatgttttttttgaacctatgcaaatagccacatgtctgtgaaaagtaaagggatacttttgtgtaatatttaaccatgtataccattgtttgtgtactttttaattgtgtcatttt

SEQ ID NO: 84145 - DNA, 410 bp, Homo sapiens
ggaaatgcctccccgaagagggcgcatttgcaattaaagccaagtgacaagaaaaaactgccatgcacagatctggggtctagagggtggggcaggagggacaacaagagcaaaggcactggggacggaagggcttcatgggcagtgggagccccacgggagccccctaggtctggcttgcaagctctctggccctctgctggacaccccagagcaagccagcccctgcctgggactccctgaacacactgcccccagagaaccacaggcagagggactggctcacctgagttccacaggaaagacagactgtcctgagaacagacactcgctcattttcatcactgttcctcaaacaagtagattttgttttaaagcaaacaaataaacagcgttgtcaagttggtcaa

SEQ ID NO: 84146 - DNA, 245 bp, Homo sapiens
aattaatagcagctactattatgaataacaggattttcctttcactgcatgggcgtatctttgcccatcagggatcttcactgtgttcatcattcttctgtatcagaaggaggaagcccatttcctgtgcctgaatgtcagaactgtaaactccagtctcagggacctacctcctggttaataaggttgaagtcagaacacggtcctgaaagtcagggtcagatttccataccttatttggttgc

SEQ ID NO: 84147 - DNA, 870 bp, Homo sapiens
gggatacttaacctataatatacaaaggattttatatccccttataaatatgacatgttcaactattctgcaagagggactatggaaacccctagaaatgtcacttaaggagaatctgggggcattcgggaataattatttgaaaaattgcaactagagagaaggaggagtaaaatggttgacgagaagctttcactaattatccttcctgctggaacaccaaactgaacaactatccacagggtgaaaacccagggtattatatccttagaatttatttctaccagaaagttgccactttatatattctgccaacaagcttgcttgcaagaggagaagccactattattcccgagtcagtggcatgaacacgtggactgcagagataactgaggtaagaaagctatgaacctggaacaagaatcatggggagaagcaatatgcaattttgtgaattatgaatttaagttcataaagggaactgggattgggaccctgtgggaagccctgaagaagaaagaccaggaaaattggtaagagaatcatttcagtttgaatgaaccaggacaaggcaccagagggctttaaccagccatgctgaccacagaatggtgcttaactcagtgccctcttgaatacagaaggaaaaagggcaggcttaaattaaggctgtgcccaggcatcaatgaggtgacgagaagactaaggcttagaagacttaagtaacttgcaaaggtcatggagtgatcaggtggctatgcatataatcccaagagtagtctgtgtgaaagcttatgtgctctatgctgcttttctacatcagaaaggtggaaattctccctctctgttgtatccctcacagaatgacca

SEQ ID NO: 84148 - DNA, 356 bp, Homo sapiens
aaaagattggtgacgaagaagataattaggcaaaagttccagagaagttgcttcaggctgaggaaacagcttggtatgtgcaagaaactacaagcactttgctgacgctgagtggaaattgcatgcagtgttgacagacaataataattaaagctgacacttggagagcacttactggtgccaggcatggttcaaattgtgctttactaattttatatatcagtcttcatagtaatgccacaagataagtggtattttaccctcattctacaaaggaagcatagaggctaaaggaaggctgactggctttaaatctttgcctttaaccactgtactaaacagcttccaagatgcag

SEQ ID NO: 84149 - DNA, 813 bp, Homo sapiens
ctccaagtagccctggtatcttatgttggagaatggtgttagaaaaacaagatctgggtgctagacatactgattgctgctgaaatataattgcttctaggccctctcagttgacatagcaaaaagatatatgtgtatataatacccatacatatataaagtatttatggaaatataaatatttctgtatataaccatctgtatttatataaggctaaacataaatttatactagtgtctccaactacagtctattactgcatggatcattctagcctccccttgcttatttgtaaccttctactccaactgtgagaaacctgtctcctactatctgccatccattttactaattgtttattaattatataaatatatagtggcttcaaaattgtaaacctgtgcccctgtggaaaacaactttatcaactggagtagagtgctatgtacagttccttttgcctttggtcttacagactccactcatttccaaatttacctatgtcagtaccttattcccccatccctttcagtgagattgtttcatacatttgtgatacattaaaattcttttctcacattctgcatttggggactgctattgtaaatggtacttttacatttcaagttctaattgttcattactagtatataggaaagcaactgacttttgtatattaatcttgtatgctgggactttgcaccaggcatttgtcagttctttggcagccatgtcaactgcagataaagacagtttatttcttcctttcccatctgtatatgttttatttcccttaaaaaaatttattttgt

SEQ ID NO: 84150 - DNA, 587 bp, Homo sapiens
tcttggccaggctggtcttgaactcctgacctcacgatccacctgccccggcctcccaagatagcatattttaggtactgttatacaccttgctttttttcacttaaaagtatgtgtattctagaagataaatagatatgtgataaatatagtaaaatgttaaatatagaacctagcttgtagagactgggagtccactgtaaaattctttcaactttgttgttgttctgaaaattttcataatcaaaattggaaatgaaaatacatagtttagagagatttctagaggaattcatgataactctggttcttttttttacagccatataacaattccatcatataaatgtaccattatttacttatcaatgtcttaatgatagaagttttggtttctagtttttggttgttataaacagtgctacattgtaagtatagtaagaattcacagaagttggattcctaggtcacgacttacccattttgaattttgataaatattgctaaattgctctcaggaaaagttgtactgattttactcctgtcaacaaatgtgtagaataaagtggactcattatgcttattta

SEQ ID NO: 84151 - DNA, 288 bp, Homo sapiens
aattaataaataaactgacaaggaattcaaaaattcgggtgggtttatgtaaaaagtgggatttccaccttctcttaaaaaaaaaaaaattggtgggccgggtgtggtggctcacgcctgtaatctcagcactttgggagtctgctgggggtggctttgactttcaaagtacctctcactagagacacaatcatgggatagaagtttccatagtctaggccaggcgtggtggctcacctggatttcacccgcctctttagtagagacaggtgaaaccccatctttact

SEQ ID NO: 84152 - DNA, 405 bp, Homo sapiens
actttggccttctaaagtgttgggattatgcgtgagcctctgcacccagccaaaattttgaaatttgaggcagtctcatctctctgtttttgcttttgttacctgtgcttttggtgttgtatcttggaaatcactaccaaatccagtgtcatggatttattaataattctgtgagattagttaaaaattagaggattaaaataggaaatacaactcgaagcatcacgttaataatttcaacatgaacaatgaagtagaaatacagtagacataaaaagcataaaccagttgatatttgatgaaataacaaatggaaaatactcactaatatactttttgtagaattattataatgtgctaactttctgaaagctcaggccaggtgtggtggctcacacctgtaat

SEQ ID NO: 84153 - DNA, 327 bp, Homo sapiens
gcatttcagtacgacggaacttatgagtgctgtgaatatgcctggaaatgaacccgccagtgattggaataatggtccggaagcagtggttttcaagctgtactcttttagcagttgaggttgctttttcttcaaatgacatgtgcagaaatgtaatataaataaaatagatcagatccaaatttgaagccagggtgaaagcaggggcctgtaattccccacccctccctttgcctcagagctgacacttccaaagagaatgccctttcgttacaggtttgactgaaagtaggctaacgcttggttggatgaagatcattgtttttc

SEQ ID NO: 84154 - DNA, 322 bp, Homo sapiens
gtgaagaattgtgatccaggatcttattggcagcctgttcgcaacaacagcacctagaacagtgcctggcagttagaaggcacttaatattttttttgattgaatgaaattgtctgttgacaatggagtaaaaaaaatgtagtatttccatactatgggatccatacactcattttaaagtaatacgagtttctatgctataacagcacaaattaaaataatagtggtttagataaagaagtatagtttgagtaaaccctccagagctggtgtggaggctccaccctcctcaggaacccagggtgcctactgttgtgtggtt

SEQ ID NO: 84155 - DNA, 370 bp, Homo sapiens
ggcaaggcacagtcgcatatgcctgtaattccagctagtccagagacggacatgggaggattgcttgaatctaggagtttaggaccagcctgagcaacaaagcaagaccctgtctctacaaaaaggaggtttccagataaaagtagactcaatagatatgttaagcatttggaagaaaaatctgttgatgagtataaatagcatctaatgtaaaaaacgaaggatagggacacaacaggaaaagcgaaactttttataaaaaaggagacattatcacagtaaatttcttggctttacagtaagcagtatttccctaatcataatgcagaactacagccagtttaaccaaaaattgggatgaaatatagtg

SEQ ID NO: 84156 - DNA, 684 bp, Homo sapiens
ctgggcagaagccagccacggacagtgaattatctggaaatgcgtctccctgaggcgcgtttacaatacaaaactttattgttgttttatcatccaaatgtgtatatatttatgttgttttgtgcaactgtatactgccaataatcactttaaaatgtttaatacttagagcgctggatcaaggcaaattcctaacaacttgactcggaactcacacacggcacccatcccgtgacagagcaccaccggggtggctgacaagacttctgaccccaaaacgcggttctgcggagagagtggggcaggaccggggagcaaggcgccgctccccaccgcccgagcgctcgctactccagggccgcagcgctcggtcccgccggggttcgcagcccggcagccctccaggcctctcagctcctaggccggggcctctcccgctcccagcgccccggtaccccgcggcccaagccgaggcccctccttgcgcccgggccgcgaccaccccccaggcccacgctccccgctccccgctcccgcactcaccggctcgggaaagcacgtcacttccggagcgtcgcaagcggccgaccacttccggggccttttggctccggaagcccaaggcttgcccagtgcgcaggtgcagaaaacacgccgacggaccgagaggcgaccttgtccctg

SEQ ID NO: 84157 - DNA, 801 bp, Homo sapiens
gggaaattgtgaagactaaaaaaaaagtgtttcattttatggaaaaggaaagttagacatttgttaaatattaatgacattgaatgtgcttaatggttttgtggtgatgtagaaaagggtttctcaatcttggcattattggcaaactggaccggtgcatgctttgctgcggagagtgtcctgtgcattgtgggtgctgagcagcagttctggcctccaaccgccagatgtcgagagagcttttccttctcccattgagacaaccaaaaatgactctagatgccgccatgtgtcccccggcgcgcaaaattgccccctgtttgacgatcatggtgtgagacgatgttatcattaccagtagattcatactaaaatatttcagggtgaaattttcacagtttattttcagatagcttaatcagaattgaaaacaggataaaggcaaaaagagaacatttttgaaaaaagaaaagaattaaaaaaaaaaaaaaaaggaaatggaaggataagaaaaaaaactatgagagccaaaattcacaggccaggcaagtcacatcaggcctcataggggttgacaagctgcagtgttgagtgctttacacagctgggcaaggagtgaggacagcttctccatccatatgaccctgcttttaggagaggaatgcgtgtgatacaacatgtagaatactggagactcgagtttaaccacagggttatttatttaatgatgaaagagctaactagcagatgcgtattttccttgggcattacacagaggacttacattaaattgtcacataa

SEQ ID NO: 84158 - DNA, 715 bp, Homo sapiens
ttctctttactgtgctctacagaacatttctatgatatgtgtggagctaatgagattacagttataatttttgggggggataattaggaaggtattgataatgatatataaaggactagaattttgtgggataaaggttgctgtttgtagaaaaatcctcccacacatgagggaaaaaaatccaacaaaccaaaaacaggaataatataatgtgtttagcttttaaatgttctaaacaactataaagtacagtagagtgtgtagtaagcaaaaccatggtcagttagggtgttaaacttttgaatcaagagacctggaatctcttcccattaattaacaattaactttggggaagttacttaaattttctttttctttctttccccatttattgagaatgataccaaaaactcacaaattctgaggattcagtatgttgcttaagaaagagtttatcttgggattggtttagtgagtataagaggaaagttagttagcaagaacgctcaggctttgaccattatttccttcatttaaagcatagttcaattgagtataagttttactaattctgggaagtgtgaattgtatgtaagattggaagacaggaccaccttttatcttatcaagtactaaaataaattactcaccatacttttctgttaaccattatgaattgttatgtattctgggttatatttattagtattttaat

SEQ ID NO: 84159 - DNA, 1208 bp, Homo sapiens
cagtcttttcgcgacgagtgccctccgccaccctcgccacgcccctgctcccccgcggttggttcttccttgctctactcaaccctgacctcttctctctgactctcgacttgtgttccccgctcctccctgaccttcctcccctcccctttcactcaattctcaccaactctttctctctctggtgttttctccttttctcgtaaactttgccgcctatgagcagccacattgccttactgaaatccagagcctaaccttcaatcccaccgccggctgcgcgtcgctcgccaaagaaatgttcgccatgaaaactaaggctgccttagctatctggtgcccaggctattcggaaactcagataaatgctactcaggcaatgaagaagaggagaaaaaggaaagtcacaaccaataaatgtctggaacaagtgtcacaattacaaggattgtggcgtcgcttcaatcgacctttactgaaacaacagtaaaccatctttattatggtcatatttcacagcaccaaaataaatcatctttattaagtagatgaaacattaactctaactgtgacaaagaagaccacaaatagttatcttttaattacagaagagtttcttaacttacttttgtaagttttatggtgtaagtttataatgcaggggaagtactactcctcaaatgttgagggaagcttccataacattgatgactggcttcatggcagtaattctcggctgtagttgcataagcattgctcaagaggaaaatccaaaagtgcagcaggagaactcttttccctgaaaaaggaaaaatattgaactcaatgatagcacctaaacttacatttaaaagacagacattccttctacatgtaatgacacttcttgtgttaaactaaaaatttacaagagaagaaagtgaaagcaaatggggtttcacaaatagttgtaaatatagtgaagcaatttgaaataattttcaagcaaagtattgtgaaagtattctaagccaagttttaaatattatctaacagacaagagtggtatatacaagtagatcctgagaagtacctttgttacagctactataaatatacatataaattatagaatctactttaatttattttgtgaacacttttgaaaatgtacatgttcctttgtaattgacactatatatttcttaataaaataattctcaaatttg

SEQ ID NO: 84160 - DNA, 1397 bp, Homo sapiens
gcagccagaaagctctggagcatcagggagactccaacttaaggcaacagcatgggtgaataagggcttcctgtggactggcaatgagaggcaaaacctggtgcttgagcactggcccctaaggcaggccttacagatctcttacactcgtggtgggaagagtttagtgtgaaactggggtggaattgggtgtccacgtatgttcccttttgccttactatatgttctgtcagtttctttcaggaaaatcttcatcttacaacttgtagggctggtgttaacttacgacttcactaactgtgactttgagaagattaaagcagcctatctcagtactatttctaaagacctgattacatatatgagtgggaccaaaagtaccgagttcaacaacaccgtctcttgtagcaatcggccacattgccttactgaaatccagagcctaaccttcaatcccaccgccggctgcgcgtcgctcgccaaagaaatgttcgccatgaaaactaaggctgccttagctatctggtgcccaggctattcggaaactcagataaatgctactcaggcaatgaagaagaggagaaaaaggaaagtcacaaccaataaatgtctggaacaagtgtcacaattacaaggattgtggcgtcgcttcaatcgacctttactgaaacaacagtaaaccatctttattatggtcatatttcacagcaccaaaataaatcatctttattaagtagatgaaacattaactctaactgtgacaaagaagaccacaaatagttatcttttaattacagaagagtttcttaacttacttttgtaagttttatggtgtaagtttataatgcaggggaagtactactcctcaaatgttgagggaagcttccataacattgatgactggcttcatggcagtaattctcggctgtagttgcataagcattgctcaagaggaaaatccaaaagtgcagcaggagaactcttttccctgaaaaaggaaaaatattgaactcaatgatagcacctaaacttacatttaaaagacagacattccttctacatgtaatgacacttcttgtgttaaactaaaaatttacaagagaagaaagtgaaagcaaatggggtttcacaaatagttgtaaatatagtgaagcaatttgaaataattttcaagcaaagtattgtgaaagtattctaagccaagttttaaatattatctaacagacaagagtggtatatacaagtagatcctgagaagtacctttgttacagctactataaatatacatataaattatagaatctactttaatttattttgtgaacacttttgaaaatgtacatgttcctttgtaattgacactatatatttcttaataaaataattctcaaatttg

SEQ ID NO: 84161 - DNA, 5489 bp, Homo sapiens
attttctctttctggctgcgcgggatggaggggaccagtcgcgctgggggtgggcgcgcgctgaggcgggggtcccgccgcgcggggcggaggcgcgggcgggcgcaggcggccccacgggacgcggctgcgctcggcggaagacgcggcagccctgcgagagtcagcagcggagacgcggtgctcctcgggcgccaagcggaaaatttcaaaaatgtttcaaattcctgtggaaaatcttgacaacatcagaaaggtgcgaaaaaaggtgaaaggtattcttgtggatattgggcttgacagctgcaaggagttactgaaggaccttaaaggctttgatccaggagagaaatactttcataacacatcatggggagatgtttctctctgggaaccttctggaaagaaagtgagatatcgaacaaagccatactgttgtggcctctgtaaatactctacaaaggtgcttacttcattcaagaatcatttacatcgttaccatgaagatgaaattgaccaagagctggtgatcccttgcccaaactgtgtatttgcatctcagcccaaagttgtgggaaggcacttcagaatgttccatgcacctgtccggaaagtccagaactacacagtgaatattttaggtgaaactaaatcatctaggagcgatgtgataagtttcacatgtctaaaatgtaacttttcaaacactttgtactacagcatgaagaagcatgtgctggtagcccattttcactacttaattaactcctactttggcctaagaactgaggaaatgggtgagcaaccgaaaactaacgatactgtttctatagagaagatcccaccacctgacaaatattactgtaaaaagtgcaacgccaatgccagcagccaggatgcgttaatgtatcacattttgacatcagacatacacagagatttggagaataagcttagatctgtgatttcagaacatattaagaggactggactcttgaagcaaacgcacattgctccaaaaccagcagcacatttggctgcaccagcaaatggcagtgctccaagcgctccagcgcagcctccttgcttccatcttgctttgccacagaacagtccaagcccagccgcaggacagccagtgactgtggcccagggtgcccctggaagcctcactcattccccccctgctgctggccaatcccacatgactctggtctccagccctctgcctgtgggccagaacagcctcaccctgcagcccccagcacctcagcccgtctttctttctcacggggttccacttcatcagtctgtgaatcctcctgtgttgcccttgagtcagccagtcggacctgtcaataagtctgttggaactagtgtcctccccataaatcagactgttcgccctggggttttacccctcacccagcctgtgggacccataaacagacctgttgggcctggtgttcttcctgtgagcccctctgtcacccctggggtcctgcaggctgtctcgccaggggtgctttctgtgagtcgggcggtcccgtctggagtccttcctgcaggccagatgactcctgcaggccagatgactcctgcaggggttatccctgggcaaacagcaacttctggggttcttcctactggccagatggtccagtcaggagttctccctgtgggccagacagctccgtcacgggttcttcccccaggccagacagccccattgagggttatctctgcaggccaggtggtcccatctgggcttctttctcccaaccagacagtctcctcctcagctgttgtgcctgtaaaccagggtgtgaattctggtgttctgcagcttagtcagcctgttgtgtcgggagttcttcctgtgggccagccagtgaggcctggggtcttgcaactcaaccagactgtgggcaccaacattctgcctgtgaatcagccagtgagacctggtgcttcgcagaacaccaccttcctgacatcaggctctattctcagacagctcatccctacagggaaacaagtgaatgggattccaacctacacgctggcccccgtgtctgtcactctgccggttccccctggaggccttgcgactgtcgctccgccccagatgcccatccagctcctgccgtcaggtgcagctgcaccaatggccggttccatgcccggcatgccctctcctccagtgctggtgaatgctgctcagagcgtgtttgttcaggcctcctcctctgcagcagacacaaaccaggtgctcaaacaggccaagcagtggaagacctgccctgtctgcaacgagctctttccgtccaacgtctaccaggtccacatggaggtagcgcataagcacagcgagtccaagtctggtgagaaacttgagcctgaaaaactggcagcgtgtgcaccatttctaaagtggatgagagagaaaacggtgcgatgtctgtcttgtaagtgcttggtctctgaggaagagcttatacaccacttgctgatgcatggcttggggtgcttgttctgtccatgcaccttccatgatatcaaaggtctttcagagcacagcaggaataggcacctggggaagaagaagttgcctatggattatagcaacagaggttttcaattagatgtcgatgccaatggcaacctgctctttccccaccttgatttcatcaccatattgccaaaggagaagcttggggagcgggaagtctacttggcaatcctggctgggatacactccaagtcactggtgcctgtgtatgtgaaggtgaggcctcaggctgagggcacccccgggagcaccggcaagcgagtgtccacctgccccttttgctttggcccctttgtgacaactgaggcctatgagctgcatttgaaggagaggcaccacatcatgcccacagtccacacggtcctgaagtctcccgccttcaagtgcatccactgctgtggggtctacacgggaaatatgaccctggctgccatcgccgtccatttggtgcgctgcagaagtgctcccaaggacagcagctcagacctgcaggcccagccgggttttattcacaacagtgaactgcttttagtcagtggtgaagtgatgcatgattccagtttttctgttaagagaaagctgcctgacggccacttaggggccgaagaccagcggcatggggaggagcagcctcccatcctaaatgccgatgcagccccgggtccagaaaaggtgacgagtgttgtgccttttaaaagacaaaggaatgaaagcagaacagagggacctattgtcaaggacgaggctcttcagattttagcattagatcctaaaaaatatgaaggccgttcttatgaagaaaagaagcaatttcttaaagattatttccataagaaaccatatcctagtaaaaaggaaatagaactgttgtcctcactcttttgggtgtggaaaattgatgtggcttcattttttggaaaaagaaggtatatttgcatgaaagcaataaaaaatcacaagccttctgtacttttaggctttgatatgtctgaacttaaaaatgtgaaacatagattgaactttgaatatgaaccataaaacttgcaaaaaaaaaaaaaaagtaactctaaagtagtaggtagatttttttcagttgaaatttcacagtgttgtcctcactgtgttggtgaatcaacctcagtggtcactgtgctgctctgcagagttacttcaggtgctggagagacccctgttaccaggaagccagtagttatttcacatctattgtttcctgcagtttgatttgtaacagaacagttgttttcaggtttttttctctgtcatgtaaatgaaatcttttgatatttcatgcacgccttgttttcccactagtgtcagtatcgtatgataagaaactgaaatctataaataatttgctttttcattaaggacatttcagcctttttcagaatacttgatttaactgcgagtggaagcatcgatctccttcagctttccctgtagcagcagatggtacagtgagtgttcagagacgtgggtacaaaccctgtgatgtatgtataaggctccctgaggatgcactgcattaacttacgctgacttctttgtaagatctttgcttatagattataatttagatctgtatttttttaggtttatcctaatagctgttttttttttttaaccataactcatagaaaatcaaatgtttttatttgttaaaagtagactgaatttgacatctggtatgctggtatgtagctcatacatcaagagttattttacaaataaatttattctgtagatgcagaaatatttttcagtgtagattttcccttttgatatgctaagtcatttctccgttcagaggtaaaacaataaatttttagtgcctttagaataaacattgaaagaatacaccccaaaactcttctcctaacttaactactcataaactagtgaaagggaaggtctatgatactcaggaataagattattgcccctgagtgtgaaaactaacttaaatttcagcatagggtttcaggggacatggcgaagtttacagactgagatctcagtctccatggttggtacagtaagtctttgaccacattttctgaaggtcatgtttagtggagaaacgggcttttctctagctggtttaggctggaagctgtgtccgggtcgatgggatggcatattgttaaagaatctccattgtcgtcactgtcctgtggatgttaaacctcgtttttttccccacacgatattaaaacttaaagcaccagaaccagtcatggagaccagccagtttagatggtaagtcatatttctggtggtacacagcagaggaaccccttcactctatctttaggtagaaatatttggaggatgtgacagcctctgagaaacataatgttactatgtggattttaaaaaatataatacttgcatgtaattgctataatgttcatatttgaggcagttgtgaaactggtttatgattgttggtgtactctgttgtaaattcaaagagagcttgttgaacattttttttttttacctattgttttcagagtgtctattttgaattaaaatttgttacaccgctaaaaaaaaaaaacaaaaacaacaacaagacaaaaaaaaaaaaaaaaaaagaaaaaacaacaggggggccggccgacccaaaagaatagaaattctacgacgaggggggcacccacgaactatgacgaggagacacacgaatgtgatctcacaaaaacaagggggcccaccaaaaaggggagacgctgctgattactaaccgaaggacgcacaggacgcactgggatacaaacaagaaacggtgcagtgtagtgagaaaacaaacggcaatcggcggaatcatcctagcggagacgggaacacacatacgcgagggggaggagcgaaaaaagcgaagcgaagataa

SEQ ID NO: 84162 - DNA, 5144 bp, Homo sapiens
attttctctttctggctgcgcgggatggaggggaccagtcgcgctgggggtgggcgcgcgctgaggcgggggtcccgccgcgcggggcggaggcgcgggcgggcgcaggcggccccacgggacgcggctgcgctcggcggaagacgcggcagccctgcgagagtcagcagcggagacgcggtgctcctcgggcgccaagcggaaaatttcaaaaatgtttcaaattcctgtggaaaatcttgacaacatcagaaaggtgcgaaaaaaggtgaaaggtattcttgtggatattgggcttgacagctgcaaggagttactgaaggaccttaaaggctttgatccaggagagaaatactttcataacacatcatggggagatgtttctctctgggaaccttctggaaagaaagtgagatatcgaacaaagccatactgttgtggcctctgtaaatactctacaaaggtgcttacttcattcaagaatcatttacatcgttaccatgaagatgaaattgaccaagagctggtgatcccttgcccaaactgtgtatttgcatctcagcccaaagttgtgggaaggcacttcagaatgttccatgcacctgtccggaaagtccagaactacacagtgaatattttaggtgaaactaaatcatctaggagcgatgtgataagtttcacatgtctaaaatgtaacttttcaaacactttgtactacagcatgaagaagcatgtgctggtagcccattttcactacttaattaactcctactttggcctaagaactgaggaaatgggtgagcaaccgaaaactaacgatactgtttctatagagaagatcccaccacctgacaaatattactgtaaaaagtgcaacgccaatgccagcagccaggatgcgttaatgtatcacattttgacatcagacatacacagagatttggagaataagcttagatctgtgatttcagaacatattaagaggactggactcttgaagcaaacgcacattgctccaaaaccagcagcacatttggctgcaccagcaaatggcagtgctccaagcgctccagcgcagcctccttgcttccatcttgctttgccacagaacagtccaagcccagccgcaggacagccagtgactgtggcccagggtgcccctggaagcctcactcattccccccctgctgctggccaatcccacatgactctggtctccagccctctgcctgtgggccagaacagcctcaccctgcagcccccagcacctcagcccgtctttctttctcacggggttccacttcatcagtctgtgaatcctcctgtgttgcccttgagtcagccagtcggacctgtcaataagtctgttggaactagtgtcctccccataaatcagactgttcgccctggggttttacccctcacccagcctgtgggacccataaacagacctgttgggcctggtgttcttcctgtgagcccctctgtcacccctggggtcctgcaggctgtctcgccaggggtgctttctgtgagtcgggcggtcccgtctggagtccttcctgcaggccagatgactcctgcaggccagatgactcctgcaggggttatccctgggcaaacagcaacttctggggttcttcctactggccagatggtccagtcaggagttctccctgtgggccagacagctccgtcacgggttcttcccccaggccagacagccccattgagggttatctctgcaggccaggtggtcccatctgggcttctttctcccaaccagacagtctcctcctcagctgttgtgcctgtaaaccagggtgtgaattctggtgttctgcagcttagtcagcctgttgtgtcgggagttcttcctgtgggccagccagtgaggcctggggtcttgcaactcaaccagactgtgggcaccaacattctgcctgtgaatcagccagtgagacctggtgcttcgcagaacaccaccttcctgacatcaggctctattctcagacagctcatccctacagggaaacaagtgaatgggattccaacctacacgctggcccccgtgtctgtcactctgccggttccccctggaggccttgcgactgtcgctccgccccagatgcccatccagctcctgccgtcaggtgcagctgcaccaatggccggttccatgcccggcatgccctctcctccagtgctggtgaatgctgctcagagcgtgtttgttcaggcctcctcctctgcagcagacacaaaccaggtgctcaaacaggccaagcagtggaagacctgccctgtctgcaacgagctctttccgtccaacgtctaccaggtccacatggaggtagcgcataagcacagcgagtccaagtctggtgagaaacttgagcctgaaaaactggcagcgtgtgcaccatttctaaagtggatgagagagaaaacggtgcgatgtctgtcttgtaagtgcttggtctctgaggaagagcttatacaccacttgctgatgcatggcttggggtgcttgttctgtccatgcaccttccatgatatcaaaggtctttcagagcacagcaggaataggcacctggggaagaagaagttgcctatggattatagcaacagaggttttcaattagatgtcgatgccaatggcaacctgctctttccccaccttgatttcatcaccatattgccaaaggagaagcttggggagcgggaagtctacttggcaatcctggctgggatacactccaagtcactggtgcctgtgtatgtgaaggtgaggcctcaggctgagggcacccccgggagcaccggcaagcgagtgtccacctgccccttttgctttggcccctttgtgacaactgaggcctatgagctgcatttgaaggagaggcaccacatcatgcccacagtccacacggtcctgaagtctcccgccttcaagtgcatccactgctgtggggtctacacgggaaatatgaccctggctgccatcgccgtccatttggtgcgctgcagaagtgctcccaaggacagcagctcagacctgcaggcccagccgggttttattcacaacagtgaactgcttttagtcagtggtgaagtgatgcatgattccagtttttctgttaagagaaagctgcctgacggccacttaggggccgaagaccagcggcatggggaggagcagcctcccatcctaaatgccgatgcagccccgggtccagaaaaggtgacgagtgttgtgccttttaaaagacaaaggaatgaaagcagaacagagggacctattgtcaaggacgaggctcttcagattttagcattagatcctaaaaaatatgaaggccgttcttatgaagaaaagaagcaatttcttaaagattatttccataagaaaccatatcctagtaaaaaggaaatagaactgttgtcctcactcttttgggtgtggaaaattgatgtggcttcattttttggaaaaagaaggtatatttgcatgaaagcaataaaaaatcacaagccttctgtacttttaggctttgatatgtctgaacttaaaaatgtgaaacatagattgaactttgaatatgaaccataaaacttgcaaaaaaaaaaaaaaagtaactctaaagtagtaggtagatttttttcagttgaaatttcacagtgttgtcctcactgtgttggtgaatcaacctcagtggtcactgtgctgctctgcagagttacttcaggtgctggagagacccctgttaccaggaagccagtagttatttcacatctattgtttcctgcagtttgatttgtaacagaacagttgttttcaggtttttttctctgtcatgtaaatgaaatcttttgatatttcatgcacgccttgttttcccactagtgtcagtatcgtatgataagaaactgaaatctataaataatttgctttttcattaaggacatttcagcctttttcagaatacttgatttaactgcgagtggaagcatcgatctccttcagctttccctgtagcagcagatggtacagtgagtgttcagagacgtgggtacaaaccctgtgatgtatgtataaggctccctgaggatgcactgcattaacttacgctgacttctttgtaagatctttgcttatagattataatttagatctgtatttttttaggtttatcctaatagctgttttttttttttaaccataactcatagaaaatcaaatgtttttatttgttaaaagtagactgaatttgacatctggtatgctggtatgtagctcatacatcaagagttattttacaaataaatttattctgtagatgcagaaatatttttcagtgtagattttcccttttgatatgctaagtcatttctccgttcagaggtaaaacaataaatttttagtgcctttagaataaacattgaaagaatacaccccaaaactcttctcctaacttaactactcataaactagtgaaagggaaggtctatgatactcaggaataagattattgcccctgagtgtgaaaactaacttaaatttcagcatagggtttcaggggacatggcgaagtttacagactgagatctcagtctccatggttggtacagtaagtctttgaccacattttctgaaggtcatgtttagtggagaaacgggcttttctctagctggtttaggctggaagctgtgtccgggtcgatgggatggcatattgttaaagaatctccattgtcgtcactgtcctgtggatgttaaacctcgtttttttccccacacgatattaaaacttaaagcaccagaaccagtcatggagaccagccagtttagatggtaagtcatatttctggtggtacacagcagaggaaccccttcactctatctttaggtagaaatatttggaggatgtgacagcctctgagaaacataatgttactatgtggattttaaaaaatataatacttgcatgtaattgctataatgttcatatttgaggcagttgtgaaactggtttatgattgttggtgtactctgttgtaaattcaaagagagcttgttgaacattttttttttttacctattgttttcagagtgtctattttgaattaaaatttgttacaccgct

SEQ ID NO: 84163 - DNA, 758 bp, Homo sapiens
gcggggggatcgcctgagcccaggagtttgagaacaatagatgttctaacaaatatttgttgttgggctttcaggagctaaatgaatgggctaatgacatttgttcaaccttaagataatttttatatgaccctctgtgagaggttctaataattctttttttaacaaacgaataagaatattaacaacaatctaggtaaatatttcgaaagagttcttcctttggaaaaagcaagccgagtgttgatttaaatttctcaatgatcaaagtgttaaagtaatatgttttgaatagagccatctataaaacatacccatataaacaacaaaacttgtaaatgtgtaatgggcaaaagtaataaaactattgaaataatgcattttcctcataccaactctatccattaattttttacagttttctaccatgtaacattacccttcataaaaatgatattttaaaatgagatggggttggtaaaagaaacaaggggtaataatggaaggaggattgcaaagctgtgctctgctggatgagggagaagggaaaatagaattcatttgggctttctgtgagccagaggccatggtctgtagcctttaaagggatgagcaatgctcagagccaagggtttttatatctttattttgattatttgtttcttttctctaaagaaatcaagcacaagctattaaaataatgaaagtcacttcaatataatactttataagcaaatttgtgaatctctcatgtatta

SEQ ID NO: 84164 - DNA, 852 bp, Homo sapiens
agggttcttgccccctaaactgccaagtatcgcaactccaggtgactcttgaaatacttggtttggagtacctagggctacagagagctcaacctgaaaattagctctgagctatatttcaactttcttctaaactcaaattttgaaaaagtcagaaatatgtaaaatctcacattttaaaaatttttcaataagtttaatatatccacaccaaactgcttgtatatctatcatatatactgaatattcatcaacctatttataagtgtccaacaatatgcagtgtttgtatataaatacaaaatcaacttgttactcttaaaagcccactctcagtctattctataaaacaaaaacaaataattttttaaaattgaagtgaagaaaaaagatttccacctttagtaagactttagaaaaaagatggagtttgtcatcttcagaaagagagcaaggggagagagcatcttatcactcatgctctcaccgtctcagccttcagcacctggtgtagcatgggctacccctcacttaatgatgtcacataaagcacacagaggaaccatgacttcctggataccaaggacaagtgatctccaaagaccctttgtgatgtttacaatgtagagatctggctgggcatggtgactcacgcctgtgatcccagcactttgggaggctgaagcaggaggattgcttgagctcaggagtttaacatcagcctgggccacacagtgagacctcgtctttaaaaaaatcagacatcatctttaaaaaaatacaaatttggctgggcacagtggctcatgcctgtaatcccagaaatttgggaggccgaagcgggtggatcac

SEQ ID NO: 84165 - DNA, 294 bp, Homo sapiens
ctgcaaacccttcagcatttagctaaagttatttcacaattcaatgcttgtcttgcactgtcctggtcatttaaaaactggtatctcttcaatagcaaatagtatcataacagaccactaaatttggagggaaagtggtttctattgcagatggatgtaattaaaattggtgtaaatcacagggtacagaattcttatctggtaagaattctgacttttttttaaagaagaaaaaatatatccagatctgtatccacatgctatttaaatgctcaggacaaaaagaagccacta

SEQ ID NO: 84166 - DNA, 388 bp, Homo sapiens
tacaaacaccgcaatctatcaaaaaaaaaaatctttttttttcactttttccattgtttattgagctatatactcaagtcttagtcttgtttaacaaaatacttgtgtttctttgtatatctacagtattttctttggggttgtgctttgaaatgcctggaagaatacagtttatgaattcagtatgttggtgttgctagtaatatagatatttttacaaaacttattttgggaataaactttaatttgactgggaagacatttcatatagattctgtaaaaaaatttagcttgcagctattttataaataaataaagaatgcatttctttcatattaaacttctggtgactgccttttcacaagattgcggtgttcacacggtctta

SEQ ID NO: 84167 - DNA, 327 bp, Homo sapiens
tagcacttaaaaagtttccctttgtcctttagaaagtttctgattgaataacaaaacagatgaggcaatgtaaatcaaaggctatttaagataatgatatccttttcctttagaggaatcatctgaatagtgtgaaggaaaagggactttaaaaaaacattttccccataaagtacattaaaatagacatcagaataaaatatgggcaagctttagaactatacccatccaagcactgggatcctgccaaagatactgcacaaaaaataaaggagatttttaaaattacaacaagtagaaaaaaatactttggacattcttcaaagt

SEQ ID NO: 84168 - DNA, 264 bp, Homo sapiens
aaatactggtaaacttaaattgcagagatgccttttaaaaatgcatagtaaaaatatttcatctttacttttctcttcaaatgattttaagatttttacatttttccagttgatgaataacttaaattatgagatttcatgggcataattattttctatatttattgttactttttaatattcttaatactttgcttagaaggtatttaaaagtgaaatttcaaactttttagtacaaaatttcttgaataaataaagttacaa

SEQ ID NO: 84169 - DNA, 206 bp, Homo sapiens
ctggggtttaaaccctgtgttaagccttaaattctatcctttcatcagataatacaaatgctggggttccacacttccataactttttctgattattttcaatgatcaaagtcaaagagaatcaaatacatggaccattttatcctctaaaatgaaaggacagattttctttctgtagaagaaaaagtccaggcccacgtagctca

SEQ ID NO: 84170 - DNA, 1574 bp, Homo sapiens
ggacgcgtgggtcgacccacgcgtccgggtgcgcgggcgggcggcggcaccatgcagggaagctgccaggggccgtgggcagcgccgctttctgccgcccacctggcgctgtgagactggcgctgccaccatgttccccagccctgctctcacgcccacgcccttctcagtcaaagacatcctaaacctggaacagcagcagcgcagcctggctgccgccggagagctctctgcccgcctggaggcgaccctggcgccctcctcctgcatgctggccgccttcaagccagaggcctacgctgggcccgaggcggctgcgccgggcctcccagagctgcgcgcagagctgggccgcgcgccttcaccggccaagtgtgcgtctgcctttcccgccgcccccgccttctatccacgtgcctacagcgaccccgacccagccaaggaccctagagccgaaaagaaagagctgtgcgcgctgcagaaggcggtggagctggagaagacagaggcggacaacgcggagcggccccgggcgcgacggcggaggaagccgcgcgtgctcttctcgcaggcgcaggtctatgagctggagcggcgcttcaagcagcagcggtacctgtcggcccccgaacgcgaccagctggccagcgtgctgaaactcacgtccacgcaggtcaagatctggttccagaaccggcgctacaagtgcaagcggcagcggcaggaccagactctggagctggtggggctgcccccgccgccgccgccgcctgcccgcaggatcgcggtgccagtgctggtgcgcgatggcaagccatgcctaggggactcggcgccctacgcgcctgcctacggcgtgggcctcaatccctacggttataacgcctaccccgcctatccgggttacggcggcgcggcctgcagccctggctacagctgcactgccgcttaccccgccgggccttccccagcgcagccggccactgccgccgccaacaacaacttcgtgaacttcggcgtcggggacttgaatgcggttcagagccccgggattccgcagagcaactcgggagtgtccacgctgcatggtatccgagcctggtagggaagggacccgcgtggcgcgaccctgaccgatcccacctcaacagctccctgactctcggggggagaaggggctcccaacatgaccctgagtcccctggattttgcattcactcctgcggagacctaggaactttttctgtcccacgcgcgtttgttcttgcgcacgggagagtttgtggcggcgattatgcagcgtgcaatgagtgatcctgcagcctggtgtcttagctgtccccccaggagtgccctccgagagtccatgggcacccccggttggaactgggactgagctcgggcacgcagggcctgagatctggccgcccattccgcgagccagggccgggcgcccgggcctttgctatctcgccgtcgcccgcccacgcacccacccgtatttatgtttttacctattgctgtaagaaatgacgatccccttcccattaaagagagtgcgttgaacccgcacg

SEQ ID NO: 84171 - DNA, 1620 bp, Homo sapiens
gcctggtcccgcctctcctgccccttgtgctcagcgctacctgctgcccggacacatccagagctggccgacgggtgcgcgggcgggcggcggcaccatgcagggaagctgccaggggccgtgggcagcgccgctttctgccgcccacctggcgctgtgagactggcgctgccaccatgttccccagccctgctctcacgcccacgcccttctcagtcaaagacatcctaaacctggaacagcagcagcgcagcctggctgccgccggagagctctctgcccgcctggaggcgaccctggcgccctcctcctgcatgctggccgccttcaagccagaggcctacgctgggcccgaggcggctgcgccgggcctcccagagctgcgcgcagagctgggccgcgcgccttcaccggccaagtgtgcgtctgcctttcccgccgcccccgccttctatccacgtgcctacagcgaccccgacccagccaaggaccctagagccgaaaagaaagagctgtgcgcgctgcagaaggcggtggagctggagaagacagaggcggacaacgcggagcggccccgggcgcgacggcggaggaagccgcgcgtgctcttctcgcaggcgcaggtctatgagctggagcggcgcttcaagcagcagcggtacctgtcggcccccgaacgcgaccagctggccagcgtgctgaaactcacgtccacgcaggtcaagatctggttccagaaccggcgctacaagtgcaagcggcagcggcaggaccagactctggagctggtggggctgcccccgccgccgccgccgcctgcccgcaggatcgcggtgccagtgctggtgcgcgatggcaagccatgcctaggggactcggcgccctacgcgcctgcctacggcgtgggcctcaatccctacggttataacgcctaccccgcctatccgggttacggcggcgcggcctgcagccctggctacagctgcactgccgcttaccccgccgggccttccccagcgcagccggccactgccgccgccaacaacaacttcgtgaacttcggcgtcggggacttgaatgcggttcagagccccgggattccgcagagcaactcgggagtgtccacgctgcatggtatccgagcctggtagggaagggacccgcgtggcgcgaccctgaccgatcccacctcaacagctccctgactctcggggggagaaggggctcccaacatgaccctgagtcccctggattttgcattcactcctgcggagacctaggaactttttctgtcccacgcgcgtttgttcttgcgcacgggagagtttgtggcggcgattatgcagcgtgcaatgagtgatcctgcagcctggtgtcttagctgtccccccaggagtgccctccgagagtccatgggcacccccggttggaactgggactgagctcgggcacgcagggcctgagatctggccgcccattccgcgagccagggccgggcgcccgggcctttgctatctcgccgtcgcccgcccacgcacccacccgtatttatgtttttacctattgctgtaagaaatgacgatccccttcccattaaagagagtgcgttgaacccgcacg

SEQ ID NO: 84172 - DNA, 525 bp, Homo sapiens
tcttttactcatgttaaaaatccaggctgtcaatgacattagtataatagcttattgttttatctcataactatacacacaacaatctcagaatagcaatagcgaccctaccactaacaatgtgactactgaagagagtttaagattatttttcatttttaaaacaccttttaaaggcacttggaatagttcttttctgtgtgattatgcctccaacattgtaaacatttagatttgtttcattttactttcgattttaggaattaccttttgaaatgtaattgtgttttataattacgtaaaatatttaaatgcttcaaaacccaagtctaaaatgtaaactgtatttataaaatataatttctattcctgtttttgccaccttagtctctcctgcccctatcagtaatcattaaaaaacgtttttttaatggtttaccccttgccatggtttgggtttttctacaaagcagagtctgagacaatggatgcgtgcgggtaattaatttggggacgtgaccccag

SEQ ID NO: 84173 - DNA, 322 bp, Homo sapiens
caggatcctatccctcagctgacagacaggcacaggctgctgcaactcaaaaacaaacctcccacgaccttgggtccctccctccggcaaacccagccctgcaccccgggacagccctaaatcgactccttttagaaaatacgctgcaaggccaggcgcggtggctcacgcctgtaatcccagcactttgggaggccaaagtgggcagatcacgaggtctggagttcaagaccagcctggccaagatggtgaaacctcgtctctactaaaaatacaaaaattagccgggggtggtggagggtgcctgtaatcccagctactc

SEQ ID NO: 84174 - DNA, 463 bp, Homo sapiens
atgatagggtcacagtttcttagagtcagaagagacttgagaagttatcgacggatgcacccttgtcttccctgcctcagccgggacacatccaatgcccagaagagagcaggctcatgtgtggggccatttctgtgtggattgtttgaaactttttccaaataatgaactgcagcttatttccctgtgtattctctttaatgattccagtcctgtatcctggataaaataataacatctcatttacctcttatttggaacacatgtcataattgtccatttatttgtgtgatttttgtatcattactctgttttcccttttaaacatgtgtacctcgagagtggaattgtgtctgtttttggtcattgttatttctctagtgttatcacagtgctagggaatgaataaatgaatggatgagaatgatttatcttgttccaaaaggttttaaggaagaataca

SEQ ID NO: 84175 - DNA, 416 bp, Homo sapiens
catttgagtctgggagttcaataccatcctgggtaacacagcgagaccctgtctccataaaaaatgaaaaatatacatataattcattgctatcaggaggaaatttattattaatatcaacagcattttgggaagtcttcaaagcaattaacttttaactgaagaaactatttacccaaattatatcatatgagtgggtggtatcaaaatgaattgaaatcttgaagaaactgtctccaacttggaaagagatatagagggagaatcacattaatgtatcaatctaatatatcaacctaaatgtgtcaacctttaacttttaattaattgttcccttctaattgtttttttccttctacttttaagttcaggggtacatgtgcaggatgtgcacgtttgttacataggtaaacatg

SEQ ID NO: 84176 - DNA, 469 bp, Homo sapiens
atataactctctataaccattttgcttctaccatacttactctcacattccttccctagcttgccttgccctccaaaacaaaaaagcttccaccatgaaattactaattgatattctgccttataaactttgccttgaaagattcctttgaaaaattaatttcatttcctcgatctagccaatgataaaataatgatgacagcaaacagaagtagaaacagcataattttttaaaaaaggaaacatcaaattttgtattgaaaatttacatcagcatttcactagtgaacagacatttcctctgagaaagagtgataattaccatttgcacctcatgtaaggattttcctgaggcctaagaaagctataaataatatagtttcttttgaaataaagaaaaaaaatttaattttctttcatcacgctaacaagaagtaaaataggttgcaaataatggtgtagtaaatgg

SEQ ID NO: 84177 - DNA, 418 bp, Homo sapiens
aaaaatattgcatgttatcattcatatatgggagctaaaaaaagaggatctcatgaaaatagagagtaggttgctggttaccagaggtaaggaaggaggggagagaaggtgggggatggaaataaaaaagaatgtatatggccgggcacggtgactcacgcctgtaatcctagcactttgggaggctgaggcgggcagatcacaaggccaggagtttgagaccagcctggccaacgtggcgaaacccggctctactaaaaatacaaaaattagccaggtctggtggcacatacctgtgatcccagctacttaggagactgaggcatgagaattgcttggacccaggagatggaggttgcagtgagtcgagatcgcaccactgtgctccagcctgggtgacagtcactgtgtctccaaa

SEQ ID NO: 84178 - DNA, 450 bp, Homo sapiens
gaaaaatcacacctcttccttatagaaaattccagttaatacatgtagaaagaaggaggcaaatagaaaatcattgttagagcaccatagtaataattactgcgggtaagatctacctgtgaatgctaaaattaaggagtgaaagtttaaccagaaacatgatatttgtatgatttttaaagtatctcctccaaaatatttagtaaagaaaaaggggaaatccttagttgactgtggagaatattgtcagactccacctttgccaagcaatcaagactgatatcacttggcccggtcaacatcgtatatgcccaggcgtgtttcacctctgttcttcccaataaagcataacctcaatctaaacatgcgaaaacatcagacacccaaattgagggactttgttctaaataaccggccagtgttttcaaagctgtccaggttataaaaaaa

SEQ ID NO: 84179 - DNA, 392 bp, Homo sapiens
gagatggagtcttgctctgttgcccaggctggagtgcagtggtgcgatctcggctcactgcaacctccacctcctgggttcaagtgattgttctgtctcaacctcctgagtagctgggattacaggcccccaccaccatgcctggctaatttttgtatttttagtagagacaggttttcaccatattggccaggctggtctcaaattcccgacttcaggtgatccacccacctcggcctcccaaagtgctaggattataggtgtgagccactgtgcccagcctctaaatcacttcttatgcttgtacatacttattcagtagttttcaccaaatatttaaagatgtaaaggaaatagcacacgtaaaataaggacttattttatggagagct

SEQ ID NO: 84180 - DNA, 417 bp, Homo sapiens
cggccgctcgcgatctagaactagtggccattgtaaaaggtgtatagtgatatcttgtttgaatatgctgttttctaatcacatatgatgatatataatggtttggctatgtgactcctctagatctgtagttatggccagggtggtgactcatacctataatcccagcactttgggaggctgaggtgggaggattgcttgaggccaggagtttgagaccagcttggccaacatgagactgcgactctgtctctacaaaaagaaaaaattagccagatggtggtcagcacacctgtggttccagctactcaggagaccgagtggggaggatcacttaagcctgagaggccaaggctgcagtgagctatgattgtgccacggcactcctacctgggcaacagggtgagaccctgtctc

SEQ ID NO: 84181 - DNA, 566 bp, Homo sapiens
taaataacaagaagcctgattgctggatagtatagtaaaagtatgttttggaagaaactgccaaactgtcttccatagtggctgcaccattttgcattcccacctgtagtgagtgagagttcctgttgctctacattcttgtcagcatttgatattgccagatttttggattttggccattgtaaaaggtgtatagtgatatcttgtttgaatatgctgttttctaatcacatatgatgatatataatggtttggctatgtgactcctctagatctgtagttatggccagggtggtgactcatacctataatcccagcactttgggaggctgaggtgggaggattgcttgaggccaggagtttgagaccagcttggccaacatgagactgcgactctgtctctacaaaaagaaaaaattagccagatggtggtcagcacacctgtggttccagctactcaggagaccgagtggggaggatcacttaagcctgagaggccaaggctgcagtgagctatgattgtgccacggcactcctacctgggcaacagggtgagaccctgtctc

SEQ ID NO: 84182 - DNA, 577 bp, Homo sapiens
agaaatcttttccttctattggacaactcttaactggctggaaggggccacagattccttggagaatctaataaagatttagatcttcccaagaacaaaagttttcatcttcccaaggagcttgagaacaaaactgggcaacaagccactctgcctcttctctttttctttccggtgtatctttaaacaagtttcgttcactgtactcctttgagatacaaaccatcaaaatgaatgtaatataggcaggtgctaatctcaagatcacaacttttgctttgacttttccaaatgctgcatttggatgtctgtttagccagtgactacaacttgagtccgtcctctctcaagctgccccatccctgatgtcatttctgcttaatttgctccacaactctgcttccagcttctggtctctcttaaatctacctatactcttgctagcattaattaaatgaatagaattataacacaaacagaagaacacatgtcataagcatatatttcaatgaatgtccacaaagtaaacacactgatgtccagcaggttttcattcccagtgagatcagtactatgg

SEQ ID NO: 84183 - DNA, 390 bp, Homo sapiens
caaacaaccccacaatctcagtagtttaaaacaatggctggtttcttgactgtgctatgggtccacctcagatctatgagggttctgccagacatccagaagtcccctggcttccatgatcactgaggcaggtaaaagggggagtggtaaattagacactggcttttaaaggcttcagctcagaagtggcacatgtccctgccactcatgttttactgcccaatccctacctcattcagagaagagtaaaatcctaccacacacggaagaggagaactggtatattgctgaacaccgatgacgagtccagcaatatttaagatgagttgactttgaaacacaatgaaaccttattcatttaggttactttaatctagattgagagtgaag

SEQ ID NO: 84184 - DNA, 168 bp, Homo sapiens
gggacttaccatcactccagaatccactacggaggttgaactttctccagtcgtccaggagaccccaactcagcctcctaagaaagttgtagcacaacttccagtatatcaagaggtaacagttccaacaccaggtcaggatcaagctcagcatccaatgtcacccag

SEQ ID NO: 84185 - DNA, 491 bp, Homo sapiens
catgagacagaagactgatggatgtagaagtttctaagaggacagttacgctgccatgttttgaagcaggaagacgttaccacttctcaaaggtctttaattgcctgaccactgcttctctttggaaggctgtcagggtgatggaatctcagatcacagcacagataaaatggacaaagaaagaaagatacaagaaggatgtaaaaatgtccataatgaactcatgtatcttgcggaaacctctaatctaatgagaatggattttgttgagaagattgtacaccaacaattaattattcatggcagagacatcattaagatttcattttgtttaaaggcctctaagtgacttaggaaattaggttaagctagagaagaatttcaagaaagagacaagggaaagcttttcgttatattgactttttctaatattttccagatagatattttgacttggtacataaattatactctgactaaaaatctccaat

SEQ ID NO: 84186 - DNA, 2563 bp, Homo sapiens
  misc_feature (852)..(852): n is a, c, g, or t
gtggcagggcgctggcaggtgcaggtctttgtgcattctcagagggctcttggtcgctcagggaggtggagtgtccactgttctgtgtgcctagttttgctctgggcagtgttgctgaaagggccaggttgtggtgggggcggggctgactgctaaggctccaactgcagtgtcgttggtggggcaaggtgggggtgaagtgcactcctgctgcatgagtggcagggcagggtgcacacacacacgtgggtgctggctgggtgaggcaagcaaaacctgcctgcacatggcaaagggatgtgggaagtatccatgggccccaggggaagctgcagtgtggggagggaatgggtggcactgctgcgtgtctgtgggggccaccccactgggggtctccagtggtcaagttccgtctgccagggtagaagctatgatgggggcttctaggacactcgaggctgacctgaaagcaggtactttcacactgggaccctgcaagaggccaacagattaagggatgctcaggtcagactggcctcttcttatgggcaagacctccccgcagagttcagatctgacagttgccctagggttaaagtctcctatgggagcaagttgattctaggtggatggtcatccttggctgtgctccactacagaggcccctgcaccaaaccctgtgggctccagatcagctggcttgctgcccctacaacttctttaagcagctttccctgccaactcaagtgtccctgctggctgaagggtttcctcctgctgagattccagaggcctgtgcccagagcaggttgctctctgccagttcacctaacttgtgccctcagcatattnggggtcaagaacaagtcccagtgtgtggtagccccatgcagcgttcccagattccttctccttaagccaagcttctctctgtcttccctcctctactcttggtgctttccctctgaagatctcttaggagtgcaccagtactctcagtccctccggggcagctcttctacctggctgcgtctagtcagccatcttgccccaacatctacttttataaagtcagtctcttttcacacattgcatcagtttcttcctagataagaaaatgagtgtaaatttggacttgtgggtagtcagaaagattacaagaaaagagcattaattcctatgttgataacatggaaaaccatctcaatgctgaaacttcattgtgggtacagttgtaaagcatgtgaagacaggccaggcgcggcggctcactctgtaattccagcactttgggaggccaaggcgggcagatcacttgaggtcaggagttcaagaccagcctggccaacatggtaaaaccccgtctctactaaaaatacaaaaattagccatgcatggtggtgcatgcctgtaatctcagctactcgggaggctgaggcaggaaaatcacttgaacccgggaggcggaggttgcagtgaggtaagatggcaccactacactccagcccgggcgacagagcaagactctgtgtcaaaaaaaaaaaaaaaaaaaaaaagcatgtgaagacagacattatcatgacttcaaatttgttaaggcctctaaagaaacaaatgaaatagtcgaatatggagaacagtatttagtttactttatcaaggtattggtattaaaatgatactactaggagaattgcaggagttctggggcagttctttaatatctgcaattcaccatgttaactagcatattgtaaataaaaaaaggaagatgctttccaagttaagagctgtaaagtaattcccaagttgttaagagctgtgaagtaattgagactaagaggtttgatgtactaaaaaaagttacttcattactttactgttgcttctatatgatgtaaactttaaaaattaaggctcaaattttagaaatacacagaggacaaacatacactctaaaacatgtttatttcagtctaaacaaatgttttgtttatggatattagtgtttttgagaaatcactcagaaaatgttacttcatggccttgcaatgcttgatgttagtttagcacatacaagtgcacttttatacccattgtttaggaggttttatttttaaaattttcttttggataatctcaaaacaataaaggcatttagtgagtacaaatttggaaatcccattttatttttatatctattttcattgtttatcttattgtttgagacagaaattgttaccatgtgatgatgatttccctgttgttttactgtacaaatatctgcctaattgtaaaattatgaatataaaattttaatattgtataataatctttcttggaggatttttttgttgttgttcacagcagatactgaatgtatttctctgtttggcttctttctttgaatgaatgatctcccagctttaaaaaatattactggggctgggtgcagtggcttatgcttgtaatcccagcactttgggagtatgaggtgggagaatcacttgaggcaagaagttcaagaccagcctggggaacatagtgagagcccatctctgca

SEQ ID NO: 84187 - DNA, 1531 bp, Homo sapiens
acgtcagtctccccagcacagtggatacctgcgctccaggagacagaatcaagttgagactgatataagtaccccggagttaaagcacacagtccaggagttaggaacttagcaccggtcccttaaaaccttccagaacacagtcacttggctgaatccaccttattccacagttaaaccctcaaggtcatcaaatataggatacaagaaaaaaaaattggctgggcacagtggtccatgtctgtaattccagcactttgggaggccaaggcgggcagatcacttgaggtcaggagttcaagaccagcctggccaacatggtaaaaccccgtctctactaaaaatacaaaaattagccatgcatggtggtgcatgcctgtaatctcagctactcgggaggctgaggcaggaaaatcacttgaacccgggaggcggaggttgcagtgaggtaagatggcaccactacactccagcccgggcgacagagcaagactctgtgtcaaaaaaaaaaaaaaaaaaaaaaagcatgtgaagacagacattatcatgacttcaaatttgttaaggcctctaaagaaacaaatgaaatagtcgaatatggagaacagtatttagtttactttatcaaggtattggtattaaaatgatactactaggagaattgcaggagttctggggcagttctttaatatctgcaattcaccatgttaactagcatattgtaaataaaaaaaggaagatgctttccaagttaagagctgtaaagtaattcccaagttgttaagagctgtgaagtaattgagactaagaggtttgatgtactaaaaaaagttacttcattactttactgttgcttctatatgatgtaaactttaaaaattaaggctcaaattttagaaatacacagaggacaaacatacactctaaaacatgtttatttcagtctaaacaaatgttttgtttatggatattagtgtttttgagaaatcactcagaaaatgttacttcatggccttgcaatgcttgatgttagtttagcacatacaagtgcacttttatacccattgtttaggaggttttatttttaaaattttcttttggataatctcaaaacaataaaggcatttagtgagtacaaatttggaaatcccattttatttttatatctattttcattgtttatcttattgtttgagacagaaattgttaccatgtgatgatgatttccctgttgttttactgtacaaatatctgcctaattgtaaaattatgaatataaaattttaatattgtataataatctttcttggaggatttttttgttgttgttcacagcagatactgaatgtatttctctgtttggcttctttctttgaatgaatgatctcccagctttaaaaaatattactggggctgggtgcagtggcttatgcttgtaatcccagcactttgggagtatgaggtgggagaatcacttgaggcaagaagttcaagaccagcctggggaacatagtgagagcccatctctgca

SEQ ID NO: 84188 - DNA, 218 bp, Homo sapiens
agggagagagggaaaaggctcacaaaaatgctaaccttctgaaattcatacctgcaaagggcaggcatttctattttggggggccaccaccagtcagaaaactggctcaatgaacaacgggtccagatctatcaaagcattgcttatattctaatgaattattcattctcattttgtatatgattaaactaaaattagaaaactgatgtgttccaaca

SEQ ID NO: 84189 - DNA, 433 bp, Homo sapiens
ggcctggcttctcaagccctacacaatctgccccaacccgtatcaacacacccagaacaaaaggtgcccacagaggaacccctaaatccctgctcacagtcatctgcacaaccctgtgactagccacacccccaactctgaccatatttgagaatgtctccatctctagacataaatcctagacacaagggtctatatattctcatggttacacacctacggagccagagtccccagcaaggcatgacttgagaaatctagggaaaggacccaggtcccaactaacactcagtagccaactggtccaaaatcctcgactagctattattccttgatttaagcaccagctttcctaggtaatttttttctctctctttttttttttttttttttttttgagacagagtcttgttctgtcatccaggctagagtg

SEQ ID NO: 84190 - DNA, 320 bp, Homo sapiens
tgctttctttagaaatttagggcagtgtgatgcttccagaggtctgtacaaacaccagctttcattgtgcttgggagtttccatgcctcttccttctcttcgcttagtgcacgtttctgctttttatcagtttgactgcctgagactgattccaacaacccaaactgaacgcctcagctcctccttgtcaaaggaggatgacttgtcttaacaactatttaggtgaattatttctacagtttttgaaagcaatggctctaaacaaattccactggggtgacaagtacaatacaaaggcgtagcctcgagggcttggggtt

SEQ ID NO: 84191 - DNA, 794 bp, Homo sapiens
agagaaatcacatatcatcatgattatccattctctttcctgtggttctgtttatagtccctattacttttctggcccacccatcctcctagatcttattgctgacttaggacagaattattttcttttagaccagtgtttctttgttcaagacttaagcctgtatgtgtcttttcttaacgtcccaccttgttttggtctagattttacagtattgcaaatatgccccagttttataatttaattggtgatgaagatttttctccttgcattctttttgttgtctttagtgggtttcacaggaatgagaatacaataaaaagtcttttctccatcattttcaactgaaaagccaaacagctttaagattgaattgacacagtgaaagctctctcctaataattttcattgatatgaagtacagagatatttaagggatagaatcaacagaacttgctgatttgtgggaaataggggccaagggaaggggagcaattaagggcagtcattacattttcttggcttgagatatttggatgatgatggtgccaattatttgatggagaaagtaggaagactgggttgccaagggaggatatattaagggttacattttggatttattaaaattgagaaatatctgaaatattcaactagggatttcatatattctcttggatatgagtctggaattgccatgggaggatatattaagggttacattttggatttattaaaattgagaaatatctgaaatattcaactagggacttcacatatactcttggatatga

SEQ ID NO: 84192 - DNA, 438 bp, Homo sapiens
accaactactgatcaggatatgtgaccaaaataaggaatttctaatattcaaccacataaatatctattaacataataatatttaattacatttcctcaatacagtcagagaactataggactagaggagggaacaagaaataactaaggcaagaccgggcacggtggttctcgcctgtaatcccagcactttgggaggccgaagctggtggatcatgaggtcaggaggtcgaggccagcctggccaacatggtaaaatcccgtctctactaaaaatacaaaaattcaccgggtgcggtggcaggcgcctgtaatcccagctactcgggaggctgaggcaggaatcacttgaacccaggaggcagaggttgcagtgagccgagatcatgccactccactctagcctggtaacacaacaagactcagtctcagagaaaa

SEQ ID NO: 84193 - DNA, 302 bp, Homo sapiens
taagaatcacagttccacagtcttaaatgcctattacattttttgtaataatagttcttgaggaaagtgctgaatcttgtattctgagtgttggggaactgtctctttccttaaccttggcccttgagaaaatatagctaattcacaactagcggtattaaaaaaaatgagttaacaactgctaatttatcctatagcaaagtgctagatcagagctacaacacatttaagtagaaagaaactagaaacatatatttaaccagaattaattttctagtggggctcaggataccaagaagggt

SEQ ID NO: 84194 - DNA, 421 bp, Homo sapiens
gtgagaggatcacttgagcccaagagtcggagaccagcctgggcaacacagggagacgctcactctacaaaaaatttaaaaatcagccaggcacattggcatgtgcttgtagtcccagctgctactagagaggctgaggtgggaggatagtttgggcctggtaggtcaaggctgcagtgagccatgattgtgccactgcacagagaaagatcctgactcaaaaaattaaaaataaaaataagtaaatagaacacacacaaaaaaatttttttttaaagtgtcttttgcaatcaatttttctctgatcagtgctttcaatgtatcttgattctgatacatagtgttttcaatgtcgtttttaagtttctccttttctttaggagttattaggaggttttaaaaattccaggtagatgaacct

SEQ ID NO: 84195 - DNA, 2377 bp, Homo sapiens
  misc_feature (1)..(1): n is a, c, g, or t
  misc_feature (3)..(3): n is a, c, g, or t
ngnctctcagctgcactcctgtacatccacctgtcttcaggagagcactgtttgtgtgtgcccagccccgctgcgcgctctgctcttcgcagctccccggacccgcagccatggccgacatcaagacgggcatcttcgccaagaacgtccagaagcgactcaaccgcgcgcaggaaaaggtcctccaaaagctggggaaagctgatgagacaaaagacgaacagttcgaagaatatgtccagaacttcaaacggcaagaagcagagggtaccagacttcagcgagaactccgaggatatttagcagcaatcaaaggcatgcaggaggcctccatgaagctcacagagtcgctgcatgaagtctatgagcctgactggtatgggcgggaagatgtgaaaatggttggtgagaaatgtgatgtgctgtgggaagacttccatcaaaaactcgtggatgggtccttgctaacactggatacctacctggggcaatttcctgacataaagaatcgcatcgccaagcgcagcaggaagctagtggactatgacagtgcccgccaccatctggaagctctgcagagctccaagaggaaggatgagagtcgaatctctaaggcagaagaagaatttcagaaagcacagaaagtgtttgaagagtttaacgttgacttacaagaagagttaccatcattatggtcaagacgagttggattttatgttaatactttcaaaaacgtctccagccttgaagccaagtttcataaggaaattgcggtgctttgccacaaactgtatgaagtgatgacaaaactgggtgaccagcacgccgacaaggccttcaccatccaaggagcgcccagtgattcgggtcctctccgcattgcaaagacaccatcaccgcctgaggagccttcacccctcccgagcccgacagcaagtccaaatcatacattagcacctgcgtctcccgcaccagcacggcctcggtcaccttcacagacaaggaaagggcctcctgtcccacctctacctaaagtcaccccgacaaaggaactgcagcaggagaacatcatcagtttctttgaggacaactttgttccagaaatcagtgtgacaacaccttcccagaatgaagtccctgaggtgaagaaagaggagactttgctggatctggactttgatcctttcaagcccgaggtgacacctgcaggttctgctggagtgacccactcacccatgtctcagacattgccctgggacctatggacgacaagcactgatttggtacagccggcttctggtggttcatttaatggattcacacagccccaggatacttcattattcacaatgcagacagaccagagtatgatctgcaacttggctgaatctgaacaggctccacccacagagccaaaagcagaggagcctctggctgctgtcacacctgccgttggtctggaccttggaatggacactcgggctgaggagccagtggaggaggcagtgatcatacctggagctgatgctgatgcagctgttggaaccttggtgtcagcagctgagggggccccaggagaggaagcagaggcggagaaggccactgtccctgccggggaaggagtaagtttagaggaggccaaaattggaactgaaaccactgagggtgcagagagtgcccaacctgaagcagaggagctcgaagcaacagtgcctcaggagaaggtcattccttcggtggtcatagagcctgcctccaaccatgaagaggaaggagaaaacgaaataactataggtgcagagcccaaggagaccaccgaggacgcggctcctccgggccccaccagcgagacaccggagctggctacggagcagaagcctatccaggaccctcagcccacgccttctgcaccagccatgggggctgctgaccagctagcatctgcaagggaggcctctcaggaattgcctcctggctttctctacaaggtggaaacactgcatgattttgaggcagcaaattctgatgaacttaccttacaaaggggtgatgtggtgctggtggtcccctcagattcagaagctgatcaggatgcaggctggctggtgggagtgaaggaatcagactggcttcagtacagagaccttgccacctacaaaggcctctttccagagaacttcacccgacgcttagattagggcaacaagtactgcaagaaggagctcagttacggggtttttaaaccttcatgaaaacctgaagagttcacttttgttattatgctcttaatgatttacagactgatgccagacaaaccttgggaagatgtatcaatggagcatgtgtgcaaaaaaatgtaagaggaaaaaaaaaaccg

SEQ ID NO: 84196 - DNA, 448 bp, Homo sapiens
taccttgtattttgaaagatatgttttgaaaaatgcattagtttaggtcagcggttcttgactggaagtgatctctaccccctcagaatatctggcaacatccacatacatatttggctgtcacagcagggatgtgggcaggcgttactgttatctagtgtgtagaggtcagggagacggctggacatgctacgatgcacagggcagctccatatgacaaagaatgtcctggccccaaatatcaatagtgccaagactgagaaaccctgattaagctggaggtaacttcttagatcttctagggaaggaaggagagagggaggaaggaaaggaggaaggggggaaggaggaaggaggaaggaggaagggaggagaggaaggagagaaaaaggaagaaccagtaacctatgctaatgcttttcacaaaccagatccttcaaaatacgag

SEQ ID NO: 84197 - DNA, 437 bp, Homo sapiens
tttactattttgagctatattccttctatattttgtttgttgagggtttttatcatgctgaattttaccaactgctttttctatgtctattgagatggtcatatggttttgttcctaattctatttatgggatatatcacatttattgatttgcatatgttgaaccatccttgcatccctggcacataacacatcatagcgtattatctttttgatgtgctgcttgagtcagtttgctagtattttgttgaggatttgtaatctatgttcaatagggatattggtctgtatttttggtgttgtgtccttgtctgatttgggtactggggtgatactggcctcataaaatgagtcaggaagaaatccctcatcctccattttctggaaccgtttcaggagggttggtactagttcttcataggtttggtagaattcgg

SEQ ID NO: 84198 - DNA, 4071 bp, Homo sapiens
taaggaccttcagagcatcccagggttacagcaagagccactgaggtgtggctggcagagcaactgaggagctctgcgagagtgtgccctctgagacagccctgtccgccccgcccaggtgggacctgacatacaggcggctccagccctgggcagcggcttcaagagccagagtgggaagtcaggcctctctgggaaggtcacaaggcctggggttgttcacaccacaggcacaatacagagctgtccactcttgaactggacggtctggggagaattgagaagctgcctctcactgcatggatagtggtggctgctggtttcaagcgtggttttttgctaagagccagaggcaggtcttctggagttctcaggggggccctgtgaccccctctccacaaccatggccagcatcggcttcttgctgcacctgtgcattctccacccctcccccaatggttccagctcctaaaacacctggacattccccatcctgcaccggcactgtgtttgttcagagaaaacgaagggtgtcatttcttcttttccctgtggcatcgtggatcctttacatttagcaacaacagtgtgaggctccacttccgttgaatatgagcggctgtcacacccatgagcaagtttccttgatggaagatgctgtttctccggcagaaccaaccctccaggacgaagtttcagaattggctgatggtcgtgagtgcaggtgtccctgttgtaatttgcagggaaattgactgcaggcgatagtgttgacgtccgacgtctgacaacctcctatgtgcatgtctaaatagtcacaatgaagatgaaaataaggatgatggggacggggtccaggagggccactgggaaggcactatccagaaatagtggacagaggtctggcatgtggaaaccttggatctcggtcacagggaggaaggcagctagaaatgggagggaagcttctgggtaggcaccatagtaggggaatgtctaaagacccactgctctgagatgtggtcagagaggtttctgtggactgcagatgaggcctgagccctgcctatgctcaaagccatcagggttgggggtccgcctcctcactgctcctcaacagctgtaaccctttcctgagggccccgacttttcagaataggagcagagagaagcccagacttccttccctggagtgtagacctgtgtgtgggacctgctccaggctgatccctgtccgcacaggtgggtgatgtccttggctgctgccgtcagaggcagccccctgcacagggaggggctgatcctgcctcagctgtgtggccatgtgggggcagcaggggcctgggccatagctgggggaggccagaccctgagggctttgcagggcggccagtgcagtgatgcctggcgcttccagctgagacaggagtccggacagaggtgggcagggtggatggcttcgggcagggaaggcgggtagaggctgcatgtgggggcccctgtctgcctgtccttagggtgtggattaggctctggcttctgtgatggtgcaagaggcaggatggtctccagacaccttcttgcagagtgattttgaccaatgcctttccagcaccttcccctggttatgacagggagctcccaggccaggccacatgaccccacaggtaggctgaccccatggacccactggagactttgagggcagagctcgggcacctttcatcttccttgggtggtcctcatgtcgctgtccgctcatgttcctggtgttctggcatcaccttgtgccggtgggggctgggctcccgtgaggtcctagggcagaaggaggtgcttgcagggcctctcgctgctactgggacatccacaggacctaatgtttatgtggaatctccaggctgccatcgagggctcctgagctcatcctgaggacccagggtccatctgagctggctgtgggctgagatcctggctggggccctgctgtcaacctctcctccagccctgccttgtccctgctcctgtgctttcctctcttcaggacaaatggtttgtccttatggtcccctttccactaggattttctcatcctcatctgtctatcccagccggatttaaagcagtcacttcagacaggagccacagggagcctgtgagggagtagtgcggtggtggtgagtgtggctgccctggctcccccagctcaccgtggtgctgtccttgacccacgagctgttgagaagggtgcagagcccctggcacagccaaccctgttgcccccagtgccgctgcccagcttcggccatccaggtggtgggtagacagaggagtgaaccccaaaggtgtccatgccccagttctaagccctgtggccaggtgctgtcacacagcaaaggggactttgcaggtggaattagggttagggatctaaggatgggaggggaacttggtttatctgggtgggctcagtgaccccttggaatggctgagggaggcaggagagcctggaaagattcgaagtgtcacagagatggtgccgtcattgctggcttaaagacaaggggccaggagccaacaccagaggccactccacaaccccagcgccagtcagcaaggaagccgggtgtcgctcacacaaccagaaggagctgagtttggcaacaacccaagtgagcctgaagcagattcgccccagagcctccaggcgtgagtggagcccagtccagcgacaccttggtttggcctgtgagactgagaagagagccagccacgccatgctgtgcctggggtccacagagccgggaggtcacacatgtacatcctggaagctgcccaaggtgtggccacttgtagggcagtgagaggaagccgtcgcggggaccatgctgccttctctgggctcacgactgttctggaaaggaccccatggcagacttggcaaggtctccacttcaggggcaaacatctccatcatcagcaactccaaaccccagccacttcctgggagttcaggaactgtgtttagccataatgtcccttggggtttggtgaaaaacaacttcctttttatttgtgggaaaactgtattatattgccttatttatttttaatcatgtacaatattcatgtacaaatgttagagccattcgggtaggattctctctaaattatttattgaagaggctttgtaaatagtgcaccagtgacaggtgctgcctgtttactcgtaccaaaaatgaagacaagccccacacccacctcagcccttgcttggccatgctgtggccctttggaaatgaccctgtgtgctcccctcgcgacccttgcatgcctttcatgcctgatgccgtagagtagaacacagccccggaatgcttccagttgcttgcaagggaccatgccggcccgggtggtccatgcctgcggggtgtctgtatcctgcaggaggacgcccctacagacccagcaacccaagttgccagcccgtgtttctcagactttaaagccaccagggcttctggaacacctgtcatagaagcaataactctaactctatactgtagagatgagtctggtccgaagcagattagtaatttagagataagccatgcatacaagtttgccccattctctggcttggggtggtgggaggcggggagctgccactcccaaagcctccaccccttcctgaagacccagctatgaaaccgcagttcctgtgggttgggctgcccaggctggtcagagctcagcaccccaggtctggtgagcagacagagccggcgttaaaccccgatcaggtcattgtcaccacacccttgcttggatgaggaaggaaggaggcaaaggcacccactccatccaagatccattccaattgatgagcctcagtactggcctcacactgaccaacggtggtatgctgcagtttgttggtttggtgcagagtctaaaggataacatatcaaggcttacctgtgataggccattttaaggaaatggtggcactctgaaggctgtccccattcaccttccacaatgctggtaccatcctggtagaagagccct

SEQ ID NO: 84199 - DNA, 285 bp, Homo sapiens
ctaaaaaacatttggagaaaatcctaaaaacatacctggttttcttactttgcaataaaagattaatagaggggaaaaagaacaaaacaaattatcagccaggtgtggtgggtcatgcctgtaatcccagcacttttggaaagcccagatgggcagatagcttgagcccaggagttggagacccgcctgggcaacatgacaaaatcccatttctacaaaaaaaacaaaagtacaaaaattagctgggcatggtggcatgcgtctgtgacaccagccactccagag

SEQ ID NO: 84200 - DNA, 967 bp, Homo sapiens
cacaggaaaaaaaagctcatttttaaattgtaaaagtggcatctgattcaatcttggcactgtaaataaagaaaatacgtaattaaaaaaaatccttccaattcactgcagtggaaacaaagaaaataacattccatgtagcaaaatatttaaactagcccataatataagctttgtggtattgctaaaactcagcccagtgcctaaatgaaagaatgtcataagatgaaaaaagatcagtaatcttaatcaaggaaataaatatgaatgggcttaatattcttattagaagatagaaactgtcagatttgggtagaatgcaatttgtaagaaacttgcctaaaataatacaatgtggaaaactgataccaaaaggacaggcaaggatatactataagcctctacatatattgtgaaggacttcaagttacctaagagatgagaaaggaagaggctaggcctatgattgtagggtttctggttagtccttccagattcaaatcctccatctcttcaacttggtcattaattttaactgagaattgtatgtcttacatatcttatagatctgtacatttgtttgccatcaccgcactagcagtttattagtgtatttcttttcactttaaaaacgactcaatcaaacaagtctctgttaatttataagccagtaaaaatatattcacgttatcagtatggctatccaggctgaaattcataaatgggaagactttttacttccctctttgggccagtgtctgtgctgaatattacaatgctagaaaggaaatgggtacaaagagaaagactgctaccgtgtgctaaaggcaagaacactgcaattttagttcaaaagatgcttctttccttttgcagtatcattttcgatgagggaaacataaatcctggtatacagaattggctattggctgatctacttaaaattttgtgccaagctgaaagtgct

SEQ ID NO: 84201 - DNA, 585 bp, Homo sapiens
aatggcttattgttctccctgcagattttcaccgctatgcctcctttcactctgggagtcttccagaggtcttgcactcgggagagcatgctcaggtttccccagctctacaaaatcacccagaatgccaaagacttcaacacaagggtaaataaggttgatctcagaattgtcacctcaaaaaggccctgccttccactgttcagttctggtcatctgcctatgagatatctgaagcttgaaagagaacacttgaaaatcactgagaccgtgactcccatcccagcacacacagcaagccaagtaggttacagagatttcttcttgggtgatgagttcacgccacatggggtatgttctccagttccagtgtgttgactccttcctgcttccccccatcagcccctgaggtcaatgtgggcagcagcccccatggtccaagttcaagatccgctgtggaagacttttttaggcaatcacacagccctgcatggagtcctgatgagagcttgcctaattgttgctaggtttgtcattttaaatacagtgtttctttagctagtgagtaaaattggctatatagga

SEQ ID NO: 84202 - DNA, 669 bp, Homo sapiens
atggtgtaaaataagttagaagtgatagaaaccttcaaagatatattcctggatggagagggttagaaacctttcctcttgactggtttttatttagtagtagtatttgaaaatactgatggtcatggtgataacaacaggttggaatctggaggactcttgatgggatagtgtaatattttggctcataaaatatggaattgttgccttgtcttaaatcagttttcagctggaacattttgtgacttctctggcatggtagccaccatctggccaacacagtctcctgagattcttgcagccaaagtgtctcagcattcacttgaagaaattcattttaaaaatgtctccaaatcctcaaggaccatggctagcaaaaatgtggatatgcatctgagaggcataattatcatgcccctctcattcagaaatgttctgcttcaaaggaatggcacagtgtccttcttgattttgtcactttttttttttccagttacttcttttgacattgttgaaggatgagaataagttcaaggcttcctaaggatgaaggaagcaaagggcctgcggcaaaaatataatcatgaacgattagaggagatgctatgtaaaaattggcactaaagctggattttggagcctcattagcattttagttaattgtctaga

SEQ ID NO: 84203 - DNA, 292 bp, Homo sapiens
ctctgctcctccatgggtacctacgcagaccccagagacatcccagggtccctcggacactcgcagcttcagtttcccagcattgattgcactgctctggggaacagtgcccgtccctccccaagggcccgagggcttctgggaagtgacatcctcttccaggggtggggcctgtggctgaggtctgagccaatcaggataatccctaccccttggctacagtgattggcccaaggatgggcatgtgacctgagcttgttcatcggaataaagatgaatgttttctacaaat

SEQ ID NO: 84204 - DNA, 757 bp, Homo sapiens
aggtcattttgccctggtgggcctgtgcctcaaaaatggggtttcttcccttgtgaggaagacccatgaattagtaacggaattgccaggaatgctaaaaactatctaaatgccatgtattgttttcaagctgttactcctggaaggggctgggttggcattgttttagaggttaggagccaaacatcagctcatctattctccagctgttgtttgtcctccatcttcctgcaatagtcaggcacagggtcttataaaaatgggtttgtgctgctgtatgtttcgcatcaccatcctgtggtcacctgatctcagcgtctaggtcaactttgattcctttcttcttgccctgatggccagtgacatacacagatcccatcgactctaaaaaaaaaaaaaaaaaaaaaaacaaaaaaaacaaaaaaaaaaaaaaaaaaaaaaaaaaagaaaaaaagaagaaaacaaaagacaaaaaaaaaaaaagagggggggggcgccgccaaataatctcagccgaccgagggggcggcgcaccagcaagcacgagcggccaccccgcagcattttgttgtgagaacaagagagagggggcccccactccaagaggaggcggacccccattataaacgacagcaggcgacgagggcgggcgccgatcaaaacaacgacaggggcgacggggagaaaaacagcaggcggaggacggaggacactcttgtggggagaaggaaacaccacaccaagtaggggggggcga

SEQ ID NO: 84205 - DNA, 202 bp, Homo sapiens
ttgtaaatatttgagattggtagatgctgtaggcagaggcagcataaaatgaatgaaaaatctcacatgtctgagaggtcacactgcaagtctaaccctgcctcagttggcagcagggttcatccagaggccattagatttctcgctcctgtgaacacctggaacccagtttcctgccccttcccccacttgatgtgtgtgt

SEQ ID NO: 84206 - DNA, 805 bp, Homo sapiens
tcctggtgctaacacatagactggcacatagcatctacttaagtagtagttgaatgatactgtcgatgttggctagatgcagttgcttttatgaggctaatgtcacaatatatagtttctctgttcacccccttccttagggaaacaatagagaagcctcaagttcctcaggagaaatcagaagcagaaagagaaaaaatgctatcattgtggacacttagaagtgaaatttgaaacaagaaacaacagttttctattgtgtacctacttatattctggacatagcacatcacaatcctacaacaatcctgtgcctgtgaagtcagtatgtggctcccattttacagttgaagaaagaggctaagaaaagtgaaaggctttttaagttcatacaccaagcaagttccacctgactccaaggatcatgcttttcttaatataccacactacctcctttctggatgagaacccaacccaggagtaagggatctagctgtggagctcagcaagcaagatttgtttttattgtctttagcacgaggtaaaattgtcctcagaatttcaatcaagtgttcatcagactaagtgtggctgttaatatttgggtcaggaacaggatttgaataattagtatttctcaattgagagaggaaaacctttgtcaaccaagatgcgttcctaggattcttctagaaaaaggtaaatgggaagcttttcatatctacaattttggtaagcaatattgctaatggctatttttgttctaggcctcgagctccgtttgctagtctagaaattgcatatc

SEQ ID NO: 84207 - DNA, 229 bp, Homo sapiens
atagcctcatgaaaccttttaaaattttattaaggaaatgtaaaataaaataagagtgaaatacaagtatggccatttccttggggagtactggaaggaagacatgagatggatctcatatcctgtttcattaacagtttttcacaccatgcaatttctctctgaacccctttcctgaaacaacagctgtttgctggccataggctggcctagtactggagatgggagt

SEQ ID NO: 84208 - DNA, 983 bp, Homo sapiens
gtgggtatggctgagccgctgcgtgggactgaggggagggggccgggtggacgccgcggaactgcgtcctgaggtgggagaccggaggtgggggaccactgagtctgatgtctggagggtccggttgcgggtcggagggcgtgctggaacagccgccacgcgggagccaggagcctcctgggtgcgtgtgacccacgagccggcaccgtcccgcggccctggggtctgcgaggagccctggcgccgccctccggcttcgcgctttttctagatccctagaaccccagccctccgcctacgctccgcgcccctggcctttttctggcccagggtggggttccgggagtcgtgccgaaggagcccattgccgtccttaaccggttgtaagagcctttcgtgccccggagcctttgaggcttgaatgctgagagtgtgacatggtcctttccctgcagcctggcccatttttttaaatgacatttgaaaaattattgcatcacaccagactcagaaaaggatgtctgggaacttctgaggcttgaaacatgttgaaatacagaattttgttttattcgtaatgggcataggaactaaacattttaagtgcagacatctgatggctataaaaagtttcagtgaaaccgtgctggaaatgtaaacaagaatagacttgttcattccttgattgcgctattaggtctatactaaccatattgtgtcgtcatggcatccgacgattgaaagagacccatgcttaactgcaggacttgttagcacttgaactctccttatttacccagccctttggcgttggggggcattattgccctcggtagctgacaggacgatctttcaggttttccaacaaaatcagccaaacactgcctggcatcggtggacactcttacggatatgcgcgggtcagtgggtgtaaggtgcaattgtggcacagtcggctgagacagtgggacgcatgcacgaca

SEQ ID NO: 84209 - DNA, 116 bp, Homo sapiens
cttcaaacaacctggaaagtatttttgtgaaaattaacatttttgctaactttaggtccaactgaatattttgcctcaaaattagtagagcactcttcagctcagccttgaagtca

SEQ ID NO: 84210 - DNA, 358 bp, Homo sapiens
cccgattgtttgaaacagatgggcagccctggcccttcaaggccagcctttgtggctcagaagagggcagcccagggacctggttggaatttccccatctcccaaccttcacccaccctggcataagatcatcttcatcctctcctgaggcctctgatggttttctctaaggttgagaatccctgctattattttaggaaggaaggacaacccccagaactgcagagtatcttgcttcttgctgactctggtcaagtcagcgttccacccacgaggagccttggagctgtcggacccctggctgagcgtagtgtgggtgtctgggaggtatgtgctgcccactgcagaggctggctcg

SEQ ID NO: 84211 - DNA, 213 bp, Homo sapiens
atcaagtgtaataaagatttttaatgatataccatctgttgttagagcatattatacagacaaatggatgtaagtctggaagttacaagttgaggggcactaaccgcatttatttgagtactatattttgagtagaaagtgtcacatatgaaaatcaccctcctcataagttttcagtctttgttaagtgctactactaatgatgacattgat

SEQ ID NO: 84212 - DNA, 721 bp, Homo sapiens
tggcaacttgttcgggtatccttccccagtgtggaagctttagttcttttgctctttgcaatgaatcttgctgctgctcactctttgggtccacgctgcgtttacactgtgtttatgagctgtaacactcaccacaaaggtctgcagcttcactcctgaagccagcaaagaccacgaacccaccaggaagaaggaacaactccagacacgcagccttaagagctgtaacactcactgccaaggtcttcagcttcactcctgagccagccagaccatgaacccaccagaaggaaaaaactcggaacacatcccaacatcagaaggaacaaactctggacatgccgcctttaagaactgtaacaacgcaagggtccgcggctttattcttgaagtcagtaagaccaagaacccaattccggacacgtttggacccagatggaaaggcagctcaacatctgagaagccagtcttactccctgcaggcaacagctgcttccagaaaacagccctgtaattgtcaccatcaaatccatatattttcaagggaagttggtcccacaccagaagtcatagctgaatcaccagcagtaatgcagggacatactggttgcttcttggcttttccaaccctctgccatgcttgaacatctttgtgaaagtccaggaacaacaaataagcttaaggataaaagccccccagccataccaccacaaccccctg

SEQ ID NO: 84213 - DNA, 309 bp, Homo sapiens
agggttaaaagtgattttgtatgactccttaatcatttagataaatgtatccactgagaaatgttaaataatttggccaaaactagaactagaactagaactagaactggaactggagctgtaactgtaactgtaactagaactagaactaaaactagaactagagcaagaattcaaatctgctgtatttcaggctaaagtgctcttggctacaccagaatcttttctaatttatggtttatcttcaattagcttatcattgaactcacatcccatgatgtaataaaagactccttttagattcctcaa

SEQ ID NO: 84214 - DNA, 200 bp, Homo sapiens
tttagagtgtcaaacatatattttattacattttaaatatttggaagctattttattgaaattagagcatcttaaactcgaatggcttcaaatactagctttctgaggaaaactaacaagttagcattaaaatatttctaagaaagaacaatttctattttcagttggcccaatatcttatcagcaggcagttaaagatc

SEQ ID NO: 84215 - DNA, 411 bp, Homo sapiens
  misc_feature (348)..(348): n is a, c, g, or t
  misc_feature (367)..(367): n is a, c, g, or t
  misc_feature (373)..(373): n is a, c, g, or t
tagtatcatccaacagtcaagaaaggtctggacttcacagcggggctgacgggagtttctgcctactgagtcttgcttgtactcagtggactgtgcagaccattaactacagcaatgattctggcgaggggaggctacgccaccgaggtctgcagagctgtaagttacagagctagggttggccatgctgttgaacagagtgatacatctacacccctcttagtacagttcatggtcaagctcaaatcaaaaccaaagagcaggcgaggcaacatagggaaaccgtctctacgaaaaattagtagagacagggtttcgccatgttgaccgggatggtcttgatctctngactccatgatccatccgnctcggnctcccaaagtgctgggattataggcatgagccactgtg

SEQ ID NO: 84216 - DNA, 1742 bp, Homo sapiens
  misc_feature (116)..(116): n is a, c, g, or t
  misc_feature (191)..(191): n is a, c, g, or t
  misc_feature (222)..(224): n is a, c, g, or t
  misc_feature (1011)..(1011): n is a, c, g, or t
tgagagggagtttcactcttgttgcccaggctggagtacagtggcgcgatctcagctcactcaacctccgcctcccacctgagtagctggattacaggcacctgcaccacacctgnctaatttttgtatttttagtagagatggggtttcgccatattggccaggctggtctcaaactcctgacttcaggngatccatccacctcagcttcccaaagtgctnnnattacaggtgtgagccactgcgcccgcctattcttttgcttttaatttgctgatattaacttgctatgagttatgaatcaaggtaaccaagctgattagaattgaaactaacataaaagttattaggctctgaggtggggaatctctcagggatgaagtaccaggactttgtgactttgtggccctacagtgcatgcgcagtaagagactgatggaggagtttttattatgaagaagtgggagtgccaggcctgccttcacagcaggtcctctccaaatgtgagtgtccttttttctaggaatgatcagacacttacacagctcacagccacattgccttttctctcttgcactatttggattgtagagccccagaacatgcccccagcagaataaccctggtattataacaaagcaaagccactgcataaactagtgggaaccagacatcctcttggagggttccagggtggtgcacacagacaggacctgtggaccagtcctgtgctaatacttggtggttccacggggcccttcttaaatgcaggttgccaggttcctccctgggcttgcctacttcgactcttttaaacagaggcctgagaatctgtattcttaaagcacttgggtgattgtgatgagcagccaggattggaaacctcagaacaagaatatgcttgtatccagtggttgtccctggcctgggtggagccaccaaaatgtctttggatcaggtaccaggagcaggttgaaggtgcttcttctgaagccaaggatgcttgagatngctttctaagacaatactctactctatatcttttcctatccaagttaatgctactgcctgtaacatgaagtgaaaaatcacagttgttaagagcatgtactttggtgcctgggagaactaggtcacaaatcccagtttaacatctgtgtgatcctgggcaagttacttaacttcgctgtgccttagtttctttttttgaaaaaaaaaaaagcatgagcaatgagcagaacacagtgcctggcatttggtaggctcttcaatatcattctaaatagggtgcatttgctggcacagggctctgcagatcctcctaaagaggatcctacgggaggtgagcaggggagatgaccaggcctcaggaaagcgcaagccccctttcccttaatgggtttgtccagttcaggctagatgtgcatcatggcaggaagaaagaaggcactgtcaggctgagaatgatggctcacatctgtaatcctagcattatgggaggctgaggtaggaggattgcttgagcccaggagtttgagaccagcctgggcaacatagtgaaaccctgtctctacaaaaaaaaatacaaaatgttagctgggtttggtggcaagtgcctgtagtcccagcttgggaggttgaggtgggaggattgcttgagcccagaaggtcgaggtcgaggctacattgagctgtaattgtaccactgcactctagcctgagcaaaacagtgagactcaaaa

SEQ ID NO: 84217 - DNA, 332 bp, Homo sapiens
gtggggttcaccgagacatgggcccttaaccaacttgtcagcaaagcatctgtggtattataaggtgtcctcgttgtataaatttcatagatttacaaaagatttgtcacctagattgtcaatcttgagaagactttatttattagaagatatttttaaagtgcttctgttcattaatcatttttttcagactcttttacgtatcttgcttcccttctgcagtcagtccctcaggccctagagaggaggctccctgtgcagtgtctgttgagattggctgattggatttgcattgccaggcccagccaggctttcctctgaggctgacatga

SEQ ID NO: 84218 - DNA, 259 bp, Homo sapiens
tgttcctacaaataatcccactaatcctctctctccccagctgcttccttgcctttcctgcttggctcccctctcataagcctctttctttctaattttttcagaggaacatattttacagtcccgttgcttcacctaccttgcccattgtccttgcctaaaattgtccttgactgaaatagtaagagatagttttcctctgctttttgaaatcttagcatatgttggttggttgagttaactgcttcatatttatttg

SEQ ID NO: 84219 - DNA, 678 bp, Homo sapiens
ttttttttgagacagagtctacctctgtcacccaggagttcaatggcacaatcttggctcactgcaaccttggcctccagggttcaagcagttctcctgcttcagccttctgagtagctgggactacaggtgtgcaacaccacacccagctaatttttgtatttttttagtagacacaaggtttcaccatgttggccacgctggtctcgaactcttgacctcaactgatctgcccaccttggcctcccaaataaccttaaatcttaaggttgatgcatgcctcttaatctcttggtttgcccatcagaaactgaatcatgggctcactaggagaaattgtcagtttaaaaatcctatgcttttcaaagaggttttattttggataactgttgcaattatagacctagagaagacatttaacccacccatgtttcagtttctattttcttcctcactagattattttattcacttttcaatttttaaaaattagatttattgcagactggcctcaagctcccagactatattttttagctgcattatttaggggttgaaatgccagcttttgagacttttgaaaaattcacaggctgggtgtggaggctcatgcctgtgaaggttgcagtgagctgagatcgtgccactgcactccaacctgggtgacgagagtgagac

SEQ ID NO: 84220 - DNA, 743 bp, Homo sapiens
acattcagtctcgaggttttctgctgacctatattccagttcactaataatgcttttcactgtatctaatttgcttataaatagaaaaccattgattgagttattaatttcagttatagaatagccagtgtagactccaatgcttggctccacttctccactttttcacctatttttttcaccatcttccattttcttcaacacaccagtcagagtcatttttaaagacattttaaacacctcagtggcctgtagatcttatcttctgttttttgtttctttttaatcttagttttttggcacacttggagggttttgattgaatgctagacatagtattcaggaaggcagagaggatttttttttaagtcagattttttgaggtataatttaatacagtaaaattcacctattttagttcagttctaagagtttcctctgtgacttttcctttggcccatggtttatttaaaattgtgttcttttacttccaaattatttgggatttttctagatatctttctgttcttgatttctggcttacctctatcagggtcagagaacaaacttaatatgatttcaattattttaaatttgccaatgtttattttatggcccagaatatggtctatgttggtgaaagttcaatttgaacttgaaaagaatatgttttatgctgttgtctactgaaaagtctatatataaaaaatagattaataaactgattaatagcctggttcacc

SEQ ID NO: 84221 - DNA, 353 bp, Homo sapiens
acaagatcatatcaatgcaggaaaaacatctgacaaaattcaatatacattcataattaaaactatcagaaaaaatatgaatacagaggaacttcctcagcttgataaagagcatttacaaaaaatctacagttaacattatacttaatgatgaaagactcagtgcttttacccttagatcaggaacagggcataaggctatccactcttacctctcttattcagtacggtgctaaaagttgtagctactgtaataaggcaagaaaaggaaataaaaggcacacagattgggaaggatgaaataacttcctattttcagatgacatgactgtctatatagaaaatcctaagga

SEQ ID NO: 84222 - DNA, 284 bp, Homo sapiens
ggggggcatttggtattaaaagatctagaagataaggggggaccagccaagccatctgaggcaagcagcgcaacaggaagggtgatgatgcagaacacgctcacggaagaaagcatgacgtgccacgtcagtgcagcccacgggggcagcaagacaaggaccaagaactgatgcctgggatgtggcaagggtggctttggtgaggtggtggaggtgaggactcagcacccagcatctaactgaccccacacttgtttgaagagtaaataacaaggccaggtgca

SEQ ID NO: 84223 - DNA, 463 bp, Homo sapiens
attaccttaaaaataaacatggctgtatcatcttaaaaaaatcaaagctagaagaataaaattcacctcaatccccttcagtacaaaggaatagtcatactaacactctggtgtttcttgccaggttactttcgtgcatatatattttaaggtatttattttcatagttaagtatttatttcatagttaagatcgtggtaagtattctattttatttcgtcacttttagtatttaccgttataatgtaagtgtctttttccttcatacaaatcatgcttaacaccaatataaaattccatcatgtacctcaatcatattttattgctgtttacacctatgttgaagtttattttcaatgttgtcttataaataatggtgtttagaataaagatctgcattaaagcttttttcctattttggatttttcccttaggacagattctcagaagtgaaatttgagga

SEQ ID NO: 84224 - DNA, 717 bp, Homo sapiens
acaaaggaactaatctctttattcctcttgactaacatgttgaccttcataacacacttttattccttcatcctccttgcctatctcactctctgaagtccctaacacctgtccccttgagtcacctcttacatcaactacttgcacacaaatcttcatctcaggctctactttgggcctgagagagaagaaacaagggaatagaaatacgaccaggagagtgtgttattgcagaagtaaagaggttatgtccagaaggaaggagtgggaaaaaaacttttgaatgctgctgagaggttaagacaagaactggtttggtgatgtagaaatcattggcaatacccattagaatagtgagtgtgtttgctgagaatgatggtttcctgcttcatccatgtccctgcaaaggacatgaactcatcctttgttatggctgcataatattccatggtgtatgtgtgccacattttctttatgcagtctatcattgatggtcatttgggttggttccaagactttgctattgtgaacagtgccgcaataaacataagtatgcatgtgtctttatagtagaatgatttttaatcctttgggtatatacccagtaatgagattgctgggtcaaatggtatttctggttctagatccttgaggaatctctacactgtcttccacaacagtcgaactaatttacactcccaccaacagtgtaatgga

SEQ ID NO: 84225 - DNA, 420 bp, Homo sapiens
ccttttctgtgcaaacagctcagcttgctgactttgatgcagtggtttaggccaagctttgaagtcagcccttggaggacgttcctatcagcctttgcacagatatctcccactccaaccctaagactcaatgccacctcaggactgcccctatccgcagagcttgaggcctttaggtcagccttgggaagaggtgcttgagtggggtggaagaagcccactcttgggaaatggggagcataggggaggaggaagacactgccttggaatgacactcccagagacctctgctctgcctacctgcattctgctgaaggttttgggtcaccttgttttatggtccctgtcccagcatgaagcttgcacaggaagaacagaatgaatgatgtggaaatctgttagcagtggtgtcttccagat

SEQ ID NO: 84226 - DNA, 429 bp, Homo sapiens
gggcagccctaagagaaggccccagccaagcataagggaaggagggagtttggatcagcacatcccttgaggggagtgtctgagccaaatgctgaatgctgggtaggcatttacctagagacaaagtcctggcaacagggaaagcttggaggacagagccctggtggggcagcagtgtggagcagagatgagccagactgccctgaacagcttgagttttatcctgagtccatggggagccttcagagtggttttgattatttatttgtttgcttgtttgttttgttttatgattttaaccattttaagtgttccgttcattgggattaagtacattcccaatgttgtgcaaccattactactatccgtcgccagaacagaacctctgtatcctttaacaacccccatctcctcattctctcagcccct

SEQ ID NO: 84227 - DNA, 368 bp, Homo sapiens
tgggatagatatacactgctatagaaagacctgtatgaaacactgttaagtaaaagaagcaattcgatatacataatctgattaatgataaaatattattgctatatttagcattggtgctaaaatattaatagtaaaatataaaatgctgtttattatttacatatggcattgttacagaaagtcctctaataggatacgtataaaaccaaactgtgggtagtggactacctattgaagttggatgagttaagaggcatgcaggaaaatataactttttactttctatggggctacatcactttaaatttttacaataagcataaatttatatattatttgtacagtttaatcttaaaaatcaattc

SEQ ID NO: 84228 - DNA, 4662 bp, Homo sapiens
gtgtccacgcttagcagctttctcaccgccgccaaaccttgcctgggcactgggaccgtgggtggccgcctgtccctagctgtggctgagccaagattgcacttgtgagaaggcctgacaggcagcatgggcgacatggccaatagttcaatcgagttccaccccaagccccagcagcagcgggatgtcccccaggctggaggctttgggtgcacgctggcggagctgcgcaccctcatggagctgcgaggggccgaggcgctgcagaagatcgaggaggcctacggggatgtcagcgggctctgccggaggctgaagacctcacccacagagggcctggcggacaacaccaatgacctggagaagcgcaggcagatctacgggcagaacttcatccccccaaagcaacccaagaccttcctgcagctggtgtgggaggccctgcaggacgtgaccctcatcatcctggaggtggctgccatcgtctctctgggcctctcgttctatgcgccgccaggagaggagagtgaagcctgtgggaatgtgtcgggaggcgcagaagatgagggcgaggccgaagctggctggatcgagggggctgccatcctgctgtccgtcatctgtgtggtgctggtcacggccttcaatgactggagcaaggagaagcagttccgaggcctgcagagccgaattgagcaggagcagaagttcacggtcatccggaacgggcagctcctccaggtccccgtggctgcgctggtggtgggggacattgcccaggtcaagtacggcgacctgctgccagccgacggcgtgctcatccaggccaatgacctcaagatcgacgagagctccctgacgggcgagtctgaccacgtgcgcaagtcagctgacaaagatcccatgctgctctcaggcactcatgtcatggaaggttctggaagaatggtggtgaccgccgttggcgtgaattcccagacaggcatcatcttcacgctgcttggagctggcggagaggaggaagagaagaaagataagaaaggcaagcagcaggatggggccatggagagtagccagaccaaagctaagaagcaggatggtgcagtggccatggagatgcagcccctgaagagcgcggagggtggggagatggaggagcgggagaagaagaaagccaacgcacccaaaaaggagaagtctgtccttcaggggaagctcacaaagctagccgtgcagatcgggaaagcagggctggtgatgtctgccatcaccgtcatcatcctggtcctctactttgtgattgagacgtttgtcgtggaaggccggacatggctggcagagtgcacgccggtctatgtacaatacttcgtgaagttcttcatcattggtgtcactgtgctggtcgtggctgtcccagagggcctgcctcttgctgtcaccatctccttagcttactctgtcaagaaaatgatgaaagacaacaacctggtgcgccacctggatgcctgcgagaccatgggcaacgccacagccatctgctccgacaagacgggcacgctcaccaccaaccgtatgaccgtggtccagtcctacctaggggacacccactacaaagagattccggcccccagcgccctgacccctaagatcctcgacctcctggtccatgccatctccatcaacagtgcctataccaccaaaatactacctcctgagaaggaaggcgccctcccacgccaggtgggcaataagacggagtgcgccctgctgggcttcgtcttggacctgaagcgggacttccagcccgtgcgcgagcagatcccggaagacaagctttacaaagtgtacaccttcaactcggtccgaaagtccatgagcacagtcgtccgcatgcccgacggtggcttccgcctcttcagcaagggggcctcagagatcctcttgaaaaagtgcaccaacatcttgaacagcaatggcgaactccggggctttcggcctcgggaccgggacgacatggtgaggaagatcatcgagccgatggcttgcgatggcctccgcaccatttgcatcgcctaccgggacttctatgcaggccaggagcccgactgggacaacgagaatgaggtcgtgggtgacctcacctgcatagctgtcgtgggcattgaggaccctgtgcggcccgaggtccctgaagctatccgaaaatgccagcgtgctggcatcacagtccgcatggtaactggggacaacatcaacacggcccgggccatcgcagccaaatgcggcatcatccagcccggggaggacttcctgtgcctagaagggaaggagttcaaccggcggatccgcaatgagaaaggcgagatagaacaggagcggctggacaaggtgtggcccaagctgagggtgctggcccggtcgtctcccaccgacaagcacacactggtcaaagggattatcgacagcaccactggtgagcagcggcaggtggtggctgtgacaggggatggcaccaacgatgggccggccctcaagaaggcggacgtgggcttcgccatgggcatcgcagggaccgacgtggccaaggaggcctccgacatcatcctgaccgatgacaacttcaccagcatcgtcaaggcagtcatgtggggccgtaacgtctatgacagcatctccaagttcctgcagtttcaactgacggtcaatgtggtggctgtcatcgtggccttcacaggtgcctgcattactcaggactctcctctcaaagccgtgcagatgttgtgggtgaacttgatcatggacacatttgcctctctggccctggcgacggagccacccacagagtcgctgctgctgcggaagccgtacggccgcgacaagcccctcatctcccgcaccatgatgaagaacatcctgggccacgccgtgtaccagctcgccatcatcttcaccctgctgtttgtcggggagctcttcttcgacatcgacagcgggaggaatgcgcccctgcactcgccaccctcagagcactacaccatcatcttcaacacgttcgtcatgatgcagctctttaacgagatcaacgcccgcaagatccacggcgagaggaacgtgttcgacggcatcttcagcaaccccatcttctgcaccatcgttttgggcactttcgggattcagattgtcatcgtccagtttggcgggaagcccttcagctgctccccactgtccacagaacagtggctctggtgcctgtttgttggtgttggggagctggtctggggacaggtcattgccaccatccccaccagccagctcaagtgcctgaaggaagccgggcacgggcccgggaaggacgagatgaccgacgaggagctggccgaaggcgaggaagagatcgaccatgccgagcgggagctccgcaggggccagatcctctggttccggggcctgaaccggattcagacgcagatggaggtagtgagtaccttcaagagaagcggttcagttcagggtgctgtgcgccggcggtcttcggtcctcagccagcttcatgacgtaaccaatctttctacccctactcacgcaattctctctgctgccaatcctaccagtgctgctgggaatccgggtggtgaaagcgttccgtagctcgctctatgaaggcctggagaaaccagaatccaagacctccattcacaacttcatggccacgcccgagtttctgatcaatgactacacccacaacatcccgctcattgacgacacggacgtggacgagaacgaggagcgcctccgggcccccccgcccccgtcccccaaccagaacaacaacgccatagacagcggcatctacctgaccacgcatgtcaccaagtcagctacctcttcagtgttttcctccagtcccgggagcccgctccacagcgtggagacgtccctctaacaagaacttgcctcagcacatgcgcacacgcacactcggactcacacgaagtcacacgcacacatgcacgcacacacacatatggggacctgcgcacctgcaaaacgagggaacaactaaggtggctgaagacctttctggcagggcatttgcaaggacccaaatccattcaacaagggtgcagcctgccacaggctcctcatccggactgaggaagacgaggacagggaggaggaaaaggaggaagaggaggacaaaaagggggaggagaaggttcttcgtccaaaggaggaaggagaagaagtagaaagtgcgaagagctgagttccccacctttttttctattgatgcttcttttttaacaaactacagttttaccgtgtgtttgccatttgagctgtgtggtgggcagggggctggtttgggtttatggggagcttttgttgcacccatgcaggggcaatcagatcagcatcttcatgcaaaaaaaaaaaaaaagttgagtgctctgcaggcctgtgaagggtgccacctgagggagccgcctgcaagcggccctgcagccacaaagcaacccgccctctgcaaaaactaggcacatccgcagtgcgcatgtgtgtgcgtgcatgcacatatgtgtatgtgtgtggatctgtacacacacacgtatatatggccagatgcgtatttcaataaggaactatttactggcatgatat

SEQ ID NO: 84229 - DNA, 4508 bp, Homo sapiens
gtgtccacgcttagcagctttctcaccgccgccaaaccttgcctgggcactgggaccgtgggtggccgcctgtccctagctgtggctgagccaagattgcacttgtgagaaggcctgacaggcagcatgggcgacatggccaatagttcaatcgagttccaccccaagccccagcagcagcgggatgtcccccaggctggaggctttgggtgcacgctggcggagctgcgcaccctcatggagctgcgaggggccgaggcgctgcagaagatcgaggaggcctacggggatgtcagcgggctctgccggaggctgaagacctcacccacagagggcctggcggacaacaccaatgacctggagaagcgcaggcagatctacgggcagaacttcatccccccaaagcaacccaagaccttcctgcagctggtgtgggaggccctgcaggacgtgaccctcatcatcctggaggtggctgccatcgtctctctgggcctctcgttctatgcgccgccaggagaggagagtgaagcctgtgggaatgtgtcgggaggcgcagaagatgagggcgaggccgaagctggctggatcgagggggctgccatcctgctgtccgtcatctgtgtggtgctggtcacggccttcaatgactggagcaaggagaagcagttccgaggcctgcagagccgaattgagcaggagcagaagttcacggtcatccggaacgggcagctcctccaggtccccgtggctgcgctggtggtgggggacattgcccaggtcaagtacggcgacctgctgccagccgacggcgtgctcatccaggccaatgacctcaagatcgacgagagctccctgacgggcgagtctgaccacgtgcgcaagtcagctgacaaagatcccatgctgctctcaggcactcatgtcatggaaggttctggaagaatggtggtgaccgccgttggcgtgaattcccagacaggcatcatcttcacgctgcttggagctggcggagaggaggaagagaagaaagataagaaaggcaagcagcaggatggggccatggagagtagccagaccaaagctaagaagcaggatggtgcagtggccatggagatgcagcccctgaagagcgcggagggtggggagatggaggagcgggagaagaagaaagccaacgcacccaaaaaggagaagtctgtccttcaggggaagctcacaaagctagccgtgcagatcgggaaagcagggctggtgatgtctgccatcaccgtcatcatcctggtcctctactttgtgattgagacgtttgtcgtggaaggccggacatggctggcagagtgcacgccggtctatgtacaatacttcgtgaagttcttcatcattggtgtcactgtgctggtcgtggctgtcccagagggcctgcctcttgctgtcaccatctccttagcttactctgtcaagaaaatgatgaaagacaacaacctggtgcgccacctggatgcctgcgagaccatgggcaacgccacagccatctgctccgacaagacgggcacgctcaccaccaaccgtatgaccgtggtccagtcctacctaggggacacccactacaaagagattccggcccccagcgccctgacccctaagatcctcgacctcctggtccatgccatctccatcaacagtgcctataccaccaaaatactacctcctgagaaggaaggcgccctcccacgccaggtgggcaataagacggagtgcgccctgctgggcttcgtcttggacctgaagcgggacttccagcccgtgcgcgagcagatcccggaagacaagctttacaaagtgtacaccttcaactcggtccgaaagtccatgagcacagtcgtccgcatgcccgacggtggcttccgcctcttcagcaagggggcctcagagatcctcttgaaaaagtgcaccaacatcttgaacagcaatggcgaactccggggctttcggcctcgggaccgggacgacatggtgaggaagatcatcgagccgatggcttgcgatggcctccgcaccatttgcatcgcctaccgggacttctatgcaggccaggagcccgactgggacaacgagaatgaggtcgtgggtgacctcacctgcatagctgtcgtgggcattgaggaccctgtgcggcccgaggtccctgaagctatccgaaaatgccagcgtgctggcatcacagtccgcatggtaactggggacaacatcaacacggcccgggccatcgcagccaaatgcggcatcatccagcccggggaggacttcctgtgcctagaagggaaggagttcaaccggcggatccgcaatgagaaaggcgagatagaacaggagcggctggacaaggtgtggcccaagctgagggtgctggcccggtcgtctcccaccgacaagcacacactggtcaaagggattatcgacagcaccactggtgagcagcggcaggtggtggctgtgacaggggatggcaccaacgatgggccggccctcaagaaggcggacgtgggcttcgccatgggcatcgcagggaccgacgtggccaaggaggcctccgacatcatcctgaccgatgacaacttcaccagcatcgtcaaggcagtcatgtggggccgtaacgtctatgacagcatctccaagttcctgcagtttcaactgacggtcaatgtggtggctgtcatcgtggccttcacaggtgcctgcattactcaggactctcctctcaaagccgtgcagatgttgtgggtgaacttgatcatggacacatttgcctctctggccctggcgacggagccacccacagagtcgctgctgctgcggaagccgtacggccgcgacaagcccctcatctcccgcaccatgatgaagaacatcctgggccacgccgtgtaccagctcgccatcatcttcaccctgctgtttgtcggggagctcttcttcgacatcgacagcgggaggaatgcgcccctgcactcgccaccctcagagcactacaccatcatcttcaacacgttcgtcatgatgcagctctttaacgagatcaacgcccgcaagatccacggcgagaggaacgtgttcgacggcatcttcagcaaccccatcttctgcaccatcgttttgggcactttcgggattcagattgtcatcgtccagtttggcgggaagcccttcagctgctccccactgtccacagaacagtggctctggtgcctgtttgttggtgttggggagctggtctggggacaggtcattgccaccatccccaccagccagctcaagtgcctgaaggaagccgggcacgggcccgggaaggacgagatgaccgacgaggagctggccgaaggcgaggaagagatcgaccatgccgagcgggagctccgcaggggccagatcctctggttccggggcctgaaccggattcagacgcagatccgggtggtgaaagcgttccgtagctcgctctatgaaggcctggagaaaccagaatccaagacctccattcacaacttcatggccacgcccgagtttctgatcaatgactacacccacaacatcccgctcattgacgacacggacgtggacgagaacgaggagcgcctccgggcccccccgcccccgtcccccaaccagaacaacaacgccatagacagcggcatctacctgaccacgcatgtcaccaagtcagctacctcttcagtgttttcctccagtcccgggagcccgctccacagcgtggagacgtccctctaacaagaacttgcctcagcacatgcgcacacgcacactcggactcacacgaagtcacacgcacacatgcacgcacacacacatatggggacctgcgcacctgcaaaacgagggaacaactaaggtggctgaagacctttctggcagggcatttgcaaggacccaaatccattcaacaagggtgcagcctgccacaggctcctcatccggactgaggaagacgaggacagggaggaggaaaaggaggaagaggaggacaaaaagggggaggagaaggttcttcgtccaaaggaggaaggagaagaagtagaaagtgcgaagagctgagttccccacctttttttctattgatgcttcttttttaacaaactacagttttaccgtgtgtttgccatttgagctgtgtggtgggcagggggctggtttgggtttatggggagcttttgttgcacccatgcaggggcaatcagatcagcatcttcatgcaaaaaaaaaaaaaaagttgagtgctctgcaggcctgtgaagggtgccacctgagggagccgcctgcaagcggccctgcagccacaaagcaacccgccctctgcaaaaactaggcacatccgcagtgcgcatgtgtgtgcgtgcatgcacatatgtgtatgtgtgtggatctgtacacacacacgtatatatggccagatgcgtatttcaataaggaactatttactggcatgatat

SEQ ID NO: 84230 - DNA, 1269 bp, Homo sapiens
cagacgcaggtgtgttgggacggaaaaaaaatgttgagaactaccgaagtaggataaggaagtattgccaaacacatggaggtagtgagtaccttcaagagaagcggttcagttcagggtgctgtgcgccggcggtcttcggtcctcagccagcttcatgacgtaaccaatctttctacccctactcacgcaattctctctgctgccaatcctaccagtgctgctgggaatccgggtggtgaaagcgttccgtagctcgctctatgaaggcctggagaaaccagaatccaagacctccattcacaacttcatggccacgcccgagtttctgatcaatgactacacccacaacatcccgctcattgacgacacggacgtggacgagaacgaggagcgcctccgggcccccccgcccccgtcccccaaccagaacaacaacgccatagacagcggcatctacctgaccacgcatgtcaccaagtcagctacctcttcagtgttttcctccagtcccgggagcccgctccacagcgtggagacgtccctctaacaagaacttgcctcagcacatgcgcacacgcacactcggactcacacgaagtcacacgcacacatgcacgcacacacacatatggggacctgcgcacctgcaaaacgagggaacaactaaggtggctgaagacctttctggcagggcatttgcaaggacccaaatccattcaacaagggtgcagcctgccacaggctcctcatccggactgaggaagacgaggacagggaggaggaaaaggaggaagaggaggacaaaaagggggaggagaaggttcttcgtccaaaggaggaaggagaagaagtagaaagtgcgaagagctgagttccccacctttttttctattgatgcttcttttttaacaaactacagttttaccgtgtgtttgccatttgagctgtgtggtgggcagggggctggtttgggtttatggggagcttttgttgcacccatgcaggggcaatcagatcagcatcttcatgcaaaaaaaaaaaaaaagttgagtgctctgcaggcctgtgaagggtgccacctgagggagccgcctgcaagcggccctgcagccacaaagcaacccgccctctgcaaaaactaggcacatccgcagtgcgcatgtgtgtgcgtgcatgcacatatgtgtatgtgtgtggatctgtacacacacacgtatatatggccagatgcgtatttcaataaggaactatttactggcatgatat

SEQ ID NO: 84231 - DNA, 4595 bp, Homo sapiens
gtgtccacgcttagcagctttctcaccgccgccaaaccttgcctgggcactgggaccgtgggtggccgcctgtccctagctgtggctgagccaagattgcacttgtgagaaggcctgacaggcagcatgggcgacatggccaatagttcaatcgagttccaccccaagccccagcagcagcgggatgtcccccaggctggaggctttgggtgcacgctggcggagctgcgcaccctcatggagctgcgaggggccgaggcgctgcagaagatcgaggaggcctacggggatgtcagcgggctctgccggaggctgaagacctcacccacagagggcctggcggacaacaccaatgacctggagaagcgcaggcagatctacgggcagaacttcatccccccaaagcaacccaagaccttcctgcagctggtgtgggaggccctgcaggacgtgaccctcatcatcctggaggtggctgccatcgtctctctgggcctctcgttctatgcgccgccaggagaggagagtgaagcctgtgggaatgtgtcgggaggcgcagaagatgagggcgaggccgaagctggctggatcgagggggctgccatcctgctgtccgtcatctgtgtggtgctggtcacggccttcaatgactggagcaaggagaagcagttccgaggcctgcagagccgaattgagcaggagcagaagttcacggtcatccggaacgggcagctcctccaggtccccgtggctgcgctggtggtgggggacattgcccaggtcaagtacggcgacctgctgccagccgacggcgtgctcatccaggccaatgacctcaagatcgacgagagctccctgacgggcgagtctgaccacgtgcgcaagtcagctgacaaagatcccatgctgctctcaggcactcatgtcatggaaggttctggaagaatggtggtgaccgccgttggcgtgaattcccagacaggcatcatcttcacgctgcttggagctggcggagaggaggaagagaagaaagataagaaaggcaagcagcaggatggggccatggagagtagccagaccaaagctaagaagcaggatggtgcagtggccatggagatgcagcccctgaagagcgcggagggtggggagatggaggagcgggagaagaagaaagccaacgcacccaaaaaggagaagtctgtccttcaggggaagctcacaaagctagccgtgcagatcgggaaagcagggctggtgatgtctgccatcaccgtcatcatcctggtcctctactttgtgattgagacgtttgtcgtggaaggccggacatggctggcagagtgcacgccggtctatgtacaatacttcgtgaagttcttcatcattggtgtcactgtgctggtcgtggctgtcccagagggcctgcctcttgctgtcaccatctccttagcttactctgtcaagaaaatgatgaaagacaacaacctggtgcgccacctggatgcctgcgagaccatgggcaacgccacagccatctgctccgacaagacgggcacgctcaccaccaaccgtatgaccgtggtccagtcctacctaggggacacccactacaaagagattccggcccccagcgccctgacccctaagatcctcgacctcctggtccatgccatctccatcaacagtgcctataccaccaaaatactacctcctgagaaggaaggcgccctcccacgccaggtgggcaataagacggagtgcgccctgctgggcttcgtcttggacctgaagcgggacttccagcccgtgcgcgagcagatcccggaagacaagctttacaaagtgtacaccttcaactcggtccgaaagtccatgagcacagtcgtccgcatgcccgacggtggcttccgcctcttcagcaagggggcctcagagatcctcttgaaaaagtgcaccaacatcttgaacagcaatggcgaactccggggctttcggcctcgggaccgggacgacatggtgaggaagatcatcgagccgatggcttgcgatggcctccgcaccatttgcatcgcctaccgggacttctatgcaggccaggagcccgactgggacaacgagaatgaggtcgtgggtgacctcacctgcatagctgtcgtgggcattgaggaccctgtgcggcccgaggtccctgaagctatccgaaaatgccagcgtgctggcatcacagtccgcatggtaactggggacaacatcaacacggcccgggccatcgcagccaaatgcggcatcatccagcccggggaggacttcctgtgcctagaagggaaggagttcaaccggcggatccgcaatgagaaaggcgagatagaacaggagcggctggacaaggtgtggcccaagctgagggtgctggcccggtcgtctcccaccgacaagcacacactggtcaaagggattatcgacagcaccactggtgagcagcggcaggtggtggctgtgacaggggatggcaccaacgatgggccggccctcaagaaggcggacgtgggcttcgccatgggcatcgcagggaccgacgtggccaaggaggcctccgacatcatcctgaccgatgacaacttcaccagcatcgtcaaggcagtcatgtggggccgtaacgtctatgacagcatctccaagttcctgcagtttcaactgacggtcaatgtggtggctgtcatcgtggccttcacaggtgcctgcattactcaggactctcctctcaaagccgtgcagatgttgtgggtgaacttgatcatggacacatttgcctctctggccctggcgacggagccacccacagagtcgctgctgctgcggaagccgtacggccgcgacaagcccctcatctcccgcaccatgatgaagaacatcctgggccacgccgtgtaccagctcgccatcatcttcaccctgctgtttgtcggggagctcttcttcgacatcgacagcgggaggaatgcgcccctgcactcgccaccctcagagcactacaccatcatcttcaacacgttcgtcatgatgcagctctttaacgagatcaacgcccgcaagatccacggcgagaggaacgtgttcgacggcatcttcagcaaccccatcttctgcaccatcgttttgggcactttcgggattcagattgtcatcgtccagtttggcgggaagcccttcagctgctccccactgtccacagaacagtggctctggtgcctgtttgttggtgttggggagctggtctggggacaggtcattgccaccatccccaccagccagctcaagtgcctgaaggaagccgggcacgggcccgggaaggacgagatgaccgacgaggagctggccgaaggcgaggaagagatcgaccatgccgagcgggagctccgcaggggccagatcctctggttccggggcctgaaccggattcagacgcagatggaggtagtgagtaccttcaagagaagcggttcagttcagggtgctgtgcgccggcggtcttcggtcctcagccagcttcatgacatccgggtggtgaaagcgttccgtagctcgctctatgaaggcctggagaaaccagaatccaagacctccattcacaacttcatggccacgcccgagtttctgatcaatgactacacccacaacatcccgctcattgacgacacggacgtggacgagaacgaggagcgcctccgggcccccccgcccccgtcccccaaccagaacaacaacgccatagacagcggcatctacctgaccacgcatgtcaccaagtcagctacctcttcagtgttttcctccagtcccgggagcccgctccacagcgtggagacgtccctctaacaagaacttgcctcagcacatgcgcacacgcacactcggactcacacgaagtcacacgcacacatgcacgcacacacacatatggggacctgcgcacctgcaaaacgagggaacaactaaggtggctgaagacctttctggcagggcatttgcaaggacccaaatccattcaacaagggtgcagcctgccacaggctcctcatccggactgaggaagacgaggacagggaggaggaaaaggaggaagaggaggacaaaaagggggaggagaaggttcttcgtccaaaggaggaaggagaagaagtagaaagtgcgaagagctgagttccccacctttttttctattgatgcttcttttttaacaaactacagttttaccgtgtgtttgccatttgagctgtgtggtgggcagggggctggtttgggtttatggggagcttttgttgcacccatgcaggggcaatcagatcagcatcttcatgcaaaaaaaaaaaaaaagttgagtgctctgcaggcctgtgaagggtgccacctgagggagccgcctgcaagcggccctgcagccacaaagcaacccgccctctgcaaaaactaggcacatccgcagtgcgcatgtgtgtgcgtgcatgcacatatgtgtatgtgtgtggatctgtacacacacacgtatatatggccagatgcgtatttcaataaggaactatttactggcatgatat

SEQ ID NO: 84232 - DNA, 396 bp, Homo sapiens
tgcgcaccctcatggagctgcgaggggccgaggcgctgcagaagatcgaggaggcctacggggatgtcagcgggctctgccggaggctgaagacctcacccacagagggtaagtccctctcaggctgcatgccacccagccctgctcccagccttcagaggagcgacctgaaggcatccttagccccaaggctggccagggtcaagggccacctgtgcccctcctctcagccatttcccttgagggggagatgccctgggtaacctgacctgaccccctcatctccacacctccacaatcaggagttctccgctctatagagcgagactggggagggggagatgggaacttcatgggacacacacacaggcggaatgggccccaaacagaaaccct

SEQ ID NO: 84233 - DNA, 3825 bp, Homo sapiens
gtgtccacgcttagcagctttctcaccgccgccaaaccttgcctgggcactgggaccgtgggtggccgcctgtccctagctgtggctgagccaagattgcacttgtgagaaggcctgacaggcagcatgggcgacatggccaatagttcaatcgagttccaccccaagccccagcagcagcgggatgtcccccaggctggaggctttgggtgcacgctggcggagctgcgcaccctcatggagctgcgaggggccgaggcgctgcagaagatcgaggaggcctacggggatgtcagcgggctctgccggaggctgaagacctcacccacagagggcctggcggacaacaccaatgacctggagaagcgcaggcagatctacgggcagaacttcatccccccaaagcaacccaagaccttcctgcagctggtgtgggaggccctgcaggacgtgaccctcatcatcctggaggtggctgccatcgtctctctgggcctctcgttctatgcgccgccaggagaggagagtgaagcctgtgggaatgtgtcgggaggcgcagaagatgagggcgaggccgaagctggctggatcgagggggctgccatcctgctgtccgtcatctgtgtggtgctggtcacggccttcaatgactggagcaaggagaagcagttccgaggcctgcagagccgaattgagcaggagcagaagttcacggtcatccggaacgggcagctcctccaggtccccgtggctgcgctggtggtgggggacattgcccaggtcaagtacggcgacctgctgccagccgacggcgtgctcatccaggccaatgacctcaagatcgacgagagctccctgacgggcgagtctgaccacgtgcgcaagtcagctgacaaagatcccatgctgctctcaggcactcatgtcatggaaggttctggaagaatggtggtgaccgccgttggcgtgaattcccagacaggcatcatcttcacgctgcttggagctggcggagaggaggaagagaagaaagataagaaaggcaagcagcaggatggggccatggagagtagccagaccaaagctaagaagcaggatggtgcagtggccatggagatgcagcccctgaagagcgcggagggtggggagatggaggagcgggagaagaagaaagccaacgcacccaaaaaggagaagtctgtccttcaggggaagctcacaaagctagccgtgcagatcgggaaagcagggctggtgatgtctgccatcaccgtcatcatcctggtcctctactttgtgattgagacgtttgtcgtggaaggccggacatggctggcagagtgcacgccggtctatgtacaatacttcgtgaagttcttcatcattggtgtcactgtgctggtcgtggctgtcccagagggcctgcctcttgctgtcaccatctccttagcttactctgtcaagaaaatgatgaaagacaacaacctggtgcgccacctggatgcctgcgagaccatgggcaacgccacagccatctgctccgacaagacgggcacgctcaccaccaaccgtatgaccgtggtccagtcctacctaggggacacccactacaaagagattccggcccccagcgccctgacccctaagatcctcgacctcctggtccatgccatctccatcaacagtgcctataccaccaaaatactacctcctgagaaggaaggcgccctcccacgccaggtgggcaataagacggagtgcgccctgctgggcttcgtcttggacctgaagcgggacttccagcccgtgcgcgagcagatcccggaagacaagctttacaaagtgtacaccttcaactcggtccgaaagtccatgagcacagtcgtccgcatgcccgacggtggcttccgcctcttcagcaagggggcctcagagatcctcttgaaaaagtgcaccaacatcttgaacagcaatggcgaactccggggctttcggcctcgggaccgggacgacatggtgaggaagatcatcgagccgatggcttgcgatggcctccgcaccatttgcatcgcctaccgggacttctatgcaggccaggagcccgactgggacaacgagaatgaggtcgtgggtgacctcacctgcatagctgtcgtgggcattgaggaccctgtgcggcccgaggtccctgaagctatccgaaaatgccagcgtgctggcatcacagtccgcatggtaactggggacaacatcaacacggcccgggccatcgcagccaaatgcggcatcatccagcccggggaggacttcctgtgcctagaagggaaggagttcaaccggcggatccgcaatgagaaaggcgagatagaacaggagcggctggacaaggtgtggcccaagctgagggtgctggcccggtcgtctcccaccgacaagcacacactggtcaaagggattatcgacagcaccactggtgagcagcggcaggtggtggctgtgacaggggatggcaccaacgatgggccggccctcaagaaggcggacgtgggcttcgccatgggcatcgcagggaccgacgtggccaaggaggcctccgacatcatcctgaccgatgacaacttcaccagcatcgtcaaggcagtcatgtggggccgtaacgtctatgacagcatctccaagttcctgcagtttcaactgacggtcaatgtggtggctgtcatcgtggccttcacaggtgcctgcattactcaggactctcctctcaaagccgtgcagatgttgtgggtgaacttgatcatggacacatttgcctctctggccctggcgacggagccacccacagagtcgctgctgctgcggaagccgtacggccgcgacaagcccctcatctcccgcaccatgatgaagaacatcctgggccacgccgtgtaccagctcgccatcatcttcaccctgctgtttgtcggggagctcttcttcgacatcgacagcgggaggaatgcgcccctgcactcgccaccctcagagcactacaccatcatcttcaacacgttcgtcatgatgcagctctttaacgagatcaacgcccgcaagatccacggcgagaggaacgtgttcgacggcatcttcagcaaccccatcttctgcaccatcgttttgggcactttcgggattcagattgtcatcgtccagtttggcgggaagcccttcagctgctccccactgtccacagaacagtggctctggtgcctgtttgttggtgttggggagctggtctggggacaggtcattgccaccatccccaccagccagctcaagtgcctgaaggaagccgggcacgggcccgggaaggacgagatgaccgacgaggagctggccgaaggcgaggaagagatcgaccatgccgagcgggagctccgcaggggccagatcctctggttccggggcctgaaccggattcagacgcagatggaggtagtgagtaccttcaagagaagcggttcagttcagggtgctgtgcgccggcggtcttcggtcctcagccagcttcatgacgtaaccaatctttctacccctactcacgcaattctctctgctgccaatcctaccagtgctgctgggagtgagtcttgacttcccttttctctcataaatggcatctctggggaagaataagcctccccagctcggccttctctcttttgcagtcttgcattccgctcaccgtggcttttctgttctttctttaccgccctgtccagtccttcccgcccagacggtgtctctcgaaagccatattcttttatgaaacgtattcaacccatg

SEQ ID NO: 84234 - DNA, 442 bp, Homo sapiens
acacaggaagacttgcaatctggtagctattgcttctgtactacagataaattaaaaacaaacaaaatttgaggtcagcaaaactgataacccttgataaaatttccaaagttctcttacatagttcaatgattttcttaactaccttctcaaggactcccataaattaatccgaaataactgtttgaatactatttatctcaatatctttgttcttgtgacttatcagagaatgaaagatggtaaaaagaacaataatatcttttaatagtcttcagagtaattttaggagatgaaatataattttatgactttttttactttttacgaacatatggagatatatacacactaatacaagtttcaaatgtattactgaataactgattaaatgtgggttttgtttacattcttttaaatgagaattaaggaaagaaaaaaa

SEQ ID NO: 84235 - DNA, 175 bp, Homo sapiens
  misc_feature (2)..(2): n is a, c, g, or t
  misc_feature (173)..(173): n is a, c, g, or t
antcctgaacatcatcataaaaagacagtcaccagtcctgctcatctggaggactgttctcacaatcttcagcaaggagataaaacagagtactgcagagatgaagtaacttgccctaagacccatacctgagtataattttctgaatgtgcagttcaaccacttcatactgnag

SEQ ID NO: 84236 - DNA, 1701 bp, Homo sapiens
ccgggttcggtgctcccgcgggcactggttctcaaagccttctccagcagctcgctggacgcgtcctctgacagctcgcccgtggcttctccttccagtcccaaaagaaatttcttcagcagacatcagtctttcaccacaaagacagagaaaggcaagcccagccgagaaattaaaaagcactccatgtctttcacctttgcccctcacaaaaaagtgctgaccaaaaacctcagcgcgggctctgggaaatcgcaagactttaccagggaccacgtcccgatggggtgtcagaaaggaaagccagcttgccggccgaatcgtgcaggaaaatgggtgtgaaacccacaaccaaacagcccgcggcttctgcctgagaccccacgccctctcggtggatgatgtgttccagggagctgactgggagaggcctggaagcccaccctcttatgaagaggccatgcagggcccggcagccagactagtggcctccgagagccagaccgtggggagcatgacggtggggagcatgagggcgaggatgctggaggcgcactgcctcctaccccctcttccacctgctcaccacgtagaggactcaagacacaggggcagcaaagagccactccctggccacggactctctcccctgcctgagcgatggaaacagagcagaactgtccatgcttctggggactctctggggcacgtgtctggcccagggagacctgagctcctcccgctgaggaccgtctccgagtccgtgcagaggaataagcgggactgtctcgtgcgacgatgtagccagccggtctttgaggctgaccaattccaatatgccaaagaatcgtatatttaggagggaggccatacgccatgccatagcttgtgctatctgtaaatatgagacttgtaaagaactgcctgtagattgtttttaaaaggtcttgaataagctccttgagaaagttgtggaaagccctcctcagtgaggatagctacaccatggccatggcgcatcagatagtctctgtgtacctggatttgtgcaatatgtaaaaatgtatcaaatgtattatagataaggtgttaggtgcaaaggatgtctaataatccctgcacacgttttgaacttgcagtgaagtacactgctgttccttgcttcctggggcacttttctcttggttagtgtttaaaaattatcttcgcttttttaatgtggcctcaaatgtcatgccaattttcacatcttccacaaactccatttagggagaaatgtttaaatctctggtataagtttactccataccagagtaaactatatattactctatataagcagtcttgcaataactaatcaccaccatagaagaaagaaacagactgcaaggaacagagttgagtgtctggagtcatcaaaggcattaaaaactccagtaaaagctggggccgtagcaaaaatcatgaaaaacacttcaacgtgtcctttcaatcatccaattaaatgtgggtagattaatgaaaatgtattacatcaatattaactcatctatagcactttgagtatctttgtagttcatgatatcctatcctataatgtggaggtaaatgattttatatgcattgggggtcatatataaaacttcaatgtaatttcactacaataaattgccttccttatttgaaagtaaaaatgttctt

SEQ ID NO: 84237 - DNA, 1370 bp, Homo sapiens
tacttttcctcacaggtgaagacactggtggaattcctcattgataactgctttgaaatatttggggagaacattccagtgcattccagtatcacttctgatgactccctggagcacactgacagttcaggtatgtgtcgaccctgcagaatgactcagcctacgacagcaacgaccctgatgtggaatccaacagcagcagtggcatcagctctcccagcaggcagccccaggtgcccatggccacagctgctggcttggatagcgcgggcccacaggatgcccgagaggtcagcccagagcccattactctctcccctgcctgagcgatggaaacagagcagaactgtccatgcttctggggactctctggggcacgtgtctggcccagggagacctgagctcctcccgctgaggaccgtctccgagtccgtgcagaggaataagcgggactgtctcgtgcgacgatgtagccagccggtctttgaggctgaccaattccaatatgccaaagaatcgtatatttaggagggaggccatacgccatgccatagcttgtgctatctgtaaatatgagacttgtaaagaactgcctgtagattgtttttaaaaggtcttgaataagctccttgagaaagttgtggaaagccctcctcagtgaggatagctacaccatggccatggcgcatcagatagtctctgtgtacctggatttgtgcaatatgtaaaaatgtatcaaatgtattatagataaggtgttaggtgcaaaggatgtctaataatccctgcacacgttttgaacttgcagtgaagtacactgctgttccttgcttcctggggcacttttctcttggttagtgtttaaaaattatcttcgcttttttaatgtggcctcaaatgtcatgccaattttcacatcttccacaaactccatttagggagaaatgtttaaatctctggtataagtttactccataccagagtaaactatatattactctatataagcagtcttgcaataactaatcaccaccatagaagaaagaaacagactgcaaggaacagagttgagtgtctggagtcatcaaaggcattaaaaactccagtaaaagctggggccgtagcaaaaatcatgaaaaacacttcaacgtgtcctttcaatcatccaattaaatgtgggtagattaatgaaaatgtattacatcaatattaactcatctatagcactttgagtatctttgtagttcatgatatcctatcctataatgtggaggtaaatgattttatatgcattgggggtcatatataaaacttcaatgtaatttcactacaataaattgccttccttatttgaaagtaaaaatgttctt

SEQ ID NO: 84238 - DNA, 1194 bp, Homo sapiens
tacttttcctcacaggtgaagacactggtggaattcctcattgataactgctttgaaatatttggggagaacattccagtgcattccagtatcacttctgatgactccctggagcacactgacagttcaggtactctctcccctgcctgagcgatggaaacagagcagaactgtccatgcttctggggactctctggggcacgtgtctggcccagggagacctgagctcctcccgctgaggaccgtctccgagtccgtgcagaggaataagcgggactgtctcgtgcgacgatgtagccagccggtctttgaggctgaccaattccaatatgccaaagaatcgtatatttaggagggaggccatacgccatgccatagcttgtgctatctgtaaatatgagacttgtaaagaactgcctgtagattgtttttaaaaggtcttgaataagctccttgagaaagttgtggaaagccctcctcagtgaggatagctacaccatggccatggcgcatcagatagtctctgtgtacctggatttgtgcaatatgtaaaaatgtatcaaatgtattatagataaggtgttaggtgcaaaggatgtctaataatccctgcacacgttttgaacttgcagtgaagtacactgctgttccttgcttcctggggcacttttctcttggttagtgtttaaaaattatcttcgcttttttaatgtggcctcaaatgtcatgccaattttcacatcttccacaaactccatttagggagaaatgtttaaatctctggtataagtttactccataccagagtaaactatatattactctatataagcagtcttgcaataactaatcaccaccatagaagaaagaaacagactgcaaggaacagagttgagtgtctggagtcatcaaaggcattaaaaactccagtaaaagctggggccgtagcaaaaatcatgaaaaacacttcaacgtgtcctttcaatcatccaattaaatgtgggtagattaatgaaaatgtattacatcaatattaactcatctatagcactttgagtatctttgtagttcatgatatcctatcctataatgtggaggtaaatgattttatatgcattgggggtcatatataaaacttcaatgtaatttcactacaataaattgccttccttatttgaaagtaaaaatgttctt

SEQ ID NO: 84239 - DNA, 594 bp, Homo sapiens
cccggctggccgaagaggagacccgtttcctctgactgagagacgtggctggggggctttccatctgcttcgcctccctcgggcaggcagctctgagatgcccggagggatgtgatgccccatcgccaaattggggtctctaaggtcagggccatgccttcccctcagactgaggcggctgagggcagggtcctcaggctgatggctgtgggagtcgtgccacgcccctcgtgcccccgggaggcccggccggggctgggtggggggatccggtggttccacatggtgcagttctgcgctttggccaccagatggcagccgaagctaagggatggggctgccgtctcccgtcttgctgtccttgtcccggtaagaccggggaccctggaccagggaaccgacggagggccactcccatgtggatgcccaagggaccaacccaagaaagatgccgcccttatcctcctccactccccggtatgatacatgcccctgccagagagggaaagaatctgcctgctcccctcccactaggctcctctggtctgtaccctggaaagaaagaggtggcggactctgtcactgagatccggc

SEQ ID NO: 84240 - DNA, 561 bp, Homo sapiens
acagagggacagactgctgaggaatacatgtggattctttccttctgtgacactctgaaagaattgtgactggggcatggggtgccaccttcagaggcaggagtgtttaggaaatgccacagtggcacatgacctgcgtgggctccagcagcagcagcaacctgcagggtagatagggcagctgagaacacgagagcagaagggcggtgactctatcatctcggagggttctgttcaaacaacattttctagtatacaatgaaaagagacctggtgccaggcatggtggctcatgcctctaatcccagcactttgggaggccgaggcaggtggattacctgaggttgggagttcgagcgagaccaggctggctaacgtggcgaaacctcatctctactaaaactacaaaaattagccaggattaggcacgcgcctgtaatcctcagctccttgggagactgaggcaggataactgattgaacccaggaggtggaagctgcagtgaaccgagatggtgccactacactccatcctgggtgacacagtgagactctcaaaaaa

SEQ ID NO: 84241 - DNA, 355 bp, Homo sapiens
ggcattgggggagagggggacctgggacctgcggcttagttccctgaggcaggcagggcttattggggccatttcatagaaaggcagattgaagctcagcagggaagaggcttttgagggtgatccaggcgctggagggatggcctaggacaccagggtcacaccaggaacatgggagggccgtgcttgtctctagacgaggggaatgggggaagggccacaacctctgtttctgtgacccagcagcatcaagcccctcgctgggcacctcgcacacaccccctgccttatctctgcctgcacgccctgttccctccacctagactgcctgctgagggggcagtgccaggaggtt

SEQ ID NO: 84242 - DNA, 321 bp, Homo sapiens
gtatctcatgacttctttgaacctcgctgaataattatgtacatagaaatcctgtttataatgagaaaggaagagcaacccctacagctgtcagctggaactgagtattagccctaatggctaggctattatattctgttgaatataaacaatgttatataacaccaacatctgacaagtccactctgagtgtggtggaggaagacaaaaattaagacactccataggcatgttggaacttagcaagattctgtgtaaatcatagagcgaccaaacattcttgtctcttggcttatatgtgtgatatttgctccattaccc

SEQ ID NO: 84243 - DNA, 362 bp, Homo sapiens
tctaatcttccgcccaagtcagatgagaggtagagatagaagtctaggaatctttgtcaagcagtctttgtcaaattgcctatgggacatagagcatgaaaagtggggataacaagagaggtaaataaaatatatagacaggctgccaagaacaaattgttagtttgaaaatgctaagctgaaatgtaacagaaaccggggagacgataagcctggagaaattggccaggggtttgtttttttagggacagttgtgcacagtgtaaagacatatgaacatgaaggagggaatcctcattaccttagctctggctgatgactttcaaaaaccatagatggaggcatcacatttcctgatttaa

SEQ ID NO: 84244 - DNA, 658 bp, Homo sapiens
agcgccgcccttcctacggctacgggaaggatcgtccagtggctgaggctggacagagcacaggaattcctggttgtttcatgaaagggccgtatattcaaagtgacctccaaatacagaaggagctgagaaactaaagaatgaaggagacaaatccagcttgtcagcaaaaggtgatttattagggaacttacggacagaagcatggtcttggacagcagcaagacaggaagcccatgccatgtcctgaggacgggtgagcagcctggtggagagatctatctggtggggaactgagactgcctgcagtcatgtgagggagccaccttagaggcagaccctccagcctgagtcaagccttcagatgactgcaggtgacatcttgaccacaacctcaggatcaattctgagccagaaccactcagctaagccactcccacattcctgtcagaaactgagtgacataatgactctgtggtttttaggctgctatatctgggagcaatatgttcaacaggagtggtacctaccttgagtattaataattgttgagagtcacctttctcaccccttcacttgatggcgctgtggtgcaactgcaaactcctgtggcaacgacttgtctcgctgtacagcagacaaaagataaaaagcaaga

SEQ ID NO: 84245 - DNA, 431 bp, Homo sapiens
gtacttttagtagagatgtggtttcgccatgttggccaggctggtctccaactcccgacctcaagtgatcgcctgcctcagcttccggaagtgctggaatttcaggtgtgagccaccgcgagcctgggcaacaagagcgaaactctgtctaaaaaaaaagaaaacagcaaaaagcaacagatataggatgatcccttttgtttaaataacataactatttctatacattgatacacattgatgcatagaattaaaatctaagctgggcaggcagctatagtcccagctactcaggaggttgaggtaggaggattgcttgcgcccaggagttcaaggctatagtcagacatgattgtgtctatgaatagccactgcattctagcttgagcaatatagtgaaaccttattgctacaaaacacaaacaaacaaa

SEQ ID NO: 84246 - DNA, 466 bp, Homo sapiens
gttgatgggaatgatgatgattataaattatattgtgcaattactgccatgccttgttctaatgcttaatgtggattatctcttttaatccttagtaactctataacaaagatactatcattatccccttctcatatatgcttaacagttttagctttgtagcttctttagtttttttcctccttcaaagccataaacaggcaattgttaaaagaggaaaatacttctctatgtaaagcttttttttgagaacaagagcttttaaaaattaataaacacaagtataatttatttataaaatgtgtttgtggaaacaatactgaagtgctattaaaacacgtatcattatagatgctgattttgtcatgcccaaatctcattgctggacagaatttcaactattccattgctgtcaggcattgtttttgtttttctaagcaggaatctaaaattccacattgaaaga

SEQ ID NO: 84247 - DNA, 728 bp, Homo sapiens
gaagacccaatgtcagtgtctggattctagaagaccattacagtttgactccgcaaagcttacccacttctgattctagaaggggctgccagtcatcgtgcctgcccgtggctatagtgatggttgcgggaaaagtacctggcccggcccatttaattttgtcattaaactaatggaagcaacaaaaaaaaaaaaaaaaaaaaaaaaaaaaaaaaaaaaaataaaaaaaaaaaaaaaaagaaggaggggggcgccgggcggtaagataaaagagtatctctctccgagagggggggccacaactagtttgcgggatacacacatgcttgttgttagtaaaacagggggtcgcccccatatatatggaggctgctttatataataatagaagcagtaggcgacggtggcgcgggtgtttttacaacaacagtcgtctactaggcagctagggaagaaacaatgcgtggtatcacgaagtgaggagatatcttgtggggggagagaagagcgacccactctactcctgtggggggggggggggagcacaattatgtgggggaacaacaactccctctcattgacgagaaatatttagaagccaccctacgagggggaataatatttaacaattttttagaggggtgtactacgggggggtctactaaccatgaggtgataatttattgtgtgggggtgtaaaaaagttttcgctacaagggaatatttta

SEQ ID NO: 84248 - DNA, 464 bp, Homo sapiens
ttgaattttcattactagacaaacatccatgcattttttgccctttcttctttgtccacatctttttcctacaggctgaaatgtgacaaaatagttggactgaaacagttactttggcccatgagatgatcttgagattggaggtcacataaatagtagagcagcaagagatagaattcatatgcttgaaacattcatgggatccagccctatgcaagtcctagcctgcataacttcagacttttatgtaagagagaactaagcatacctcttctgcaagtaacagtcattaggtgcctcagcaactcaaaaggaacctcaccctatatagtaagtgtgaataagttccagtgtgtttgtttaaaatatatacttttagaataacagtaaaaactcaatgtatagttttagaataacagtaaaaacagaagtgttttgtaatttaataaactcagttatgcttt

SEQ ID NO: 84249 - DNA, 562 bp, Homo sapiens
tatttgattaaatgatttgtctctggtttgaaagtggaagcctgagttgagccaaatgcacaaacagtccctagtgtcttctcttgtgttaacgccacactggaaatttccctcgctccctcagatacacattaaaggaaataccagggggaaggattttagcagtttcttggtcatttcaatgatttgagatgtggttttttagtctgaggcaagtgaggggggtggagaggagactgggttcttcaaagttcctaaaatgtgtatttagatgagtctgtggttaaacctgagctgtgtggtcttctgtggtctgccccaaactcaagtgaatcagttcctgctcttcacgaccttggggatccggcactcaggccatgaggcagagactacggtgcttcaacattcaagtgcgcctctaagctagagccttaaaaaccacacagctcaggctgaactcctgtcagatacttataatgttctcaatgtcaagatgttaaaagtatatttttcatcagattttaaaaataaaagcaacatcgttatgcaaaaataaaaaaaa

SEQ ID NO: 84250 - DNA, 566 bp, Homo sapiens
ttattgaaatagctattcccattagtttaatatatcgtccaaggctgcttttgtgcacggtgtggcaggattgagtagttgtatgagagactctacaggcagcaaagcctaaactgtttattaacctgtcctttacagaagaagtttgccagtcctttttatttaatgtgattattgatatggttggttttaaatctcccatctcggtgtttgtttttttacttgtctcatctgttctttatttttcactctttttctgctctcttttggattgaatatttttattccattttatctctattactggcttattagctatacatctttttctctgactttcttaatatactactacttcttctacagtataagaaccttagagtagtatgctttaatttcttcttccagcctttgttctgttgttgttatacattttttcttccacatgttagaaatcttacaatatgttgttacttttattttaaactgtaaaaaagaaaaaaattatattgatctacatgtcattgatgatagtcttcatccctttgcgtagatgtgtatttcca

SEQ ID NO: 84251 - DNA, 671 bp, Homo sapiens
aaaggatattgtccatgtcatgaaatattgacaatatgataaaaatgtttgctaaattagaaaaggtgatgaatttggaggaaggggaattggctgcacctgtttctgatatgttcagaagcttaatgaatataatattctaatttaaataaactgtttgattgagaaaagaggtagccacattattgtttagaaatgatagactgttattgacttttggtgtagctgggaagctggagaagaggtagtatgtagtttgcttttgatttcaaaatgccacctcttctgattccagatacaattatcttttggcacatttcctaattagcattaggttcttataaatgaaattttattttacacacagtttttaatggaacttacttttgaacatcacgaaagttatctctagcccttttcatgccttaggtgctgataagcattccgtttatcataagctatgtcattagtctcagcttcctagtgggaagtaaaactcatagcaattctctcagtcatccatgatatatagctaggtggggccagatgatttgaaaattaacatattgttcattttaggtgctttgttttcattttaagttgtttctgcatctagtttgaagctgcttggcataaagatgagcctttctgatagaagtgtgtgagaacat

SEQ ID NO: 84252 - DNA, 168 bp, Homo sapiens
ccaatgagtgtggaccctaaatttaaacagctaaagctatagtctaaggacagtctcaaataaatacctttgaattgtcatatggtgcccaggagggtcttgtggaaagggtttcatggtagtgaaagatgtaataactctttttttcttttaaccctaagactgtgc

SEQ ID NO: 84253 - DNA, 128 bp, Homo sapiens
taagtcagggcaaaaagggtctgaaagctcactcttcactgagatcctacaggagtacatagtcaaacaaagaaatctgtgaattagcaacttgcataggatagcatctgctctggataggaaggtct

SEQ ID NO: 84254 - DNA, 406 bp, Homo sapiens
aagggaagtatttctcggaagaggtgctgatgggccttcttttcagatggtgaggcttctgcttacatcttttttatgtctttgctgtttgggacctaattgctactttttctagtcgtagcagatgacttgcttgaagctgttggaatagttactgcatattgcatacccttccttgtagctaaaacaacaacaaaacgcagtgtgtgtctaatattggacaagactctattgtgagttagaaagcagaggttttctgcttgtgaactcctttctctgatattttctattttgtggtaagttaggcttggtgtaagttgataaccacatctcatttaaccatgtgcgtcagattttgcatttttgagctttagaaactcaaaagttttcatttggggaaaaaaaa

SEQ ID NO: 84255 - DNA, 338 bp, Homo sapiens
caatggtgtgatgttggctcactgcaacctccacctcccaggttcaagcaattctcctgcctcagcctcctgagtagctgggattacaggcacgtgccatcacgccaggctaattttgtatttttagtagagacagggtttctctatgttggtcaggctggtcttgcactcccgacctcaggttatctgtctgccttggcctcccaaagtgttgggattagaggcatgaaccaccacgcccagccaaagttaaactattattctgtgtcagaatctgtattaaatgtgacttgtcaagttattcagtctttatccttaaataaatgagttatctgaat

SEQ ID NO: 84256 - DNA, 331 bp, Homo sapiens
accacacccagcctcattctcttattgaacctttatcaaatcacacttcctaaaaaacagagtcataaaagcagaattactaaaccaaagggtagaaaggttatactgctttaaatgacacatgaggagcagaagcccctgagtactatctctggtcaaatattctttaaatctttgcaaatttaatgcgtaataaatagtattactgctttacatgtacactgcattgttagccagtgagtttgaacatttttttcatgttcacaagctatttaaattttaaattttgttggtgatccattcaagttagtccattttcctaacagactta

SEQ ID NO: 84257 - DNA, 530 bp, Homo sapiens
cacaatgaggggcacatttgatgctgctgggcagggagagagcctcacactcatccatgggaggagagcgcccagaggaggtgggctgagctaagatctgggtgatgcactccaagagaagctttggctgcaggtgagagctgagctcccgtcacctgcctttcctgtagaacaggcttccagatgctgcacaaaattcattcagccagtgacacctaattccagatcctgactccagccctgcttaccctgtgatcttggcagttatctctgggtcccatctgcttcagtcataagatggggtcctcattcctgcccctttagagggagtgtgtgcatggaatgacattccaaaactgcacaagtgcacaagtagccctccgacttctggactaggctggccagtgccaggcagtagagccctcggagggtttctttcagaatctgagcaaagcagccacaagtcattacgaagtggacggtgatggcagaactgatttggtcagcgtgaatcatgaatcagccattcg

SEQ ID NO: 84258 - DNA, 516 bp, Homo sapiens
tctataaatatttgtgacatctgtgacatttgtttgccaatcttttatggataatttatttgtctatgtttagatatattgccattattcataaaagatttagaggtgatttagatattagagttctaagttcaaaataactattactaatatttttaagaaaagagagaaaaagattttttcatgagataactacaattcataaaaagaaaaacagacataaaactaaaaaataaactgaactgaaaattcattaggtaggctcaatagcaaagtccacaaagcagaagagataatttataaactgtagtcttgttcagtagaaagtatggagacagaagcacagaacaaaaaggagggaaaataaagaaatgagcataaaagttcaactaagcaaaaaggtctaaatcatggatagtcagatttccaggagaaaacaataaagtaaaagagatgcaatatctgaaaaaaatactagctcagtgaacaccgatcggatagctaaaacaaacaaat

SEQ ID NO: 84259 - DNA, 353 bp, Homo sapiens
tccctttacactgtccaattgtgcttcttacttttttttcatgtatttacaaactctagttaggatcctgattacagcatagttccttgataatattaagatatgtaaggtatcttcattgttggcctcaggctatctttgctatgacttgcatttgtccaacgtcaaaacataggaaacaggtaataaagcttttggtggtatccagccactgtaatgaagacaggaatgtgatttgagctgggaggaataaatttccatcttacttcacttttatattcctttttattatcaggcagcattacccaaagccatgggttttgttttcagaaaagtagaacttagaattatgc

SEQ ID NO: 84260 - DNA, 997 bp, Homo sapiens
caaacctctcttggtgggcaggcagtcggacgctcagcaggactggcaaaacagaatatctgtgtgtcagtgtacgttttattcatctgtcgtttgggtcagggtctgcggggcagatccccgcagctaatgccctcttgtgagcagcaatacctcactttttatcagcctctggctgcagaagagcaggaccacaatcctggaggctcagcaaacatcccatcaatggtggaaaatgtttcctcttcgtcccacatggagtttacagatgatgggtttccaacttccagaagaggaaccagctgaagagaacatcccactccccgctccccaccacaaaaaaaagattcagagggtacatacgcaggtttgttacctgagtagacttcctgatgctgaggtttggagtacaactgatgccgtcactcaggtacagagcaaaacaggttggagtgcagtggcgcgatcttggctcactgaaacctctgactcctggattcaagcaattctcctgcctcagcctccagagtagctgggattacaagagcccaccaccatgcctggctaattttgtatttttagtagaaatggggtttgccatgttggccaggctggtctcgaattcctgagctcaggtgatccacctgccttgacttcccaaagtactgggattacaggcgggagccctcggtgtccagcctagaatatcctcaaatccttccacagtgaccccagtttttatttctacctttctgcattctacattttctttggtacttttcttgagcacacattcagtctggtattagtaacttccacctgcattagccccgttcttcagaaaatactaaatgtgcagtcccacagaagcaggagtaagtgaaagagaaacaaagtggtgaagaggggagagaaacctcacagggtaggttcctgtatggccagagtctgggacaagccaatttcgtgatttcacaggatgccttcagagagaaca

SEQ ID NO: 84261 - DNA, 641 bp, Homo sapiens
cagagactgagtgtcgctgctgaaggctgtggtggaccgggctggatcgcggattctaggagccggtggttgggggtctgagaagtcaccaccaccaagaagttcttcggcttcgggagccgcgggggcgagatggcccgggctccatagaccacgtctgcacggttccgggtaccgaatccgggacgcggaacagcggaaaatccaagggcggctgtcaaggaccggaggtggagcgcggcctggagcgcaggagccggagacctggaggcccgggacaagcagcacagaactgctctacatttggcctgtgccagcggccatgtggaagtggtcactctcctggtgaacagacaatgccaaattgacatctgtgacaaagaaaagagtgtgcctttgatacaggcacaggctgtgcattgccaagaagaggcttgtgccattattctgctggaacgtggcgccaatccaaaccttaaggatgtctacagcaacactgctctccagtatgctgtgtatagtgagagcacatcactggcaaaaaaactgctttcccatgatgcaaatactgaagcactggacaaggtttattcctttttttcctaattagtgtaaaacaacacaagaaagaaaatatgccc

SEQ ID NO: 84262 - DNA, 392 bp, Homo sapiens
tttggggaaaacacctgcaatctgatgtcagacttgaagtattcaaagtagttacagagtagaaacagagaaggttttctttcaaattttaactcaaaatagcttaaacaaaaccagaaaatgtagtgtctcaagttatttcagatataaatgaattcaggaactcacaggccttactggtggtccctaggaaaatctgaatccgtttctatatttttcagcaaaaccataagaattactgaccttgacctagcttggctcctatgccatctctggatcaattccttttgatcagaatggaatgaaatgactggcccacctgaatcctgtgcccaccccacttaaaacccagagactgcaaatacagcatgggtggtctccaaagaaaaatc

SEQ ID NO: 84263 - DNA, 620 bp, Homo sapiens
gggagaagaggcaggtgaggggataatgagtttggtggctgctgtgggcagctgaacagaaaaactcaggcactcaggctgtttctctcctaggcttctgctagtggaataagctctgggcaggtgcacctcctgctgctggtggtggtggtggtgaaacaaatcctggcccatgtccatgacgctgaggccccagaggcctgatcctccagcctccagggttctaggacagttgaaagcatccaatactggagaaactgtttgtgatagagtctgatacatgcagacacattccacatgaggtatgggcagaaacagggcccaaaaaggtgactagcacccactttgagcctactgggacagaagcagggcttccgccgatgtatacaggagggtttggtagacggctgatggccaaggctaagaggaggaccacaaatctggaccctccccatcctgtcggagctccacaggaacaggtgcccaggcaagctgctgtttgagcacacaagcccaggacacagggcaggtgtgtttcccagggccctggcccagcagtgccaagccttgtgccttgtcactagtgattatggcctgggtcacatctcccacacacacga

SEQ ID NO: 84264 - DNA, 518 bp, Homo sapiens
acaaccaaagctcattgagcagctactgtgtgtccttggagttagaactcaaggatggaatgggggagggggatggctgcaaaatggtgtaaaaagaattcaagactggcaggtatcatgctggacccctgttgacttcattcaataggaatggcatcgtgtttgagaggctaaagacctggcaccagtgaacaagacatagggtttattgagggaacttacatacagggcagtcccgtccagtggtggtggactagacaggagaactgtaacaacttgtataaagcatgcagtttatatagtgttttcacttaacaccctcctcctaggaacctctacccattaaccttcacttaacccaaaacaaagagccttgatcctctgtacagcctgtgctccacaggatgggccaagggataaggaatgaatctccatgttggctacttctggattccttagcttacagctacaaacacacattcttcttagaccatagggtcattctcagagtgtgccta

SEQ ID NO: 84265 - DNA, 333 bp, Homo sapiens
tagatgggaactcactcaaatggaaaaaggcatctataaaaacactacagttgacatcatacttaatggtgcaagacttgaagcattccctctaagctcagaaaaaaggcaaggatgtcccctctcaccactccttttcaaaatcatactgaaaatcccatcttatgtgataagacaaggaaaggaaacaaaaggtataccaattgggaaggaagaaataaaactgtttttgttcacacatgacatgattgtctatgtagaaaaattccaaagaattgattgttttaaataaaatctcctggaactaataagtgataatagtaaggttacagg

SEQ ID NO: 84266 - DNA, 362 bp, Homo sapiens
ctataacaattgcctccctacctttatctgagcatttggtctcactctcttgccacactcccagtctttcccctgtatggcctcagtgatatttctaacaaaaaactctgactatagtattcccctactcagtcatctttaatgattctccttcacctcttgagtaaaatctaaatctttttggaagggtgtttgaggttcctcatggttttgtccattgggctggactaaggttatggatgagagacttgtgaggaagaaaaaccagttctagagaaataaaggcatggcatctttgcacacttacaaatgcaggaagagaaggtttaaaaccatctttctagaatatgccctttggctgg

SEQ ID NO: 84267 - DNA, 714 bp, Homo sapiens
ggagatgttcagctgtggattcagaccattccttactagattcttccccacctgttcttgtcaccctcccatgctcaccaggctgtgagcagagagaatgtgaacatctatttaagaagaaaggcgtgagggaaagcatgaaaaatccaggataaaatcatcatcagggaaactcctatgatgctggaactggacaacagtgttttagatccctagtcatgcccattccttcctgtcctggaaaagttaaaatatgaagtgcctgtgttcactaaagcaaaaccttctgaaatagcttacatggatggattctttagaattggatgaaactctttggttacccccaaatttcttgaaacactcaaaacttccattagctgaggtgaagcctctagtggttcaggactgggttctacagcaagggttcttaactcagtccatgaatcttcccaggaagtctccaccaacaaaattcaggaagtttgtgaatatcctgaaattttatgaaaagtgattggcttgtgtgaacatgctgtttaactgggaagggaatctttagctttcagtaaatgtataaggtcttacagtttgctctgagggtactactgctccacatttctcagctacaaaattgaggtaatggatcctgaatcactttagtcacgcagagtagcctgtctttctgatcacgatgagaaattcaaaactgagccc

SEQ ID NO: 84268 - DNA, 222 bp, Homo sapiens
ccttgcttgtcattggcaaacttccaaatactttcctttaagtgattctgagacccatatatcaagtttgtttttaaaataaatgtattgaagcaaaaaaaaattaagtaaatgtaaagaagaacacatttaatgagatatagagctatggcaaaagtagtgaagtctggaaaatcttaactttacaataaataaatccaagatcattgtaagcattgaaga

SEQ ID NO: 84269 - DNA, 307 bp, Homo sapiens
gaccaattaagagattattgaaaaaattcaggccaaattaacataggttctggggaatgactgaaggtgggggtaaaaagagagagacacctgggatggcttcaaggtttaatgctgcacgactgcaacattaattaatagactgaagatacctgtaaggtctcctggatcatccctcttttatgggaggcaaaacgtctccaaaatgaccacaaggtgcctctgttctttaagagggcagtcaactgtttaacatttttccaaaaatgtacattttacctcagttgataaattatatgtgctcctt

SEQ ID NO: 84270 - DNA, 459 bp, Homo sapiens
cctgggttcaagcgattctcctgcctcagcctcccgagtagctgggattacaggtgcccgccaccatgcccagctaatttttgtattttttagaagagatggggtttcactgtgttgggcaggctggtcaaggactcctgacctcatgatccacctgccttggcctcccaaagtgctgggattacaggtgtgagccaccgtgcccagctaaattttgtattttttagtagagatggggtttcactgtattggccaggctggtcaagaacttctgacctcatgatccacctgccttggcctcccaaagtgctgggattacaggcatgagccacagcacccggccggtatttatgactttttaaagctcatttgttccctaatatatgcagtaacttagattacctagtccactaatttataatgaaaccttgacttcgtagcatgaacttagaaattctt

SEQ ID NO: 84271 - DNA, 286 bp, Homo sapiens
cctcatttggcagcagaagcatcgagtcacaaggaggatgaggttctagcccagaagcagctgggctatgtcattctaaaggtggtgagtaaaatggctattcactggggcatcaggttttctttcatgctatttccctgagtggagaatctgggtctagaagggggtgtgtgtgtgtgtgtgtgtgtgtgtgtgtgtgtgtgtgtgtgatggtacacatgtatggcacttacattttcactgagcagcaatacttgcaaagctgtgagtgcaataactaaacaga

SEQ ID NO: 84272 - DNA, 382 bp, Homo sapiens
aagtgcacacaagaacagagaaaccaaacatattgagaactatgagaaaatgtcgtcatcttacagtattaagaactttatcactttattattcagagatgttgatatctgaatagagaacaccaagaagagtatcaagctgcccacagatgtctcaaaatattttttaaagtaactatggaaatggagaaataaagatgaatggaaacttggccagaagagttagcaaaggtagcaagagaactggcattcggtagacaaaagtaatgcaagtcatcccacttttacataaggtggtcatatactttatccaaagaataagactgtaacaaggtattttcacttctcttaaatgactgtgttaagtagtctctcccttttc

SEQ ID NO: 84273 - DNA, 1019 bp, Homo sapiens
tcactctgattacagatgagttaatttaagtttaataaacccaagtccaagtaacagagaataggaaaggcatagaggtaggagaaatttggaactaatctttgttgtgcacttaccatggtacttgaatccatgcaagatgcttctatataatttatataaattatgacttcataataccctcacaacaaaaatatagccttatgtagatgagggaactcagaatggtctagttatttgtttattgtcacataatcagttaaaatagcacaactgaaattcaatacaggttctgttggcttcaaacccatattctttccctactcacaaaaatccacttaaagtcaatttcctttggcttttgctattcctagaaggacccagactactccttcagttttgagaattactgtctaaggaagcaatgattcttccctttataaaccatctgggcagctactattttctgatacttacaatgaccacttctttttgtgatttatttaggatgttttccaaattgcatattagtagccactcacaggggtaaatgaaggctcatcaagtagtgaaaaggcagctgttctcaatttgctggctgccactggaatcatctactgacctttaaaaatgttgatgcctgcttttcagccccacaaattccaatttaattgattggggtatggcagaggcgttgggattttaaaacactacctaggtgattttaatgtgtagctaggctgagaattattgttttttaaggatcaagatgagaatataagtatttccataaagaagtaaaagaaataatgttactatttattcaacaagcccaactttttgaatagctgctgaatttaaggattttttcagatggaaaataaacaatttaaagtttgatatctttttctatataaatgacatttgtattcatttggagaacctgtttaaatatgtgcttacttcactagttaagttactgattcatgcttatttaatctgtaaaacacataattctc

SEQ ID NO: 84274 - DNA, 175 bp, Homo sapiens
tttcttgggcatcatgaatgattttcttatcgacatctttgagcacatcaccaccaaggctggctgccaggttgctacactgagtgctccactatcacctccagagagatccagaccacccgagcctgatgctgtctggggatatccacaaacacgctgtattgaaaaccaaagg

SEQ ID NO: 84275 - DNA, 448 bp, Homo sapiens
ctgggtaggatgagcacctagttgtgtgaaaataaagtgtgtggtggactctgaaagccaaggaagttgcaatctctgttctagaagtccactgaagaggcagaatgggaattagttccttgaggatggtaggtgtaacatgttttaacaaggtggctgaactactcaaaagaatacagccttatcagaagccaaacacattcactaatgaccctgctgatgttcctagttctaggttgtttggtgggtcttaaaactttaaatagccctgcaaggggatgtggtaaatccacatgacccctctctgttttgacagcttggccctgtccaaatgaatcttagtcaccactttggctattttaggcccaagtctgattctgtggccccgggagaagtacagcatgtgtttcttgtgatggggcaagcccaagctctctggtgaaatgtt

SEQ ID NO: 84276 - DNA, 344 bp, Homo sapiens
ggcttttcacgtgagtgcgtctaagccatgtaagaaaaataaatacaggccaggcacagtggctgacacctgaaatcccagcactttgggaggccaaggtgggcagatcacgaggtcaggagatcaagaccatcctgtgaatggtgaaaccccgtctctactaaaaatacaaaaaattagctgggcatggtggcgggcgcctgtagtcccagctactcaggaggctgaggcgggagaatggcatgaacccaggacgcggaggttgcagtgagctgagatcgcgccactgcactccagcctgggcgacagagcgagactccatctcaaaaaaaaaaaaaaaaaaa

SEQ ID NO: 84277 - DNA, 252 bp, Homo sapiens
cgcagagaggcaaacccccaaacaaagagccggcagctcgcgtgcggggctcccgggcgcgtcctgccggctgggctgggagagccggcgccggggcgtcgcggccgagcgctgggcaggcggggactagagggccggcaggaagcctcagtgggcgcaggggcgcgggccgggctgcccacacgctgaccttcccgggctgggagggaggagcgctggctgcgggcggtgggcggctgggcggccccggga

SEQ ID NO: 84278 - DNA, 804 bp, Homo sapiens
agagactgtgggagtctctggccataagcttcccgcctcctggccctccagcctccagcgcactctccgccaccgcctgaaccttcctactccagctcgcagctgtctggagcgcagatcgagtgcgtgaggcgttacgcccagcgctgtgggattggcgctcagctgtgcctcacccgtcgcctcaaggaccaaccggatagcgcggcgtgggcgtgcacccggcggcggcgagtagagggggcgagagttctcaccccacagccttcgaccggagtccgcctccgcccaagcccctgcggatctgacctgagccttcagcccgcagcgcgcctcccttgagcccaagcactgggaacacacagagactgtgggagtctctggccataagctccccttgggtgctgacatgaaacctgtaaacagttgcatcaggagattgttcaggaaactatcttgcgttttcttcctttgctgcttaccaaagcagtctaggcttggactccaagaatcaagacgtcagaggtatactttggttcatgagcatcttgataagactcttgcctgtcatcctgttactggtagaaggtgtccaggttcttggcatcttgaagaaagaattgaagaaaacgcacaaacaaagcaaggaaggaatgaaggggtttattgaaaatgaaagtacactccacagtgtgggaacgggcgagcataggggctcaaaggccgcgttacagaattttggggagtttaaataccccctagaggattccattggttactttgggtatgccctatgtaaaggga

SEQ ID NO: 84279 - DNA, 452 bp, Homo sapiens
cttcaaacatcaatttaaattatgaaaagtcttgagtaattattttgtaccatcttataaaaacattttcatttgtgaatccattcattcaacaaatatgatctataaaatgtgagacagtctgctaaattcagtacattcatagataaattagacattgtatatagctgccctccaatttaatttctatacagacctgttacctacattattatgtgctatagaacagatgctgttaaaatccagttgagacatttaatccatattggaggttagagagagattttagaagttttatagtcaaagggctgaacagccaccaggttggctatggtgagtaagtaatttgagagtggccttagcaatcacctggtccagtgtgctatcgatgatcacccttttataaatctgttaatgcctttttccataacaccttccatactgatttagag

SEQ ID NO: 84280 - DNA, 453 bp, Homo sapiens
tcttataaggacactaattccgttgatgagggccctatgctcatgactttgtctaaacctaattaattctcaaaggcctcacttcccaatactgtcacattgtggggtagggctttaacatatgaaatttgagggaaaaggaatgttcagtctagaacaaagccccatacatttcaaaaagctgtgggacaggagggaatggggatggtattcaatggtaccacatccaagcaagtcttgtatggttaaaacaaatcaatataataacatgaaattttacacagaaacctatctgattataaactgtatgcttaccataatcaacactgatgtacattgttttaaaaatacttaatagtgttctttgtttaaccaaacaatagaggtattaactagtttcctagtgctgccaaaagaaattgctacaaaatttgtggcttaaaatagtaaaaa

SEQ ID NO: 84281 - DNA, 599 bp, Homo sapiens
caaaaaatctcatctgcacatccttcccacccccccaagtgggcgattccatattcttcctgtcttttgctctcccaagaaaatgaagactctatacctttgaggagagatctcttccctcttgtatatggaaaatgacacagattgtttcttttctccttttcctttataaaacagaggaaaatcttttatacaggaagcctctgtcagtagaaatcaggagcattttccagtttcactccttacgtggagacagggatccttcttctggatgttattaaagggaggaaatgggaaatagtccttgatgctttagagattttctgcacgctccatgttgaagcgcttgccctgtttagtgtatgaacttccctgcctcacttttggtttgtcttgggattttattaaaaaactcttctttctttgtttctcaagaagaggcccattctccaaattccctcttggagggaatggctacaaagtctgaatctttggaaaagaaagcccctttctcaaggtgaaaagagtgttgtgagcttctgagggcctggtcattattgtgagtattgttcctgaagcaagcatggcagcgcctagtg

SEQ ID NO: 84282 - DNA, 390 bp, Homo sapiens
gaatgggtatctagataagttaataattcattttttcttccctgtttgccagtgaacaatctgaaggtacagggctgctatatatggttatgcagcttgtatactgcccaaagatgctggactgaaggaagcaacaagtcagcctgtgttctgcttacagagtcctgtgccccagcttaggcctcgcagagggaactgtgcctccacttctctctccaaggcatcagctccttgccaaaagtgtctgtatttccccagaaggatgtatttttcctagttacataaaggccctatggagagcaatggatgctctgaaagactccttaaggagacatattaaggatacatttagaacaacatcaaaaacaattgggaaattggagaaatggt

SEQ ID NO: 84283 - DNA, 2073 bp, Homo sapiens
ttgttttttgtttttttttttgagacggagttttgttcttgtcaccgaggctggagtgcagtggtgctgtctcggttcactgcaacctctgcctcctgggttcaagcgattctcctgcctcagcctcccgagtagctgggattacaagcctgcaccaccacgcctggctaattttagtatttttagtagagacgggatttcaccacgttggcaggctagtctcgaactcctgacctcaagtaatcaacctgcctcagcctcccaaagttctgggattacaggcgtgagccactgcgcccggcctgatgctcctagttttaatggtttgaatgaacaggggacgtgagttcttgagaacagtaactacggtggtgcatttttcccccctgcacgtaacgtacagcactctaccgttttgccaagcactttgtgctcctaaaatttctgttgcattgttgtttgaatgaatgaataaatgagtcttttaaaagtaattgtagaagttgcagcattaagaaataaagaggggggctagtaaaaatgcatttttatagagatgttgggaaaggcttgcttgaaattacacgtgggacttttaatagataggcgctttgaccagctaagcaacagggctcccctcgtgtgggacttttagaatgtagcaaccactgacacgcagggaaggattatgcgatcaggtgagaaggtggccgaccctgactggctggaagcagatgcattctggtagttgattggtccacaggtagcgtgacgcttgtcacgtcctcagcctcccagcattcaatcgtagcctttcggacagctcgaagcccttctgtggagagctcgaagccttctgtggagaactcaaagccgtccgtggagccccagacgagccaaagcccaccttctcctcagcctgagctgtcttgaagatgagtaagagtgggtttgggagctatggcagcatttctgctgctgatggagcgagtggaggcagtgaccaactgtgtgagagagatgcaactcctgctattaagacccaaagacctaaggtccgaattcaggacgttgtaccgtgtaacgtgaaccagcttctcagctctactgtgtttgaccctgtgttcaaggttaggggaattatagtttcccaggtctccatcgtgggggtaatcagaggggcagagaaggcttcaaatcacatttgttacaaaattgatgatatgaccgcgaaaccaatcgaggcccgacagtggtttggtagagagaaagtcaagcaggtgactccattgtcagtcggagtatatgtcaaagtgtttggtatcctcaaatgtcccacgggaacaaagagccttgaggtattgaaaattcatgtcctagaggacatgaacgagttcaccgtgcatattctggaaacggtcaatgcacacatgatgctggataaagcccgtcgtgataccactgtagaaagtgtgcctgtgtctccatcagaagtgaatgatgctggggataacgatgagagtcaccgcaatttcatccaggacgaagtgctgcgtttgattcatgagtgtcctcatcaggaagggaagagcatccatgagctccgggctcagctctgcgaccttagcgtcaaggccatcaaggaagcgattgattatctgaccgttgagggccacatctatcccactgtggatcgggagcattttaagtctgctgattgaggcagggaaaacatcctttcatttttcgaagacccttgcatccagctgtgagtaattttgacctgttgactttttaggagtaggactaaaaaaaaaaatctcaagtggcattctttgtcaactcgctgcttttctaactgctttgaacttttcggattttctgtatttgaagctcagagagagacggtgatggataaattgacaactctgtaggatttactagcaagctaatggaaacatgattttcggggaagaaaaactacagaaaatgtagaaatttattatttaattgtgttggagcttctttttccaaaagaaaaactagttgcagtcagggagccagcgaaaagac

SEQ ID NO: 84284 - DNA, 633 bp, Homo sapiens
attggggaaatgaagcaagaaaaaacattttaaaagtaacatgaaaattgaaatataaaaactcatttcttggctctgtctgccaggccctaagattacctcattaatgaatctattacctaatcagttcaaattcaggaaggtagactaaacacacttggggtgcacagagaaaagagtacctgcctcccagccctgttctacgaaggctgcagaaaggctcattacctgcctccctcaactcaaaccactcctgagtaaggcttctgggtaagctctctgaggtctaagaaagtttggtatatgccttgtctatcaaaatggagctcatagcatgcattagactctgataccttcaggtcataagaagccttactcttcggtcaggacaggctaaggttagccacacaacaggaagtcagtggcagagaaaggaagttaggccagactcctacttcctgacccaatcaaggcagcaaggagtaggaggtcgaactcaagcagaagtatgtctctcacactattgcaaatatggcttctcaatcataatgtagctggggagcaccagctcagctgatactttcccattcccttagtagaacccatctccatctatccatgaggaattacttt

SEQ ID NO: 84285 - DNA, 842 bp, Homo sapiens
ggcaaaaggctgagcatgaaattcctcacagaatccagagggcagtccccaaggctctcagagtcttactctgagccacaggaagaagtaccttacgccagctcacaggggaactccaaacagtcagcaggaagaaactcagtcactcagatgaaaatgatggtgtctcaccattcttctatgcagttttctaaggggcaagacagagacatttggctcttccaatggtgccaggcttccagcaggaggaatagaggctgtggtaaaggaaaccgttggcaaatgaaagaaaccagaaactgtcactacccataacaacgaaacaacaaaaaaatttacagaaaaggaaggggagacaaaggaaattgtttaaagtggttgaagcctgtacagtctgatgtgatcattaggcgtgagggtgccgcagcatggtggtgcctaagacactgactccaattttccagtgagaacaggaaggctttaagcaccaaagccatgctgtccagtaatactgctgagcaagaaagcttttcttgaaggaagagaatagcgtttaattgagactatttttgtcagtctcctaacatgctcctcagaccactaatatgcaaaagaacctaaggatctggtcaccaagttacgtcaaaagagtttaccccatagtcctttttactgccttttgcagaacaaacgtttaataatgtcgctattgttcattggttatcaagaaataactcattgtaactcagaagtgcttagcaaagaatctatctcatatgtactttctttatttcaagaactttaaggaggcaggttttctacgtgtgttcaccaaagcgcca

SEQ ID NO: 84286 - DNA, 1005 bp, Homo sapiens
acttgctatcagctgaagcctggcctccaagaagagctgctccatttctatctggagaagggatgagggcattgaagagtcgtggaaggcagctgtgacaggctactttaaaggcgacgcaaacatttgagacgccatgtcctgcaggcctcatttcctccattctgtcttgctttctttcccagccctgaaacccaggtctttggtctttttcttctgttgcattcccttctcactcggtttccttacgaccagctcagcagcaataacaggaatggagagggaattgtccacattcacagtacaatgctctggttttatcaggtctagagccagaggcactggaatgttaatggggccctcatttcccaagcagctgtcctctggatagcagatggcagttgtgacaggagagtgacagcaacctatgtgtagcctggccaaggtatgatgcagatttcagccagtccccagaagccaaaaacacatttgacaattggaaacatcctcataccctaggacaatatctgctgcggtgtctaagggctgactcatggcccaagccatggccttcttgaacccttggtaaagaaacagagaaatatatttctctccatctccctctccctctactctcctttctttctctctttcgctccctttctttctctctcttacacacctgttcacataaaaaacaaaaatgtaagcaccagcttgtgattaaaacaggcttcacaagcaccctgtgaggagtactgacacatttgcctctgtcctttccttcaacacctctgtttcttttctccttcccacttgtaacttaactgagagagacctgataggacacttggttcaaatctttcaatttacccaggagaaagctgtgacccagaaaggttaagagatttgtccaataccacatctattgaacttcagtcggctagaaagtttttggataaaaaggattatgtttcctcaggggaagagtaaactcttagaatc

SEQ ID NO: 84287 - DNA, 344 bp, Homo sapiens
caaatttccagcttagtgctataaccgttcagatacatcacaaatttaagtctagtggggtgctacaaattatgcatcatctcattaatgataatgtttactaatctcaagatctttgaaataaaaataatagctacctttttcagatacggtgctagtaggcactttatatatattatcttgaatcctcacaatagctcagcgaaatatccactatactcctcatttatagactaggaaaataagatttagaaagattaagtgacttgcccaatcacttagccagaaagtattgaaaccagctttcaaatccaagtttatcaaagccagtgttctgattaacc

SEQ ID NO: 84288 - DNA, 1011 bp, Homo sapiens
  misc_feature (876)..(876): n is a, c, g, or t
  misc_feature (880)..(880): n is a, c, g, or t
atcagctcctctccgggtctgcaggtgcacgaccctcaatctagaacatcagctcctctccaggtctgcagctgcacgaccctcaatctagaacatcagctcctctccgggtctgcagctgcatgaccctcaaactagaacatcagctcctccccgggtcttcagctgcatgaccctcaaactagaacatcagctcctccccgggtctgcaggtgcacgaccctcaatctagaacatcagctcctccccaggtctgcagctgcacgaccctcaatctagaacatcagctcctccccgggtctgcagctgcacgaccctcaatctagaacatcagctcctccccgggtctgcagctgcacgaccctcaatctagaacatcagctcctctccaggtctgcagctgcatgacactcaaactagaacatcagctcctccccgggtctgcagctgcatgacactcaaactagaacatcagctcctccccgggtctgcagctgcaggaccctcaaggtagaacatcagctcttccccgagctaaaacacctctcccacctggatctccagctccacgagtctcacagaacagccacactggctccttcgttgtcttcagctccacaacctaagacatcagtgggagcaccggctcctccctggacctccagctcaacgactctcatagacttaaaaggcagcacctgctcctccccaaggctccatctccaccaccctcagatttgaacagcggtagcaccacctcctctccaggtcttcagccccacgtccctccctgaacaatcccttctcatgaaattcagcagtcaagaaatctgcagcggaagtaaatgaataaatgttttgttttcaaattgaaanaaanaaaaaaaatatattaccctcgggggggggcccggccccaattccccttatggggaggtttttacgccccctccctggccggtttttaaaacgtctggatggaaaaaccctggcgccacccaaattaattgc

SEQ ID NO: 84289 - DNA, 347 bp, Homo sapiens
aatcattggctcacatggagccttttaggccagtggcctctgccgtgcacagcccaacactatttcttattcatctctcttcaaaattgtccactgaaggcaattccaaaaaaaaaaaaaaaaaaaaagccattccaaaattcttccaagcagtggcagcatcattagaataacagtatgatccctaaatttaacgtagaagttctggtatgtctactgaaaaccaatattattccattaaaatcacacttcattcagggggttaggactgtcttttccttcatattttcagggtgtttccaaacaagaggatcattttgaagccagattgctaatgtacctaaaac

SEQ ID NO: 84290 - DNA, 430 bp, Homo sapiens
gatctcagctccctgcaacctctgcctcctgggctcaagcaatcctcccacctcagctgggactacaggtatgcgccaccacgtccagctcatttttgtatttttttgtagagacgggtttgccatgtcatccaggctgatctcaaactcctgcactcaaaagatccgcctgcctcataagccaccgcactgggcctctgctgattttattctaacttaattttttttcaccttaaatggcggagctaacaacggattcaatttagctattcactcgaagtaataatactctgaaaagcacttaaaaaatcataaaaccaattcaaaatcataatgaataagattgaagaaatctttttttttaaagttttttgctacaaaattctgaatcaacatttgctacagtcaaaacaaagcagtatttttcctt

SEQ ID NO: 84291 - DNA, 509 bp, Homo sapiens
ggtgtgggtacaagggaattcaccatgccattaaatataatttaaatgaaggacagtctaaatgcccatcaaaaaggggctgataataaagatgactctcttcctgaatggaacaccaatgcagctattaaatggatgcttactaagatgagagctgtccagtcataaactatagtgaaaaggcatgtcacagtactatttagttttttattttataaatacttatgttgcagctgggcgtggtggctcactcctgtaactccaacactttgggagaccaaggcaaaaggattgcttgaggaaaggagtttgagaccagcctgggcaatatagtgagatcccatctctataaaaaaaatttaaaaatcagctgggcatggtggcacgcacctatagtcccagctactcgggaggctgaggcaggagggttgattgagcccaaaagtttgaggctgtagtgaactttgattgccccactgccctccagcctgggtgacagagtgagaccc

SEQ ID NO: 84292 - DNA, 392 bp, Homo sapiens
ctcactggccaaagtgacacttggaggctttcatgaaggagacagtcttatcagattctgattatccaaaccaacagttttaggtatgtctgctgtacaagaagagggatgctgcttactaatacaaaattgatttgttcactatcaacagaactagcaatacaaacagaaaacagtgtgcacatggctatactcacatgtacgcacatgttccaggaagaggaaaggtacatatgtgtgaagatgagtaatcttcacacatataaggccacgcaccattttctgagccaccctctcattcctcatccactgcctgactttttgccttcgttgttcttggaaacagagggatttctcttgtcttacttcagggtccttccgtctccttctgg

SEQ ID NO: 84293 - DNA, 519 bp, Homo sapiens
taaagagtagcttgttaatgccattacataggcccccacgtcctatagtgctgtggtgaaaacaacaaggtcctaataatgggccataccaatgaactaatttctactatttaaaaggacacgggaaactgctttcagtggcctgccttcttagttctggtatattctgctctatactcaagagttattctgtttcctgtgccttcagaggaccacattcccagctttatgcccagagaagtctatgaaactaccccccaccggcatcctacagagttgggatttttttcagcctcacaaagccctctgttgttcctctttaacagtcagctaactgaagttagggagaagtggtggggagcacttctgccctctccctctcctttagattttaagaggcttccagcagcttgaccttaccttttgtgtaaaatatatttagtcactcattacaagttgcaatccctttttggtccttgggttccagatggggaattgaaaagagtttttagatgtcag

SEQ ID NO: 84294 - DNA, 1409 bp, Homo sapiens
  misc_feature (1)..(1): n is a, c, g, or t
  misc_feature (3)..(3): n is a, c, g, or t
  misc_feature (72)..(72): n is a, c, g, or t
ncnggtaaatccacgggaaccttctcagtgcagtggtaatacagagtataaagtagccctccttactcttangaggaaattttgcctctcaagctctgcccttcccagcccagcccagcctacccaacctcatctcttccctgtagaccacatcccaccatgttcccctgagcctccaaggaaggggctcagggggccccatggcctcccgctccctgtggccccacagcccccgtgggccaggggaagcgccccagaagccgaagtgcccaccatgggcaaccacacgtgggagggctgccacgtggactcgcgcgtggaccacctctttccgccatccctctacatctttgtcatcggcgtggggctgcccaccaactgcctggctctgtgggcggcctaccgccaggtgcaacagcgcaacgagctgggcgtctacctgctgaacctcagcatcgccgacctgctgtacatctgctcactgccgctgtgggtggactacttcctgcaccacgacaactggatccacggccccgggtcctgcaagctctttgggttcatcttctacaccaatatctacatcagcatcgccttcctgtgctgcatctcggtggaccgctacctggctgtggcccacccactccgcttcgcccgcctgcgccgcgtcaagaccgccgtggccgtgagctccgtggtctgggccacggagctgggcgccaactcggcgcccctgttccatgacgagctcttccgagaccgctacaaccacaccttctgctttgagaagttccccatggaaggctgggtggcctggatgaacctctatcgggtgttcgtgggcttcctcttcccgtgggcgctcatgctgctgtcgtaccggggcatcctgcgggccgtgcggggcagcgtgtccaccgagcgccaggagaaggccaagatcaagcggctggccctcagcctcatcgccatcgtgctggtctgctttgcgccctatcacgtgctcttgctgtcccgcagcgccatctacctgggccgcccctgggactgcggcttcgaggagcgcgtcttttctgcataccacagctcactggctttcaccagcctcaactgtgtggcggaccccatcctctactgcctggtcaacgagggcgcccgcagcgatgtggccaaggccctgcacaacctgctccgctttctggccagcgacaagccccaggagatggccaatgcctcgctcaccctggagaccccactcacctccaagaggaacagcacagccaaagtcatgactggcagctgggccgccactccgccctcccagggggaccaggtgcagctgaagatgctgccgccagcacaatgaaccccgagtggcacagaatccccagttttcccctctcccgaattcc

SEQ ID NO: 84295 - DNA, 308 bp, Homo sapiens
aggagaatcgcttgaacccaggaggcggaagttgcggtgagccatgagcacaccactgcactccagcctgggcaacaagaaggaaattcatctaaaaaaaaaaaattcaagttacctaatttaggtaaatctttggcaaacaaaattagcttaatattgtgggcttaataaaaatagctatgttttatgagttattaccattaagtataacagaagtatacacttctttctacttggtatgttcttcctaaatgtgtacaggtttactagtcgaataagccaatattgtatcaactagattgcggtgt

SEQ ID NO: 84296 - DNA, 319 bp, Homo sapiens
tagaacacttactttactttcagactctttgcaggggtttgccctacaggatcatggaatttgtgctctgggaggtgggtgccataattattcccattcacagatgaggaaaataaggcttacagtaactaagatcacaaactaagaagcagcaaagttgggattccactccaggtctatgacaggcaggatgaggcaggaagaataagtatgatttttgtcctcattctacagatggggagactgggcatcagagaggttaggtgacctgtgcaaagccacacagcaaaagacagaacctggtcttggagccagggat

SEQ ID NO: 84297 - DNA, 361 bp, Homo sapiens
agggaagatctgaaatatatttaagatcttttgtaaagactctttacaaaaaacttgccaatgtgaataaattcttgaattttctttggaataggatgcagatctgccatgtttcttaaggcattttgtttatctctacatgtatgcaaggtttatttcccccttacctaagcttaggcaaacactaattttcagccccaggcaagagttttctttttatagacatgagagtatccaattgtgtgaaccctggaatgctaaattgaaaccctattcctgccagtaatcaatttgatgatgcgaacatttcataatataaaggctccacctctttcattaaccaatcactcaggctgctttg

SEQ ID NO: 84298 - DNA, 351 bp, Homo sapiens
ggccccttcagaggtctgattgcttacgttatggacttacaattctaaatttgttcctgaaaactttccttagtgtgcatagtatatgttaacgacaatgggtgctaggaatatggggattttgctctgtgggggaaccagagattactttgaacagaggcaagaagcattttagtaaactggaaatgtttatttccatgctgtcttaaaaatgtaaagcatattcaagcaacatggtttggtgatttgttttgcaaatgaggcaattcatttaactctagagcttccctctccccactccccatcagatgatagagatactattcacttatggtgaacttggcaatattt

SEQ ID NO: 84299 - DNA, 643 bp, Homo sapiens
gccaccttaagagctgtaacactcaccgggaaggtctgtagcttcactcctgagccagcgagaccacgaacccaccagaagggagaaactccgaacacattcgaacatcagaaggaccaaactccagacgcgccaccttaagagctgtaacactcactgcgagggtccgcggcttcattcttgaagtcagtgagaccaagaacccaccaattccggacacagtggctgggattacaggcacgtgccaccatgcctggctagtttttgtattttttgtagagacgggattttgccatgttgcccaggctggtctcgaactcctggagtcaagtgatctgcctgcctcagccttccaaagtgctgggattacaggaatttattctcattttacagatgaggaaactgcagcacagaaagtctgttacttgaccaaagttacataggtgataagtgatagaatggggatttgaacgtaggcaattctgtctcagccccagcttgttctcccattctaaagatcacatctttgactcattttgtctgcctgattgcttatggtgatgcttggggccacaggtcctcactgcagacctcccaggggcaggagccctgcccctgagccctagaccaggagccttccccc

SEQ ID NO: 84300 - DNA, 698 bp, Homo sapiens
acacaaatggattgagacagggagttagaattttaatcaaataaataactggaggaaacagtggctcaaaagaaggatgtaagacagattaccttggacaggtacaaagaaataataaaagcttgccaggagtatgatcagtaaggaagggaacagaatacatcttgccatgaaaggaaagaggaataagtggaaaaatgccctctgatacctcagcaacaagagagaggaatgaaacttcacgcccttcttgactggggttagaaacatcattataggtattgccacaaagtcacaagatttttttattacattaaaaaatgtaggccaggcgtggtggctcattcctataatcccagcactttaagaggctaaggcaggaggatcacttgagctcaggtgttgagaacagccctggcaacaaagaccttgtttccacagaaaatcaaaaaattagctaggtatggtagtagtacgcagctgtggtgccggctactttggaggctgaagtgggaggatctcttgagcctgggaggtcaaggctgcagtgagctatgatggcactgctgcgctccagcttgggcaacagagcaagacagtgtatcaaaaaaaaaaaaacatataatcttgagggatagtgattgatagggtaaattatgagcattacttatatgagaatgtaaaatttaaaattgtca

SEQ ID NO: 84301 - DNA, 490 bp, Homo sapiens
gatagaatcgagctggaccggttcgcatgtttcccggttcgctcccacttgagtcccttcctaaggactgggatgcagatttcctcaaagaagctggagcagccctcctggcctataagctagaggatgacagtgcacaaaacagcatgagtctggccccctagcaggcatggagttactaagccagctctcagccacctacccagattttcacttgaaatagaaaaaaatcaacatcttgttcaagccattattatttccgacctctgccacagcagtcaaatcaatatcctaactaatacacagaatctggaagctggaagtaatcaaccttaacaatacaaatatgcagcattggcttaggggtcagcatgggcacagatactgtaggatggaagaatggcaaccctcagagatcacaataaaacatttggcaaaacccgtgatatcttagaaaacagcctgcatgccaacatggcctgtaattcta

SEQ ID NO: 84302 - DNA, 156 bp, Homo sapiens
aggccgaatcccatttgtggagtctcttgcgtgtcaagcaccttgcagtcagctcaactacacacttttgggattcgttgcagacacgagagaaggttatcagcaaaataaaggaaccagggctcagaattaccagaacaatccatgacagaggag

SEQ ID NO: 84303 - DNA, 265 bp, Homo sapiens
ttatcaggtagtgataaatgtaacaaataaaacatccagaagggtcaggagcctgtgtgtgtaggtgagtaagaaggcctcttggagaatgtgatattttagcagaaacagaatgaagtgaggaagtgaaccatgaggactgtacagaggagagtagtccagagggagaacagcaagtgtaaaggccctgaggtcagagtgtgcctagaatgctcagggaatatcaatgggacagcgaaatggtaggtcatgtaggggacttgca

SEQ ID NO: 84304 - DNA, 866 bp, Homo sapiens
atcttatttcttccctgtttaatttttataaagattgtaaaaatacattttagctcaagagttcaaggctttcagagccctttgtgcagattgctgctccagtcccgggctattgtgtattgtgataaattgtgtgctcttccagggactgttactcatttttctatccagcacagtgcttggcacatagtgggaacacagaaaacgttagttgactgacatttgattctaaggagcagaatcaaagtgtagatttcggattcattttagtcgttgaattgtgcagttttagtttaacaggacaataagaaaatgactagttcatgtgcaaaatgcgcgttttgaaaaaatacttaaatggagcaactcatggggtcttggaaaattctgtcagtttgctggatctctccgttctactatcatgtttgagcttctgttcctctcacttccagagttctgaaagagcagtctatgctggctgcttccctttcttcacgtcttcactacacagtcattctttaaacttttgcagccagattgttccaaggttgccaattacctagtgggtaaatttcccacattggccgggcgtggtggctcacgcctgtaataccagcacttttgggaggccgagtcaggtggatcacgaggtcaggagatcaagaccattctggccaatatggtgaaaccccgtctctactaaaaatacaaaaaaattagccgggtgtggcggcgcatgcctgtagtcccagttactcgggagcctgacgcaggagaattgcttgaaccaaggaggcggaggctgcagtgacctgagatcgcgccactgcactccagcctgggcaacagagcgaggctccgtctca

SEQ ID NO: 84305 - DNA, 503 bp, Homo sapiens
actcatggggtcttggaaaattctgtcagtttgctggatctctccgttctactatcatgtttgagcttctgttcctctcacttccagagttctgaaagagcagtctatgctggctgcttccctttcttcacgtcttcactacacagtcattctttaaacttttgcagccagattctcccaaagtgctgggattacaggcgtgagccaccgcgcccggccttaaaaatgttttcaagtcggagcaataccacttgttgaaatggcagtaataatattagctaacatttattgtatgcttactctatgccagccttttgacatcttttcccctaattcttagcccaagcctgtggggtaggtatcgttactatactatgaatgagaaaagggatctccaggacctgacgcaggagaattgcttgaaccaaggaggcggaggctgcagtgacctgagatcgcgccactgcactccagcctgggcaacagagcgaggctccgtctca

SEQ ID NO: 84306 - DNA, 373 bp, Homo sapiens
tctacctagaatgtcctctctcttctctgcacgtccttagtaacccctgtggcccacttcttacttaggtctctcctaacatgtatctatgacacattgatccctaacagctatgattcttcttatactttttcagtaatttaaattttatcattctactgcttgttcaatacatctctctatgtaaatcttgactccataatgaggtttttaacttcgaaggggttggaagttatctgctgccttggtacccccccgccattacacaagagtacattttaagcacattacacctgagtgattgttgtaaaacacagatgcaatctttccaccatcctctaagaattcttctgtggcttccattggtgaattc

SEQ ID NO: 84307 - DNA, 717 bp, Homo sapiens
  misc_feature (591)..(591): n is a, c, g, or t
  misc_feature (629)..(629): n is a, c, g, or t
ctacgtgatcctgtgcattttcaccacatagatctgctagcttacaaatgatgcacacagtcaaggtaggaattataggcctactcagagggtacccagacacagaaagttttagggtaaatagtaaactacaaataccctcttggttaagttaattcatcaagttaataaaggtcatattatctatcttctgctggtgacaacttgttgtctcagtatagtctgtctcaagaaagaactggttcagattgcggtgttgcaaacaccgcaatctacctataacagagtgttacagggattccgtaatctttgctctccagcatctgttggccggggtagatggggggtttgttgtccttggaaacctggaaggaactattagtcatgtcttaatcctgagccataaatttacactcatttgagagataagcaaatttggcagaaagactgagtcaaaaatctttgtcttgatctctgagacaggattagtggacaaactaaatcataaattatttattattttggtcacagaagcgtgagccaccgcgcccagcctatagctctttactttttaacatgccaccatatctngtctgacatgagattattcatttagaaacattttattnggtcttccaaatacattagaatgtcagccacaaaagatagcttggggccttataattgaaccatttacttataagattgcggtgttag

SEQ ID NO: 84308 - DNA, 360 bp, Homo sapiens
cctgttacttcctcctccggttgtgccttgcataacctgtgtgctgccagagcctagggtgttccaagagagacacatgctccggctgccaaccccctttctgctcaggagaccgcaactcagtgatgatctccagtggaaaaagacagacttgaaataaattcttgttggactccagccatgtaccatgcacagaaacctatccatcatgtagatgctaacctgtcaggtaggtgctatagttacccattttacagaagagaaaacagaggttcgccagctggcttcaaatctagctctgtctgactctgaagtcttcattctctccagggatgtcctgctgcctccacattcctttaa

SEQ ID NO: 84309 - DNA, 858 bp, Homo sapiens
tttcctttcagaagcactgctgacagtttggtggttgccattgggacagtgagccttttgttctttctgaggttgggctggtttctcctcttggccctgccctacagaccgtaaaggaaatcagcaagaagtccccagcaaacatccacagatggccctggacatcagccacattctgagaaacatgtcacgttctgggagggctaaggcatcaagtaaggcctatggggctggagaatccgagggcaggtggggcaacccagagccatgggggctacccatgggaattgggaggtcccaagtcagatgcaggggttccacaggagaagtcccagagccaccaagtgctctcctgtcccagggagcagtcaacaccatggactgaacacttactgggcttcaagctctgggccaggctggggcatgtggggccatgagggagctcagagtgggagacagagagacaagtgtgctcagagggcacccatttctgggtgtaatgtggtcctgagattttggctgagaagggtttccagggtttcatatgtgttatggagctgcttcctctccccagcctcaccttgcaggaatcccagtgaatatattgccaccctatttgagctcagtgccctcatggtgtaatggcaccagcagatctgcctgtgcatggacttcctgtactacccattcctgaggggtgatgcttctgcagggcctatgacctggtgcacaactttagacaccatcatcctggagcagcactgcaccctcactagccagggtgttcatgacttcctcaaggccaaggccacgttcaagacttgggacttcagtgatgcacttgtgctgggcaaggtg

SEQ ID NO: 84310 - DNA, 308 bp, Homo sapiens
cctgtgctttgggaggaacagaggattgagaaatggtggcggcatggaggcagcagctggaggctgctgctttagttcaacatgccaaagtgccatattttggagttctgttttctgagacccaacatgttctatttttcccatttacatataaacacactgagacaagccgggcacagtggctcacgcctgtaatcccagcactttgggaggccgaggcgggtggatcactaggtcaagagttcaagaccagcctggccaagagaccaccctagtcaacatggtgaaaccccgtctctactaaaaac

SEQ ID NO: 84311 - DNA, 637 bp, Homo sapiens
gccctaaggctagagagaggatggtcctctggatgggagaaaggccagcctgcctgggggaagatagcctctcattgcacaaacatctgttccttgaggatcccgtggcacttcacaaccctcttcctctcaactcttatcttttgcctaaggggggtaatttgttttttcctttctctttatctgattgcaaatccaaaacattatcttaattacagaagatcctagtaagtcctcccagcattcgaagaatgtcttaagtcttgaagtgacattaaatataattagtaaaacagaaacaaaaccatcaaccttcacaaccctaagaaatgccttttggtaacaccacaaaattatttaactagtgtctccccctccaaataaatctgtctttgttttgttcagtttttccattatagatatatcaagacatcatttattaactaaacttccacagaccagcctggaatgcaagttcctatttctgttatgttttctattgtgaaactgggtttcaagctacaaacaactgattctcaaagttttggcaaagaatccatttttactgttgggactttgtttttgaattggaaagggtggtgtgtccaggtacagggagggatgatgtaagtggtcc

SEQ ID NO: 84312 - DNA, 1191 bp, Homo sapiens
  misc_feature (1)..(1): n is a, c, g, or t
nctaagcgcgactgactctcttaactaccaccgctacagatatcatggaaatcaggacagtggcagttcggattgtggcaatcaaaggggtggaaagtgaattctatcttgcaatgaacgaggaaggaaaactctatgcaaagaaagaatgcaatgaagattgtaacttcaaagaactaattctggaaaaccattacaacacatatgcagcagctaaatggacacacaatggaggggaaatgtttgttgccttaaatcaaaaggggattcctgtaagaggaaaaaaaacgaagaaagaacaaaaaacagcccactttcttcctatggcaataacttaattgcatatggtatataaagaaccagttccagtagggagatttctttaagtggactgttttctttcttctcaaaattttctttccttttattttctagtaatcaagaaaggctggaaaactactgaaaaactgatcaagctggacttgcgcatttatgtttgttttaaggcactgcattaaagagacatttgaaaagtatacacaaaaatcagatttagtaactaaaggttgtacaaaattgtaaaactggttgtacaatcatgatgttagtaatagtaatttttttcttaaattaatttacccttaagagtatgttagatttgattatctgataatgattatttaaatattcctatctgcttataaaatggctgctataataataataatgcagatgatgttatataaggtatatcagacctacaggctgctggcaggatttgtcagataatcaagccacactaactatggaaaatgagcagcattttaaatgctttctagtgaaaaattataatctacttaaactctaatcagaaaaaaagaatattctcaaaaaaatctattatgaaagtcaataaaatagataatttaacaaaagtacaggattagaacatgcttatacctattaacaagaacaaaatttctaatgctgctcaagtggaaagggtattgctaaaaggatgtttccaaaaatcttgtatataagatagcaacagtgattgatgataatactgtacttcatcttacttgccacaaaataacattttataatttctcaaagtaaaattgagaaatctttaagtttttttcaagtaacataatctatctttgtataattcgtatttgggaatat

SEQ ID NO: 84313 - DNA, 535 bp, Homo sapiens
ttccagtggtgtctgtgttgagccctgagaatgattgagggacctgttttgtggtcattgaggaggaagaccagtaaggcataatgagtttgagagcattttccctgcaaagaagtgcctctttcttgagtcagcctcgaagactaggattccctggagtttggtgacagaacccccaggattcagaacactcaccagccactctcaacacaaggcattctggaggacaggtgatgatggtggattttataaggcatagaatgaggaatctcttccaagcccactccaactctggaccacatttaagagaaaggaaagtgcatgtgaattggagggggtgggggtggggggtcacgtggaccatctgatccaggctgaaaagctctcagggctgaggaaaggtagacagggttccaaccctgaggagcagggacttaaatttaaacctgctgggcacagtggctcatgcctgtaatctcagcactttagaggccaaggcaggcagacctcttgaggccaggagtttgagaccagc

SEQ ID NO: 84314 - DNA, 625 bp, Homo sapiens
aagtttccaggcacttgtcaactggaactgtgggtgtttgatctttgagagaaggcagatacacaggaggtaagcactgtgtatttgcttggctctgtgttggttttcttgctttcttcaagggacagcactgtggttttgtgaagctgaagaggcagaaactgtagttcgagattgctaaggtgacttgaatttgtggagcaaggtgccagtgaaaaagggctggatggaatgaggggcaggagactgtacggagatctcctgtggatcctgggtttacagagagaaaagcacatgctcaggatgagactcttcaaggcccagcatagaatggctgctccaggattgagagctgaatggagatggctgtggctgtgtagggctaggatatgataaacttccgggcaagtcagaaagcaggggcctcactaagcaaagagggcattcaatgaagacctcagaaaggccacaggttcaagttaatgaccacaccctaagtgagcacgtcctcatcccccagattaaagacagaaccaaaacagtcaagacaagacctacacgcacacacacagacacacacacacagacacacacacacacacacacagcatgacaagatcaagag

SEQ ID NO: 84315 - DNA, 384 bp, Homo sapiens
ttggataaaagtgatgagaccagacatcctttctttgcttctgatcttagagggaaagttatcagtcttttactcttaaatatggatgttagcccagggttttttgtagatgccctttattaagatgtaggaagatttgagcacttttatcaagaatgaatgttggatttcattaaggcttttctacatgtgtggaaatgatcactttgctttttttttcttttagtttcatattttatatatagattgaattgtgtccctccaaaaaagatatattgaagttataatccccagtccctttaaatgtcacttgtttggaaataaggtctttatagaggtaattgagatattaggaattaggatgggcagtaatccaatatgact

SEQ ID NO: 84316 - DNA, 219 bp, Homo sapiens
aggcttttgccaactatcttgtaagcataaccacatttttaatgtttcttaggggaaaatgtatccaaacaatcagcttccaaagcaagcttgggaacccagttctctaaggtgtggtaacttggacatgcactttttaacgacgtgcccataatatctttgcagaaattgaggattaagtaacacttaaaaatagagaatatggacttagaaaaagag

SEQ ID NO: 84317 - DNA, 306 bp, Homo sapiens
aagaatttcagctataggcagagacacttgccatcttagatctcacaactctaagccaagaaacgcgcgtgcccctctgacctgctacgcataccgggttatcatttcccgggttctagggttaggggctatccagcgagatgaaccaccagccctgacctggcctcttgggcgagagaaacacaccgcaaccacctcggagtaggcagcatgcctgtgtgctgcagcttccggtaacagaatcctagcttgctctgcttgtctgggagagtgacacgattcatttcattttgcatttaattctca

SEQ ID NO: 84318 - DNA, 396 bp, Homo sapiens
gtgaaatctctagagctttccacataaaattatattatctgtaggctagagtaattttacctctacatttccaatttggatagtttgtttctttttaattcttaatttgactagaacttccaacactatgtggaatagaaatagcaaaagcagacacctttgccttgttcctgagcttagagcagaagctttttgtctttcaccctggagtacattgtttgatgtggttttttaatgtgtggatttcacaatggtagtattttagttttaaaattcctacttttttgagtgttttcaccctgaaaagattttgaatttcataaaatacttttctctgcatccatgaggtgatcaatgtttcttttattttgttaatgtgtacacattgatcaattt

SEQ ID NO: 84319 - DNA, 513 bp, Homo sapiens
ggatgagcacaggagggaagcatggggctgaaggcaggctttattatgtgaaacagaaactactgcgataggttcatatagtgatgagactgattcagtattgagggggaaactgataatgcaagggagagagaaggaggggaatttagaattgcttgcaggggaataaatacatatttaatctctatactgtccgaggcagttctccataataacaaggccaaaatgctaaattattctgtggtaataagcttaagtttcactttaaacataaagaaacttccttttgaactattgaatcacaacatatatttcagaatagaaaatcaactctattatatgtctctccttttaaaaaaaatttagaagatctagcaactgaaaatatttttccttttttatttatgtcaggagtactgaggaagcgtatgatcatagctgctgggatccatgacagcatttgtaggtgagtaatgaatggctttaaatgagagacaaacccgagacaatatg

SEQ ID NO: 84320 - DNA, 270 bp, Homo sapiens
acataaacttgccttttataattccaggcactagaggttgacttctaaccctgacaccttttatttctgttcttttcctttccagtcctgttgtatataagaagtatcctatgtccactagctgactctgttattaatagtgaggacctgttcagcatggttttcctaaaaggaaactatccagctttcatttgcatttatatgacatggtaggtctaatgcttctttcaaatcaaaatgactgttttttttctgtgtagggtgtgtgtg

SEQ ID NO: 84321 - DNA, 864 bp, Homo sapiens
  misc_feature (710)..(710): n is a, c, g, or t
gctttcatatagattatcatgtctttactgatttaaggatctctgttttaggattagaaaataatttcatttgtccctgtaataatgtacattattagaaaataatttcatttgtcccttagaaaggagggcaagtgcaacatttgcaatgttttcttttaaacatttttctgatagaagattatataatcagtttggttttagatcaagaaaatacgattaagacctaattagatatttttatagacttgattttaaatcagtaattactgcttttaaaacgctttgaccaaaaaagatgatccttgtaattaaatattaccaagtaaaactacttggtaaaatatggttttatattattctatttacatacatttattttggtcccaactcatgattgtaaagcctgtgaaccacaaagtgttctggatcatcaaacgatagcaaataaaaattaaaaaaaaaaaaaaaaaagaaaaaaaaaaaaaactctgtgttgcggcgcgcgccccgcggcccccgcgaaaaagcttttctcatagaacccactccgcggtggggcgcgcgcgcgcgggcccccgatgggttaggggacaccgtgggtgccataacgcgggttccccagagaggagaatccgcgggcgcacaatgaacaagagcggcgcggggatattctctccacccaatattagaaaaaagcgccccgcggngggaaaaacccgagagccgttttcgtgacaacacaacttcccaaggagggggagttcttcgaggggggcgtcctattaagggggggacttctaattcaaacagggggggttccacaaggggaaaatctccgtattatccagatttaaggcccgg

SEQ ID NO: 84322 - DNA, 213 bp, Homo sapiens
gcactttggggccatggggtggaggtgggctgggagaagttggcaggagtggggaaggagagtgcacgaattaaatttctttagctttgcagagaaacctcagcagtttctctgtgctgcttgcaaaacatcctcagactttcacatgtataattagctgtggaaaaagctgggagttacctcgtaccgctgttgtttgagtgtgtgtgagcg

SEQ ID NO: 84323 - DNA, 722 bp, Homo sapiens
caaataagttataggacaactttacttttaattaacttttatttctcatgagttgatttttttgtgacgttcctcttgattttcccagattctcatgtcaccagggtagataggctggcagtggccaatgttgttctaagagaaatcctaaagactacccaatttttttttttcttgaatccgcaggatcctgttttgtgaaaattcctcttacgcccacctataggatagacagtggaggccccccctgggagaaagtgtacacagaaagtgctatctaattacagaagtagcagaatttcctttgtgctcagaggggaagtgctacaaaagtgtaattactttacccagcatgtgtgatttacgggacttaaaatgtgtgagtttccaaagagtcatctgtttttaaatacagtatccctcccagccaggcaggatgtgtttggggaggtgggagtgaggacatgtacttccgtcctgtgcctgctgcaggatgcctggtgacaggggactgaaaccactggtacttgctgcccctcagggtcttgcttatctgagtagaaggaagaaaatcagcaaagggctggaatctagtcagctactcccagaccagatcatccactgctctcctcttaccttcccaagccaaattctttttctaggacctccaagacttttcccagtaataagcaaaagaattgttagagtgaaccctgagaccg

SEQ ID NO: 84324 - DNA, 298 bp, Homo sapiens
tataaactggcttaatcatcatttcaaacactagtttgaagaattttgtctatatgtgatatgtaaacatttctgaataactatttcatgtcactttgagagggagcaatgatttcagataaaatatccctctaaatcttgccttttgtgcctaatataatatttattgtatttgacatggataatgcttaggaaataattctagggcttggatttgaatcacactcagtaagtttggtatgtagaagtgaaacccttagctggcaagcaaggtcagttagccatctgatatattgtt

SEQ ID NO: 84325 - DNA, 346 bp, Homo sapiens
  misc_feature (306)..(306): n is a, c, g, or t
  misc_feature (337)..(337): n is a, c, g, or t
  misc_feature (343)..(344): n is a, c, g, or t
ctaaacctttttcaatcacgtatcacatacccttattcaaatataagtaatttaaatgtcaaacatttttcaaagtcccaataaatttgtattgtcttctgtttaacagtttgattactaccttccatggttctggaaaattgaatttaaatctatgaaggttaaggtaaaaaaatgagctttacatcattcttagtttttgtattatagaagatataaaaatctttggaaagactttaattcagtgccttttgtgagttgggaaattatgtcaaaactcagtggactgaatattaataaaacttncttagcatcttactagactctgtagaaaaanaaaaanntt

SEQ ID NO: 84326 - DNA, 550 bp, Homo sapiens
aagatgacaagagtgatagtgaacctgatgtgttggttgtattgtgaaagaaaaaagggaatcatgggaaatagtatgggtcagctttgagtaactttttccatgggcacaatacggtacatactaattatgaatccaacaaactctatgaggactgtattgtgcaggtgtggagatgggccgtgtgtgtgtgggtgaggagagcagtaaaaaagaattaaagtcaatagataatgttaaaaactgaaaaaaaacaatcacatgtcaataaaagccatgttacttggagatacagaaataaataccaaaggaaaaaccagggtgttatgtatggcatagggctgatgtgcttttgtaataagtcagacagaactacgtgattctatgtgcatctatggcttcagggaaagtaaaaaattttatattttatagaaactcaaaagagtgctcattgcactagtatttaaaaccatccacttaaaaaccaggatatttaatcttgtgcaagcaacacaggagtcaagagggccttacgggtaggagcaaaaca

SEQ ID NO: 84327 - DNA, 319 bp, Homo sapiens
ccactaaaaaaaaaaaactaccaaaatattgtcaaaagtatgtaccacaaaaatcaggactcccaatgaaaacgattttaagccatgcataatttcatcccagatgattcagaaaacaaaactgcagacatttgttatattttcttttcctgttttttaaatgataggccctttccattagccacagttactaagtccaccttttctaactatacacagccatccatactttggcaaatatataaatttaggccacaaaaatttgtttacaagatttaaaatatcagacaccctaaaatttaactgggagtgattttat

SEQ ID NO: 84328 - DNA, 474 bp, Homo sapiens
agagaaggtggagatggcagatccagtgcagaagccaatagcaacgccctagaaccgggaacaccgtggaggggatcagatgtgccgctgcctcgggggaacaagtcccagagggggtgtctctgggagacctccctctgccaggtctggagcagaggcagggccaggtcttgacatgtatctctggtaaagcaaggactggagcctcctcaccccgatgaactgtggaggcgggctctgaacggctagaaagactgaggttcccacccactgcccagaaggtctgtgatgtggagaaaaagatacatcactgtgtttccatcacaacagcagagcaaagctacagtccttccaccaaaatactgctgatgaccgaatcttcatccaaaaggccttttactttcgtttgatgtccaactccataaatactcactgaatatggacaacatgcagggtaccagacctatgtgctta

SEQ ID NO: 84329 - DNA, 390 bp, Homo sapiens
gatacaaataaggttatgaaggagactgcagaagagtcatatcatcatgaacttaggtgactagaaaaagagaaacaggcaaaccctaaagaattcatatgcacattgtgcatatatttgtacacacatatcacatttggacaccaaataagatacagaattccaagtatttcatttattgtggattaagctgttcagtaaacaccataagttattggtaatttatactttaagataataccaataagaggtgcatgattatttttgaaactgacggacttcaactctataataaacatttataaaatatttattgtcaatgatgatgcatgactatctttctagtggggcacagccaggttggctgatagactagattgcggtgtttgg

SEQ ID NO: 84330 - DNA, 377 bp, Homo sapiens
tcccaggttcaagcaattctcttgcctcagcctcctgagtagctgggactacaggcacacaccatcatgcccagctaatttttgtatttgtagtagagacaagatttcaccatgttggccaggctggtctcaaactcctggcctcaggtgatctacccgcctcggcctcctgaagtgttgggattacagaagtgttgggattacaggcataagccactgctcccagtcgaatgccattgttctgaggagaaacatgctgaagtgtttataagaatcacaatgtctgcaacttaaatggcttggcaaaatatgtgtgtgtgaaagaaaaagtaaatatggcaaatgtcaacatcaggtaaataaaaaaaatttaagat

SEQ ID NO: 84331 - DNA, 654 bp, Homo sapiens
cccaggacttgtgggctgtgcagagtcgtgcgtcctttgacagcggcctccggccgggaggcaccagctcttcgaacaatgtttaaaagtctcttctgttcatcctaccggggtgccgtctcctgccggtcttttcactctcaccaggcccctcgcccgggcaccccccggccaatggaccactagctgcacccggttcatccaccgcgcggggtaccacccactcggacccgagccggcttcaagaggggcaagcaggccaaggatccagcagaggcctcgtggctctgagtctcagtggcaccatccctgcgtcacgtcatgctagcccgagcaccggtctcacgagcccggcccctgccctgcgaccaggccactgccctgttgcgcccggcccacgatggatggccaagtggggatggcagccaggaggcagggactccggtgtcagccaaaccagccagaccacgacagcagatggtacactgtgggcctggacctggagggggcagaagagagcctctgccacacccggaccccctgggctcctgaacagtccaccggcctgcagactcggatgacacttaacgccgccgggccctcagctgccctcctggaggggctcctgctaggggggtgggaagccatcgaccc

SEQ ID NO: 84332 - DNA, 131 bp, Homo sapiens
cgcacacaggctaggtggcctcttctgcacaagatgggccaccaacaaactcacctatgctacatacctgctccccaccgcccccacctcactcgtaaagtatggggaaaagaaagcaaaagccctttccg

SEQ ID NO: 84333 - DNA, 315 bp, Homo sapiens
cctaaccactccttcactttcagactaattctatagttctattttctccaatatggtagtcacacatgaactagtaaacacttgaaatgtggctgatccaaactgagatgtgttgtaagtatacattacactggatttcaaagacttagcaagaaaaaaagaaagatatctcgttactagtttttgtattgattacatgttgaaatgatagtttggatatactaaattagattattaaagttaatttcagctgttccttcttccttaaaaaaatatggctagtaaataactttaaaattatgtgctcactttata

SEQ ID NO: 84334 - DNA, 385 bp, Homo sapiens
gccacagtcttatgtgcctgcaaagaaagctgctgagtttacactttttaaaaattctgtatcacttctccatcccactccccagaagataccactgttggtatttttagtatgtgtccttccagacttacttccatgcatatatggcttatatacatgtactcacaattcacacgcaagcttttttcattttctgatacatcatgaaaactcatccatgttggccaggcatggtgactcatctgaggtcaggagttcaagaccagtgtggccaacatggtgaaaccccgtctctacaaaaatcagccaggtgtggtggccacacgcctgtagtcccagctactagtgaggctgaggcaggagaatcgcttgaacctgggaggcg

SEQ ID NO: 84335 - DNA, 344 bp, Homo sapiens
agcataaggacagatatatacatcagtggagaagaattgagagcccagaaatacaccctctctatatgatcaattgattttcaatgaagatgccaataccatctaatggggaaaggacaaacttttcaatagatggtgctggggaaacttgatagctgcacgtaaaacaatgaaattgtacccttacctgataccttatgcaaaaatggactcaaaatgaatcaaagacctaaatctaagagctaaagctataaaactcttagaagaaaacataggggaaaagcttcgtgatactggatttgatataatgatttcttacatattacaccagaaacacaggcaac

SEQ ID NO: 84336 - DNA, 612 bp, Homo sapiens
tgtgaggcacaggatctcagtcctagattccagggtatcgctatttcatatacagatttttaaaccagtgtttggcctgaactctcatctccagttacagataaaaccagtgcctgcaaatctccagccttgagagaggtaaagactgatttgcttcttccatgtccctctacaagccaaataacaaacaagtcttcatgggaacgaacagtgggcacatttgaagatgcagatggtgcaaagggcctatagcgtaagggttgaagtggacaagccctgatgaagccctgatgaacttgaaaatgaccaaccagacctccctgctaggaaacagcctcactcacacagaaaaaaaactgctgaaaattaaaacagaattgaacaggaaaaggttctccagaaacaaaggaaagaggaggcccacataaaagtgaggggcagtagtagaaacaggagacctcaaaggcaatctgtgtttcataacggaaaaataactctgtgaaattagaaatgctatcctgagtcactaggctttcttccaaacattcaggaaaatgaacttccaataaaactgacccatggcaaagttttcagatccaaatctcatagaag

SEQ ID NO: 84337 - DNA, 390 bp, Homo sapiens
atattctattttgagatctatttgtcttagcttggaggtggttttgttaaatgtccacgatttagagacggcataatgaaaaaatgaccaagaatttggttgggaatgggaggagcttagaagaacaagaaattggctttgattttatagtgtatggtgctctgttggtagctggacatcatcacaggctttggattgagaagacctgttctggagttctagttctgctactgcctagcgttgtgatcttgatgaagatactcttccttcctgggcttcagtttttgatctataaattgctagtgatggggctggactatttttaagtttgttctaactttagcagtcttaagaattaaggttgcatgccagaaaatagggttaaatatt

SEQ ID NO: 84338 - DNA, 555 bp, Homo sapiens
gccctggctctatgtatcatagcaaatgagaccctttgcatgttttgcatctcttaggaggcctggagtattggcaatagcaggtcaaagaggaaaggcgagctgctggcccaggatgctacagaaggggcctggtcaagaatcacgaccaaaatagctcctgttgacaggagaggctcctcttcatcaacgccccttattaacctttgcagaacaccgtgactgctctggcctggcaggcagttttagtaccatcctgatgcctgggcaagacgggatcctccctcagccctgtgcccctgagggccccactccccactccacagggtaagaggtccagggcccactgggatgtgtccacctagagtttttgcctcaccttctagaccagggtttgcaaatgactcctgggccactagtttccattcagctcataagctaagaatggtttttatatttttaaatggttgtaaaaacatcaaaggaagaatgatatgtgaaaattacatggaatttaaattttggtgtccataagtaaagttttcctggaacatt

SEQ ID NO: 84339 - DNA, 517 bp, Homo sapiens
ccatttggatttaatgattcacccattcattattcaaaagcatattgtttaatttctatgtgtttgtgaacattctaatgttcattctactaatagttcctaggttcatgcaatgtgcttaaaaatgtggtataatttctgtattattaaatgtaaaactagtcttgattcgtaacataaggcctacgcaaagatccatcttctgcagagaagaatgtagattgtgccgctgttagacgaagtattctgtatacgtcagtttgctttatttggcataaagtgtagtgtaagccagatgtagtgtaagtcagatccagatgatctgcccattgctgaaacttcagtacttaagtcccctattattattgtatggcaatctatctgtccactcagaagttattatatttgttttatatgattgagcacttctgttttgggtatatatgtatttacaattactataacctcttgctgaattaaccccttttaccattatgtaataaacttatttcccaaa

SEQ ID NO: 84340 - DNA, 1662 bp, Homo sapiens
  misc_feature (1563)..(1563): n is a, c, g, or t
  misc_feature (1630)..(1630): n is a, c, g, or t
acgcgagctgggcagggaagagagcgcccggctcagtactgcgcgcgccctgcggctgtccggggccgcgcggtggccaaagcacagcgcgggagagtctgcgatgtcagagaacggctccttcgccaactgctgcgaggcgggcgggtgggcagtgcgcccgggctggtcgggggctggcagcgcgcggccctccaggacccctcgacctccctgggtggctccagcgctgtccgcggtgctcatcgtcaccaccgccgtggacgtcgtgggcaacctcctggtgatcctctccgtgctcaggaaccgcaagctccggaacgcaggtaatttgttcttggtgagtctggcattggctgacctggtggtggccttctacccctacccgctaatcctcgtggccatcttctatgacggctgggccctgggggaggagcactgcaaggccagcgcctttgtgatgggcctgagcgtcatcggctctgtcttcaatatcactgccatcgccattaaccgctactgctacatctgccacagcatggcctaccaccgaatctaccggcgctggcacacccctctgcacatctgcctcatctggctcctcaccgtggtggccttgctgcccaacttctttgtggggtccctggagtacgacccacgcatctattcctgcaccttcatccagaccgccagcacccagtacacggcggcagtggtggtcatccacttcctcctccctatcgctgtcgtgtccttctgctacctgcgcatctgggtgctggtgcttcaggcccgcaggaaagccaagccagagagcaggctgtgcctgaagcccagcgacttgcggagctttctaaccatgtttgtggtgtttgtgatctttgccatctgctgggctccacttaactgcatcggcctcgctgtggccatcaacccccaagaaatggctccccagatccctgaggggctatttgtcactagctacttactggcttatttcaacagctgcctgaatgccattgtctatgggctcttgaaccaaaacttccgcagggaatacaagaggatcctcttggccctttggaacccacggcactgcattcaagatgcttccaagggcagccacgcggaggggctgcagagcccagctccacccatcattggtgtgcagcaccaggcagatgctctctagcctggatctgaggcacaccagcagcatgacaaactcatgaaatggtgggagagagtctgctgcaagggtgagaccaggcagcctgctgggccacactgtcctgttggcatcacagccccaaggctgggggaacttcatgctgggacaagcagcccatcaacgccatgggttcaggctgatccaggagatgctcacaggccacaggacctggaaaacactcttggtggtgtcttggggatttggtgcacacaagaccaaggaaaggacagaatgaggaaaggcctggggcagaagagcccaactccttctcatagctgaccctcatcctcctgccttggcctcctggctgctttctccccttccccccagcntggcaggatctcttcctgttagcaaggatgaaagagagaggtcagtaggactggaacttggtaactncaagggcctcaggtggggcaggtgcagagggc

SEQ ID NO: 84341 - DNA, 606 bp, Homo sapiens
tgctatctcccaagataccctggttgaaagatgtttgggaaaggtttcaagtactatctggagtaaaaggtgttactgttgggatacatgacaatgagcttctacggtcagatattcatttgagtttgaacttgggatacgtgttgagaaaaccagttctgctcaatttttaaatcctaggacactcgaataatattccattgtctggatgtgccacacagtttgtttatttattcacctattgaaagacatcttggttgcttccaagtttgggaattataagtaaaattgctgtaaacatcggtgtgcaggtctttctgtggacatatattttcaactcacttgggtttttggtgataaaccaggagctgagagaatcaaaaagaatggtaaagcccaggcccaggacatcaagcaatgtacatatttggaatgacctcatgctgtgggccctgattgtaaataaaaatgcttttgcggaaacagcaaaatttggggaagcctgtcttccacctccttgactgaaaagtctggtcagaggtgccacctggctacttcctcctcatccttctaggaccttcctctggacccctcagttctgagccc

SEQ ID NO: 84342 - DNA, 508 bp, Homo sapiens
tgctatctcccaagataccctggttgaaagatgtttgggaaaggtttcaagtactatctggagtaaaaggtgttactgttgggatacatgacaatgagcttctacggtcagatattcatttgagtttgaacttgggatacgtgttgagaaaaccagttctgctcaatttttaaatcctaggacactcgaataatattccattgtctggatgtgccacacagtttgtttatttattcacctattgaaagacatcttggttgcttccaagtttgggaattataagtaaaattgctgtaaacatcggtgtgcaggtctttctgtggacatatattttcaactcacttgggtaagtactaaggaatacaattgctcgatgcgatggtaagggtatgtgttgttttgcagtgcatcaccaaactgccttccaaagtggctgtatcattcccccaccattttaaggcacagcctggccagccatgccaggatgtagcattgacttcttagatag

SEQ ID NO: 84343 - DNA, 586 bp, Homo sapiens
acgcgagctgggcagggaagagagcgcccggctcagtactgcgcgcgccctgcggctgtccggggccgcgcggtggccaaagcacagcgcgggagagtctgcgatgtcagagaacggctccttcgccaactgctgcgaggcgggcgggtgggcagtgcgcccgggctggtcgggggctggcagcgcgcggccctccaggacccctcgacctccctgggtggctccagcgctgtccgcggtgctcatcgtcaccaccgccgtggacgtcgtgggcaacctcctggtgatcctctccgtgctcaggaaccgcaagctccggaacgcaggtttttggtgataaaccaggagctgagagaatcaaaaagaatggtaaagcccaggcccaggacatcaagcaatgtacatatttggaatgacctcatgctgtgggccctgattgtaaataaaaatgcttttgcggaaacagcaaaatttggggaagcctgtcttccacctccttgactgaaaagtctggtcagaggtgccacctggctacttcctcctcatccttctaggaccttcctctggacccctcagttctgagccc

SEQ ID NO: 84344 - DNA, 889 bp, Homo sapiens
taatgtattaatatggtgaattaaattttactgatttttgaacgttaagccaaccttgcattactgagataaaccctacttggtcatgttgtcagattcaatttactgtaattttgtttagaattttgttttctgtgttcagggtatataccggcttacagttttcttttcttgtactatctttgtcaagttttggtattggggtaaaaaaaaatgtgttgagaagtattacctcttcttcaattctctggacaaatttatgtagaatgagtgctcagtctggggctaattatttcccactactgaggcaagacctatctcagtagtctacccaatgctccatgaactgagtttttccagtctacctggtaagaaaaggcactacttatagccctatctgagcaccaggtaccgttcaatctaatcttttgggatgattctttagcctcaggtagtttccacatatgggctgattagagctctgctgaacactacagtggaagcctctgcagatctcagggatcctctgtgcagctctctcttcaccctgatattctgtctgtgaactccagccactttggtctcccctgaccctcagcttcatctcttcaactgaggaagttccctggactctacctaggttccctctcatagtaccacaacccataaatctctcaaggcagaaagctggcacaatcgaagggccaaccttactgtttcccctctcagggtccttcactacctgatgaccaatgccttaaaaaccattgtttcgctgggcgtggtggctcacgcctgtaatccgagcactttgggaggccgaggttgtagtgagccgagatcatgccattgcactccagcctgggcaacgaaagtgaaattccgtctc

SEQ ID NO: 84345 - DNA, 963 bp, Homo sapiens
tacaggcggccgccaccacgcctggctaattttttgtatttttaatagagacggggtttcaccgtgttggccaggatggtcttgatctcctgacctcgtgatccgcccacctcggcctcccaaagtgctgggattacaggcgtgagccactgtgcctggcctgagaggacaaatatttttaaaaagaaatgatagttctttatgtatagaatgtgggatgatttttttttaattgccctcgttttcagaacatgtattcagtttgatcagtgattttcagtcttggcactattgacatttagggtcggataatctccaggctatcctatgcattgtaggatgttctgtagcactcctggccactacccactagataggtcagtaacacctctcctcacccccaccctgattgtgactaccaaaaatgtctctagacattgccaaatgccctctggggggcaaacgtgacctctgataaaattcactgtcacttatgaagattccttaattatttatttatgccttttatgaactagggttcccttgatgtaagctaggtacaggtgttgaatgaatcccttctgcagatgtagtgtatagcttgggcggtgcctgatatatgttggagaacactggaatatgatgaaatattttagcactattgggaatttaattgaaggttcgaaatgagctcttgttttgaaagtaaaggtgtaggctttctggctgtatctaaatctctgttttccacctctgccaccaacccctcatgcatttgcttgaaaaagatccttactagcttaggaatagttgagattccgaggacagttggacctgacgggcccgggtccaggcacacaacggcgggagagaagagaaggcggcggccggcaccggcgcctgtgcccatggagtcgggccacagaccctaaccacggagccaccccggctgggccccgcgcc

SEQ ID NO: 84346 - DNA, 111 bp, Homo sapiens
tactagcttaggaatagttgagaatttcgtttgaaatgtttgacatgatctgtctatatcttgtgttcaaggaaagatagttttgtttgtttgcgtgtttgtttgtttgtt

SEQ ID NO: 84347 - DNA, 6261 bp, Homo sapiens
ttttgtttgttttcctgccggaggctggaaaacggccgggttcctgctgcactaccatgcgccgtgcggcccgtgcgactcgccggacctcgcgggcgtccctgtacggagccctcggccggtcctagcagggattgtccccatttccagctccggagcgggcggctgcgccccgctcgtcgaggagctgcgctcacctcaggggcgggcccccgcctgcgttcgcggcgccaagaagagtattcctttccacttacaactaaataagacctgcttttgctggagctgtgctaggctgagggaattccacactgaattttacaagcgggatggatttctctaaggcagaagactgatttttggaaatatgtatttgggagacagtcacgtcctattgaataccttgtgctggtgctgccatcgaaaaatctggttacactctggggaggactgctaccactgcagaactgaaccacttcggccgtgagatgagtgtccggcctgagcaggcacaccatgaatagatacacaacaatcaggcagctcggggatggaacctacggttccgtcctgctgggaagaagcattgagtctggggagctgatcgctattaaaaaaatgaaaagaaaattttattcctgggaggaatgcatgaaccttcgggaggttaagtctttaaagaagctcaaccatgccaatgtagtcaaattaaaagaagttatcagggaaaatgatcatctttattttatcttcgagtacatgaaggaaaatctttaccagctcattaaagagagaaataagttgtttcctgagtctgctataaggaatatcatgtatcagatattacaaggactcgcatttattcacaaacacggcttctttcatcgagacttaaagcctgagaacctcctctgcatgggaccagaacttgtgaaaattgcagactttggtttggcccgagaaatacgatcaaaacctccatatacagattatgtatctaccagatggtacagggctccagaagtactcctgaggtctaccaactacagctcccccattgacgtctgggcggtgggctgcatcatggcagaagtttacaccctcaggccactcttccctggagccagtgaaattgacacaatattcaaaatttgccaagtgctggggacaccaaaaaagactgactggcctgaaggctatcaactttcaagtgcaatgaacttccgttggccacagtgtgtacccaataacttaaagaccttgattcccaatgctagcagtgaagcagtccagctcctgagagacatgcttcagtgggatcccaagaaacgaccaacagctagtcaggcacttcgatatccttacttccaagttggacacccactaggcagcaccacacaaaaccttcaggattcagaaaaaccacagaaaggcatcctggaaaaggcaggcccacctccttatattaagccagtcccacctgcccagccaccagccaagccacacacacgaatttcttcacgacagcatcaagccagccagccccctctgcatctcacgtacccctacaaagcagaggtctccaggacagatcacccaagccatctccaggaggacaagccaagcccgttgcttttcccatccctccacaacaagcatccacagtcgaaaatcacagctggcctggagcacaaaaatggtgagataaagccaaagagtaggagaaggtggggtcttatttccaggtcaacaaaggattcagatgattgggctgacttggatgacttggatttcagtccatccctcagcaggattgacctgaaaaacaagaaaagacagagtgatgacactctctgcaggtttgagagtgttttggacctgaagccctctgagcctgtgggcacaggaaacagtgcccccacccagacgtcatatcagcggcgagacacgcccaccctgagatctgcagccaagcagcactatttgaagcactctcgatacttgcctgggatcagtataagaaatggcatactctcgaatccaggcaaggaatttattccacctaatccatggtctagttctggcttgtctggaaaatcttcagggacaatgtcagtaatcagcaaagtaaattcagttggttccagctctacaagttctagtggactgactggaaactatgtcccttcctttctgaaaaaagaaatcggttctgctatgcagagggtacacctagcacctattccagacccttcccctggttattcctccctgaaggccatgagacctcatcctgggcgaccattcttccacacccagcctagaagcactcctgggttgataccacggcctccagccgcccagccagtgcatggccggacagactgggcttccaagtacgcatctcggcgatgactgtctgccttggtgatgaatctcttcctagggagaagcaggatactttccctcagctgactggtgttctacctgcaagatgtgcagagggcataaaagcaaatcaacactttatagttattcttctgaactaagacatgtcaatattcttttttaaagtttttttttaaaatattgatttgaatgcagtaggcttttttgtataaaattattttattctaaaactgggtcccattattttcttaaacaacagcattttgtatatatggattatgttttagcattttatacagtcaactttgtaatgaactttttaaaaattaattgattttcctttggggttccagataatattttctacagattttgaaaaatgtaataatattaatgcagtattgcaacaggggtgcaatttaaggctatgtgatagagggttatttactcagtgtgtgcagatatttatgaagtggtgaaatttcaagtgtggctcactaggtacttcaggccttcttggactgttgttagaaaagtgatcctctgcttttcttagtaggtcattggtttgatttttggataccactctgctgttctaaaaggactattatattatataattcactttgttttacttttgttccccagatgaaagaactctaagtaaatacattttaaaaaatttttctgacaccctttaatgtggttgcagatctcagatgaaaccaagcttaattatactatgccattatattctaatttattccatttttgaaatcaagttgtatgtgtaccaataaaagagatttctgcttcaaaaggctctcaacatgaaggttaacacagtcaatcaaacttacattcctgccaagatgcatggccaaaaaactaagtatcaaagcagcagaaggtttttgattatagtaactgagatggaattttgtgcctagctcagttctccagatctggctaggagcagtcaatgactaatgttctgtcctagccaaattctcaggacaatttggggagcagaaagagttatggcagaggttccactcatctacaaagtcacagtcacatgccacatttgatctcctaaccctggtgtagtttctttcaagagtgagaactttatttgttgggcagaggctgttccattgagaggaatgtttacagcagtttcaaaaatgacaaagtcagtttggagacagaaaaagacaaaaggtccagtctcatccatctctatatggtacatttgcctcacttatggttgccttaaaggcaagagggaaggtcaccatcagtgaacgcaatgcaatctcaacagtgtattgattcatattctcctagggctcaaactactctctattggttccaggataatgacaaattgaaccatatgtaagtaatcttttattttttattttttttttgagacagagtctcactctgtcacccaggctggagtgcagtggcgcgatcttagctctctgcaacctctgcctcccaggttcaagcctcctgagtaactgggactacaggcgcccgccaccacgcccagctaattttttgtatttttagtagagacggggtttcactgtgttagccaggacggcctcgatctcctgacctcgtgatccaccctcctccacctcccaaagtactgggattacaggcatgagccactgcacccagccaagtgatcatttttataggttaaaatgataggtgaaatgaatatagacactttcatatggttcaacctaatgacttggtaaattattgccttggtgtattaataatatgttgcattctgaacaaataaccatggcttccaaagggccctaacctaaaatcggagagtaatttatgctttggagaatttgactcaaatatatacttgaccaagcaccatgatccctaggggcatgagaaaagcacataatggatgtggatgtgataggtggtcttttcctgttaacaagctggcagcaaagcttcagaaaatatatatgcaagcacaacttgaagctgaattcatttctgtattatattctcaactcgttatctaaagcatcagaacatgtgttttcagagatgagtcctttactataaggttaatatttattttcattttctgtattatatatgaaaagtaaattaatgtgaaacctggcccagcttgctggaaagcaggttttaaattgtaaatattccttagaggagcaaatggattgtttaataccatagtctcagtaatctagcttatataaggtcattacattttttaactgaaaaacctagttacctgattattgcacattataaaattgtttttctaatactttatagggcccaacttcagaaaatacttcgcttttttctttttatgctttcgtttgtttaccagcaagcaacttccctggggaagccaaacacatattcataaaaaaaatcaagtagctgatgtgcagttgagaaaactagaggactgaaaaaacaaattttaactagcaaatgctgtgaattactcttcctccccttctctgaaatgggtaaaggacaaattgtgtaaaaaaacctatgcactatagaagggaatagtaaccatttcttttgtctctctgtttctgttctgactgagaacctgcagccatttcttgttacatgaaaacaaaatgctacttgttacctctattttttgttactatacaattatgaaatgtaatgtaagacaccaacagaaatgatatacctgtaactgtacctatcaggactatacctcatttacagtcagaaagcttactgggatgtcaggaaatgatacagggttggttctcatttcgtgccgaaatgagacagaaattcagtgacgaaggtgcgttgtaggggtattgatgtgccccaggtagtgccagcagagtagggaaaactgcatttgcataaaaactactcttgacatgattgttcattttacaaaaaaattccattaattaccaagccctcacccagcccatgtgtgataggatttatgtaggaagaaacttgattttcaaataattttttaaatgtatctcttgcctaaaggactatatacatctaataaagtaacactgtgtcatcttctggagttatcaaaaattgtatacaatcaagacaacacaagaattattttatttttgagtgcaaatacaggtactgttggagttgatgggcaccatgctttctcatgaagtagcatttccctaccatcaagccattgttttgtgccattcaggagaggaaaaaaaggaatttatgctgtacatttcagttcagtgtatgaccaaaagcaatatgtttataagaagatgtttgacatactaattattttatatcatttaaaccatactgtagcaacataatatatggagctaatttgtagaattatttttacgatttccaaacaaatgtactgtactgttatataatttattgtgaggaccttctcatggaagccattaggaaaacaaactagaggtaaatatcacattaatctgtattatcaatttctcatagacactgtgctaatgtgaattttaaatgacctgcatcaagtcttctgatctcagataactcagtacagatagcaattagtcagctgatttgattacaatggagtaaccgacaatatatttatttataaagcacatattcataataacgagaagaattcagaaaaccacttaagcaagacccttctgaaataaaaaatgttgctttttaaatagtttgtcctaaggtgtttaaaacatgtcaaccttatgtaaggaaaaatttcctggtccaaataaagttgaagtttaagaaaaa

SEQ ID NO: 84348 - DNA, 6336 bp, Homo sapiens
ttttgtttgttttcctgccggaggctggaaaacggccgggttcctgctgcactaccatgcgccgtgcggcccgtgcgactcgccggacctcgcgggcgtccctgtacggagccctcggccggtcctagcagggattgtccccatttccagctccggagcgggcggctgcgccccgctcgtcgaggagctgcgctcacctcaggggcgggcccccgcctgcgttcgcggcgccaagaagagtattcctttccacttacaactaaataagacctgcttttgctggagctgtgctaggctgagggaattccacactgaattttacaagcgggatggatttctctaaggcagaagactgatttttggaaatatgtatttgggagacagtcacgtcctattgaataccttgtgctggtgctgccatcgaaaaatctggttacactctggggaggactgctaccactgcagaactgaaccacttcggccgtgagatgagtgtccggcctgagcaggcacaccatgaatagatacacaacaatcaggcagctcggggatggaacctacggttccgtcctgctgggaagaagcattgagtctggggagctgatcgctattaaaaaaatgaaaagaaaattttattcctgggaggaatgcatgaaccttcgggaggttaagtctttaaagaagctcaaccatgccaatgtagtcaaattaaaagaagttatcagggaaaatgatcatctttattttatcttcgagtacatgaaggaaaatctttaccagctcattaaagagagaaataagttgtttcctgagtctgctataaggaatatcatgtatcagatattacaaggactcgcatttattcacaaacacggcttctttcatcgagacttaaagcctgagaacctcctctgcatgggaccagaacttgtgaaaattgcagactttggtttggcccgagaaatacgatcaaaacctccatatacagattatgtatctaccagatggtacagggctccagaagtactcctgaggtctaccaactacagctcccccattgacgtctgggcggtgggctgcatcatggcagaagtttacaccctcaggccactcttccctggagccagtgaaattgacacaatattcaaaatttgccaagtgctggggacaccaaaaaagactgactggcctgaaggctatcaactttcaagtgcaatgaacttccgttggccacagtgtgtacccaataacttaaagaccttgattcccaatgctagcagtgaagcagtccagctcctgagagacatgcttcagtgggatcccaagaaacgaccaacagctagtcaggcacttcgatatccttacttccaagttggacacccactaggcagcaccacacaaaaccttcaggattcagaaaaaccacagaaaggcatcctggaaaaggcaggcccacctccttatattaagccagtcccacctgcccagccaccagccaagccacacacacgaatttcttcacgacagcatcaagccagccagccccctctgcatctcacgtacccctacaaagcagaggtctccaggacagatcacccaagccatctccaggaggacaagccaagcccgttgcttttcccatccctccacaacaagcatccacagtcgaaaatcacagctggcctggagcacaaaaatggtgagataaagccaaagagtaggagaaggtggggtcttatttccaggtcaacaaaggattcagatgattgggctgacttggatgacttggatttcagtccatccctcagcaggattgacctgaaaaacaagaaaagacagagtgatgacactctctgcaggtttgagagtgttttggacctgaagccctctgagcctgtgggcacaggaaacagtgcccccacccagacgtcatatcagcggcgagacacgcccaccctgagatctgcagccaagcagcactatttgaagcactctcgatacttgcctgggatcagtataagaaatggcatactctcgaatccaggcaaggaatttattccacctaatccatggtctagttctggcttgtctggaaaatcttcagggacaatgtcagtaatcagcaaagtaaattcagttggttccagctctacaagttctagtggactgactggaaactatgtcccttcctttctgaaaaaagaaatcggttctgctatgcagagggtacacctagcacctattccagacccttcccctggttattcctccctgaaggccatgagacctcatcctgggcgaccattcttccacacccagcctagaagcactcctgggttgataccacggcctccagccgcccagccagtgcatggccggacagactgggcttccaagtacgcatctcggcgatgactgtctgccttggtgatgaatctcttcctagggagaagcaggatactttccctcagctgactggtgttctacctgcaagatgtgcagagggcataaaagcaaatcaacactttatagttattcttctgaactaagacatgtcaatattcttttttaaagtttttttttaaaatattgatttgaatgcagtaggcttttttgtataaaattattttattctaaaactgggtcccattattttcttaaacaacagcattttgtatatatggattatgttttagcattttatacagtcaactttgtaatgaactttttaaaaattaattgattttcctttggggttccagataatattttctacagattttgaaaaatgtaataatattaatgcagtattgcaacaggggtgcaatttaaggctatgtgatagagggttatttactcagtgtgtgcagatatttatgaagtggtgaaatttcaagtgtggctcactaggtacttcaggccttcttggactgttgttagaaaagtgatcctctgcttttcttagtaggtcattggtttgatttttggataccactctgctgttctaaaaggactattatattatataattcactttgttttacttttgttccccagatgaaagaactctaagtaaatacattttaaaaaatttttctgacaccctttaatgtggttgcagatctcagatgaaaccaagcttaattatactatgccattatattctaatttattccatttttgaaatcaagttgtatgtgtaccaataaaagagatttctgcttcaaaaggctctcaacatgaaggttaacacagtcaatcaaacttacattcctgccaagatgcatggccaaaaaactaagtatcaaagcagcagaaggtttttgattatagtaactgagatggaattttgtgcctagctcagttctccagatctggctaggagcagtcaatgactaatgttctgtcctagccaaattctcaggacaatttggggagcagaaagagttatggcagaggttccactcatctacaaagtcacagtcacatgccacatttgatctcctaaccctggtgtagtttctttcaagagtgagaactttatttgttgggcagaggctgttccattgagaggaatgtttacagcagtttcaaaaatgacaaagtcagtttggagacagaaaaagacaaaaggtccagtctcatccatctctatatggtacatttgcctcacttatggttgccttaaaggcaagagggaaggtcaccatcagtgaacgcaatgcaatctcaacagtgtattgattcatattctcctagggctcaaactactctctattggttccaggataatgacaaattgaaccatatgtaagtaatcttttattttttattttttttttgagacagagtctcactctgtcacccaggctggagtgcagtggcgcgatcttagctctctgcaacctctgcctcccaggttcaagcctcctgagtaactgggactacaggcgcccgccaccacgcccagctaattttttgtatttttagtagagacggggtttcactgtgttagccaggacggcctcgatctcctgacctcgtgatccaccctcctccacctcccaaagtactgggattacaggcatgagccactgcacccagccaagtgatcatttttataggttaaaatgataggtgaaatgaatatagacactttcatatggttcaacctaatgacttggtaaattattgccttggtgtattaataatatgttgcattctgaacaaataaccatggcttccaaagggccctaacctaaaatcggagagtaatttatgctttggagaatttgactcaaatatatacttgaccaagcaccatgatccctaggggcatgagaaaagcacataatggatgtggatgtgataggtggtcttttcctgttaacaagctggcagcaaagcttcagaaaatatatatgcaagcacaacttgaagctgaattcatttctgtattatattctcaactcgttatctaaagcatcagaacatgtgttttcagagatgagtcctttactataaggttaatatttattttcattttctgtattatatatgaaaagtaaattaatgtgaaacctggcccagcttgctggaaagcaggttttaaattgtaaatattccttagaggagcaaatggattgtttaataccatagtctcagtaatctagcttatataaggtcattacattttttaactgaaaaacctagttacctgattattgcacattataaaattgtttttctaatactttatagggcccaacttcagaaaatacttcgcttttttctttttatgctttcgtttgtttaccagcaagcaacttccctggggaagccaaacacatattcataaaaaaaatcaagtagctgatgtgcagttgagaaaactagaggactgaaaaaacaaattttaactagcaaatgctgtgaattactcttcctccccttctctgaaatgggtaaaggacaaattgtgtaaaaaaacctatgcactatagaagggaatagtaaccatttcttttgtctctctgtttctgttctgactgagaacctgcagccatttcttgttacatgaaaacaaaatgctacttgttacctctattttttgttactatacaattatgaaatgtaatgtaagacaccaacagaaatgatatacctgtaactgtacctatcaggactatacctcatttacagtcagaaagcttactgggatgtcaggaaatgatacagggttggttctcatttcgtgccgaaatgagacagaaattcagtgacgaaggtgcgttgtaggggtattgatgtgccccaggtagtgccagcagagtagggaaaactgcatttgcataaaaactactcttgacatgattgttcattttacaaaaaaattccattaattaccaagccctcacccagcccatgtgtgataggatttatgtaggaagaaacttgattttcaaataattttttaaatgtatctcttgcctaaaggactatatacatctaataaagtaacactgtgtcatcttctggagttatcaaaaattgtatacaatcaagacaacacaagaattattttatttttgagtgcaaatacaggtactgttggagttgatgggcaccatgctttctcatgaagtagcatttccctaccatcaagccattgttttgtgccattcaggagaggaaaaaaaggaatttatgctgtacatttcagttcagtgtatgaccaaaagcaatatgtttataagaagatgtttgacatactaattattttatatcatttaaaccatactgtagcaacataatatatggagctaatttgtagaattatttttacgatttccaaacaaatgtactgtactgttatataatttattgtgaggaccttctcatggaagccattaggaaaacaaactagaggtaaatatcacattaatctgtattatcaatttctcatagacactgtgctaatgtgaattttaaatgacctgcatcaagtcttctgatctcagataactcagtacagatagcaattagtcagctgatttgattacaatggagtaaccgacaatatatttatttataaagcacatattcataataacgagaagaattcagaaaaccacttaagcaagacccttctgaaataaaaaatgttgctttttaaatagtttgtcctaaggtgtttaaaacatgtcaaccttatgtaaggaaaaatttcctggtccaaataaagttgaagtttaagaaaaaaaaaattatatcttttcacataataacacattcttctcttaatttattctactaaaaaaaaattgggcccgaatc

SEQ ID NO: 84349 - DNA, 6207 bp, Homo sapiens
ttttgtttgttttcctgccggaggctggaaaacggccgggttcctgctgcactaccatgcgccgtgcggcccgtgcgactcgccggacctcgcgggcgtccctgtacggagccctcggccggtcctagcagggattgtccccatttccagctccggagcgggcggctgcgccccgctcgtcgaggagctgcgctcacctcaggggcgggcccccgcctgcgttcgcggcgccaagaagagtattcctttccacttacaactaaataagacctgcttttgctggagctgtgctaggctgagggaattccacactgaattttacaagcgggatggatttctctaaggcagaagactgatttttggaaatatgtatttgggagacagtcacgtcctattgaataccttgtgctggtgctgccatcgaaaaatctggttacactctggggaggactgctaccactgcagaactgaaccacttcggccgtgagatgagtgtccggcctgagcaggcacaccatgaatagatacacaacaatcaggcagctcggggatggaacctacggttccgtcctgctgggaagaagcattgagtctggggagctgatcgctattaaaaaaatgaaaagaaaattttattcctgggaggaatgcatgaaccttcgggaggttaagtctttaaagaagctcaaccatgccaatgtagtcaaattaaaagaagttatcagggaaaatgatcatctttattttatcttcgagtacatgaaggaaaatctttaccagctcattaaagagagaaataagttgtttcctgagtctgctataaggaatatcatgtatcagatattacaaggactcgcatttattcacaaacacggcttctttcatcgagacttaaagcctgagaacctcctctgcatgggaccagaacttgtgaaaattgcagactttggtttggcccgagaaatacgatcaaaacctccatatacagattatgtatctaccagatggtacagggctccagaagtactcctgaggtctaccaactacagctcccccattgacgtctgggcggtgggctgcatcatggcagaagtttacaccctcaggccactcttccctggagccagtgaaattgacacaatattcaaaatttgccaagtgctggggacaccaaaaaagactgactggcctgaaggctatcaactttcaagtgcaatgaacttccgttggccacagtgtgtacccaataacttaaagaccttgattcccaatgctagcagtgaagcagtccagctcctgagagacatgcttcagtgggatcccaagaaacgaccaacagctagtcaggcacttcgatatccttacttccaagttggacacccactaggcagcaccacacaaaaccttcaggattcagaaaaaccacagaaaggcatcctggaaaaggcaggcccacctccttatattaagccagtcccacctgcccagccaccagccaagccacacacacgaatttcttcacgacagcatcaagccagccagccccctctgcatctcacgtacccctacaaagcagaggtctccaggacagatcacccaagccatctccaggaggacaagccaagcccgttgcttttcccatccctccacaacaagcatccacagtcgaaaatcacagctggcctggagcacaaaaatggtgagataaagccaaagagtaggagaaggtggggtcttatttccaggtcaacaaaggattcagatgattgggctgacttggatgacttggatttcagtccatccctcagcaggattgacctgaaaaacaagaaaagacagagtgatgacactctctgcaggtttgagagtgttttggacctgaagccctctgagcctgtgggcacaggaaacagtgcccccacccagacgtcatatcagcggcgagacacgcccaccctgagatctgcagccaagcagcactatttgaagcactctcgatacttgcctgggatcagtataagaaatggcatactctcgaatccaggcaaggaatttattccacctaatccatggtctagttctggcttgtctggaaaatcttcagggacaatgtcagtaatcagcaaagtaaattcagttggttccagctctacaagttctagtggactgactggaaactatgtcccttcctttctgaaaaaagaaatcggttctgctatgcagagggtacacctagcacctattccagacccttcccctggttattcctccctgaaggccatgagacctcatcctgggcgaccattcttccacacccagcctagaagcactcctgggttgataccacggcctccagccgcccagccagtgcatggccggacagactgggcttccaagtacgcatctcggcgatgactgtctgccttggtgatgaatctcttcctagggagaagcaggatactttccctcagctgactggtgttctacctgcaagatgtgcagagggcataaaagcaaatcaacactttatagttattcttctgaactaagacatgtcaatattcttttttaaagtttttttttaaaatattgatttgaatgcagtaggcttttttgtataaaattattttattctaaaactgggtcccattattttcttaaacaacagcattttgtatatatggattatgttttagcattttatacagtcaactttgtaatgaactttttaaaaattaattgattttcctttggggttccagataatattttctacagattttgaaaaatgtaataatattaatgcagtattgcaacaggggtgcaatttaaggctatgtgatagagggttatttactcagtgtgtgcagatatttatgaagtggtgaaatttcaagtgtggctcactaggtacttcaggccttcttggactgttgttagaaaagtgatcctctgcttttcttagtaggtcattggtttgatttttggataccactctgctgttctaaaaggactattatattatataattcactttgttttacttttgttccccagatgaaagaactctaagtaaatacattttaaaaaatttttctgacaccctttaatgtggttgcagatctcagatgaaaccaagcttaattatactatgccattatattctaatttattccatttttgaaatcaagttgtatgtgtaccaataaaagagatttctgcttcaaaaggctctcaacatgaaggttaacacagtcaatcaaacttacattcctgccaagatgcatggccaaaaaactaagtatcaaagcagcagaaggtttttgattatagtaactgagatggaattttgtgcctagctcagttctccagatctggctaggagcagtcaatgactaatgttctgtcctagccaaattctcaggacaatttggggagcagaaagagttatggcagaggttccactcatctacaaagtcacagtcacatgccacatttgatctcctaaccctggtgtagtttctttcaagagtgagaactttatttgttgggcagaggctgttccattgagaggaatgtttacagcagtttcaaaaatgacaaagtcagtttggagacagaaaaagacaaaaggtccagtctcatccatctctatatggtacatttgcctcacttatggttgccttaaaggcaagagggaaggtcaccatcagtgaacgcaatgcaatctcaacagtgtattgattcatattctcctagggctcaaactactctctattggttccaggataatgacaaattgaaccatatgtaagtaatcttttattttttattttttttttgagacagagtctcactctgtcacccaggctggagtgcagtggcgcgatcttagctctctgcaacctctgcctcccaggttcaagcctcctgagtaactgggactacaggcgcccgccaccacgcccagctaattttttgtatttttagtagagacggggtttcactgtgttagccaggacggcctcgatctcctgacctcgtgatccaccctcctccacctcccaaagtactgggattacaggcatgagccactgcacccagccaagtgatcatttttataggttaaaatgataggtgaaatgaatatagacactttcatatggttcaacctaatgacttggtaaattattgccttggtgtattaataatatgttgcattctgaacaaataaccatggcttccaaagggccctaacctaaaatcggagagtaatttatgctttggagaatttgactcaaatatatacttgaccaagcaccatgatccctaggggcatgagaaaagcacataatggatgtggatgtgataggtggtcttttcctgttaacaagctggcagcaaagcttcagaaaatatatatgcaagcacaacttgaagctgaattcatttctgtattatattctcaactcgttatctaaagcatcagaacatgtgttttcagagatgagtcctttactataaggttaatatttattttcattttctgtattatatatgaaaagtaaattaatgtgaaacctggcccagcttgctggaaagcaggttttaaattgtaaatattccttagaggagcaaatggattgtttaataccatagtctcagtaatctagcttatataaggtcattacattttttaactgaaaaacctagttacctgattattgcacattataaaattgtttttctaatactttatagggcccaacttcagaaaatacttcgcttttttctttttatgctttcgtttgtttaccagcaagcaacttccctggggaagccaaacacatattcataaaaaaaatcaagtagctgatgtgcagttgagaaaactagaggactgaaaaaacaaattttaactagcaaatgctgtgaattactcttcctccccttctctgaaatgggtaaaggacaaattgtgtaaaaaaacctatgcactatagaagggaatagtaaccatttcttttgtctctctgtttctgttctgactgagaacctgcagccatttcttgttacatgaaaacaaaatgctacttgttacctctattttttgttactatacaattatgaaatgtaatgtaagacaccaacagaaatgatatacctgtaactgtacctatcaggactatacctcatttacagtcagaaagcttactgggatgtcaggaaatgatacagggttggttctcatttcgtgccgaaatgagacagaaattcagtgacgaaggtgcgttgtaggggtattgatgtgccccaggtagtgccagcagagtagggaaaactgcatttgcataaaaactactcttgacatgattgttcattttacaaaaaaattccattaattaccaagccctcacccagcccatgtgtgataggatttatgtaggaagaaacttgattttcaaataattttttaaatgtatctcttgcctaaaggactatatacatctaataaagtaacactgtgtcatcttctggagttatcaaaaattgtatacaatcaagacaacacaagaattattttatttttgagtgcaaatacaggtactgttggagttgatgggcaccatgctttctcatgaagtagcatttccctaccatcaagccattgttttgtgccattcaggagaggaaaaaaaggaatttatgctgtacatttcagttcagtgtatgaccaaaagcaatatgtttataagaagatgtttgacatactaattattttatatcatttaaaccatactgtagcaacataatatatggagctaatttgtagaattatttttacgatttccaaacaaatgtactgtactgttatataatttattgtgaggaccttctcatggaagccattagacactgtgctaatgtgaattttaaatgacctgcatcaagtcttctgatctcagataactcagtacagatagcaattagtcagctgatttgattacaatggagtaaccgacaatatatttatttataaagcacatattcataataacgagaagaattcagaaaaccacttaagcaagacccttctgaaataaaaaatgttgctttttaaatagtttgtcctaaggtgtttaaaacatgtcaaccttatgtaaggaaaaatttcctggtccaaataaagttgaagtttaagaaaaa

SEQ ID NO: 84350 - DNA, 6385 bp, Homo sapiens
ttttgtttgttttcctgccggaggctggaaaacggccgggttcctgctgcactaccatgcgccgtgcggcccgtgcgactcgccggacctcgcgggcgtccctgtacggagccctcggccggtcctagcagggattgtccccatttccagctccggagcgggcggctgcgccccgctcgtcgaggagctgcgctcacctcaggggcgggcccccgcctgcgttcgcggcgccaagaagagtattcctttccacttacaactaaataagacctgcttttgctggagctgtgctaggctgagggaattccacactgaattttacaagcgggatggatttctctaaggaagatgacatacaacgatggtttgggagtcttaatttgttggaaagtgaaataatgaatgatggaggattcatacacagatgtgtctcaacttagagtggggttacatccctataaacccattgcagaagactgatttttggaaatatgtatttgggagacagtcacgtcctattgaataccttgtgctggtgctgccatcgaaaaatctggttacactctggggaggactgctaccactgcagaactgaaccacttcggccgtgagatgagtgtccggcctgagcaggcacaccatgaatagatacacaacaatcaggcagctcggggatggaacctacggttccgtcctgctgggaagaagcattgagtctggggagctgatcgctattaaaaaaatgaaaagaaaattttattcctgggaggaatgcatgaaccttcgggaggttaagtctttaaagaagctcaaccatgccaatgtagtcaaattaaaagaagttatcagggaaaatgatcatctttattttatcttcgagtacatgaaggaaaatctttaccagctcattaaagagagaaataagttgtttcctgagtctgctataaggaatatcatgtatcagatattacaaggactcgcatttattcacaaacacggcttctttcatcgagacttaaagcctgagaacctcctctgcatgggaccagaacttgtgaaaattgcagactttggtttggcccgagaaatacgatcaaaacctccatatacagattatgtatctaccagatggtacagggctccagaagtactcctgaggtctaccaactacagctcccccattgacgtctgggcggtgggctgcatcatggcagaagtttacaccctcaggccactcttccctggagccagtgaaattgacacaatattcaaaatttgccaagtgctggggacaccaaaaaagactgactggcctgaaggctatcaactttcaagtgcaatgaacttccgttggccacagtgtgtacccaataacttaaagaccttgattcccaatgctagcagtgaagcagtccagctcctgagagacatgcttcagtgggatcccaagaaacgaccaacagctagtcaggcacttcgatatccttacttccaagttggacacccactaggcagcaccacacaaaaccttcaggattcagaaaaaccacagaaaggcatcctggaaaaggcaggcccacctccttatattaagccagtcccacctgcccagccaccagccaagccacacacacgaatttcttcacgacagcatcaagccagccagccccctctgcatctcacgtacccctacaaagcagaggtctccaggacagatcacccaagccatctccaggaggacaagccaagcccgttgcttttcccatccctccacaacaagcatccacagtcgaaaatcacagctggcctggagcacaaaaatggtgagataaagccaaagagtaggagaaggtggggtcttatttccaggtcaacaaaggattcagatgattgggctgacttggatgacttggatttcagtccatccctcagcaggattgacctgaaaaacaagaaaagacagagtgatgacactctctgcaggtttgagagtgttttggacctgaagccctctgagcctgtgggcacaggaaacagtgcccccacccagacgtcatatcagcggcgagacacgcccaccctgagatctgcagccaagcagcactatttgaagcactctcgatacttgcctgggatcagtataagaaatggcatactctcgaatccaggcaaggaatttattccacctaatccatggtctagttctggcttgtctggaaaatcttcagggacaatgtcagtaatcagcaaagtaaattcagttggttccagctctacaagttctagtggactgactggaaactatgtcccttcctttctgaaaaaagaaatcggttctgctatgcagagggtacacctagcacctattccagacccttcccctggttattcctccctgaaggccatgagacctcatcctgggcgaccattcttccacacccagcctagaagcactcctgggttgataccacggcctccagccgcccagccagtgcatggccggacagactgggcttccaagtacgcatctcggcgatgactgtctgccttggtgatgaatctcttcctagggagaagcaggatactttccctcagctgactggtgttctacctgcaagatgtgcagagggcataaaagcaaatcaacactttatagttattcttctgaactaagacatgtcaatattcttttttaaagtttttttttaaaatattgatttgaatgcagtaggcttttttgtataaaattattttattctaaaactgggtcccattattttcttaaacaacagcattttgtatatatggattatgttttagcattttatacagtcaactttgtaatgaactttttaaaaattaattgattttcctttggggttccagataatattttctacagattttgaaaaatgtaataatattaatgcagtattgcaacaggggtgcaatttaaggctatgtgatagagggttatttactcagtgtgtgcagatatttatgaagtggtgaaatttcaagtgtggctcactaggtacttcaggccttcttggactgttgttagaaaagtgatcctctgcttttcttagtaggtcattggtttgatttttggataccactctgctgttctaaaaggactattatattatataattcactttgttttacttttgttccccagatgaaagaactctaagtaaatacattttaaaaaatttttctgacaccctttaatgtggttgcagatctcagatgaaaccaagcttaattatactatgccattatattctaatttattccatttttgaaatcaagttgtatgtgtaccaataaaagagatttctgcttcaaaaggctctcaacatgaaggttaacacagtcaatcaaacttacattcctgccaagatgcatggccaaaaaactaagtatcaaagcagcagaaggtttttgattatagtaactgagatggaattttgtgcctagctcagttctccagatctggctaggagcagtcaatgactaatgttctgtcctagccaaattctcaggacaatttggggagcagaaagagttatggcagaggttccactcatctacaaagtcacagtcacatgccacatttgatctcctaaccctggtgtagtttctttcaagagtgagaactttatttgttgggcagaggctgttccattgagaggaatgtttacagcagtttcaaaaatgacaaagtcagtttggagacagaaaaagacaaaaggtccagtctcatccatctctatatggtacatttgcctcacttatggttgccttaaaggcaagagggaaggtcaccatcagtgaacgcaatgcaatctcaacagtgtattgattcatattctcctagggctcaaactactctctattggttccaggataatgacaaattgaaccatatgtaagtaatcttttattttttattttttttttgagacagagtctcactctgtcacccaggctggagtgcagtggcgcgatcttagctctctgcaacctctgcctcccaggttcaagcctcctgagtaactgggactacaggcgcccgccaccacgcccagctaattttttgtatttttagtagagacggggtttcactgtgttagccaggacggcctcgatctcctgacctcgtgatccaccctcctccacctcccaaagtactgggattacaggcatgagccactgcacccagccaagtgatcatttttataggttaaaatgataggtgaaatgaatatagacactttcatatggttcaacctaatgacttggtaaattattgccttggtgtattaataatatgttgcattctgaacaaataaccatggcttccaaagggccctaacctaaaatcggagagtaatttatgctttggagaatttgactcaaatatatacttgaccaagcaccatgatccctaggggcatgagaaaagcacataatggatgtggatgtgataggtggtcttttcctgttaacaagctggcagcaaagcttcagaaaatatatatgcaagcacaacttgaagctgaattcatttctgtattatattctcaactcgttatctaaagcatcagaacatgtgttttcagagatgagtcctttactataaggttaatatttattttcattttctgtattatatatgaaaagtaaattaatgtgaaacctggcccagcttgctggaaagcaggttttaaattgtaaatattccttagaggagcaaatggattgtttaataccatagtctcagtaatctagcttatataaggtcattacattttttaactgaaaaacctagttacctgattattgcacattataaaattgtttttctaatactttatagggcccaacttcagaaaatacttcgcttttttctttttatgctttcgtttgtttaccagcaagcaacttccctggggaagccaaacacatattcataaaaaaaatcaagtagctgatgtgcagttgagaaaactagaggactgaaaaaacaaattttaactagcaaatgctgtgaattactcttcctccccttctctgaaatgggtaaaggacaaattgtgtaaaaaaacctatgcactatagaagggaatagtaaccatttcttttgtctctctgtttctgttctgactgagaacctgcagccatttcttgttacatgaaaacaaaatgctacttgttacctctattttttgttactatacaattatgaaatgtaatgtaagacaccaacagaaatgatatacctgtaactgtacctatcaggactatacctcatttacagtcagaaagcttactgggatgtcaggaaatgatacagggttggttctcatttcgtgccgaaatgagacagaaattcagtgacgaaggtgcgttgtaggggtattgatgtgccccaggtagtgccagcagagtagggaaaactgcatttgcataaaaactactcttgacatgattgttcattttacaaaaaaattccattaattaccaagccctcacccagcccatgtgtgataggatttatgtaggaagaaacttgattttcaaataattttttaaatgtatctcttgcctaaaggactatatacatctaataaagtaacactgtgtcatcttctggagttatcaaaaattgtatacaatcaagacaacacaagaattattttatttttgagtgcaaatacaggtactgttggagttgatgggcaccatgctttctcatgaagtagcatttccctaccatcaagccattgttttgtgccattcaggagaggaaaaaaaggaatttatgctgtacatttcagttcagtgtatgaccaaaagcaatatgtttataagaagatgtttgacatactaattattttatatcatttaaaccatactgtagcaacataatatatggagctaatttgtagaattatttttacgatttccaaacaaatgtactgtactgttatataatttattgtgaggaccttctcatggaagccattaggaaaacaaactagaggtaaatatcacattaatctgtattatcaatttctcatagacactgtgctaatgtgaattttaaatgacctgcatcaagtcttctgatctcagataactcagtacagatagcaattagtcagctgatttgattacaatggagtaaccgacaatatatttatttataaagcacatattcataataacgagaagaattcagaaaaccacttaagcaagacccttctgaaataaaaaatgttgctttttaaatagtttgtcctaaggtgtttaaaacatgtcaaccttatgtaaggaaaaatttcctggtccaaataaagttgaagtttaagaaaaa

SEQ ID NO: 84351 - DNA, 4119 bp, Homo sapiens
tgaggccaacgaggccataagtttattttctcatgtttttgtcaccaaaatgcatttatttgtactttgcttacattggccccatatcagtcatgccggcctttttctttcattgcaggttattcctccctgaaggccatgagacctcatcctgggcgaccattcttccacacccagcctagaagcactcctgggttgataccacggcctccagccgcccagccagtgcatggccggacagactgggcttccaagtacgcatctcggcgatgactgtctgccttggtgatgaatctcttcctagggagaagcaggatactttccctcagctgactggtgttctacctgcaagatgtgcagagggcataaaagcaaatcaacactttatagttattcttctgaactaagacatgtcaatattcttttttaaagtttttttttaaaatattgatttgaatgcagtaggcttttttgtataaaattattttattctaaaactgggtcccattattttcttaaacaacagcattttgtatatatggattatgttttagcattttatacagtcaactttgtaatgaactttttaaaaattaattgattttcctttggggttccagataatattttctacagattttgaaaaatgtaataatattaatgcagtattgcaacaggggtgcaatttaaggctatgtgatagagggttatttactcagtgtgtgcagatatttatgaagtggtgaaatttcaagtgtggctcactaggtacttcaggccttcttggactgttgttagaaaagtgatcctctgcttttcttagtaggtcattggtttgatttttggataccactctgctgttctaaaaggactattatattatataattcactttgttttacttttgttccccagatgaaagaactctaagtaaatacattttaaaaaatttttctgacaccctttaatgtggttgcagatctcagatgaaaccaagcttaattatactatgccattatattctaatttattccatttttgaaatcaagttgtatgtgtaccaataaaagagatttctgcttcaaaaggctctcaacatgaaggttaacacagtcaatcaaacttacattcctgccaagatgcatggccaaaaaactaagtatcaaagcagcagaaggtttttgattatagtaactgagatggaattttgtgcctagctcagttctccagatctggctaggagcagtcaatgactaatgttctgtcctagccaaattctcaggacaatttggggagcagaaagagttatggcagaggttccactcatctacaaagtcacagtcacatgccacatttgatctcctaaccctggtgtagtttctttcaagagtgagaactttatttgttgggcagaggctgttccattgagaggaatgtttacagcagtttcaaaaatgacaaagtcagtttggagacagaaaaagacaaaaggtccagtctcatccatctctatatggtacatttgcctcacttatggttgccttaaaggcaagagggaaggtcaccatcagtgaacgcaatgcaatctcaacagtgtattgattcatattctcctagggctcaaactactctctattggttccaggataatgacaaattgaaccatatgtaagtaatcttttattttttattttttttttgagacagagtctcactctgtcacccaggctggagtgcagtggcgcgatcttagctctctgcaacctctgcctcccaggttcaagcctcctgagtaactgggactacaggcgcccgccaccacgcccagctaattttttgtatttttagtagagacggggtttcactgtgttagccaggacggcctcgatctcctgacctcgtgatccaccctcctccacctcccaaagtactgggattacaggcatgagccactgcacccagccaagtgatcatttttataggttaaaatgataggtgaaatgaatatagacactttcatatggttcaacctaatgacttggtaaattattgccttggtgtattaataatatgttgcattctgaacaaataaccatggcttccaaagggccctaacctaaaatcggagagtaatttatgctttggagaatttgactcaaatatatacttgaccaagcaccatgatccctaggggcatgagaaaagcacataatggatgtggatgtgataggtggtcttttcctgttaacaagctggcagcaaagcttcagaaaatatatatgcaagcacaacttgaagctgaattcatttctgtattatattctcaactcgttatctaaagcatcagaacatgtgttttcagagatgagtcctttactataaggttaatatttattttcattttctgtattatatatgaaaagtaaattaatgtgaaacctggcccagcttgctggaaagcaggttttaaattgtaaatattccttagaggagcaaatggattgtttaataccatagtctcagtaatctagcttatataaggtcattacattttttaactgaaaaacctagttacctgattattgcacattataaaattgtttttctaatactttatagggcccaacttcagaaaatacttcgcttttttctttttatgctttcgtttgtttaccagcaagcaacttccctggggaagccaaacacatattcataaaaaaaatcaagtagctgatgtgcagttgagaaaactagaggactgaaaaaacaaattttaactagcaaatgctgtgaattactcttcctccccttctctgaaatgggtaaaggacaaattgtgtaaaaaaacctatgcactatagaagggaatagtaaccatttcttttgtctctctgtttctgttctgactgagaacctgcagccatttcttgttacatgaaaacaaaatgctacttgttacctctattttttgttactatacaattatgaaatgtaatgtaagacaccaacagaaatgatatacctgtaactgtacctatcaggactatacctcatttacagtcagaaagcttactgggatgtcaggaaatgatacagggttggttctcatttcgtgccgaaatgagacagaaattcagtgacgaaggtgcgttgtaggggtattgatgtgccccaggtagtgccagcagagtagggaaaactgcatttgcataaaaactactcttgacatgattgttcattttacaaaaaaattccattaattaccaagccctcacccagcccatgtgtgataggatttatgtaggaagaaacttgattttcaaataattttttaaatgtatctcttgcctaaaggactatatacatctaataaagtaacactgtgtcatcttctggagttatcaaaaattgtatacaatcaagacaacacaagaattattttatttttgagtgcaaatacaggtactgttggagttgatgggcaccatgctttctcatgaagtagcatttccctaccatcaagccattgttttgtgccattcaggagaggaaaaaaaggaatttatgctgtacatttcagttcagtgtatgaccaaaagcaatatgtttataagaagatgtttgacatactaattattttatatcatttaaaccatactgtagcaacataatatatggagctaatttgtagaattatttttacgatttccaaacaaatgtactgtactgttatataatttattgtgaggaccttctcatggaagccattaggaaaacaaactagaggtaaatatcacattaatctgtattatcaatttctcatagacactgtgctaatgtgaattttaaatgacctgcatcaagtcttctgatctcagataactcagtacagatagcaattagtcagctgatttgattacaatggagtaaccgacaatatatttatttataaagcacatattcataataacgagaagaattcagaaaaccacttaagcaagacccttctgaaataaaaaatgttgctttttaaatagtttgtcctaaggtgtttaaaacatgtcaaccttatgtaaggaaaaatttcctggtccaaataaagttgaagtttaagaaaaa

SEQ ID NO: 84352 - DNA, 5811 bp, Homo sapiens
atacataccttctactcagttcattgaagtagtttttctatgtaaagttattataaatttcagaggtatactattaaactgtcaataaaatataatttagcacatttctgaggttctaaaattagttgtttctttccaagtatacataggattacttttctttttcaacaacagattttctctaatatttgttttgttttgtgtttattccttgccttttagtctttaaagaagctcaaccatgccaatgtagtcaaattaaaagaagttatcagggaaaatgatcatctttattttatcttcgagtacatgaaggaaaatctttaccagctcattaaagagagaaataagttgtttcctgagtctgctataaggaatatcatgtatcagatattacaaggactcgcatttattcacaaacacggcttctttcatcgagacttaaagcctgagaacctcctctgcatgggaccagaacttgtgaaaattgcagactttggtttggcccgagaaatacgatcaaaacctccatatacagattatgtatctaccagatggtacagggctccagaagtactcctgaggtctaccaactacagctcccccattgacgtctgggcggtgggctgcatcatggcagaagtttacaccctcaggccactcttccctggagccagtgaaattgacacaatattcaaaatttgccaagtgctggggacaccaaaaaagactgactggcctgaaggctatcaactttcaagtgcaatgaacttccgttggccacagtgtgtacccaataacttaaagaccttgattcccaatgctagcagtgaagcagtccagctcctgagagacatgcttcagtgggatcccaagaaacgaccaacagctagtcaggcacttcgatatccttacttccaagttggacacccactaggcagcaccacacaaaaccttcaggattcagaaaaaccacagaaaggcatcctggaaaaggcaggcccacctccttatattaagccagtcccacctgcccagccaccagccaagccacacacacgaatttcttcacgacagcatcaagccagccagccccctctgcatctcacgtacccctacaaagcagaggtctccaggacagatcacccaagccatctccaggaggacaagccaagcccgttgcttttcccatccctccacaacaagcatccacagtcgaaaatcacagctggcctggagcacaaaaatggtgagataaagccaaagagtaggagaaggtggggtcttatttccaggtcaacaaaggattcagatgattgggctgacttggatgacttggatttcagtccatccctcagcaggattgacctgaaaaacaagaaaagacagagtgatgacactctctgcaggtttgagagtgttttggacctgaagccctctgagcctgtgggcacaggaaacagtgcccccacccagacgtcatatcagcggcgagacacgcccaccctgagatctgcagccaagcagcactatttgaagcactctcgatacttgcctgggatcagtataagaaatggcatactctcgaatccaggcaaggaatttattccacctaatccatggtctagttctggcttgtctggaaaatcttcagggacaatgtcagtaatcagcaaagtaaattcagttggttccagctctacaagttctagtggactgactggaaactatgtcccttcctttctgaaaaaagaaatcggttctgctatgcagagggtacacctagcacctattccagacccttcccctggttattcctccctgaaggccatgagacctcatcctgggcgaccattcttccacacccagcctagaagcactcctgggttgataccacggcctccagccgcccagccagtgcatggccggacagactgggcttccaagtacgcatctcggcgatgactgtctgccttggtgatgaatctcttcctagggagaagcaggatactttccctcagctgactggtgttctacctgcaagatgtgcagagggcataaaagcaaatcaacactttatagttattcttctgaactaagacatgtcaatattcttttttaaagtttttttttaaaatattgatttgaatgcagtaggcttttttgtataaaattattttattctaaaactgggtcccattattttcttaaacaacagcattttgtatatatggattatgttttagcattttatacagtcaactttgtaatgaactttttaaaaattaattgattttcctttggggttccagataatattttctacagattttgaaaaatgtaataatattaatgcagtattgcaacaggggtgcaatttaaggctatgtgatagagggttatttactcagtgtgtgcagatatttatgaagtggtgaaatttcaagtgtggctcactaggtacttcaggccttcttggactgttgttagaaaagtgatcctctgcttttcttagtaggtcattggtttgatttttggataccactctgctgttctaaaaggactattatattatataattcactttgttttacttttgttccccagatgaaagaactctaagtaaatacattttaaaaaatttttctgacaccctttaatgtggttgcagatctcagatgaaaccaagcttaattatactatgccattatattctaatttattccatttttgaaatcaagttgtatgtgtaccaataaaagagatttctgcttcaaaaggctctcaacatgaaggttaacacagtcaatcaaacttacattcctgccaagatgcatggccaaaaaactaagtatcaaagcagcagaaggtttttgattatagtaactgagatggaattttgtgcctagctcagttctccagatctggctaggagcagtcaatgactaatgttctgtcctagccaaattctcaggacaatttggggagcagaaagagttatggcagaggttccactcatctacaaagtcacagtcacatgccacatttgatctcctaaccctggtgtagtttctttcaagagtgagaactttatttgttgggcagaggctgttccattgagaggaatgtttacagcagtttcaaaaatgacaaagtcagtttggagacagaaaaagacaaaaggtccagtctcatccatctctatatggtacatttgcctcacttatggttgccttaaaggcaagagggaaggtcaccatcagtgaacgcaatgcaatctcaacagtgtattgattcatattctcctagggctcaaactactctctattggttccaggataatgacaaattgaaccatatgtaagtaatcttttattttttattttttttttgagacagagtctcactctgtcacccaggctggagtgcagtggcgcgatcttagctctctgcaacctctgcctcccaggttcaagcctcctgagtaactgggactacaggcgcccgccaccacgcccagctaattttttgtatttttagtagagacggggtttcactgtgttagccaggacggcctcgatctcctgacctcgtgatccaccctcctccacctcccaaagtactgggattacaggcatgagccactgcacccagccaagtgatcatttttataggttaaaatgataggtgaaatgaatatagacactttcatatggttcaacctaatgacttggtaaattattgccttggtgtattaataatatgttgcattctgaacaaataaccatggcttccaaagggccctaacctaaaatcggagagtaatttatgctttggagaatttgactcaaatatatacttgaccaagcaccatgatccctaggggcatgagaaaagcacataatggatgtggatgtgataggtggtcttttcctgttaacaagctggcagcaaagcttcagaaaatatatatgcaagcacaacttgaagctgaattcatttctgtattatattctcaactcgttatctaaagcatcagaacatgtgttttcagagatgagtcctttactataaggttaatatttattttcattttctgtattatatatgaaaagtaaattaatgtgaaacctggcccagcttgctggaaagcaggttttaaattgtaaatattccttagaggagcaaatggattgtttaataccatagtctcagtaatctagcttatataaggtcattacattttttaactgaaaaacctagttacctgattattgcacattataaaattgtttttctaatactttatagggcccaacttcagaaaatacttcgcttttttctttttatgctttcgtttgtttaccagcaagcaacttccctggggaagccaaacacatattcataaaaaaaatcaagtagctgatgtgcagttgagaaaactagaggactgaaaaaacaaattttaactagcaaatgctgtgaattactcttcctccccttctctgaaatgggtaaaggacaaattgtgtaaaaaaacctatgcactatagaagggaatagtaaccatttcttttgtctctctgtttctgttctgactgagaacctgcagccatttcttgttacatgaaaacaaaatgctacttgttacctctattttttgttactatacaattatgaaatgtaatgtaagacaccaacagaaatgatatacctgtaactgtacctatcaggactatacctcatttacagtcagaaagcttactgggatgtcaggaaatgatacagggttggttctcatttcgtgccgaaatgagacagaaattcagtgacgaaggtgcgttgtaggggtattgatgtgccccaggtagtgccagcagagtagggaaaactgcatttgcataaaaactactcttgacatgattgttcattttacaaaaaaattccattaattaccaagccctcacccagcccatgtgtgataggatttatgtaggaagaaacttgattttcaaataattttttaaatgtatctcttgcctaaaggactatatacatctaataaagtaacactgtgtcatcttctggagttatcaaaaattgtatacaatcaagacaacacaagaattattttatttttgagtgcaaatacaggtactgttggagttgatgggcaccatgctttctcatgaagtagcatttccctaccatcaagccattgttttgtgccattcaggagaggaaaaaaaggaatttatgctgtacatttcagttcagtgtatgaccaaaagcaatatgtttataagaagatgtttgacatactaattattttatatcatttaaaccatactgtagcaacataatatatggagctaatttgtagaattatttttacgatttccaaacaaatgtactgtactgttatataatttattgtgaggaccttctcatggaagccattaggaaaacaaactagaggtaaatatcacattaatctgtattatcaatttctcatagacactgtgctaatgtgaattttaaatgacctgcatcaagtcttctgatctcagataactcagtacagatagcaattagtcagctgatttgattacaatggagtaaccgacaatatatttatttataaagcacatattcataataacgagaagaattcagaaaaccacttaagcaagacccttctgaaataaaaaatgttgctttttaaatagtttgtcctaaggtgtttaaaacatgtcaaccttatgtaaggaaaaatttcctggtccaaataaagttgaagtttaagaaaaa

SEQ ID NO: 84353 - DNA, 3185 bp, Homo sapiens
acaggaaagtataacatgattctgatcactggccggtgtttgacactcaggaaagagatataactaagatatacgatgcaatgatatacgaattaaatccaggaaagagctctaattgtatgtgtaccaataaaagagatttctgcttcaaaaggctctcaacatgaaggttaacacagtcaatcaaacttacattcctgccaagatgcatggccaaaaaactaagtatcaaagcagcagaaggtttttgattatagtaactgagatggaattttgtgcctagctcagttctccagatctggctaggagcagtcaatgactaatgttctgtcctagccaaattctcaggacaatttggggagcagaaagagttatggcagaggttccactcatctacaaagtcacagtcacatgccacatttgatctcctaaccctggtgtagtttctttcaagagtgagaactttatttgttgggcagaggctgttccattgagaggaatgtttacagcagtttcaaaaatgacaaagtcagtttggagacagaaaaagacaaaaggtccagtctcatccatctctatatggtacatttgcctcacttatggttgccttaaaggcaagagggaaggtcaccatcagtgaacgcaatgcaatctcaacagtgtattgattcatattctcctagggctcaaactactctctattggttccaggataatgacaaattgaaccatatgtaagtaatcttttattttttattttttttttgagacagagtctcactctgtcacccaggctggagtgcagtggcgcgatcttagctctctgcaacctctgcctcccaggttcaagcctcctgagtaactgggactacaggcgcccgccaccacgcccagctaattttttgtatttttagtagagacggggtttcactgtgttagccaggacggcctcgatctcctgacctcgtgatccaccctcctccacctcccaaagtactgggattacaggcatgagccactgcacccagccaagtgatcatttttataggttaaaatgataggtgaaatgaatatagacactttcatatggttcaacctaatgacttggtaaattattgccttggtgtattaataatatgttgcattctgaacaaataaccatggcttccaaagggccctaacctaaaatcggagagtaatttatgctttggagaatttgactcaaatatatacttgaccaagcaccatgatccctaggggcatgagaaaagcacataatggatgtggatgtgataggtggtcttttcctgttaacaagctggcagcaaagcttcagaaaatatatatgcaagcacaacttgaagctgaattcatttctgtattatattctcaactcgttatctaaagcatcagaacatgtgttttcagagatgagtcctttactataaggttaatatttattttcattttctgtattatatatgaaaagtaaattaatgtgaaacctggcccagcttgctggaaagcaggttttaaattgtaaatattccttagaggagcaaatggattgtttaataccatagtctcagtaatctagcttatataaggtcattacattttttaactgaaaaacctagttacctgattattgcacattataaaattgtttttctaatactttatagggcccaacttcagaaaatacttcgcttttttctttttatgctttcgtttgtttaccagcaagcaacttccctggggaagccaaacacatattcataaaaaaaatcaagtagctgatgtgcagttgagaaaactagaggactgaaaaaacaaattttaactagcaaatgctgtgaattactcttcctccccttctctgaaatgggtaaaggacaaattgtgtaaaaaaacctatgcactatagaagggaatagtaaccatttcttttgtctctctgtttctgttctgactgagaacctgcagccatttcttgttacatgaaaacaaaatgctacttgttacctctattttttgttactatacaattatgaaatgtaatgtaagacaccaacagaaatgatatacctgtaactgtacctatcaggactatacctcatttacagtcagaaagcttactgggatgtcaggaaatgatacagggttggttctcatttcgtgccgaaatgagacagaaattcagtgacgaaggtgcgttgtaggggtattgatgtgccccaggtagtgccagcagagtagggaaaactgcatttgcataaaaactactcttgacatgattgttcattttacaaaaaaattccattaattaccaagccctcacccagcccatgtgtgataggatttatgtaggaagaaacttgattttcaaataattttttaaatgtatctcttgcctaaaggactatatacatctaataaagtaacactgtgtcatcttctggagttatcaaaaattgtatacaatcaagacaacacaagaattattttatttttgagtgcaaatacaggtactgttggagttgatgggcaccatgctttctcatgaagtagcatttccctaccatcaagccattgttttgtgccattcaggagaggaaaaaaaggaatttatgctgtacatttcagttcagtgtatgaccaaaagcaatatgtttataagaagatgtttgacatactaattattttatatcatttaaaccatactgtagcaacataatatatggagctaatttgtagaattatttttacgatttccaaacaaatgtactgtactgttatataatttattgtgaggaccttctcatggaagccattaggaaaacaaactagaggtaaatatcacattaatctgtattatcaatttctcatagacactgtgctaatgtgaattttaaatgacctgcatcaagtcttctgatctcagataactcagtacagatagcaattagtcagctgatttgattacaatggagtaaccgacaatatatttatttataaagcacatattcataataacgagaagaattcagaaaaccacttaagcaagacccttctgaaataaaaaatgttgctttttaaatagtttgtcctaaggtgtttaaaacatgtcaaccttatgtaaggaaaaatttcctggtccaaataaagttgaagtttaagaaaaa

SEQ ID NO: 84354 - DNA, 1732 bp, Homo sapiens
ttttgtttgttttcctgccggaggctggaaaacggccgggttcctgctgcactaccatgcgccgtgcggcccgtgcgactcgccggacctcgcgggcgtccctgtacggagccctcggccggtcctagcagggattgtccccatttccagctccggagcgggcggctgcgccccgctcgtcgaggagctgcgctcacctcaggggcgggcccccgcctgcgttcgcggcgccaagaagagtattcctttccacttacaactaaataagacctgcttttgctggagctgtgctaggctgagggaattccacactgaattttacaagcgggatggatttctctaaggaagatgacatacaacgatggtttgggagtcttaatttgttggaaagtgaaataatgaatgatggaggattcatacacagatgtgtctcaacttagagtggggttacatccctataaacccattgcagaagactgatttttggaaatatgtatttgggagacagtcacgtcctattgaataccttgtgctggtgctgccatcgaaaaatctggttacactctggggaggactgctaccactgcagaactgaaccacttcggccgtgagatgagtgtccggcctgagcaggcacaccatgaatagatacacaacaatcaggcagctcggggatggaacctacggttccgtcctgctgggaagaagcattgagtctggggagctgatcgctattaaaaaaatgaaaagaaaattttattcctgggaggaatgcatgaaccttcgggaggttaagtctttaaagaagctcaaccatgccaatgtagtcaaattaaaagaagttatcagggaaaatgatcatctttattttatcttcgagtacatgaaggaaaatctttaccagctcattaaagagagaaataagttgtttcctgagtctgctataaggaatatcatgtatcagatattacaaggactcgcatttattcacaaacacggcttctttcatcgagacttaaagcctgagaacctcctctgcatgggaccagaacttgtgaaaattgcagactttggtttggcccgagaaatacgatcaaaacctccatatacagattatgtatctaccagatggtacagggctccagaagtactcctgaggtctaccaactacagctcccccattgacgtctgggcggtgggctgcatcatggcagaagtttacaccctcaggccactcttccctggagccagtgaaattgacacaatattcaaaatttgccaagtgctggggacaccaaaaaagactgactggcctgaaggctatcaactttcaagtgcaatgaacttccgttggccacagtgtgtacccaataacttaaagaccttgattcccaatgctagcagtgaagcagtccagctcctgagagacatgcttcagtgggatcccaagaaacgaccaacagctagtcaggttttcttccattttcttgttataacgttcatatctaactctgaataatttctatgaattgcacaggaaatatttagtatttagtattatgggtgagaaatagtacagaataccactaatggtgtactatataaggtatgagaacttaaaatagtttgaaacttactgggtataaagtagttacaatgtaaacaatatagttgctttgaaaattggcatgtaattcacatgatatatcaccatttatatggaaatggaaat

SEQ ID NO: 84355 - DNA, 473 bp, Homo sapiens
cagcacagagcagtttcaccaatatagaaagttctgctggacagctctggtctaaatagaataagcctgagcaatttccttccagagcaaggttagttagttagtatagagtaagacagcagtccaggcctctttggactgcaccacaccactgctactggcaaaatttgtgacttaggattattgcactgctgtttgaaaataagtgctggtttgggatagtataatactgggtagaaatttaaacccactttaagtactgttaattaggatcagaatggaagcatttttctaaaagcaaagtttaacctattactgagaataagtgtgctgtttgtttctttcttctcttctagaatgaaaagaaaattttattcctgggaggaatgcatgaaccttcgggaggttaaggtatatattaatataccaaggaataatttatggatgattaaaatagctttgtacatgcttag

SEQ ID NO: 84356 - DNA, 266 bp, Homo sapiens
catcacagtcagtttttgctttgattattgtatcatagagagtttttgacaaattgagttctgcattaattttatctttgtagtctagtgtaagattcattgtgtattttgcattttaaaatcatttcttctctatcagggatcagtataagaaatggcatactctcgaatccaggcaaggaatttattccacctaatccatggtctagttctggcttgtctggaaaatcttcagggacaatgtcagtaatcagcaaagtaaattc

SEQ ID NO: 84357 - DNA, 6150 bp, Homo sapiens
ttttgtttgttttcctgccggaggctggaaaacggccgggttcctgctgcactaccatgcgccgtgcggcccgtgcgactcgccggacctcgcgggcgtccctgtacggagccctcggccggtcctagcagggattgtccccatttccagctccggagcgggcggctgcgccccgctcgtcgaggagctgcgctcacctcaggggcgggcccccgcctgcgttcgcggcgccagcagaagactgatttttggaaatatgtatttgggagacagtcacgtcctattgaataccttgtgctggtgctgccatcgaaaaatctggttacactctggggaggactgctaccactgcagaactgaaccacttcggccgtgagatgagtgtccggcctgagcaggcacaccatgaatagatacacaacaatcaggcagctcggggatggaacctacggttccgtcctgctgggaagaagcattgagtctggggagctgatcgctattaaaaaaatgaaaagaaaattttattcctgggaggaatgcatgaaccttcgggaggttaagtctttaaagaagctcaaccatgccaatgtagtcaaattaaaagaagttatcagggaaaatgatcatctttattttatcttcgagtacatgaaggaaaatctttaccagctcattaaagagagaaataagttgtttcctgagtctgctataaggaatatcatgtatcagatattacaaggactcgcatttattcacaaacacggcttctttcatcgagacttaaagcctgagaacctcctctgcatgggaccagaacttgtgaaaattgcagactttggtttggcccgagaaatacgatcaaaacctccatatacagattatgtatctaccagatggtacagggctccagaagtactcctgaggtctaccaactacagctcccccattgacgtctgggcggtgggctgcatcatggcagaagtttacaccctcaggccactcttccctggagccagtgaaattgacacaatattcaaaatttgccaagtgctggggacaccaaaaaagactgactggcctgaaggctatcaactttcaagtgcaatgaacttccgttggccacagtgtgtacccaataacttaaagaccttgattcccaatgctagcagtgaagcagtccagctcctgagagacatgcttcagtgggatcccaagaaacgaccaacagctagtcaggcacttcgatatccttacttccaagttggacacccactaggcagcaccacacaaaaccttcaggattcagaaaaaccacagaaaggcatcctggaaaaggcaggcccacctccttatattaagccagtcccacctgcccagccaccagccaagccacacacacgaatttcttcacgacagcatcaagccagccagccccctctgcatctcacgtacccctacaaagcagaggtctccaggacagatcacccaagccatctccaggaggacaagccaagcccgttgcttttcccatccctccacaacaagcatccacagtcgaaaatcacagctggcctggagcacaaaaatggtgagataaagccaaagagtaggagaaggtggggtcttatttccaggtcaacaaaggattcagatgattgggctgacttggatgacttggatttcagtccatccctcagcaggattgacctgaaaaacaagaaaagacagagtgatgacactctctgcaggtttgagagtgttttggacctgaagccctctgagcctgtgggcacaggaaacagtgcccccacccagacgtcatatcagcggcgagacacgcccaccctgagatctgcagccaagcagcactatttgaagcactctcgatacttgcctgggatcagtataagaaatggcatactctcgaatccaggcaaggaatttattccacctaatccatggtctagttctggcttgtctggaaaatcttcagggacaatgtcagtaatcagcaaagtaaattcagttggttccagctctacaagttctagtggactgactggaaactatgtcccttcctttctgaaaaaagaaatcggttctgctatgcagagggtacacctagcacctattccagacccttcccctggttattcctccctgaaggccatgagacctcatcctgggcgaccattcttccacacccagcctagaagcactcctgggttgataccacggcctccagccgcccagccagtgcatggccggacagactgggcttccaagtacgcatctcggcgatgactgtctgccttggtgatgaatctcttcctagggagaagcaggatactttccctcagctgactggtgttctacctgcaagatgtgcagagggcataaaagcaaatcaacactttatagttattcttctgaactaagacatgtcaatattcttttttaaagtttttttttaaaatattgatttgaatgcagtaggcttttttgtataaaattattttattctaaaactgggtcccattattttcttaaacaacagcattttgtatatatggattatgttttagcattttatacagtcaactttgtaatgaactttttaaaaattaattgattttcctttggggttccagataatattttctacagattttgaaaaatgtaataatattaatgcagtattgcaacaggggtgcaatttaaggctatgtgatagagggttatttactcagtgtgtgcagatatttatgaagtggtgaaatttcaagtgtggctcactaggtacttcaggccttcttggactgttgttagaaaagtgatcctctgcttttcttagtaggtcattggtttgatttttggataccactctgctgttctaaaaggactattatattatataattcactttgttttacttttgttccccagatgaaagaactctaagtaaatacattttaaaaaatttttctgacaccctttaatgtggttgcagatctcagatgaaaccaagcttaattatactatgccattatattctaatttattccatttttgaaatcaagttgtatgtgtaccaataaaagagatttctgcttcaaaaggctctcaacatgaaggttaacacagtcaatcaaacttacattcctgccaagatgcatggccaaaaaactaagtatcaaagcagcagaaggtttttgattatagtaactgagatggaattttgtgcctagctcagttctccagatctggctaggagcagtcaatgactaatgttctgtcctagccaaattctcaggacaatttggggagcagaaagagttatggcagaggttccactcatctacaaagtcacagtcacatgccacatttgatctcctaaccctggtgtagtttctttcaagagtgagaactttatttgttgggcagaggctgttccattgagaggaatgtttacagcagtttcaaaaatgacaaagtcagtttggagacagaaaaagacaaaaggtccagtctcatccatctctatatggtacatttgcctcacttatggttgccttaaaggcaagagggaaggtcaccatcagtgaacgcaatgcaatctcaacagtgtattgattcatattctcctagggctcaaactactctctattggttccaggataatgacaaattgaaccatatgtaagtaatcttttattttttattttttttttgagacagagtctcactctgtcacccaggctggagtgcagtggcgcgatcttagctctctgcaacctctgcctcccaggttcaagcctcctgagtaactgggactacaggcgcccgccaccacgcccagctaattttttgtatttttagtagagacggggtttcactgtgttagccaggacggcctcgatctcctgacctcgtgatccaccctcctccacctcccaaagtactgggattacaggcatgagccactgcacccagccaagtgatcatttttataggttaaaatgataggtgaaatgaatatagacactttcatatggttcaacctaatgacttggtaaattattgccttggtgtattaataatatgttgcattctgaacaaataaccatggcttccaaagggccctaacctaaaatcggagagtaatttatgctttggagaatttgactcaaatatatacttgaccaagcaccatgatccctaggggcatgagaaaagcacataatggatgtggatgtgataggtggtcttttcctgttaacaagctggcagcaaagcttcagaaaatatatatgcaagcacaacttgaagctgaattcatttctgtattatattctcaactcgttatctaaagcatcagaacatgtgttttcagagatgagtcctttactataaggttaatatttattttcattttctgtattatatatgaaaagtaaattaatgtgaaacctggcccagcttgctggaaagcaggttttaaattgtaaatattccttagaggagcaaatggattgtttaataccatagtctcagtaatctagcttatataaggtcattacattttttaactgaaaaacctagttacctgattattgcacattataaaattgtttttctaatactttatagggcccaacttcagaaaatacttcgcttttttctttttatgctttcgtttgtttaccagcaagcaacttccctggggaagccaaacacatattcataaaaaaaatcaagtagctgatgtgcagttgagaaaactagaggactgaaaaaacaaattttaactagcaaatgctgtgaattactcttcctccccttctctgaaatgggtaaaggacaaattgtgtaaaaaaacctatgcactatagaagggaatagtaaccatttcttttgtctctctgtttctgttctgactgagaacctgcagccatttcttgttacatgaaaacaaaatgctacttgttacctctattttttgttactatacaattatgaaatgtaatgtaagacaccaacagaaatgatatacctgtaactgtacctatcaggactatacctcatttacagtcagaaagcttactgggatgtcaggaaatgatacagggttggttctcatttcgtgccgaaatgagacagaaattcagtgacgaaggtgcgttgtaggggtattgatgtgccccaggtagtgccagcagagtagggaaaactgcatttgcataaaaactactcttgacatgattgttcattttacaaaaaaattccattaattaccaagccctcacccagcccatgtgtgataggatttatgtaggaagaaacttgattttcaaataattttttaaatgtatctcttgcctaaaggactatatacatctaataaagtaacactgtgtcatcttctggagttatcaaaaattgtatacaatcaagacaacacaagaattattttatttttgagtgcaaatacaggtactgttggagttgatgggcaccatgctttctcatgaagtagcatttccctaccatcaagccattgttttgtgccattcaggagaggaaaaaaaggaatttatgctgtacatttcagttcagtgtatgaccaaaagcaatatgtttataagaagatgtttgacatactaattattttatatcatttaaaccatactgtagcaacataatatatggagctaatttgtagaattatttttacgatttccaaacaaatgtactgtactgttatataatttattgtgaggaccttctcatggaagccattaggaaaacaaactagaggtaaatatcacattaatctgtattatcaatttctcatagacactgtgctaatgtgaattttaaatgacctgcatcaagtcttctgatctcagataactcagtacagatagcaattagtcagctgatttgattacaatggagtaaccgacaatatatttatttataaagcacatattcataataacgagaagaattcagaaaaccacttaagcaagacccttctgaaataaaaaatgttgctttttaaatagtttgtcctaaggtgtttaaaacatgtcaaccttatgtaaggaaaaatttcctggtccaaataaagttgaagtttaagaaaaa

SEQ ID NO: 84358 - DNA, 6207 bp, Homo sapiens
ttttgtttgttttcctgccggaggctggaaaacggccgggttcctgctgcactaccatgcgccgtgcggcccgtgcgactcgccggacctcgcgggcgtccctgtacggagccctcggccggtcctagcagggattgtccccatttccagctccggagcgggcggctgcgccccgctcgtcgaggagctgcgctcacctcaggggcgggcccccgcctgcgttcgcggcgccaagaagagtattcctttccacttacaactaaataagacctgcttttgctggagctgtgctaggctgagggaattccacactgaattttacaagcgggatggatttctctaaggcagaagactgatttttggaaatatgtatttgggagacagtcacgtcctattgaataccttgtgctggtgctgccatcgaaaaatctggttacactctggggaggactgctaccactgcagaactgaaccacttcggccgtgagatgagtgtccggcctgagcaggcacaccatgaatagatacacaacaatcaggcagctcggggatggaacctacggttccgtcctgctgggaagaagcattgagtctggggagctgatcgctattaaaaaaatgaaaagaaaattttattcctgggaggaatgcatgaaccttcgggaggttaagtctttaaagaagctcaaccatgccaatgtagtcaaattaaaagaagttatcagggaaaatgatcatctttattttatcttcgagtacatgaaggaaaatctttaccagctcattaaagagagaaataagttgtttcctgagtctgctataaggaatatcatgtatcagatattacaaggactcgcatttattcacaaacacggcttctttcatcgagacttaaagcctgagaacctcctctgcatgggaccagaacttgtgaaaattgcagactttggtttggcccgagaaatacgatcaaaacctccatatacagattatgtatctaccagatggtacagggctccagaagtactcctgaggtctaccaactacagctcccccattgacgtctgggcggtgggctgcatcatggcagaagtttacaccctcaggccactcttccctggagccagtgaaattgacacaatattcaaaatttgccaagtgctggggacaccaaaaaagactgactggcctgaaggctatcaactttcaagtgcaatgaacttccgttggccacagtgtgtacccaataacttaaagaccttgattcccaatgctagcagtgaagcagtccagctcctgagagacatgcttcagtgggatcccaagaaacgaccaacagctagtcaggcacttcgatatccttacttccaagttggacacccactaggcagcaccacacaaaaccttcaggattcagaaaaaccacagaaaggcatcctggaaaaggcaggcccacctccttatattaagccagtcccacctgcccagccaccagccaagccacacacacgaatttcttcacgacagcatcaagccagccagccccctctgcatctcacgtacccctacaaagcagaggtctccaggacagatcacccaagccatctccaggaggacaagccaagcccgttgcttttcccatccctccacaacaagcatccacagtcgaaaatcacagctggcctggagcacaaaaatggtgagataaagccaaagagtaggagaaggtggggtcttatttccaggtcaacaaaggattcagatgattgggctgacttggatgacttggatttcagtccatccctcagcaggattgacctgaaaaacaagaaaagacagagtgatgacactctctgcaggtttgagagtgttttggacctgaagccctctgagcctgtgggcacaggaaacagtgcccccacccagacgtcatatcagcggcgagacacgcccaccctgagatctgcagccaagcagcactatttgaagcactctcgatacttgcctgggatcagtataagaaatggcatactctcgaatccaggcaaggaatttattccacctaatccatggtctagttctggcttgtctggaaaatcttcagggacaatgtcagtaatcagcaaagtaaattcagttggttccagctctacaagttctagtggactgactggaaactatgtcccttcctttctgaaaaaagaaatcggttctgctatgcagagggtacacctagcacctattccagacccttcccctggttattcctccctgaaggccatgagacctcatcctgggcgaccattcttccacacccagcctagaagcactcctgggttgataccacggcctccagccgcccagccagtgcatggccggacagactgggcttccaagtacgcatctcggcgatgactgtctgccttggtgatgaatctcttcctagggagaagcaggatactttccctcagctgactggtgttctacctgcaagatgtgcagagggcataaaagcaaatcaacactttatagttattcttctgaactaagacatgtcaatattcttttttaaagtttttttttaaaatattgatttgaatgcagtaggcttttttgtataaaattattttattctaaaactgggtcccattattttcttaaacaacagcattttgtatatatggattatgttttagcattttatacagtcaactttgtaatgaactttttaaaaattaattgattttcctttggggttccagataatattttctacagattttgaaaaatgtaataatattaatgcagtattgcaacaggggtgcaatttaaggctatgtgatagagggttatttactcagtgtgtgcagatatttatgaagtggtgaaatttcaagtgtggctcactaggtacttcaggccttcttggactgttgttagaaaagtgatcctctgcttttcttagtaggtcattggtttgatttttggataccactctgctgttctaaaaggactattatattatataattcactttgttttacttttgttccccagatgaaagaactctaagtaaatacattttaaaaaatttttctgacaccctttaatgtggttgcagatctcagatgaaaccaagcttaattatactatgccattatattctaatttattccatttttgaaatcaagttgtatgtgtaccaataaaagagatttctgcttcaaaaggctctcaacatgaaggttaacacagtcaatcaaacttacattcctgccaagatgcatggccaaaaaactaagtatcaaagcagcagaaggtttttgattatagtaactgagatggaattttgtgcctagctcagttctccagatctggctaggagcagtcaatgactaatgttctgtcctagccaaattctcaggacaatttggggagcagaaagagttatggcagaggttccactcatctacaaagtcacagtcacatgccacatttgatctcctaaccctggtgtagtttctttcaagagtgagaactttatttgttgggcagaggctgttccattgagaggaatgtttacagcagtttcaaaaatgacaaagtcagtttggagacagaaaaagacaaaaggtccagtctcatccatctctatatggtacatttgcctcacttatggttgccttaaaggcaagagggaaggtcaccatcagtgaacgcaatgcaatctcaacagtgtattgattcatattctcctagggctcaaactactctctattggttccaggataatgacaaattgaaccatatgtaagtaatcttttattttttattttttttttgagacagagtctcactctgtcacccaggctggagtgcagtggcgcgatcttagctctctgcaacctctgcctcccaggttcaagcctcctgagtaactgggactacaggcgcccgccaccacgcccagctaattttttgtatttttagtagagacggggtttcactgtgttagccaggacggcctcgatctcctgacctcgtgatccaccctcctccacctcccaaagtactgggattacaggcatgagccactgcacccagccaagtgatcatttttataggttaaaatgataggtgaaatgaatatagacactttcatatggttcaacctaatgacttggtaaattattgccttggtgtattaataatatgttgcattctgaacaaataaccatggcttccaaagggccctaacctaaaatcggagagtaatttatgctttggagaatttgactcaaatatatacttgaccaagcaccatgatccctaggggcatgagaaaagcacataatggatgtggatgtgataggtggtcttttcctgttaacaagctggcagcaaagcttcagaaaatatatatgcaagcacaacttgaagctgaattcatttctgtattatattctcaactcgttatctaaagcatcagaacatgtgttttcagagatgagtcctttactataaggttaatatttattttcattttctgtattatatatgtgtaaatattccttagaggagcaaatggattgtttaataccatagtctcagtaatctagcttatataaggtcattacattttttaactgaaaaacctagttacctgattattgcacattataaaattgtttttctaatactttatagggcccaacttcagaaaatacttcgcttttttctttttatgctttcgtttgtttaccagcaagcaacttccctggggaagccaaacacatattcataaaaaaaatcaagtagctgatgtgcagttgagaaaactagaggactgaaaaaacaaattttaactagcaaatgctgtgaattactcttcctccccttctctgaaatgggtaaaggacaaattgtgtaaaaaaacctatgcactatagaagggaatagtaaccatttcttttgtctctctgtttctgttctgactgagaacctgcagccatttcttgttacatgaaaacaaaatgctacttgttacctctattttttgttactatacaattatgaaatgtaatgtaagacaccaacagaaatgatatacctgtaactgtacctatcaggactatacctcatttacagtcagaaagcttactgggatgtcaggaaatgatacagggttggttctcatttcgtgccgaaatgagacagaaattcagtgacgaaggtgcgttgtaggggtattgatgtgccccaggtagtgccagcagagtagggaaaactgcatttgcataaaaactactcttgacatgattgttcattttacaaaaaaattccattaattaccaagccctcacccagcccatgtgtgataggatttatgtaggaagaaacttgattttcaaataattttttaaatgtatctcttgcctaaaggactatatacatctaataaagtaacactgtgtcatcttctggagttatcaaaaattgtatacaatcaagacaacacaagaattattttatttttgagtgcaaatacaggtactgttggagttgatgggcaccatgctttctcatgaagtagcatttccctaccatcaagccattgttttgtgccattcaggagaggaaaaaaaggaatttatgctgtacatttcagttcagtgtatgaccaaaagcaatatgtttataagaagatgtttgacatactaattattttatatcatttaaaccatactgtagcaacataatatatggagctaatttgtagaattatttttacgatttccaaacaaatgtactgtactgttatataatttattgtgaggaccttctcatggaagccattaggaaaacaaactagaggtaaatatcacattaatctgtattatcaatttctcatagacactgtgctaatgtgaattttaaatgacctgcatcaagtcttctgatctcagataactcagtacagatagcaattagtcagctgatttgattacaatggagtaaccgacaatatatttatttataaagcacatattcataataacgagaagaattcagaaaaccacttaagcaagacccttctgaaataaaaaatgttgctttttaaatagtttgtcctaaggtgtttaaaacatgtcaaccttatgtaaggaaaaatttcctggtccaaataaagttgaagtttaagaaaaa

SEQ ID NO: 84359 - DNA, 6653 bp, Homo sapiens
ttttgtttgttttcctgccggaggctggaaaacggccgggttcctgctgcactaccatgcgccgtgcggcccgtgcgactcgccggacctcgcgggcgtccctgtacggagccctcggccggtcctagcagggattgtccccatttccagctccggagcgggcggctgcgccccgctcgtcgaggagctgcgctcacctcaggggcgggcccccgcctgcgttcgcggcgccaagaagagtattcctttccacttacaactaaataagacctgcttttgctggagctgtgctaggctgagggaattccacactgaattttacaagcgggatggatttctctaaggcagaagactgatttttggaaatatgtatttgggagacagtcacgtcctattgaataccttgtgctggtgctgccatcgaaaaatctggttacactctggggaggactgctaccactgcagaactgaaccacttcggccgtgagatgagtgtccggcctgagcaggcacaccatgaatagatacacaacaatcaggcagctcggggatggaacctacggttccgtcctgctgggaagaagcattgagtctggggagctgatcgctattaaaaaaatgaaaagaaaattttattcctgggaggaatgcatgaaccttcgggaggttaagtctttaaagaagctcaaccatgccaatgtagtcaaattaaaagaagttatcagggaaaatgatcatctttattttatcttcgagtacatgaaggaaaatctttaccagctcattaaagagagaaataagttgtttcctgagtctgctataaggaatatcatgtatcagatattacaaggactcgcatttattcacaaacacggcttctttcatcgagacttaaagcctgagaacctcctctgcatgggaccagaacttgtgaaaattgcagactttggtttggcccgagaaatacgatcaaaacctccatatacagattatgtatctaccagatggtacagggctccagaagtactcctgaggtctaccaactacagctcccccattgacgtctgggcggtgggctgcatcatggcagaagtttacaccctcaggccactcttccctggagccagtgaaattgacacaatattcaaaatttgccaagtgctggggacaccaaaaaagactgactggcctgaaggctatcaactttcaagtgcaatgaacttccgttggccacagtgtgtacccaataacttaaagaccttgattcccaatgctagcagtgaagcagtccagctcctgagagacatgcttcagtgggatcccaagaaacgaccaacagctagtcaggcacttcgatatccttacttccaagttggacacccactaggcagcaccacacaaaaccttcaggattcagaaaaaccacagaaaggcatcctggaaaaggcaggcccacctccttatattaagccagtcccacctgcccagccaccagccaagccacacacacgaatttcttcacgacagcatcaagccagccagccccctctgcatctcacgtacccctacaaagcagaggtctccaggacagatcacccaagccatctccaggaggacaagccaagcccgttgcttttcccatccctccacaacaagcatccacagtcgaaaatcacagctggcctggagcacaaaaatggtgagataaagccaaagagtaggagaaggtggggtcttatttccaggtcaacaaaggattcagatgattgggctgacttggatgacttggatttcagtccatccctcagcaggattgacctgaaaaacaagaaaagacagagtgatgacactctctgcaggtttgagagtgttttggacctgaagccctctgagcctgtgggcacaggaaacagtgcccccacccagacgtcatatcagcggcgagacacgcccaccctgagatctgcagccaagcagcactatttgaagcactctcgatacttgcctgggatcagtataagaaatggcatactctcgaatccaggcaaggaatttattccacctaatccatggtctagttctggcttgtctggaaaatcttcagggacaatgtcagtaatcagcaaagtaaattcagttggttccagctctacaagttctagtggactgactggaaactatgtcccttcctttctgaaaaaagaaatcggttctgctatgcagagggtacacctagcacctattccagacccttcccctggttattcctccctgaaggccatgagacctcatcctgggcgaccattcttccacacccagcctagaagcactcctgggttgataccacggcctccagccgcccagccagtgcatggccggacagactgggcttccaagtacgcatctcggcgatgactgtctgccttggtgatgaatctcttcctagggagaagcaggatactttccctcagctgactggtgttctacctgcaagatgtgcagagggcataaaagcaaatcaacactttatagttattcttctgaactaagacatgtcaatattcttttttaaagtttttttttaaaatattgatttgaatgcagtaggcttttttgtataaaattattttattctaaaactgggtcccattattttcttaaacaacagcattttgtatatatggattatgttttagcattttatacagtcaactttgtaatgaactttttaaaaattaattgattttcctttggggttccagataatattttctacagattttgaaaaatgtaataatattaatgcagtattgcaacaggggtgcaatttaaggctatgtgatagagggttatttactcagtgtgtgcagatatttatgaagtggtgaaatttcaagtgtggctcactaggtacttcaggccttcttggactgttgttagaaaagtgatcctctgcttttcttagtaggtcattggtttgatttttggataccactctgctgttctaaaaggactattatattatataattcactttgttttacttttgttccccagatgaaagaactctaagtaaatacattttaaaaaatttttctgacaccctttaatgtggttgcagatctcagatgaaaccaagcttaattatactatgccattatattctaatttattccatttttgaaatcaagttgtatgtgtaccaataaaagagatttctgcttcaaaaggctctcaacatgaaggttaacacagtcaatcaaacttacattcctgccaagatgcatggccaaaaaactaagtatcaaagcagcagaaggtttttgattatagtaactgagatggaattttgtgcctagctcagttctccagatctggctaggagcagtcaatgactaatgttctgtcctagccaaattctcaggacaatttggggagcagaaagagttatggcagaggttccactcatctacaaagtcacagtcacatgccacatttgatctcctaaccctggtgtagtttctttcaagagtgagaactttatttgttgggcagaggctgttccattgagaggaatgtttacagcagtttcaaaaatgacaaagtcagtttggagacagaaaaagacaaaaggtccagtctcatccatctctatatggtacatttgcctcacttatggttgccttaaaggcaagagggaaggtcaccatcagtgaacgcaatgcaatctcaacagtgtattgattcatattctcctagggctcaaactactctctattggttccaggataatgacaaattgaaccatatgtaagtaatcttttattttttattttttttttgagacagagtctcactctgtcacccaggctggagtgcagtggcgcgatcttagctctctgcaacctctgcctcccaggttcaagcctcctgagtaactgggactacaggcgcccgccaccacgcccagctaattttttgtatttttagtagagacggggtttcactgtgttagccaggacggcctcgatctcctgacctcgtgatccaccctcctccacctcccaaagtactgggattacaggcatgagccactgcacccagccaagtgatcatttttataggttaaaatgataggtgaaatgaatatagacactttcatatggttcaacctaatgacttggtaaattattgccttggtgtattaataatatgttgcattctgaacaaataaccatggcttccaaagggccctaacctaaaatcggagagtaatttatgctttggagaatttgactcaaatatatacttgaccaagcaccatgatccctaggggcatgagaaaagcacataatggatgtggatgtgataggtggtcttttcctgttaacaagctggcagcaaagcttcagaaaatatatatgcaagcacaacttgaagctgaattcatttctgtattatattctcaactcgttatctaaagcatcagaacatgtgttttcagagatgagtcctttactataaggttaatatttattttcattttctgtattatatatgaaaagtaaattaatgtgaaacctggcccagcttgctggaaagcaggttttaaattgtaaatattccttagaggagcaaatggattgtttaataccatagtctcagtaatctagcttatataaggtcattacattttttaactgaaaaacctagttacctgattattgcacattataaaattgtttttctaatactttatagggcccaacttcagaaaatacttcgcttttttctttttatgctttcgtttgtttaccagcaagcaacttccctggggaagccaaacacatattcataaaaaaaatcaagtagctgatgtgcagttgagaaaactagaggactgaaaaaacaaattttaactagcaaatgctgtgaattactcttcctccccttctctgaaatgggtaaaggacaaattgtgtaaaaaaacctatgcactatagaagggaatagtaaccatttcttttgtctctctgtttctgttctgactgagaacctgcagccatttcttgttacatgaaaacaaaatgctacttgttacctctattttttgttactatacaattatgaaatgtaatgtaagacaccaacagaaatgatatacctgtaactgtacctatcaggactatacctcatttacagtcagaaagcttactgggatgtcaggaaatgatacagggttggttctcatttcgtgccgaaatgagacagaaattcagtgacgaaggtgcgttgtaggggtattgatgtgccccaggtagtgccagcagagtagggaaaactgcatttgcataaaaactactcttgacatgattgttcattttacaaaaaaattccattaattaccaagccctcacccagcccatgtgtgataggatttatgtaggaagaaacttgattttcaaataattttttaaatgtatctcttgcctaaaggactatatacatctaataaagtaacactgtgtcatcttctggagttatcaaaaattgtatacaatcaagacaacacaagaattattttatttttgagtgcaaatacaggtactgttggagttgatgggcaccatgctttctcatgaagtagcatttccctaccatcaagccattgttttgtgccattcaggagaggaaaaaaaggaatttatgctgtacatttcagttcagtgtatgaccaaaagcaatatgtttataagaagatgtttgacatactaattattttatatcatttaaaccatactgtagcaacataatatatggagctaatttgtagaattatttttacgatttccaaacaaatgtactgtactgttatataatttattgtgaggaccttctcatggaagccattaggaaaacaaactagaggtaaatatcacattaatctgtattatcaatttctcatagacactgtgctaatgtgaattttaaatgacctgcatcaagtcttctgatctcagataactcagtacagatagcaattagtcagctgatttgattacaatggagtaaccgacaatatatttatttataaagcacatattcataataacgagaagaattcagaaaaccacttaagcaagacccttctgaaataaaaaatgttgctttttaaatagtttgtcctaaggtgtttaaaacatgtcaaccttatgtaaggaaaaatttcctggtccaaataaagttgaagtttaagaaaaaaaaaaaaaaaaaaaaaaaaaaaaaaaaaaaaaaaaaaaaaaaaaaaaaaaaaaacaaaaaaaaaaaacacaaaagaaccacaaagaagataaaaaaaatagaaaaaacatggctaaagaagacccaccagtgcgagcatacgataagacataagaaggccgacgagaaaaaaacaaacacaccaacatcggagaacaaagataaagaaaggaacaaccgacacaaagaaaacacacaaaactaggaaaggaaaaccaacaaacacaaaatacacacagagaaacatcaacactacacggaaagaaaaaaacaaaaagcacaaacagcaaaaaaaagaccagatacaagcaaaaaacgcaacaggaaaaaaaagaaaaatacgcgaaagaaaa

SEQ ID NO: 84360 - DNA, 6059 bp, Homo sapiens
gggacaccaaaaaagactgactgcgtgaaggctatcaactttcaagtgcaatgaacttccgttggccacagtgtgtacccaataacttaaagaccttgattcccaatgctagcagtgaagcagtccagctcctgagagacatgcttcagtgggatcccaagaaacgaccaacagctagtcaggcacttcgatatccttacttccaagttggacacccatcgaaaaatctggttacactctggggaggactgctaccactgcagaactgaaccacttcggccgtgagatgagtgtccggcctgagcaggcacaccatgaatagatacacaacaatcaggcagctcggggatggaacctacggttccgtcctgctgggaagaagcattgagtctggggagctgatcgctattaaaaaaatgaaaagaaaattttattcctgggaggaatgcatgaaccttcgggaggttaagtctttaaagaagctcaaccatgccaatgtagtcaaattaaaagaagttatcagggaaaatgatcatctttattttatcttcgagtacatgaaggaaaatctttaccagctcattaaagagagaaataagttgtttcctgagtctgctataaggaatatcatgtatcagatattacaaggactcgcatttattcacaaacacggcttctttcatcgagacttaaagcctgagaacctcctctgcatgggaccagaacttgtgaaaattgcagactttggtttggcccgagaaatacgatcaaaacctccatatacagattatgtatctaccagatggtacagggctccagaagtactcctgaggtctaccaactacagctcccccattgacgtctgggcggtgggctgcatcatggcagaagtttacaccctcaggccactcttccctggagccagtgaaattgacacaatattcaaaatttgccaagtgctggggacaccaaaaaagactgactggcctgaaggctatcaactttcaagtgcaatgaacttccgttggccacagtgtgtacccaataacttaaagaccttgattcccaatgctagcagtgaagcagtccagctcctgagagacatgcttcagtgggatcccaagaaacgaccaacagctagtcaggcacttcgatatccttacttccaagttggacacccactaggcagcaccacacaaaaccttcaggattcagaaaaaccacagaaaggcatcctggaaaaggcaggcccacctccttatattaagccagtcccacctgcccagccaccagccaagccacacacacgaatttcttcacgacagcatcaagccagccagccccctctgcatctcacgtacccctacaaagcagaggtctccaggacagatcacccaagccatctccaggaggacaagccaagcccgttgcttttcccatccctccacaacaagcatccacagtcgaaaatcacagctggcctggagcacaaaaatggtgagataaagccaaagagtaggagaaggtggggtcttatttccaggtcaacaaaggattcagatgattgggctgacttggatgacttggatttcagtccatccctcagcaggattgacctgaaaaacaagaaaagacagagtgatgacactctctgcaggtttgagagtgttttggacctgaagccctctgagcctgtgggcacaggaaacagtgcccccacccagacgtcatatcagcggcgagacacgcccaccctgagatctgcagccaagcagcactatttgaagcactctcgatacttgcctgggatcagtataagaaatggcatactctcgaatccaggcaaggaatttattccacctaatccatggtctagttctggcttgtctggaaaatcttcagggacaatgtcagtaatcagcaaagtaaattcagttggttccagctctacaagttctagtggactgactggaaactatgtcccttcctttctgaaaaaagaaatcggttctgctatgcagagggtacacctagcacctattccagacccttcccctggttattcctccctgaaggccatgagacctcatcctgggcgaccattcttccacacccagcctagaagcactcctgggttgataccacggcctccagccgcccagccagtgcatggccggacagactgggcttccaagtacgcatctcggcgatgactgtctgccttggtgatgaatctcttcctagggagaagcaggatactttccctcagctgactggtgttctacctgcaagatgtgcagagggcataaaagcaaatcaacactttatagttattcttctgaactaagacatgtcaatattcttttttaaagtttttttttaaaatattgatttgaatgcagtaggcttttttgtataaaattattttattctaaaactgggtcccattattttcttaaacaacagcattttgtatatatggattatgttttagcattttatacagtcaactttgtaatgaactttttaaaaattaattgattttcctttggggttccagataatattttctacagattttgaaaaatgtaataatattaatgcagtattgcaacaggggtgcaatttaaggctatgtgatagagggttatttactcagtgtgtgcagatatttatgaagtggtgaaatttcaagtgtggctcactaggtacttcaggccttcttggactgttgttagaaaagtgatcctctgcttttcttagtaggtcattggtttgatttttggataccactctgctgttctaaaaggactattatattatataattcactttgttttacttttgttccccagatgaaagaactctaagtaaatacattttaaaaaatttttctgacaccctttaatgtggttgcagatctcagatgaaaccaagcttaattatactatgccattatattctaatttattccatttttgaaatcaagttgtatgtgtaccaataaaagagatttctgcttcaaaaggctctcaacatgaaggttaacacagtcaatcaaacttacattcctgccaagatgcatggccaaaaaactaagtatcaaagcagcagaaggtttttgattatagtaactgagatggaattttgtgcctagctcagttctccagatctggctaggagcagtcaatgactaatgttctgtcctagccaaattctcaggacaatttggggagcagaaagagttatggcagaggttccactcatctacaaagtcacagtcacatgccacatttgatctcctaaccctggtgtagtttctttcaagagtgagaactttatttgttgggcagaggctgttccattgagaggaatgtttacagcagtttcaaaaatgacaaagtcagtttggagacagaaaaagacaaaaggtccagtctcatccatctctatatggtacatttgcctcacttatggttgccttaaaggcaagagggaaggtcaccatcagtgaacgcaatgcaatctcaacagtgtattgattcatattctcctagggctcaaactactctctattggttccaggataatgacaaattgaaccatatgtaagtaatcttttattttttattttttttttgagacagagtctcactctgtcacccaggctggagtgcagtggcgcgatcttagctctctgcaacctctgcctcccaggttcaagcctcctgagtaactgggactacaggcgcccgccaccacgcccagctaattttttgtatttttagtagagacggggtttcactgtgttagccaggacggcctcgatctcctgacctcgtgatccaccctcctccacctcccaaagtactgggattacaggcatgagccactgcacccagccaagtgatcatttttataggttaaaatgataggtgaaatgaatatagacactttcatatggttcaacctaatgacttggtaaattattgccttggtgtattaataatatgttgcattctgaacaaataaccatggcttccaaagggccctaacctaaaatcggagagtaatttatgctttggagaatttgactcaaatatatacttgaccaagcaccatgatccctaggggcatgagaaaagcacataatggatgtggatgtgataggtggtcttttcctgttaacaagctggcagcaaagcttcagaaaatatatatgcaagcacaacttgaagctgaattcatttctgtattatattctcaactcgttatctaaagcatcagaacatgtgttttcagagatgagtcctttactataaggttaatatttattttcattttctgtattatatatgaaaagtaaattaatgtgaaacctggcccagcttgctggaaagcaggttttaaattgtaaatattccttagaggagcaaatggattgtttaataccatagtctcagtaatctagcttatataaggtcattacattttttaactgaaaaacctagttacctgattattgcacattataaaattgtttttctaatactttatagggcccaacttcagaaaatacttcgcttttttctttttatgctttcgtttgtttaccagcaagcaacttccctggggaagccaaacacatattcataaaaaaaatcaagtagctgatgtgcagttgagaaaactagaggactgaaaaaacaaattttaactagcaaatgctgtgaattactcttcctccccttctctgaaatgggtaaaggacaaattgtgtaaaaaaacctatgcactatagaagggaatagtaaccatttcttttgtctctctgtttctgttctgactgagaacctgcagccatttcttgttacatgaaaacaaaatgctacttgttacctctattttttgttactatacaattatgaaatgtaatgtaagacaccaacagaaatgatatacctgtaactgtacctatcaggactatacctcatttacagtcagaaagcttactgggatgtcaggaaatgatacagggttggttctcatttcgtgccgaaatgagacagaaattcagtgacgaaggtgcgttgtaggggtattgatgtgccccaggtagtgccagcagagtagggaaaactgcatttgcataaaaactactcttgacatgattgttcattttacaaaaaaattccattaattaccaagccctcacccagcccatgtgtgataggatttatgtaggaagaaacttgattttcaaataattttttaaatgtatctcttgcctaaaggactatatacatctaataaagtaacactgtgtcatcttctggagttatcaaaaattgtatacaatcaagacaacacaagaattattttatttttgagtgcaaatacaggtactgttggagttgatgggcaccatgctttctcatgaagtagcatttccctaccatcaagccattgttttgtgccattcaggagaggaaaaaaaggaatttatgctgtacatttcagttcagtgtatgaccaaaagcaatatgtttataagaagatgtttgacatactaattattttatatcatttaaaccatactgtagcaacataatatatggagctaatttgtagaattatttttacgatttccaaacaaatgtactgtactgttatataatttattgtgaggaccttctcatggaagccattaggaaaacaaactagaggtaaatatcacattaatctgtattatcaatttctcatagacactgtgctaatgtgaattttaaatgacctgcatcaagtcttctgatctcagataactcagtacagatagcaattagtcagctgatttgattacaatggagtaaccgacaatatatttatttataaagcacatattcataataacgagaagaattcagaaaaccacttaagcaagacccttctgaaataaaaaatgttgctttttaaatagtttgtcctaaggtgtttaaaacatgtcaaccttatgtaaggaaaaatttcctggtccaaataaagttgaagtttaagaaaaa

SEQ ID NO: 84361 - DNA, 4736 bp, Homo sapiens
gtctcccttttctttgtctggtcgctccgtgtcgctcttcgctgtgtgttttgtcgctggctctcgtcgcggcgcccgtggcgtgctccgcctgtgtgtttttctttgtctcttttctttctttttgtttgcccactcctgggcgtctgagccgttgccagctatttgtcttcccgtttgtcgttgctgctgcgggtcatgcttccttgttgccggttcgggccattctggctccgtctgatttgccatttctacttcattactaataggagttttttcttctatatcatcaatgaaatctggttcctgattatttgatactgatagtctcagtggagaaagctttctttgtttagtttctgggctcttcattttgttggtcgttccttcacaatccacagtaatattctgattttgtgtatctttttcttttgaaatatctttgtcttgtttttccttttttccgtctggtctcataaccactattgatattttccatggattcagaactacgttttagaacagggcactctgggttttctttgaggcatgcacagtccaccttgtacttacaatttccatagtcaaaatcaaaggcaatagtaatttcagttggttccagctctacaagttctagtggactgactggaaactatgtcccttcctttctgaaaaaagaaatcggttctgctatgcagagggtacacctagcacctattccagacccttcccctggttattcctccctgaaggccatgagacctcatcctgggcgaccattcttccacacccagcctagaagcactcctgggttgataccacggcctccagccgcccagccagtgcatggccggacagactgggcttccaagtacgcatctcggcgatgactgtctgccttggtgatgaatctcttcctagggagaagcaggatactttccctcagctgactggtgttctacctgcaagatgtgcagagggcataaaagcaaatcaacactttatagttattcttctgaactaagacatgtcaatattcttttttaaagtttttttttaaaatattgatttgaatgcagtaggcttttttgtataaaattattttattctaaaactgggtcccattattttcttaaacaacagcattttgtatatatggattatgttttagcattttatacagtcaactttgtaatgaactttttaaaaattaattgattttcctttggggttccagataatattttctacagattttgaaaaatgtaataatattaatgcagtattgcaacaggggtgcaatttaaggctatgtgatagagggttatttactcagtgtgtgcagatatttatgaagtggtgaaatttcaagtgtggctcactaggtacttcaggccttcttggactgttgttagaaaagtgatcctctgcttttcttagtaggtcattggtttgatttttggataccactctgctgttctaaaaggactattatattatataattcactttgttttacttttgttccccagatgaaagaactctaagtaaatacattttaaaaaatttttctgacaccctttaatgtggttgcagatctcagatgaaaccaagcttaattatactatgccattatattctaatttattccatttttgaaatcaagttgtatgtgtaccaataaaagagatttctgcttcaaaaggctctcaacatgaaggttaacacagtcaatcaaacttacattcctgccaagatgcatggccaaaaaactaagtatcaaagcagcagaaggtttttgattatagtaactgagatggaattttgtgcctagctcagttctccagatctggctaggagcagtcaatgactaatgttctgtcctagccaaattctcaggacaatttggggagcagaaagagttatggcagaggttccactcatctacaaagtcacagtcacatgccacatttgatctcctaaccctggtgtagtttctttcaagagtgagaactttatttgttgggcagaggctgttccattgagaggaatgtttacagcagtttcaaaaatgacaaagtcagtttggagacagaaaaagacaaaaggtccagtctcatccatctctatatggtacatttgcctcacttatggttgccttaaaggcaagagggaaggtcaccatcagtgaacgcaatgcaatctcaacagtgtattgattcatattctcctagggctcaaactactctctattggttccaggataatgacaaattgaaccatatgtaagtaatcttttattttttattttttttttgagacagagtctcactctgtcacccaggctggagtgcagtggcgcgatcttagctctctgcaacctctgcctcccaggttcaagcctcctgagtaactgggactacaggcgcccgccaccacgcccagctaattttttgtatttttagtagagacggggtttcactgtgttagccaggacggcctcgatctcctgacctcgtgatccaccctcctccacctcccaaagtactgggattacaggcatgagccactgcacccagccaagtgatcatttttataggttaaaatgataggtgaaatgaatatagacactttcatatggttcaacctaatgacttggtaaattattgccttggtgtattaataatatgttgcattctgaacaaataaccatggcttccaaagggccctaacctaaaatcggagagtaatttatgctttggagaatttgactcaaatatatacttgaccaagcaccatgatccctaggggcatgagaaaagcacataatggatgtggatgtgataggtggtcttttcctgttaacaagctggcagcaaagcttcagaaaatatatatgcaagcacaacttgaagctgaattcatttctgtattatattctcaactcgttatctaaagcatcagaacatgtgttttcagagatgagtcctttactataaggttaatatttattttcattttctgtattatatatgaaaagtaaattaatgtgaaacctggcccagcttgctggaaagcaggttttaaattgtaaatattccttagaggagcaaatggattgtttaataccatagtctcagtaatctagcttatataaggtcattacattttttaactgaaaaacctagttacctgattattgcacattataaaattgtttttctaatactttatagggcccaacttcagaaaatacttcgcttttttctttttatgctttcgtttgtttaccagcaagcaacttccctggggaagccaaacacatattcataaaaaaaatcaagtagctgatgtgcagttgagaaaactagaggactgaaaaaacaaattttaactagcaaatgctgtgaattactcttcctccccttctctgaaatgggtaaaggacaaattgtgtaaaaaaacctatgcactatagaagggaatagtaaccatttcttttgtctctctgtttctgttctgactgagaacctgcagccatttcttgttacatgaaaacaaaatgctacttgttacctctattttttgttactatacaattatgaaatgtaatgtaagacaccaacagaaatgatatacctgtaactgtacctatcaggactatacctcatttacagtcagaaagcttactgggatgtcaggaaatgatacagggttggttctcatttcgtgccgaaatgagacagaaattcagtgacgaaggtgcgttgtaggggtattgatgtgccccaggtagtgccagcagagtagggaaaactgcatttgcataaaaactactcttgacatgattgttcattttacaaaaaaattccattaattaccaagccctcacccagcccatgtgtgataggatttatgtaggaagaaacttgattttcaaataattttttaaatgtatctcttgcctaaaggactatatacatctaataaagtaacactgtgtcatcttctggagttatcaaaaattgtatacaatcaagacaacacaagaattattttatttttgagtgcaaatacaggtactgttggagttgatgggcaccatgctttctcatgaagtagcatttccctaccatcaagccattgttttgtgccattcaggagaggaaaaaaaggaatttatgctgtacatttcagttcagtgtatgaccaaaagcaatatgtttataagaagatgtttgacatactaattattttatatcatttaaaccatactgtagcaacataatatatggagctaatttgtagaattatttttacgatttccaaacaaatgtactgtactgttatataatttattgtgaggaccttctcatggaagccattaggaaaacaaactagaggtaaatatcacattaatctgtattatcaatttctcatagacactgtgctaatgtgaattttaaatgacctgcatcaagtcttctgatctcagataactcagtacagatagcaattagtcagctgatttgattacaatggagtaaccgacaatatatttatttataaagcacatattcataataacgagaagaattcagaaaaccacttaagcaagacccttctgaaataaaaaatgttgctttttaaatagtttgtcctaaggtgtttaaaacatgtcaaccttatgtaaggaaaaatttcctggtccaaataaagttgaagtttaagaaaaa

SEQ ID NO: 84362 - DNA, 485 bp, Homo sapiens
caagagagagagagaggtgcaagccccaaagcgagcgacatgtccctttggggagcagtccctctgcaccccagagtgaggaggacgcaggggtcagaggtggctacagggcaggcagaggaggcacctgtagggggtggtgggctggtggcccaggagaagtcaggaagggagcccagctggtgacaagagagcccagaggtgcctggggctgagtgtgagagcccggaagatttcagccatgcctcacagctccgacagcagtgactccagcttcagccgctctcctccccctggcaaacaggactcatctgatgatgtgagaagagttcagaggagggagaaaaatcgtattgccgcccagaagagccgacagaggcagacacagaagagtattaagaaagatgctcaagtcccatggcacagagcaaggcgggcagggaacggttatttttctaaataaatgctttaaaagaaaaaaaaat

SEQ ID NO: 84363 - DNA, 947 bp, Homo sapiens
caagagagagagagaggtgcaagccccaaagcgagcgacatgtccctttggggagcagtccctctgcaccccagagtgaggaggacgcaggggtcagaggtggctacagggcaggcagaggaggcacctgtagggggtggtgggctggtggcccaggagaagtcaggaagggagcccagctggtgacaagagagcccagaggtgcctggggctgagtgtgagagcccggaagatttcagccatgcctcacagctccgacagcagtgactccagcttcagccgctctcctccccctggcaaacaggactcatctgatgatgtgagaagagttcagaggagggagaaaaatcgtattgccgcccagaagagccgacagaggcagacacagaaggccgacaccctgcacctggagagcgaagacctggagaaacagaacgcggctctacgcaaggagatcaagcagctcacagaggaactgaagtacttcacgtcggtgctgaacagccacgagcccctgtgctcggtgctggccgccagcacgccctcgccccccgaggtggtgtacagcgcccacgcattccaccaacctcatgtcagctccccgcgcttccagccctgagcttccgatgcggggagagcagagcctcgggaggggcacacagactgtggcagagctgcgcccatcccgcagaggcccctgtccacctggagacccggagacagaggcctggacaaggagtgaacacgggaactgtcacgactggaagggcgtgaggcctcccagcagtgccgcagcgtttcgaggggcgtgtgctggaccccaccactgtgggttgcaggcccaatgcagaagagtattaagaaagatgctcaagtcccatggcacagagcaaggcgggcagggaacggttatttttctaaataaatgctttaaaagaaaaaaaaat

SEQ ID NO: 84364 - DNA, 410 bp, Homo sapiens
tcctttttgcaccacacatttaataacctaggtgcagaattctagcgctatatgcagtccttaattcacatttcaaacctgaagaacatgtgcctacttctcaggcagacaacatgtaatgctaactgaaaaaatgtcactgaaatttgttatatttattgaaatcctaagtgatggatagttctgttgccttttaccatttccaaggaaaaagagaagctataataatagcaattgacaaagatactctcatttttcctttaccagtggtactagatattctcaggctgccgcagtggcttacacctgtaatctcaacactttgggaggccagtgtgggaggatcacttgagtccaggagttcaagaccccatctctacaaaaaaataaaaaaaattggctgggtatgg

SEQ ID NO: 84365 - DNA, 1481 bp, Homo sapiens
tgccccggctgcaacctctcccactcaagagaccctaggaacgatgaggaacggggtagaaatgaccaggggagccaaatctcaggtaccgagaccttccagctcacccctcaggctcaggaaagccaataacccacatatgcccaaaaggagcttatgtctcaactgagaacagcaaataggtgatgggccactttagaacagaggctaaaggctggtagccactgagcaaaacccaaattctaggcacctgaggtgtttcccttacacaagtgccttcacaggtagcaagcaattaatctgcaacagtgaacaacactaaaacttaaattttacatggaagtctctcaagtagacaaagttattattgggtggggttttccccccactggcaaaaaaataacttatcccttggctgttagattgagggaactataaaacaaatattttaattcgatcactgacaaagtcataaaattcaatgactgtttgtagaggaaaacatgctttcattatcttaattaaagcaagataagcctctctcaatgtgcatgcattttggagccactgaatggactggtgatgagacgaagcaacctttaattgggaccatgcttctccagtacattcgtttgtattccatggtgtaaaccgggccttacgcgtggctccgaccttcggtggaaatgcatttgcgtagcaccacccaggggctcccttgctttggctagagcctcataaaagaccccaggttttgcgaaggattttgaacaccagcgtcttttaacatgtggaactttcggttttggtttagctctgtgaacgtatttaaaacttgctacattattccacagtgaaagttggaacctttttaagagttatcatagagtgccttttaacatctgtcatattttctataaacaacttttcagtgagaagcgtatatagtgtactcgaggtaggcattagctgctggcaaggtttatgatacaatagtgacactacaggacaattttttagtcaaacaacacccgttagatatttcagggtccagcttatatgttaacttgtaaatataggttaaaaatataggtatcaagtgactaaattcagtatcagacaaattgaacatctttttatttcccagaagtgccctactctttctcctccctttggtgacctcttagtctggaatgctctgcatccggggcccctggaacacatagtttttaaagtacctattagtgatactctcctcccgttggcagtgcttccactgtgttttctgcatgtaataaaggatggcactgttttttgcataggtctttcctaatagctgagcactcttggagtgtaggggctcaaccttatgcctctttggacacacaagcctagcccatgggctggcatataggagctgctcaataaatgtttgttgaacgaatgagtggatacacgaataaaatattttcattgtcttt

SEQ ID NO: 84366 - DNA, 1834 bp, Homo sapiens
tgccccggctgcaacctctcccactcaagagaccctaggaacgatgaggaacggggtagaaatgaccaggggagccaaatctcaggtaccgagaccttccagctcacccctcaggctcaggaaagccaataacccacatatgcccaaaaggagcttatgtctcaactgagaacagcaaataggtgatgggccactttagaacagaggctaaaggctggtagccactgagcaaaacccaaattctaggcacctgaggtgtttcccttacacaagtgccttcacaggtagcaagcaattaatctgcaacagtgaacaacactaaaacttaaattttacatggaagtctctcaagtagacaaagttattattgggtggggttttccccccactggcaaaaaaataacttatcccttggctgttagattgagggaactataaaacaaatattttaattcgatcactgacaaagtcataaaattcaatgactgtttgtagaggaaaacatgctttcattatcttaattaaagcaagataagcctctctcaatgtgcatgcattttggagccactgaatggactggtgatgagacgaagcaacctttaattgggaccatgcttctccagtacattcgtttgtattccatggtgtaaaccgggccttacgcgtggctccgaccttcggtggaaatgcatttgcgtagcaccacccaggggctcccttgctttggctagagcctcataaaagaccccaggttttgcgaaggattttgaacaccagcgtcttttaacatgtggaactttcggttttggtttagctctgtgaacgtatttaaaacttgctacattattccacagtgaaagttggaacctttttaagagttatcatagagtgccttttaacatctgtcatattttctataaacaacttttcagtgagaagcgtatatagtgtactcgaggtaggcattagctgctggcaaggtttatgatacaatagtgacactacaggacaattttttagtcaaacaacacccgttagatatttcagggtccagcttatatgttaacttgtaaatataggttaaaaatataggtatcaagtgactaaattcagtatcagacaaattgaacatctttttatttcccagaagtgccctactctttctcctccctttggtgacctcttagtctggaatgctctgcatccggggcccctggaacacatagtttttaaagtacctattagtgatactctcctcccgttggcagtgcttccactgtgttttctgcatgtaataaaggatggcactgttttttgcataggtctttcctaatagctgagcactcttggagtgtaggggctcaaccttatgcctctttggacacacaagcctagcccatgggctggcatataggagctgctcaataaatgtttgttgaacgaatgagtggatacacgaataaaatattttcattgtctttagcccctctgactttcttttttaaacaggggtatgtcataaataaaatttaccttgaaaatgcatttaagtacactgttctacttctctgaccatgaagtttttaatgggacatcgttttaaaattctggtcattacaacgaaccacttttgaccttggttgacttttctcagaaccataattcgaagtaaagacaaaaacaatgagaaaaggcaaagagatcaaattttggttttctctttttcagtaggatatgatgtttatcgaaatttggaaacaaattgtagcaagcacctataacatgtagatactcatgtttttatattaaatatgacattatttataaaaccctg

SEQ ID NO: 84367 - DNA, 230 bp, Homo sapiens
caatctgcaaaatttcctattgttcttttgtgaggagaaataatagagaaacaccaaaaggccaaagtctagctccaccccgctctttgtattctcctcactgcccacctcccagcccccaccagtaattataaggcattgtgtattaagaggtatgatgtggcttccttcatccatgattaacacttacaccaatgcatattcattcatctcttagccctaccaaaccc

SEQ ID NO: 84368 - DNA, 435 bp, Homo sapiens
cagcctgtgtgacagagcaagactccatctcaaaaaaaaaaaaaaaaaaaagacatggaagatggaggcagctctgaggggagaactggagggccacagtgtccgtgacatgagagagaacacttcagaattcaaaggctcaaaatagttatcttctgagcaatgtgtcttaagaactaaaggttatgcaccaccaagacaagagtaaagtgaagatatgtgatccagcaacttgatgtgtctgagaatacaaacatgcaattctatcagtttgggaatgggtttataacaagtacacagaaaacaaaaaaatgaatagggaggcaatgattagctctaaggaaaacaaacaaaacaaactcactcaagaaaggaaaggcaatccaggcagctgtgagtgcctcccccagcaggacacagcctggaagctgcagc

SEQ ID NO: 84369 - DNA, 335 bp, Homo sapiens
ggaggacggcttgagcccaggagtttgaggctgtagtgagctgtgatcacactgctgtattacagcctgagcaacagagcaagactgtctcccaccaaaaaaaaaaaagttaaggaggcgggaacactttcgaaatacagtcatgtggtgcttaatgacaaagatacattctgaaaaatgtcttatcatgcaaatttcatagagtgtgctgcttacatagaccttatagcctatacacacataggttgtttagtatactctattattcctaggctacaaacctgtacagcatgttactatactgattaggtagttgtaacacaatggtaaatatt

SEQ ID NO: 84370 - DNA, 423 bp, Homo sapiens
acttgtgcacagatgtgttgccagtatcaggaacaatgcctagtacatattagttgctcgctagatatttgttgaaagaatgaatattaattaacaagagactggctgggagtggcggctcatgcctgtaatcccagcactttgggaggccaaagtgggtggatcacttgaggcccgagttcgagaccagcctggccaacatggtgaaaccctgtctctactaaaaatacaaaaattagccgggcttggtggtgcacacctgtagtcccagctattcgggaggctgaggcttaggcatgagaattgcttaaacccaggaagcagtggttacagtgagccaagatcgccccactgcactccagcctggacaacagtgagactcatgttcatgaaaaaaagaaataataaatatataaaataatt

SEQ ID NO: 84371 - DNA, 1065 bp, Homo sapiens
  misc_feature (721)..(721): n is a, c, g, or t
  misc_feature (731)..(731): n is a, c, g, or t
  misc_feature (735)..(735): n is a, c, g, or t
  misc_feature (758)..(758): n is a, c, g, or t
gtccctaacctaggactccctgagctgggactagcgaaatctgtctgcactgatcgcagtcgtcctcagtttcaccctctaggaatcggcctgggggtgcacgtgctactctcttcctccaggccggtccccggcgcgtgcgcgcgatccatgtccatgtccgcgcctatcaataaagttgctcacttgttgccggcccgctagcccgaaaggttgcgcgcgcagaccgagaagtctcgcgatagccagccgcggctgcccttgcgcttcccgagctggcggggtccgtggtgcgggatcgagattgcgggctatggcgccgaaggtttttcgtcagtactgggatatccccgatggcaccgattgccaccgcaaagcctacagcaccaccagtattgccagcgtcgctgccttgaccgccgctgcctacagagtcacactcaatcctccgggcaccttccttgaaggagtggctaaggttggacaatacacgttcactgcagctgctgtcggggccgtgtttggcctcaccacctgcatcagcgcccatgtccgcgagaagcccgacgacgcccctgaactacttcctcggtggctgcgccggaggcctgactctgggagcacgcacgcacaactacgggattggcgccgccgcctgcgtgtactttggcatagcggcctccctggtcaagatgggccggctggagggctgggaggtgtntgcaaaaccnaagntgtgagccctgtgctgccggganctccagcctgcagaatgcgtccagaaataaagatcctggtgtcctgtgtgatgaaaaaaaccacaaaacagaacacacacaaccacccccacgggaaacacatagtcagagcggcgcgccacaagcggagggcacaccagacggccgacccattgggtcgaaaacgctggacacacctggagccccacagactaagcgatgacaaccacgcggggaccaaccggcaggggacagccacaaaagagacacacacgaaccaaaccggaataagaccggggtaaccatgcgagtgagcagcccgcagacg

SEQ ID NO: 84372 - DNA, 604 bp, Homo sapiens
gtccctaacctaggactccctgagctgggactagcgaaatctgtctgcactgatcgcagtcgtcctcagtttcaccctctaggaatcggcctgggggtgcacgtgctactctcttcctccaggccggtccccggcgcgtgcgcgcgatccatgtccatgtccgcgcctatcaataaagttgctcacttgttgccggcccgctagcccgaaaggttgcgcgcgcagaccgagaagtctcgcgatagccagccgcggctgcccttgcgcttcccgagctggcggggtccgtggtgcgggatcgagattgcgggctatggcgccgaaggtttttcgtcagtactgggatatccccgatggcaccgattgccaccgcaaagcctacagcaccaccagtattgccagcgtcgctgccacaggttgggactcatcaggtcccagatggagctggaagtcctcttccctctgatgaagaatctttacaaactgggccaggcgcggtggctcacacctgtaatccggcgctcaggaggccaaagtgggaggatcgcttgaggccaggagttccagaccagccttggcaaaatagcaagatccccatctctgc

SEQ ID NO: 84373 - DNA, 391 bp, Homo sapiens
tttgaggccaacgaggccaggttttgggttttttttttattttgcatatttattaatagtaagacagacgttattgtgtctccatttcttacaggtagggactgaaggttggagaagcatattaactgctccagggtcatttgaagctgggctgcaagtccaggtcggctgacctgctcctaggggtctctgaagcaaggaatgttcccatcaggtccttatcgagggtcttcaagagaaagggctgaagggggccacccaggggataggatcgtgtcaggtgtgctccatgagctaggggtcccttggtcaggacagctggcatgtgggggtggtgtaaggaggttccgcccaggagtccctcggtgacagttctgggggcgtcactgag

SEQ ID NO: 84374 - DNA, 705 bp, Homo sapiens
gtccctaacctaggactccctgagctgggactagcgaaatctgtctgcactgatcgcagtcgtcctcagtttcaccctctaggaatcggcctgggggtgcacgtgctactctcttcctccaggccggtccccggcgcgtgcgcgcgatccatgtccatgtccgcgcctatcaataaagttgctcacttgttgccggcccgctagcccgaaaggttgcgcgcgcagaccgagaagtctcgcgatagccagccgcggctgcccttgcgcttcccgagctggcggggtccgtggtgcgggatcgagattgcgggctatggcgccgaaggtttttcgtcagtactgggatatccccgatggcaccgattgccaccgcaaagcctacagcaccaccagtattgccagcgtcgctgagggactgaaggttggagaagcatattaactgctccagggtcatttgaagctgggctgcaagtccaggtcggctgacctgctcctaggggtctctgaagcaaggaatgttcccatcaggtccttatcgagggtcttcaagagaaagggctgaagggggccacccaggggataggatcgtgtcaggtgtgctccatgagctaggggtcccttggtcaggacagctggcatgtgggggtggtgtaaggaggttccgcccaggagtccctcggtgacagttctgggggcgtcactgag

SEQ ID NO: 84375 - DNA, 1133 bp, Homo sapiens
  misc_feature (789)..(789): n is a, c, g, or t
  misc_feature (799)..(799): n is a, c, g, or t
  misc_feature (803)..(803): n is a, c, g, or t
  misc_feature (826)..(826): n is a, c, g, or t
gtccctaacctaggactccctgagctgggactagcgaaatctgtctgcactgatcgcagtcgtcctcagtttcaccctctaggaatcggcctgggggtgcacgtgctactctcttcctccaggccggtccccggcgcgtgcgcgcgatccatgtccatgtccgcgcctatcaataaagttgctcacttgttgccggcccgctagcccgaaaggttgcgcgcgcagaccgagaagtctcgcgatagccagccgcggctgcccttgcgcttcccgagctggcggggtccgtggtgcgggatcgagattgcgggctatggcgccgaaggtttttcgtcagtactgggatatccccgatggcaccgattgccaccgcaaagcctacagcaccaccagtattgccagcgtcgctgagggactgaaggttggagaagcatattaactgctccagggtcatttgaagctgggctgcaagtccaggccttgaccgccgctgcctacagagtcacactcaatcctccgggcaccttccttgaaggagtggctaaggttggacaatacacgttcactgcagctgctgtcggggccgtgtttggcctcaccacctgcatcagcgcccatgtccgcgagaagcccgacgacgcccctgaactacttcctcggtggctgcgccggaggcctgactctgggagcacgcacgcacaactacgggattggcgccgccgcctgcgtgtactttggcatagcggcctccctggtcaagatgggccggctggagggctgggaggtgtntgcaaaaccnaagntgtgagccctgtgctgccggganctccagcctgcagaatgcgtccagaaataaagatcctggtgtcctgtgtgatgaaaaaaaccacaaaacagaacacacacaaccacccccacgggaaacacatagtcagagcggcgcgccacaagcggagggcacaccagacggccgacccattgggtcgaaaacgctggacacacctggagccccacagactaagcgatgacaaccacgcggggaccaaccggcaggggacagccacaaaagagacacacacgaaccaaaccggaataagaccggggtaaccatgcgagtgagcagcccgcagacg

SEQ ID NO: 84376 - DNA, 327 bp, Homo sapiens
atcttttgttgtgttagaaatttattgcattgaatagtatgtagttaattatattgttgcaaagctatttatttgtaagctaatcttggttaaccaggagccattgcactggccggagtgcaatggctcgatctcggctcatggcaacctccgcctcctgggttcaagcgcttttcctgcctcagcctcccgagtagctgggattacaggcgtgcaccaccatgcctggctaattttgtatttttagtagagacagggtttctccatattggtcaggctggtcttgaactcctgacctcagatgatccgcccgcctcggcctcccaa

SEQ ID NO: 84377 - DNA, 823 bp, Homo sapiens
gtctgtaacaattttaaaataaaagccagcatattggtgggaaaaaaaacaaaaatccaacaacaacaaaaataaaacacaacaaggcatatacttccaatatttccactgtataaacccaatccatggattatgcaaaagagataagtctcttggaaatgacagtcatttggtgacaataacaaatcagcaacagaggagactttaacgagttactcactgtttcctccctcaccaaaggcatctgctaagtcaaagtctgcccctaaaggaaggaatcggtctgttcatagtaaagctctgagaaatgaggaaggaatgacctcggaaacagatggagaaatcaccagagacccacatgactaaagacttttctgaatatcacactgactaggatctcatttgaaaaagtaaattcctgatcattttcacatcattcttcccccagatgaaaagagtaagagatgacagcaagagaaagagggagagagaaagaatgtcatttgtaaatcaactgtgctgcctggacccagttgggactctgaatctgcctgcacacaactctgtcccgttgattccccattatctcctcccaggtccccaacaccttcagcaaggcagaccgtaagagaaataaacagaaaaatagtggacatgaaaatggattcagagtaacaaaaacaaggaaaaaacactttagaaacccattgacagaatcaacaagaggaagagacaaatcgaatctcaaagaaaaagctcaggccggcatggtggctcacacctgtaatcccagcactttgagaggctgagatgggcggatcac

SEQ ID NO: 84378 - DNA, 221 bp, Homo sapiens
gagcaagactccgtctcaaaacaaaacaaaacaaaacaaaaaaactgaacaatctctttctctagatttccatatgattttgtttaatcttctgtcctttgcattgcagaaacacacacacagaaattcacaagagtgtgaggtatgggactgagcatgcacaggacccattttcaatatttagcccatatacacccatgtgtgcatgtacacacacacac

SEQ ID NO: 84379 - DNA, 784 bp, Homo sapiens
gggatgtgatccaatgcatggtgcttaagagcgatggccagtggctagcctaatacccagtggcatggctgttttatacttccttttgtttgcaggtgtgctctatagtgggggtgggagagatgcctccatcaccagatctgctcctgggccctgggggagtctcctgcaatcactgtgtttcttgtgttaggtgttctaggccacaggtctctctcaggcagaggccctttcctaggagccattctggggaactagctgtagtgtttgggttccctgcacaggcttcctccctcttcaactcagcttcattgctgcctctccatccactcagcattttctctctcaagatctgcctaaattacggtggtttactccataatttggtgtctctcagtgggggtggtgcttcctgaccatgtcaaattgaccatctattgtcacagaatgaaaacctctttgatagactttgtaacatttttgaatattacattcaggagtaaaatcttacgcagtgtgatcccagctatctcttcgcttttgagaataaccttaagtaattaaaggataattaaatatgtaattaaaaattgaaaaatagaacagctacacttccagatctcaacttctttcagaaaattttaaaatctctttaaagaaaggtaaattgagaccaaaatagactaatagcttcataaaaataagtgctcaaggagggtgttacatgtgaaaattaaacttggaatttgtcattttacccgtaaaattactgagagtaatttcc

SEQ ID NO: 84380 - DNA, 357 bp, Homo sapiens
atcattggtagtttaaacttttcatctaatattagattgcatgcaggattttatatctaattactctggcagatggcctttagaaagttcaaaaataaaatgcagcaattcatattggcagatttactattgagaccaatgctttcttaactaaaaggttttgtttaaaatcgttagtttaggaaatctgataaagatttttgaatatcagagcgtttaaaagagattcttactttacatctggcatatttcttgtgttacatattataatttcattgaacatggctgtctgtaaaactatgtatatgatccggaagagactcaaattaaattaagttttaacagccatcaattcat

SEQ ID NO: 84381 - DNA, 321 bp, Homo sapiens
tcgaacttgaagcagaaaaattacctctgtgatttgtaaaatcaggcatttcaccatttctgtatttgcaaaggtaattcaagtctaggtagagtagacttagattttgggttttttaaagtgtgttcttaaaataatgtagttaatgttcccattattcatttctatcacagggcatacagtctgggcattcctaataatttttctgtctttcttgataaatgagttagttttagctatacactattttatcacttctctgtatggatttttctgacgcctgcttggtgttacatttagtagagctgtctacagtgtgtg

SEQ ID NO: 84382 - DNA, 468 bp, Homo sapiens
acctcgaaggtcgagcccctggacggcggagggactttggaaaagctcggaattgaccgaggggagccagagaagaggttggaaaccttttctcccaccacgggcggtttaagatggaggaaaacgctcttttattgaaataaaagaagtctaagctgacctgcggttgcttctttaggagagtcgacgtgtctgcgtccagcgcgcccgggctgagctgcagactcgcgcctgccaccgccaccctctgccaccttgccctgttttgtctttatggcgcttccccctctgaaatactctttgcggggagttttgtggctctatcactcgcttcttccctggctccccagatgcctggagagcggggacctacttggtccccaacgtccagtccgcagcagggctccgtcactgtctccagagactgaacgaatgactttctagcagtaaggaagtccccgctggccc

SEQ ID NO: 84383 - DNA, 418 bp, Homo sapiens
aaaaaaaagcctcccttttcttttgtctctgtcttcctcatttccctctctttttgattctggtcccaaacactgagtagatgcctactgtgtgcccatcttgtgttgggccctgggcctactgagataggttagatcctggcccagccttacaaacatgaggacaaacaaatgaacaaaacacaaaccttcacaacgaacttccaagcttgatcttcccagctccgctatgaaggcgtgatgaccccctctccatttcaaagacagaaaaactgaggttcagtgggggatgtcacttgcccaaggtcacacagaaagtagcaaagctgtcctttatacactgacacacatttgttgggcacccactgcttggaagggagatggataatatatttctgtaaataattctgagcttctg

SEQ ID NO: 84384 - DNA, 372 bp, Homo sapiens
tctgccttgtcagtgaagaaaaaaattgtagtgaagctttctattaaattccatttataggaagcatcaaaggggggaaatgaggcaggaaattaaagaaagaaagaaaaataaaatttaaaagagcaaaacatgctttctatattaggctgaatcatcccaaaggcagtaacaggcaaaacctggacccaggtgaagtcttgataacattatctaagaagccaggactgaaaggaatgtgctctggagacttccagcattccctccacaaagggagaagaaaacaaattttcctttcccccatgatatgagtaaacttatgagtttatagatttctgttttctgtaactagtaacttcaagtatcctgttt

SEQ ID NO: 84385 - DNA, 858 bp, Homo sapiens
  misc_feature (733)..(733): n is a, c, g, or t
aaggcaggcagatcacttgaggccaggagtctgagaccagcctggccaacatggtaaaaccctgtctctactaaaaatacaaaaaattagcgaggcatgttgtcccagttacttgtggggctgaggcaggataattgcttgaaactgggaggcgaaggttgcagtgagcccgagatcacaccactgcactccagcctggggcaacagttacgatgaagctctgtgaaatactcggaagccaaacagaatcaagtgataattgaatgctgaccctgagcaactcactgatagatgccgtgggggaagtacaaagagttataagggaacagtcaagcaagagcccacaaaagaaatggacaccataagaagataccattatgttagtgcattgactgtaaaaaggatggcattcaactaagaggagcaacattttgatggaatttcaggcactataataaagtgaagaatcctgaaaaaaaaaaaaaaaaaaaaaaaaaaaaaaaaaaaggggggggggggctaaagagaatatcccccagggggggggcccccaagtaaatagaggctacacaccaccacaatttttgtcttgggagcagccagaagtggggccccccccccatagaaagaaggacaccaatcaataaatagaagcaggagacgagccacgggcgagacgcgccaagacgtatacaaacacacagcgcctctgttcacgcgtggggaaaacacnacggctgcgtcgcagctgggcgggacacacacctgtgggggaacagaaggagcaaccacctaatacagatgggggggaggggggcgagacaccactcatacgtcgggggcccacagagatctccc

SEQ ID NO: 84386 - DNA, 684 bp, Homo sapiens
cggccagttctcagtgaaatgagaaaaatgcataagtacctgttacaaatatctaaatggaagaaagctatacatttagatatttgtaacaggtacttatgcatttgtggcaaactttaggtggggtcataagctattccacatttttcagaaggccactaaaaacaaccacagacttccttttggaatattaatttcagcatattattattgtagccaagcagactgttttgttttcagttaaagcttataaaaaataattaaacctaacacatgataaattttgttttcatatacaaaaaacccagagacagatggattcccttcattgcagttggtgatatttactgaaagaactaacataaatttgatatttttcctcttgaagaaaaaaatgggctggtcacggtggctcaaacctgtaatcccagcactttgggaagccaaggcaagaggatcccaggagttgaagaccatcctgggcaacatggtgaaaccctgtgtctaaaagaaatacacacaaaaaattagctcagcatgctggcacatgcttgtagttccagccactcgggaggctgaggtgggaggatcacttgggcccaggaggtcaaggctgcagtgagccataatttcaccactgcaccccagcctgggtgacagagtgagaccctgtctcaaattgga

SEQ ID NO: 84387 - DNA, 593 bp, Homo sapiens
tggcgctgccgcctgaagagctgtcagtcctactttgcagttgagctggctctgagaagaaagtgctctgcctagccctgtgattgatccacaacttcatggggactcaaacatgggttcttttattccaggtggagaaattgaggccccaagcaggggcagactcactggggtcacatggtgagttggtggcatgaatgggtgctccggtctacactgtaccacctcctccaggaagccttcctggcttggtcaagccaggcctggggtggtcaccacctgatgtcacatccccttgagacaaagccccccccctcccccgccaccaggcacctatccccagtgtccaggacatagctactggattcaggcagcttctgcagatgagctcccagccctatgtccaggaggtttctggaatcgacagctctccatgccacaataccctccatggctatttagggaacacccagtgtgtgccaggttcggctggcctgggagagtgcacagtggacactggtcaccaggagacacagggggccagtccacacccttccgcagtcgggcctggggaatgggttgggtactgacct

SEQ ID NO: 84388 - DNA, 798 bp, Homo sapiens
cccaaattgaagaggacactggattcctctgatggagttctgctccctagagctgatgctgcagatgctgctctcagggtccttgggcttgcccccagccaatgggaaagagaggtcaagactgtgctcagcttggtggacctgagacatcgaggatccttctgaaaggatggcctgaggcttggagcgtcagaggaagtctggggccaactctgcctctctgagcttcagttttctcttctctgcaacaagagcattgggctgtataatccctagaaggagacccttctgctcagtaagctcagtttagctctgtgtgtgtgcgtgtgtctgtgtgcatgtgtgtgtctgtgtgtgtgtgtgtgcatgtgtgtgtcctttgaggtccctgagcactcaaatgtagctaattcagactccattgattctgaacgtataatttttttgacttggactaggctggaagctacttttgcataattcacacacaaaaaaacttgatacgctcatgaatagtgttgctgtgatgatggaagaatcatttccatgacaccgggctgcctctcatcaaatgcctttcagattcaagcaacaaagatggagctccctcttcctgccaggcacccccccggccctacaacccctagactctcttgagccttcccatttgtgtcctaggagactttcctgagctccaccgtccaactcactaattggatcttcactgtgctcattcctttatgcagtctgtccattatgattttaattcttataagcatattttaaagtttgagaatc

SEQ ID NO: 84389 - DNA, 112 bp, Homo sapiens
gagctgaatgtccgagcaatggatagaattagatggaaagagctctcaatttggcctgagactgtccccagatactcaggaaaaacaggacgtcgcacagagtgggcagcag

SEQ ID NO: 84390 - DNA, 503 bp, Homo sapiens
tacattgtttgtgtaccattgtgacccatatgttaaatgttgttatgaaaagctgtgttaccagttttccaggaggttagaactccagcttttatgttaggatgctaaactagatattctaggtattgtgttgtttcttatgcattaacgttcacagagaaggagggttttatccaaatggaagggctggattaagcacaatgcagtgttgaagcagcatccgcctactgttggactgaaatgagcattcctttcttctcttagaggagaaaatgtggggcctatatatgactagtggttgttgatgtttggcttttgtgcgccctcagtatatgaaatacccttcctcaagaaaaagcatacgttggctgggtgtggtggctcatgcctataatcccagcactttaggagtctgaggcaggcggatcacttgaggtcaggagtttgggaccaacctggccaacatggtaaaaccctgtctctgctaaaagtacaaaaaaaaa

SEQ ID NO: 84391 - DNA, 265 bp, Homo sapiens
gatcaaagtagtggcacctgcttcacaaggttgctgtgggaatgaaataagatagggtatgaaaaatactttgtggcacaggcatttaatatgtgccatttttttcctctaacatataataataagtgcagtttggttgatccttactatatcctcagtctgtttcttataactattattttttataaaatacaaaatgttttttattctttaatctttacataaaaccctgaaagataagtatcattgttttaaaccccatttt

SEQ ID NO: 84392 - DNA, 363 bp, Homo sapiens
gagaccagcctgggtagcatagtgggacctcatctttataaaaaaataaaaacccttgtatttgagaaggattctccaaacagggctcttcgtaatacctctctattagtcttttcccccataaactgctcttcagatggctcaatcttcatgtgttagtttgagggacttaggcctacagaaaacaaatgtacatttgtcaattccaaaattctaaaggcattgcactcacatgctctttctcatgctgtgcagtatgtatttcttgaaagatcgccaaagactgatttcaccctaatgctaagggcaggatttttatcccatagctgagaggggcaacacatgaataacagttaattctag

SEQ ID NO: 84393 - DNA, 297 bp, Homo sapiens
atggtcttgatctcttgacctcatgatctgcctgccttggcctcccaaagtgctggaattacagtgtgagccactgcccccggcccatgcccagcctttttgatttttcagacaaggtcttactctgttgtccagaatggattgcagtgacacaaacacggctcattgcatcctcagcctcccagctacacaggaggctgaggcaggagaatgacatgaacccaggaggcggagcttgcagtgagctgagatcacgccactgcactccagcctgggtgattgagcaagactgtctca

SEQ ID NO: 84394 - DNA, 239 bp, Homo sapiens
ctggtctcctatagggaagatctttagtgctccttatatttgggccaaaaactagcagaagagcaggtagcttttccggaaacagtccgacatgaggagggtagctggtaggaaggagagatgcccagctcatagcgattctggttgaatagggcattcaggatagaaagcggaactgagcacattaacaaaataacatggtagaatgttctggaaaagggcctaagcctgccgtagcg

SEQ ID NO: 84395 - DNA, 536 bp, Homo sapiens
tcgatgcccttagaaaaggggtacaagggagcacattctgtctttccattgtgcaaggacacagtgagaagacactgtctgtgaaccaggaaatgggccctcaccagaccctaattctaccaggactttgatcttagacttcccagcctccagaaccaggaggaataaatgtttgttgttcacctggtccatggtattttgttagagcagccccaactaagccaccgcctctctagttcactattctgtccccggtatccagggcatcatagacactcaacaaccattcgttgaatatgcaattggatgaaatgaataaacgaccagaggagtaatccagacagagcagcagtggccaagggaagggaggattgatttatgggagaaaattaggggaatgaaatccatagaaagggtttgcctaagtgagagtgatgactggagccagaagacacccgggggagaggaattgtttcacatggtaggaaaaggggaggagggagagaggtggggtggtggagtgcagcctcgaggct

SEQ ID NO: 84396 - DNA, 276 bp, Homo sapiens
ctttttctgacaactcccaaataatagatttggttgctctagctttctttattctaatctgttttctcttgagaatagagcatatatgtgtaaataaatgtaaatttacacaattatttcatagtaatggttaacacaaattgattagcatcagtctctgttcagagtgcttggaatgcacatgtgcattatttaatacctgtgacaaccatatatgtactattttccctgctttacaaatgaggaaactgaagcaacagtgagtttcaattagta

SEQ ID NO: 84397 - DNA, 394 bp, Homo sapiens
cgccagtcactccccacatcacaactcccccagccccaggcaaccccagcctacttgttgtctctacacatgtacctgctctagacagtccgtatacatgaagtcatataacgtggctttttgtgcctggctgcttccacttagcatattttttgaggttcatccatgttgcatatgtcagcacttccttccaaaattgctgaattagattccgctttagggatacaccacattttgctcacccatttattagtcagtgaacatttgacttgtgtccccttttttgctgttgtgaacaatgctcctatatgtatgtgtacaagtttttgtgtgaacatatgttttcagttctcttgggtataggaatagaattgtctgctgatttcttttgaat

SEQ ID NO: 84398 - DNA, 154 bp, Homo sapiens
ccctgagctgggtctcgtcctcttgctgctgctgctctcgctgctgtgtggagcggcagggagccaggaggccgggaccggtgcgggcgcggggtcccttgcgggttcttgcggctgcggcacgccccagcggcctggcgcccatggcagttcg

SEQ ID NO: 84399 - DNA, 428 bp, Homo sapiens
tctttctttgactttttgatgtatcattatggactcacggattattatatatttaatgtgttttgatccagttcagtcatcattctttggtcagtgggagctctttcatcatttttgctggaaaatttaaaagtaatgggcagagataaatgatattttacctctaaatacttgagtatgcatttctgaataaagaaggaaagcttcctgcataatcacagcttcattaccccactaacaaaatccatcattctggccactatattcttttttcatatttccaataatctatgcatcttaattcagctgctttctgccacaacaagatcttccagccttatcttattacacatttcctgcaccagacctggactcagctacttactgaggagtccatgggtctttaaagtggggaaatggcatttaga

SEQ ID NO: 84400 - DNA, 166 bp, Homo sapiens
gtgaaagtataactattatatgcttgaaatttgtgaatacagtatattttaaatgtcctcaccacacacaaaaatatagactatatgaagtgatggatatgctgattaacttgattgtggtaatcatttcacaacgtacacatatatgaaaacatcatggtgtata

SEQ ID NO: 84401 - DNA, 406 bp, Homo sapiens
attcttggtggtgtcattaactttagtgagaaattaaaagaacacattgtagcaaccaaatactgatacattactactatgatcgtgttcatcttgtgcttcccactgactgtgcaattctgctgctgcatccaaaattaaaacactgggttgctttattctagtacagcctcatggaaatcggctctctttcaaatctttaaagtagaatacgggtctcacctgccaccatctgactttaccgatcttctggaggatgcatttcttatattctgccaaacccactagtaattacactataacttcttactatgggttgtatttagttgctcctttaatttctgcaacatgaagaactggtcaggatctttccttccaccatgataaatgacaatataattttgtt

SEQ ID NO: 84402 - DNA, 409 bp, Homo sapiens
tctgaaagataagcagaggctggattacgaaggatcttctgtgtcaaggaatttgaagattatccctaggcactggatggtgttaggtatgggcgcaggggagtgagcagagcagattgtgttttggctgctgcacactggagaggggtgagcctggttaggagggagttgcagaggtgctggcaagaacttctgccagaagggcagaagggtagccatagaagggtacccagaagggtagccttagaaatgggaagagggttagagggttggagagactgagacaggccctcagtctgaagaagtagactgattggatatgggaagatacagtgtggatgtaagttgattcttcagtttctggcttacataactaggtacatgctaccaatgatagagattgtgtatg

SEQ ID NO: 84403 - DNA, 218 bp, Homo sapiens
ctgtagaaacggaaaaatcagcatttattctcttttaaaatataccttaaaagttaccaacaatcacctgtatttaatctataaagtatattcaacatcacaaatcagaagcaattaaatctattcagatacagaggaaccaatacatatttttttcttttcttttgagatggagtcttgctctctcacccagactggagtacagtggcacaatctta

SEQ ID NO: 84404 - DNA, 404 bp, Homo sapiens
tagtttaaaagtagccacaattacattacattgttattgattacattaatcaaatgaatgtggctttgttccaataaaactttatttatacaagcaggcataatttgttgaccattatattaaataatgataaaataaagctatcatgattaaaaaccatctaaaaattatatctgaagataaacttttataatttttctgtagtgtttaaagtccaaagatattcaatccagtgctaagaagtctctttatacatgtcctgcttaataatgaaaaacaggaacatattattggtaaaacatttattctttcttattgcagtaataaagtggattaaatagtacaaagaaagcaatattttgtttgtattgtttgtttgtttgtttgagatggagtctcactct

SEQ ID NO: 84405 - DNA, 390 bp, Homo sapiens
atttttagtagagcagcgtttcaccatgctggccaggctggtctcgaactcctgacctcagatgatctgctgccccagcctcccaaagtgctgggattacaggcgtgagccacacctggccgtttgttttaattttgaaggtgaagtgaaagtgactacatttaccaaaagtgattgaaaagccaggactgttcttaccctgtttttccagttcttgctcagagcaaggtggtttctttttcacttaatcaccatacttacttttcatgtagaacaagtcagtttgagttatcagttcatcatcttaactaaattccatgggggaaggaattagttttagtttcttaaacttccaggtttgcttattggacaaaatgagatagcaaggca

SEQ ID NO: 84406 - DNA, 779 bp, Homo sapiens
attttgagaaatagattaatagttatcttgtattttatttttattacaagttctttaaaaacaacaagaaagacgtgagtctttctgtctctccagtcctcaggggaaagcagtgttggatttctccagggttttatctgtgcttctcctggagccaggtgtggggacagcgtctccagcagttctccctcccctggtgtggtggtggagcccagcctccaggaggacagactcagcgagattttattttgaagtttgcacattctctaaagcttttagggtgctgtttgtgtagaatggagaaagggttatttaagtatttacttctaaccctgctcatgttaactgtataaagccaacagaccctaataagagaaaattataacctaaattaatatagctcagggccagtatgtctacatagttctattttgctctagttgaaatactaataaatgcagtaagaaaacactatgtctaaaatgttgaaattctttgaaattcttttaaagctgatagattcttgcatagtagtagggcatgaggattcaacatttctcccccatcaaggtctgatttgatcagaactaaaggatgtaaagacaaaatattaccatcaatttaggatgggggtctaagtcaagcacagtggcttattcttcgtatttctgtcttagatttggttctactatttatccacagactcactagttcataatacaaatgaggtgatataaaagcactgtcaggccaagtgcggtggctcacacctgtaatcc

SEQ ID NO: 84407 - DNA, 557 bp, Homo sapiens
actcagtggggtctcatctgatctgcatacttttactagactaatattttttcctccagtgacagggcttactggcattctctaccttatattcttacgtattggtaaaatttagaaaacctggcatagtatggacaaggtgagctcaggttcttggctgctgttttccatgttacctcctttaatccttataatacatctgtgatataggtttggttatccccatttggccgatcaaaaccaaaggaggcctcctctggagtgcaagttagagacccaggcctgataatcagaaccttttcttttttctacatgaaaagccaaacatacacttgtcttattctgctctacttttacacgaggagttacatttggaattttgaaaacgtctattccatggtttactctagccattttcattgatcttttggaaacaaaatcttacttttttttccacttagtgttctagaactaaaggggccgatgaaaatctatgtgatcctgcaaagaatgactgggctaaaattagatagtatggaaaactgagccattatgtt

SEQ ID NO: 84408 - DNA, 523 bp, Homo sapiens
actcagtggggtctcatctgatctgcatacttttactagactaatattttttcctccagtgacagggcttactggcattctctaccttatattcttacgtattggtaaaatttagaaaacctggcatagtatggacaaggtgagctcaggttcttggctgctgttttccatgttacctcctttaatccttataatacatctgtgatataggtttggttatccccatttggccgatcaaaaccaaaggaggcctcctctggagtgcaagttagagacccaggcctgataatcagaaccttttcttttactactaagcttagatggccattggaaacaaacagtccggagaccgttcttccaccacggatcaagagggggggggcaggtatcagggataagattcatttagccttctgagcttgctgggcagactgggtgaccttgccagctccagcagccttctggtccaatgttttgatgacgcccaccgtaagtgtctgtctcatatcacgaactggaagcg

SEQ ID NO: 84409 - DNA, 929 bp, Homo sapiens
gatcatagtacatgtacatactaaatgaatatatcaacatttttctgtgctatttcaaaggttcagtaattttatttcataaaggtatctaaaaagactaaaccagtcatcttaaatatattaccactaaagcccaatatccacctactgtctgaatttggagagagtatggctaatgttagatactaaacatggtgagaatcctctcagatactggtttcagagagctgtcacccatagaaccaagggctaaaaagttactcatctttatggtataattttacttcaatctaacaaaaatttactgagcatctacagtgttctgggcctcgagccaggtgctgggacacagaggtgagccactcatgagtcctccccatgagtctctttagctggagaaccactttgtctagagtgtgtgattttgcacttaacctctctagagtctatggtgtgtgagatgaacagtgtaatattgttttgcatagagaggatactgtagacagaacccagtgatggagccttaagtaaagagtataattttggtgtgtggttggtagaatcactataatgtaatgtgacttaaaccttagacatcaatcattattttggtactttaaatataactgatgttttattccttgtgactacactatttagatatttacattaaatatcgaaaaactgatcacaaagatactataatacttttatacatgtgtgtacgtatgtatatatgtatgtatgtatgtcaatgtatgttttactattggcattagtaattattttccctttatgcaatttcttttagagtgcttctgtcttctcctcctacccaatagtaccatgaaattgtattattaactgagctatagcaagtcataatgatcatttgaaatcatttattaaataaatgaggtaaagatgta

SEQ ID NO: 84410 - DNA, 379 bp, Homo sapiens
tttattctaaaagcaggaggaagcccccttggactatcttgagcagaagtcaaagagatttgttatgaagtaggttttttttggctctagtgaaaaagaattggaaagtccacaggggtgtccaaagaagagaatacagtcatgggttcttagtttctatttctggttaggccagtagaacccctttctcatccctcttttcccattatcactagagagaaactaaaaaggatggcttcaggctgctaaaatacagactataagagactataaaagcctaaaaacaaaacaaaacagaacaacaacaacaacaacataaggtgggttggacaagcttgcctgaatactgggaggccagttaggagaatgttgcagtaaa

SEQ ID NO: 84411 - DNA, 1168 bp, Homo sapiens
ttaatcggcacgaggaaggggccccgtctgaggtctggcagtcagagacagccgggcgcccacggcccgagcgcccacggcagcaccatgcccgcactcctggagcgccccaagctttccaacgccatggccagggcgctgcaccggcacattatgatggagcgggagcgcaagcggcaggaggaagaagaggtggataagatgatggaacagaagatgaaggaagaacaggagagaaggaagaaaaaggagatggaagagagaatgtcattagaggagaccaaggaacaaattctgaagttggaggagaagcttttggctctacaggaagagaagcaccagcttttcctgcagctcaagaaagttttacatgaggaagaaaaacggaggcgaaaggaacagagtgacctgaccaccctgacatcagctgcataccagcagagcctgactgttcacacaggaactcatctcctcagcatgcaggggagccctggaggacacaatcgcccaggcaccctcatggcagctgacagagccaaacaaatgtttggaccccaagtgcttacgacccggcactacgtgggctcagcagctgcttttgcagggacaccagagcatggacaattccaaggcagtcctggtggtgcctatgggactgctcagcccccacctcactatgggcccacacagccagcttatagtcctagtcagcagctcagagctccttcggcattccctgcagtgcagtacctatctcagccacagccacagccctatgctgtgcatggccactttcagcccactcagacaggtttcctccagcctggtggtgccctgtccttgcaaaagcagatggaacatgctaaccagcagactggcttctccgactcatcctctctgcgccccatgcacccccaggctctgcatccagcccctggactccttgcttccccccagctccctgtgcagatgcagccagcaggaaagtcgggctttgcagctaccagccaacctggccctcggctccccttcatccaacacagccagaacccgcgattctaccacaagtgaccatcagattatatcttcaacaccacaccccccaccccatcgtgggtgagggtatcccctgtgtgtcccaggccaataaaatctacctgccactgcc

SEQ ID NO: 84412 - DNA, 1519 bp, Homo sapiens
ttaatcggcacgaggaaggggccccgtctgaggtctggcagtcagagacagccgggcgcccacggcccgagcgcccacggcagcaccatgcccgcactcctggagcgccccaagctttccaacgccatggccagggcgctgcaccggcacattatgatggagcgggagcgcaagcggcaggaggaagaagaggtggataagatgatggaacagaagatgaaggaagaacaggagagaaggaagaaaaaggagatggaagagagaatgtcattagaggagaccaaggaacaaattctgaagttggaggagaagcttttggctctacaggaagagaagcaccagcttttcctgcagctcaagaaagttttacatgaggaagaaaaacggaggcgaaaggaacagagtgacctgaccaccctgacatcagctgcataccagcagagcctgactgttcacacaggaactcatctcctcagcatgcaggggagccctggaggacacaatcgcccaggcaccctcatggcagctgacagagccaaacaaatgtttggaccccaagtgcttacgacccggcactacgtgggctcagcagctgcttttgcagggacaccagagcatggacaattccaaggcagtcctggtggtgcctatgggactgctcagcccccacctcactatgggcccacacagccagcttatagtcctagtcagcagctcagagctccttcggcattccctgcagtgcagtacctatctcagccacagccacagccctatgctgtgcatggccactttcagcccactcagacaggtttcctccagcctggtggtgccctgtccttgcaaaagcagatggaacatgctaaccagcagactggcttctccgactcatcctctctgcgccccatgcacccccaggctctgcatccagcccctggactccttgcttccccccagctccctgtgcagatgcagccagcaggaaagtcgggctttgcagctaccagccaacctggccctcggctccccttcatccaacacagccagaacccgcgattctaccacaagtgaccatcagattatatcttcaacaccacaccccccaccccatcgtgggtgagggtatcccctgtgtgtcccaggccaataaaatctacctgccactgccaaaaaaaaaaaaaaaaaaaaaaaaaaaaaaaaaaaaaaaaaaaaacaaaaaaaaacacaaaaacaaaaaagaaacgaagaaaaaacaaaaaaggggggccccagaaaaacaaaccacgagaggggcacacaaaacacgacgaccaacgacacgcgaaagaaagagaggcacgaaaaaagagggagagcacaaaaaagagagcagagagagcggcggcagaaaaaaaggcgggagagaaggagacacaagcgagcgagagagggaaatgggaaggagaacacacaaacagcgggggggcgacaacaaaagggagaacaacaccacagaggagaaagcaacgagaagagaata

SEQ ID NO: 84413 - DNA, 1325 bp, Homo sapiens
ttaatcggcacgaggaaggggccccgtctgaggtctggcagtcagagacagccgggcgcccacggcccgagcgcccacggcagcaccatgcccgcactcctggagcgccccaagctttccaacgccatggccagggcgctgcaccggcacattatgatggagcgggagcgcaagcggcaggaggaagaagaggtggataagatgatggaacagaagatgaaggaagaacaggagagaaggaagaaaaaggagatggaagagagaatgtcattagaggagaccaaggaacaaattctgaagttggaggagaagcttttggctctacaggaagagaagcaccagcttttcctgcagctcaagaaagttttacatgaggaagaaaaacggaggcgaaaggaacagagtgacctgaccaccctgacatcagctgcataccagcagagcctgactgttcacacaggaactcatctcctcagcatgcaggggagccctggaggacacaatcgcccaggcaccctcatggcagctgacagagccaaacaaatgtttggaccccaagtgcttacgacccggcactacgtgggctcagcagctgcttttgcagggacaccagagcatggacaattccaaggcagtcctggtggtgcctatgggactgctcagcccccacctcactatgggcccacacagccagcttatagtcctagtcagcagctcagagctccttcggcattccctgcagtgcagtacctatctcagccacagccacagccctatgctgtgcatggccactttcagcccactcagacaggtttcctccagcctggtggtgccctgtccttgcaaaagcagatggaacatgctaaccagcagactggcttctccgactcatcctctctgcgccccatgcacccccaggctctgcatccagcccctggactccttgcttccccccagctccctgtgcagatgcagccagcaggaaagtcgggctttgcagctaccagccaacctggccctcggctccccttcatccaacacagccagaacccgcgattctaccacaagtgaccatcagattatatcttcaacaccacaccccccaccccatcgtgggtgagggtatcccctgtgtgtcccaggccaataaaatctacctgccactgccaaaaaaaaaaaaaaaaactctactcgtgccgctcgtgccaattcggcacgagctctttttttgatttcaatttcagaaatatcccatgtcctgaataaaagctgcggcttgagtacgtttattatggaacactttagggtgtttgacatttctttta

SEQ ID NO: 84414 - DNA, 1475 bp, Homo sapiens
ttaatcggcacgaggaaggggccccgtctgaggtctggcagtcagagacagccgggcgcccacggcccgagcgcccacggcagcaccatgcccgcactcctggagcgccccaagctttccaacgccatggccagggcgctgcaccggcacattatgatggagcgggagcgcaagcggcagggtgagccggggccatagcagggggacgcacggcccagaatggctcctgtacctcaaggctggcctcaacccaccggccaaccagcgcgcccgctgccgagcgcagaggagggaaggaatagccccgttgtggtgggatttaagcgtcctgttccacgctccagaacccttgagatgggaaggaccttggagagcacctgataaagcctttccgttccctattgccgcgatggggagcttgtcccctcgaggcaaagagcatacaggcgtgttgggatgactgggttttgctggtcttcaatctgtaacgttggaattgttttcactaccctgcctcttcttcattctgcctgattctccagaggaagaagaggtggataagatgatggaacagaagatgaaggaagaacaggagagaaggaagaaaaaggagatggaagagagaatgtcattagaggagaccaaggaacaaattctgaagttggaggagaagcttttggctctacaggaagagaagcaccagcttttcctgcagctcaagaaagttttacatgaggaagaacagcagagcctgactgttcacacaggaactcatctcctcagcatgcaggggagccctggaggacacaatcgcccaggcaccctcatggcagctgacagagccaaacaaatgtttggaccccaagtgcttacgacccggcactacgtgggctcagcagctgcttttgcagggacaccagagcatggacaattccaaggcagtcctggtggtgcctatgggactgctcagcccccacctcactatgggcccacacagccagcttatagtcctagtcagcagctcagagctccttcggcattccctgcagtgcagtacctatctcagccacagccacagccctatgctgtgcatggccactttcagcccactcagacaggtttcctccagcctggtggtgccctgtccttgcaaaagcagatggaacatgctaaccagcagactggcttctccgactcatcctctctgcgccccatgcacccccaggctctgcatccagcccctggactccttgcttccccccagctccctgtgcagatgcagccagcaggaaagtcgggctttgcagctaccagccaacctggccctcggctccccttcatccaacacagccagaacccgcgattctaccacaagtgaccatcagattatatcttcaacaccacaccccccaccccatcgtgggtgagggtatcccctgtgtgtcccaggccaataaaatctacctgccactgcc

SEQ ID NO: 84415 - DNA, 1259 bp, Homo sapiens
ttaatcggcacgaggaaggggccccgtctgaggtctggcagtcagagacagccgggcgcccacggcccgagcgcccacggcagcaccatgcccgcactcctggagcgccccaagctttccaacgccatggccagggcgctgcaccggcacattatgatggagcgggagcgcaagcggcaggaggaagaagaggtggataagatgatggaacagaagatgaaggaagaacaggagagaaggaagaaaaaggagatggaagagagaatgtcattagaggagaccaaggaacaaattctgaagttggaggagaagcttttggctctacaggaagagaagcaccagcttttcctgcagctcaagaaagttttacatgaggaagaaaaacggaggcgaaaggaacagagtgacctgaccaccctgacatcagctgcataccagcagagcctgactgttcacacaggaactcatctcctcagcatgcagggtgaggactaaagaaaccaccagatggaaccggccttcttggaggtcacagcctcccatttcagcatcatgaagcccttctccctttctagggagccctggaggacacaatcgcccaggcaccctcatggcagctgacagagccaaacaaatgtttggaccccaagtgcttacgacccggcactacgtgggctcagcagctgcttttgcagggacaccagagcatggacaattccaaggcagtcctggtggtgcctatgggactgctcagcccccacctcactatgggcccacacagccagcttatagtcctagtcagcagctcagagctccttcggcattccctgcagtgcagtacctatctcagccacagccacagccctatgctgtgcatggccactttcagcccactcagacaggtttcctccagcctggtggtgccctgtccttgcaaaagcagatggaacatgctaaccagcagactggcttctccgactcatcctctctgcgccccatgcacccccaggctctgcatccagcccctggactccttgcttccccccagctccctgtgcagatgcagccagcaggaaagtcgggctttgcagctaccagccaacctggccctcggctccccttcatccaacacagccagaacccgcgattctaccacaagtgaccatcagattatatcttcaacaccacaccccccaccccatcgtgggtgagggtatcccctgtgtgtcccaggccaataaaatctacctgccactgcc

SEQ ID NO: 84416 - DNA, 1255 bp, Homo sapiens
ttaatcggcacgaggaaggggccccgtctgaggtctggcagtcagagacagccgggcgcccacggcccgagcgcccacggcagcaccatgcccgcactcctggagcgccccaagctttccaacgccatggccagggcgctgcaccggcacattatgatggagcgggagcgcaagcggcaggaggaagaagaggtggataagatgatggaacagaagatgaaggaagaacaggagagaaggaagaaaaaggagatggaagagagaatgtcattagaggagaccaaggaacaaattctgaagttggaggagaagcttttggctctacaggaagagaagcaccagcttttcctgcagctcaagaaagttttacatgaggaagaaaaacggaggcgaaaggaacagagtgacctgaccaccctgacatcagctgcataccagcagagcctgactgttcacacaggaactcatctcctcagcatgcaggggagccctggaggacacaatcgcccaggcaccctcatggcagctgacagagccaaacaaatgtttggaccccaagtgcttacgacccggcactacgtgggctcagcagctgcttttgcagggacaccagagcatggacaattccaaggcagtcctggtggtgcctatgggactgctcagcccccacctcactatgggcccacacagccagcttatagtcctagtcagcagctcagagctccttcggcattccctgcagtgcagtacctatctcagccacagccacagccctatgctgtgcatggccactttcagcccactcagacaggtttcctccagcctggtggtgccctgtccttgcaaaagcagatggaacatgctaaccagcagactggcttctccgactcagtgagtatggcaccttgggaggtcagggttagggatatgttaaggggagcttcagtatgcctcaggccctgactctgttctctgcagtcctctctgcgccccatgcacccccaggctctgcatccagcccctggactccttgcttccccccagctccctgtgcagatgcagccagcaggaaagtcgggctttgcagctaccagccaacctggccctcggctccccttcatccaacacagccagaacccgcgattctaccacaagtgaccatcagattatatcttcaacaccacaccccccaccccatcgtgggtgagggtatcccctgtgtgtcccaggccaataaaatctacctgccactgcc

SEQ ID NO: 84417 - DNA, 1055 bp, Homo sapiens
ttaatcggcacgaggaaggggccccgtctgaggtctggcagtcagagacagccgggcgcccacggcccgagcgcccacggcagcaccatgcccgcactcctggagcgccccaagctttccaacgccatggccagggcgctgcaccggcacattatgatggagcgggagcgcaagcggcaggaggaagaagaggtggataagatgatggaacagaagatgaaggaagaacaggagagaaggaagaaaaaggagatggaagagagaatgtcattagaggagaccaaggaacaaattctgaagttggaggagaagcttttggctctacaggaagagaagcaccagcttttcctgcagctcaagaaagttttacatgaggaagaaaaacggaggcgaaaggaacagagtgacctgaccaccctgacatcagctgcataccagcagagcctgactgttcacacaggaactcatctcctcagcatgcaggggagccctggaggacacaatcgcccaggcaccctcatggcagctgacagagcatgggactgctcagcccccacctcactatgggcccacacagccagcttatagtcctagtcagcagctcagagctccttcggcattccctgcagtgcagtacctatctcagccacagccacagccctatgctgtgcatggccactttcagcccactcagacaggtttcctccagcctggtggtgccctgtccttgcaaaagcagatggaacatgctaaccagcagactggcttctccgactcatcctctctgcgccccatgcacccccaggctctgcatccagcccctggactccttgcttccccccagctccctgtgcagatgcagccagcaggaaagtcgggctttgcagctaccagccaacctggccctcggctccccttcatccaacacagccagaacccgcgattctaccacaagtgaccatcagattatatcttcaacaccacaccccccaccccatcgtgggtgagggtatcccctgtgtgtcccaggccaataaaatctacctgccactgcc

SEQ ID NO: 84418 - DNA, 1354 bp, Homo sapiens
ttaatcggcacgaggaaggggccccgtctgaggtctggcagtcagagacagccgggcgcccacggcccgagcgcccacggcagcaccatgcccgcactcctggagcgccccaagctttccaacgccatggccagggcgctgcaccggcacattatgatggagcgggagcgcaagcggcaggaggaagaagaggtggataagatgatggaacagaagatgaaggaagaacaggagagaaggaagaaaaaggagatggaagagagaatgtcattagaggagaccaaggaacaaattctgaagttggaggagaagcttttggctctacaggaagagaagcaccagcttttcctgcagctcaagaaagttttacatgaggaagaaaaacggaggcgaaaggaacagagtgacctgaccaccctgacatcagctgcataccagcagagcctgactgttcacacaggaactcatctcctcagcatgcaggggagccctggaggacacaatcgcccaggcaccctcatggcagctgacagagccaaacaaatgtttggaccccaagtgcttacgacccggcactacgtgggctcagcagctgcttttgcagggacaccagagcatggacaattccaaggcagtcctggtggtgcctatgggactgctcagcccccacctcactatgggcccacacagccagcttatagtcctagtcagcagctcagaggtgagtaataggagggatggggcttggccttcctcaaggtcaaaggaggaatgccattcagtaaaagattttaatggctctgtcttttcctttctcagctccttcggcattccctgcagtgcagtacctatctcagccacagccacagccctatgctgtgcatggccactttcagcccactcagacaggtgataacatcccatgcaggagctctagctctcaggtcctcccctccctgtttcattctcatctcacatgcccctcttccccacctaggtttcctccagcctggtggtgccctgtccttgcaaaagcagatggaacatgctaaccagcagactggcttctccgactcatcctctctgcgccccatgcacccccaggctctgcatccagcccctggactccttgcttccccccagctccctgtgcagatgcagccagcaggaaagtcgggctttgcagctaccagccaacctggccctcggctccccttcatccaacacagccagaacccgcgattctaccacaagtgaccatcagattatatcttcaacaccacaccccccaccccatcgtgggtgagggtatcccctgtgtgtcccaggccaataaaatctacctgccactgcc

SEQ ID NO: 84419 - DNA, 1454 bp, Homo sapiens
ttaatcggcacgaggaaggggccccgtctgaggtctggcagtcagagacagccgggcgcccacggcccgagcgcccacggcagcaccatgcccgcactcctggagcgccccaagctttccaacgccatggccagggcgctgcaccggcacattatgatggagcgggagcgcaagcggcagggtgagccggggccatagcagggggacgcacggcccagaatggctcctgtacctcaaggctggcctcaacccaccggccaaccagcgcgcccgctgccgagcgcagaggagggaaggaatagccccgttgtggtgggatttaagcgtcctgttccacgctccagaacccttgagatgggaaggaccttggagagcacctgataaagcctttccgttccctattgccgcgatggggagcttgtcccctcgaggcaaagagcatacaggcgtgttgggatgactgggttttgctggtcttcaatctgtaacgttggaattgttttcactaccctgcctcttcttcattctgcctgattctccagaggaagaagaggtggataagatgatggaacagaagatgaaggaagaacaggagagaaggaagaaaaaggagatggaagagagaatgtcattagaggagaccaaggaacaacagcttttcctgcagctcaagaaagttttacatgaggaagaaaaacggaggcgaaaggaacagagtgacctgaccaccctgacatcagctgcataccagcagagcctgactgttcacacaggaactcatctcctcagcatgcaggggagccctggaggacacaatcgcccaggcaccctcatggcagctgacagagccaaacaaatgtttggaccccaagtgcttacgacccggcactacgtgggctcagcagctgcttttgcagggacaccagagcatggacaattccaaggcagtcctggtggtgcctatgggactgctcagcccccacctcactatgggcccacacagccagcttatagtcctagtcagcagctcagagctccttcggcattccctgcagtgcagtacctatctcagccacagccacagccctatgctgtgcatggccactttcagcccactcagacaggtttcctccagcctggtggtgccctgtccttgcaaaagcagatggaacatgctaaccagcagactggcttctccgactcagctctgcatccagcccctggactccttgcttccccccagctccctgtgcagatgcagccagcaggaaagtcgggctttgcagctaccagccaacctggccctcggctccccttcatccaacacagccagaacccgcgattctaccacaagtgaccatcagattatatcttcaacaccacaccccccaccccatcgtgggtgagggtatcccctgtgtgtcccaggccaataaaatctacctgccactgcc

SEQ ID NO: 84420 - DNA, 1629 bp, Homo sapiens
ttaatcggcacgaggaaggggccccgtctgaggtctggcagtcagagacagccgggcgcccacggcccgagcgcccacggcagcaccatgcccgcactcctggagcgccccaagctttccaacgccatggccagggcgctgcaccggcacattatgatggagcgggagcgcaagcggcaggaggaagaagaggtggataagatgatggaacagaagatgaaggaagaacaggagagaaggaagaaaaaggagatggaagagagaatgtcattagaggagaccaaggaacaaattctgaagttggaggagaagcttttggctctacaggaagagaagcaccagcttttcctgcagctcaagaaagttttacatgaggaagaaaaacggaggcgaaaggaacagagtgacctgaccaccctgacatcagctgcataccagcagagcctgactgttcacacaggaactcatctcctcagcatgcagggtgaggactaaagaaaccaccagatggaaccggccttcttggaggtcacagcctcccatttcagcatcatgaagcccttctccctttctagggagccctggaggacacaatcgcccaggcaccctcatggcagctgacagagccaaacaaatgtttggaccccaagtgcttacggtgagagtaggattggatgcctagcccctagtacttccatccatgcatccttgccaccagtattcaagtcacaaacatatcaagcacttaagtttagggggaaacggggcatacagatacacacaagtcactgggtttcagctttcaaggagtttgtaggcgagttctcattctccttccttagacccggcactacgtgggctcagcagctgcttttgcagggacaccagagcatggacaattccaaggcagtcctggtggtgcctatgggactgctcagcccccacctcactatgggcccacacagccagcttatagtcctagtcagcagctcagaggtgagtaataggagggatggggcttggccttcctcaaggtcaaaggaggaatgccattcagtaaaagattttaatggctctgtcttttcctttctcagctccttcggcattccctgcagtgcagtacctatctcagccacagccacagccctatgctgtgcatggccactttcagcccactcagacaggtgataacatcccatgcaggagctctagctctcaggtcctcccctccctgtttcattctcatctcacatgcccctcttccccacctaggtttcctccagcctggtggtgccctgtccttgcaaaagcagatggaacatgctaaccagcagactggcttctccgactcatcctctctgcgccccatgcacccccaggctctgcatccagcccctggactccttgcttccccccagctccctgtgcagatgcagccagcaggaaagtcgggctttgcagctaccagccaacctggccctcggctccccttcatccaacacagccagaacccgcgattctaccacaagtgaccatcagattatatcttcaacaccacaccccccaccccatcgtgggtgagggtatcccctgtgtgtcccaggccaataaaatctacctgccactgcc

SEQ ID NO: 84421 - DNA, 1439 bp, Homo sapiens
ttaatcggcacgaggaaggggccccgtctgaggtctggcagtcagagacagccgggcgcccacggcccgagcgcccacggcagcaccatgcccgcactcctggagcgccccaagctttccaacgccatggccagggcgctgcaccggcacattatgatggagcgggagcgcaagcggcaggaggaagaagaggtggataagatgatggaacagaagatgaaggaagaacaggagagaaggaagaaaaaggagatggaagagagaatgtcattagaggagaccaaggaacaaattctgaagttggaggagaagcttttggctctacaggaagagaagcaccagcttttcctgcagctcaagaaagttttacatgaggaagaaaaacggaggcgaaaggaacagagtgacctgaccaccctgacatcagctgcataccagcagagcctgactgttcacacaggaactcatctcctcagcatgcagggtgaggactaaagaaaccaccagatggaaccggccttcttggaggtcacagcctcccatttcagcatcatgaagcccttctccctttctagggagccctggaggacacaatcgcccaggcaccctcatggcagctgacagagccaaacaaatgtttggaccccaagtgcttacgacccggcactacgtgggctcagcagctgcttttgcagggacaccagagcatggacaattccaaggcagtcctggtggtgcctatgggactgctcagcccccacctcactatgggcccacacagccagcttatagtcctagtcagcagctcagagctccttcggcattccctgcagtgcagtacctatctcagccacagccacagccctatgctgtgcatggccactttcagcccactcagacaggtttcctccagcctggtggtgccctgtccttgcaaaagcagatggaacatgctaaccagcagactggcttctccgactcacctgctctgcgcgcccagtgcacccgtccagggcgtcgtgcagtccatgcgccgctggagctcgcgttgctgtccgcgcccaggctgccgctgtgcgagagtgcagccagacaggaaagtcgggctttgcagctaccagccaacctggccctcggctccccttcatccaacacagccagaacccgcgattctaccacaagtgaccatcagattatatcttcaacaccacaccccccaccccatcgtgggtgagggtatcccctgtgtgtcccaggccaataaaatctacctgccactgccaaaaaaaaaaaaaaaaactctactcgtgccgctcgtgccaattcggcacgagctctttttttgatttcaatttcagaaatatcccatgtcctgaataaaagctgcggcttgagtacgtttattatggaacactttagggtgtttgacatttctttta

SEQ ID NO: 84422 - DNA, 655 bp, Homo sapiens
ttaatcggcacgaggaaggggccccgtctgaggtctggcagtcagagacagccgggcgcccacggcccgagcgcccacggcagcaccatgcccgcactcctggagcgccccaagctttccaacgccatggccagggcgctgcaccggcacattatgatggagcgggagcgcaagcggcaggaggaagaagaggtggataagatgatggaacagaagatgaaggaagaacaggagagaaggaagaaaaaggagatggaagagagaatgtcattagaggagaccaaggaacaaattctgaagttggaggagaagcttttggctctacaggaagagaagcaccagcttttcctgcagctcaagaaagttttacatgaggaagaaaaacggaggcgaaaggaacagagtgacctgaccaccctgacatcagctgcataccagcagagcctgactgttcacacaggaactcatctcctcagcatgcagggagccctcggaggacacactcgcccacgcaccctccatggcagctgtacagagccacacacactattttgaccccagtgcttacgtaccccgcactatgtgggcgtctgcgctgctttttctagggacaccagaacattggacattacctcgggagtactagtaggaggct

SEQ ID NO: 84423 - DNA, 756 bp, Homo sapiens
ttaatcggcacgaggaaggggccccgtctgaggtctggcagtcagagacagccgggcgcccacggcccgagcgcccacggcagcaccatgcccgcactcctggagcgccccaagctttccaacgccatggccagggcgctgcaccggcacattatgatggagcgggagcgcaagcggcaggaggaagaagaggtggataagatgatggaacagaagatgaaggaagaacaggagagaaggaagaaaaaggagatggaagagagaatgtcattagaggagaccaaggaacaaattctgaagttggaggagaagcttttggctctacaggaagagaagcaccagcttttcctgcagctcaagaaagttttacatgaggaagaaaaacggaggcgaaaggaacagagtgacctgaccaccctgacatcagctgcataccagcagagcctgactgttcacacaggaactcatctcctcagcatgcagggtgaggactaaagaaaccaccagatggaaccggccttcttggaggtcacagcctcccatttcagcatcatgaagcccttctccctttctagggagccctggaggacacaatcgcccaggcaccctcatggcagctgacagagccaaacaaatgtttggaccccaagtgcttacggtgagagtaggattggatgcctagcccctagtacttccatccatgcatccttgccaccaggacttgtgggttgaacgaggcttgtgggttggccgtgg

SEQ ID NO: 84424 - DNA, 1529 bp, Homo sapiens
ttaatcggcacgaggaaggggccccgtctgaggtctggcagtcagagacagccgggcgcccacggcccgagcgcccacggcagcaccatgcccgcactcctggagcgccccaagctttccaacgccatggccagggcgctgcaccggcacattatgatggagcgggagcgcaagcggcagggtgagccggggccatagcagggggacgcacggcccagaatggctcctgtacctcaaggctggcctcaacccaccggccaaccagcgcgcccgctgccgagcgcagaggagggaaggaatagccccgttgtggtgggatttaagcgtcctgttccacgctccagaacccttgagatgggaaggaccttggagagcacctgataaagcctttccgttccctattgccgcgatggggagcttgtcccctcgaggcaaagagcatacaggcgtgttgggatgactgggttttgctggtcttcaatctgtaacgttggaattgttttcactaccctgcctcttcttcattctgcctgattctccagaggaagaagaggtggataagatgatggaacagaagatgaaggaagaacaggagagaaggaagaaaaaggagatggaagagagaatgtcattagaggagaccaaggaacaaattctgaagttggaggagaagcttttggctctacaggaagagaagcaccagcttttcctgcagctcaagaaagttttacatgaggaagaaaaacggaggcgaaaggaacagagtgacctgaccaccctgacatcagctgcataccagcagagcctgactgttcacacaggaactcatctcctcagcatgcaggggagccctggaggacacaatcgcccaggcaccctcatggcagctgacagagccaaacaaatgtttggaccccaagtgcttacgacccggcactacgtgggctcagcagctgcttttgcagggacaccagagcatggacaattccaaggcagtcctggtggtgcctatgggactgctcagcccccacctcactatgggcccacacagccagcttatagtcctagtcagcagctcagagctccttcggcattccctgcagtgcagtacctatctcagccacagccacagccctatgctgtgcatggccactttcagcccactcagacaggtttcctccagcctggtggtgccctgtccttgcaaaagcagatggaacatgctaaccagcagactggcttctccgactcatcctctctgcgccccatgcacccccaggctctgcatccagcccctggactccttgcttccccccagctccctgtgcagatgcagccagcaggaaagtcgggctttgcagctaccagccaacctggccctcggctccccttcatccaacacagccagaacccgcgattctaccacaagtgaccatcagattatatcttcaacaccacaccccccaccccatcgtgggtgagggtatcccctgtgtgtcccaggccaataaaatctacctgccactgcc

SEQ ID NO: 84425 - DNA, 970 bp, Homo sapiens
ggcggcacagaacaggagagaaagcggcaggaggaagaagaggtggataagatgatggaacagaagatgaaggaagaacaggagagaaggaagaaaaaggagatggaagagagaatgtcattagaggagaccaaggaacaacagcttttcctgcagctcaagaaagttttacatgaggaagaaaaacggaggcgaaaggaacagagtgacctgaccaccctgacatcagctgcataccagcagagcctgactgttcacacaggaactcatctcctcagcatgcaggggagccctggaggacacaatcgcccaggcaccctcatggcagctgacagagccaaacaaatgtttggaccccaagtgcttacgacccggcactacgtgggctcagcagctgcttttgcagggacaccagagcatggacaattccaaggcagtcctggtggtgcctatgggactgctcagcccccacctcactatgggcccacacagccagcttatagtcctagtcagcagctcagagctccttcggcattccctgcagtgcagtacctatctcagccacagccacagccctatgctgtgcatggccactttcagcccactcagacaggtttcctccagcctggtggtgccctgtccttgcaaaagcagatggaacatgctaaccagcagactggcttctccgactcatcctctctgcgccccatgcacccccaggctctgcatccagcccctggactccttgcttccccccagctccctgtgcagatgcagccagcaggaaagtcgggctttgcagctaccagccaacctggccctcggctccccttcatccaacacagccagaacccgcgattctaccacaagtgaccatcagattatatcttcaacaccacaccccccaccccatcgtgggtgagggtatcccctgtgtgtcccaggccaataaaatctacctgccactgcc

SEQ ID NO: 84426 - DNA, 1357 bp, Homo sapiens
ttaatcggcacgaggaaggggccccgtctgaggtctggcagtcagagacagccgggcgcccacggcccgagcgcccacggcagcaccatgcccgcactcctggagcgccccaagctttccaacgccatggccagggcgctgcaccggcacattatgatggagcgggagcgcaagcggcaggaggaagaagaggtggataagatgatggaacagaagatgaaggaagaacaggagagaaggaagaaaaaggagatggaagagagaatgtcattagaggagaccaaggaacaaattctgaagttggaggagaagcttttggctctacaggaagagaagcaccagcttttcctgcagctcaagaaagttttacatgaggaagaaaaacggaggcgaaaggaacagagtgacctgaccaccctgacatcagctgcataccagcagagcctgactgttcacacaggaactcatctcctcagcatgcaggggagccctggaggacacaatcgcccaggcaccctcatggcagctgacagagccaaacaaatgtttggaccccaagtgcttacgacccggcactacgtgggctcagcagctgcttttgcagggacaccagagcatggacaattccaaggcagtcctggtggtgcctatgggactgctcagcccccacctcactatgggcccacacagccagcttatagtcctagtcagcagctcagagctccttcggcattccctgcagtgcagtacctatctcagccacagccacagccctatgctgtgcatggccactttcagcccactcagacaggtttcctccagcctggtggtgccctgtccttgcaaaagcagatggaacatgctaaccagcagactggcttctccgactcatcctctctgcgccccatgcacccccaggctctgcatccagcccctggactccttgcttccccccagctccctgtgcagatgcagccagcaggaaaggtaagaatggtaatagaatttacctgtcagaatccctacactagggatccggaaaagcaggattaggtaggacaggtggcccacatcatctggtttttccttcctctttgggggtggttatcagtagggtattaagtggaagggagagtatgcccagtgacaaagccctcttttcatcaccaccaccagtcgggctttgcagctaccagccaacctggccctcggctccccttcatccaacacagccagaacccgcgattctaccacaagtgaccatcagattatatcttcaacaccacaccccccaccccatcgtgggtgagggtatcccctgtgtgtcccaggccaataaaatctacctgccactgcc

SEQ ID NO: 84427 - DNA, 1141 bp, Homo sapiens
ttaatcggcacgaggaaggggccccgtctgaggtctggcagtcagagacagccgggcgcccacggcccgagcgcccacggcagcaccatgcccgcactcctggagcgccccaagctttccaacgccatggccagggcgctgcaccggcacattatgatggagcgggagcgcaagcggcaggaggaagaagaggtggataagatgatggaacagaagatgaaggaagaacaggagagaaggaagaaaaaggagatggaagagagaatgtcattagaggagaccaaggaacaaattctgaagttggaggagaagcttttggctctacaggaagagaagcaccagcttttcctgcagctcaagaaagttttacatgaggaagaaaaacggaggcgaaaggaacagagtgacctgaccaccctgacatcagctgcataccagcagagcctgactgttcacacaggaactcatctcctcagcatgcaggggagccctggaggacacaatcgcccaggcaccctcatggcagctgacagagccaaacaaatgtttggaccccaagtgcttacgacccggcactacgtgggctcagcagctgcttttgcagggacaccagagcatggacaattccaaggcagtcctggtggtgcctatgggactgctcagcccccacctcactatgggcccacacagccagcttatagtcctagtcagcagctcagagctccttcggcattccctgcagtgcagtacctatctcagccacagccacagccctatgctgtgcatggccactttcagcccactcagacaggtttcctccagcctggtggtgccctgtccttgcaaaagcagatggaacatgctaaccagcagactggcttctccgactcagctctgcatccagcccctggactccttgcttccccccagctccctgtgcagatgcagccagcaggaaagtcgggctttgcagctaccagccaacctggccctcggctccccttcatccaacacagccagaacccgcgattctaccacaagtgaccatcagattatatcttcaacaccacaccccccaccccatcgtgggtgagggtatcccctgtgtgtcccaggccaataaaatctacctgccactgcc

SEQ ID NO: 84428 - DNA, 934 bp, Homo sapiens
ttaatcggcacgaggaaggggccccgtctgaggtctggcagtcagagacagccgggcgcccacggcccgagcgcccacggcagcaccatgcccgcactcctggagcgccccaagctttccaacgccatggccagggcgctgcaccggcacattatgatggagcgggagcgcaagcggcaggaggaagaagaggtggataagatgatggaacagaagatgaaggaagaacaggagagaaggaagaaaaaggagatggaagagagaatgtcattagaggagaccaaggaacaaattctgaagttggaggagaagcttttggctctacaggaagagaagcaccagcttttcctgcagctcaagaaagttttacatgaggaagaaaaacggaggcgaaaggaacagagtgacctgaccaccctgacatcagctgcataccagcagagcctgactgttcacacaggaactcatctcctcagcatgcaggggagccctggaggacacaatcgcccaggcaccctcatggcagctgacagagccaaacaaatgtttggaccccaagtgcttacgacccggcactacgtgggctcagcagctgcttttgcagggacaccagagcatggacaattccaaggcagtcctggtggtgcctatgggactgctcagcccccacctcactatgggcccacacagccagcttatagtcctagtcagcagctcagagctccttcggcattccctgcagtgcagtacctatctcagccacagccacagccctatgctgtgcatggccactttcagcccactcagacaggtttcctccagcctggtggtgccctgtccttgcaaaagcagatggaacatgctaaccagcagactggcttctccgactcatcctctctgcgccccatgcgtggataacagggccgagctgatt

SEQ ID NO: 84429 - DNA, 1266 bp, Homo sapiens
ttaatcggcacgaggaaggggccccgtctgaggtctggcagtcagagacagccgggcgcccacggcccgagcgcccacggcagcaccatgcccgcactcctggagcgccccaagctttccaacgccatggccagggcgctgcaccggcacattatgatggagcgggagcgcaagcggcaggaggaagaagaggtggataagatgatggaacagaagatgaaggaagaacaggagagaaggaagaaaaaggagatggaagagagaatgtcattagaggagaccaaggaacaaattctgaagttggaggagaagcttttggctctacaggaagagaagcaccagcttttcctgcagctcaagaaagttttacatgaggaagaaaaacggaggcgaaaggaacagagtgacctgaccaccctgacatcagctgcataccagcagagcctgactgttcacacaggaactcatctcctcagcatgcaggggagccctggaggacacaatcgcccaggcaccctcatggcagctgacagagccaaacaaatgtttggaccccaagtgcttacgacccggcactacgtgggctcagcagctgcttttgcagggacaccagagcatggacaattccaaggcagtcctggtggtgcctatgggactgctcagcccccacctcactatgggcccacacagccagcttatagtcctagtcagcagctcagaggtgagtaataggagggatggggcttggccttcctcaaggtcaaaggaggaatgccattcagtaaaagattttaatggctctgtcttttcctttctcagctccttcggcattccctgcagtgcagtacctatctcagccacagccacagccctatgctgtgcatggccactttcagcccactcagacaggtttcctccagcctggtggtgccctgtccttgcaaaagcagatggaacatgctaaccagcagactggcttctccgactcatcctctctgcgccccatgcacccccaggctctgcatccagcccctggactccttgcttccccccagctccctgtgcagatgcagccagcaggaaagtcgggctttgcagctaccagccaacctggccctcggctccccttcatccaacacagccagaacccgcgattctaccacaagtgaccatcagattatatcttcaacaccacaccccccaccccatcgtgggtgagggtatcccctgtgtgtcccaggccaataaaatctacctgccactgcc

SEQ ID NO: 84430 - DNA, 1256 bp, Homo sapiens
ttaatcggcacgaggaaggggccccgtctgaggtctggcagtcagagacagccgggcgcccacggcccgagcgcccacggcagcaccatgcccgcactcctggagcgccccaagctttccaacgccatggccagggcgctgcaccggcacattatgatggagcgggagcgcaagcggcaggaggaagaagaggtggataagatgatggaacagaagatgaaggaagaacaggagagaaggaagaaaaaggagatggaagagagaatgtcattagaggagaccaaggaacaaattctgaagttggaggagaagcttttggctctacaggaagagaagcaccagcttttcctgcagctcaagaaagttttacatgaggaagaaaaacggaggcgaaaggaacagagtgacctgaccaccctgacatcagctgcataccagcagagcctgactgttcacacaggaactcatctcctcagcatgcaggggagccctggaggacacaatcgcccaggcaccctcatggcagctgacagagccaaacaaatgtttggaccccaagtgcttacgacccggcactacgtgggctcagcagctgcttttgcagggacaccagagcatggacaattccaaggcagtcctggtggtgcctatgggactgctcagcccccacctcactatgggcccacacagccagcttatagtcctagtcagcagctcagagctccttcggcattccctgcagtgcagtacctatctcagccacagccacagccctatgctgtgcatggccactttcagcccactcagacaggtgataacatcccatgcaggagctctagctctcaggtcctcccctccctgtttcattctcatctcacatgcccctcttccccacctaggtttcctccagcctggtggtgccctgtccttgcaaaagcagatggaacatgctaaccagcagactggcttctccgactcatcctctctgcgccccatgcacccccaggctctgcatccagcccctggactccttgcttccccccagctccctgtgcagatgcagccagcaggaaagtcgggctttgcagctaccagccaacctggccctcggctccccttcatccaacacagccagaacccgcgattctaccacaagtgaccatcagattatatcttcaacaccacaccccccaccccatcgtgggtgagggtatcccctgtgtgtcccaggccaataaaatctacctgccactgcc

SEQ ID NO: 84431 - DNA, 897 bp, Homo sapiens
cggagacgcgccaagcaaagccgttacacggactgtgcacgcgcctccggtgtccctgcgcgtgacacaaatttggccccgagggagctccatgtgcctgagtcccaggagccctagatgccagcgacagcttgtcaccaggcctgcgacgccaatgggcgggagtcggcggagctcaggacactgacgacgggcctgggggaaagcggtccccacacagcccggggccagaggagcgggctgccagggtcagacggaggaagaccgcgggaaacagactggacgtgcagggaaaggtccagtcccacccgcgggtgcagggaacagcctgtggggaggggacccagggccgcgtgggaagagtcagggagcttaggtggaccgcccggcaggaagagaggggaaggctgagcagtgaaggggtccccaagtcagccaaggcagagttcccaggtacgaattcagagcctgacggtactgggcggggaggtagcccccaccttcctgaagccccttccttacctctgggagcgtgaggctggagacgcctgggtaggtctgagggtgagccctgggtgtggggtagctccaccctgcaagtgcctagaggccccacacctccagcctccctctgaattcagggttctctgtcctgaggctgcccaggggagcctggctggggcgagatgggccggacatgggcctgggcgagtctcgccacagaggggcgccgctgagcagccaggcctcctgaggagtggacactctcccggcaggccctgggatccgccacccacaagcacacttggaggcagcatccttgcaggactcgcgccggagcctgagccctccagccagcccagcgcgccaccgcccttctgtccccagccacccacg

SEQ ID NO: 84432 - DNA, 844 bp, Homo sapiens
cgccccaaccacccctgagagccattaggtgacagttgtgcttcacccgcaaaaggtcttcctttgccaatttttgtcacaagtttttgcatattgtttgcataaatttgcaggtaggattcaaaaggtcctgattccaattacacaagagaaaacacactgactgcaagtgcagttgaagaaggttctcagaagggcacgctggaaccgctccccggtgccaggagaggtgtttgaactacgtgctgctggggcgcccagacgggcttccccacgatccaggaaatcagagcttttgcaacgttggcttgaaatcgtggctaacaagacagaaaagtgctcttctcaaccccaggggaagactggggaggtgggcggggccccagggcccactgattccatccaagagggggcatggaaggacagcggcgagcccacgtctggagcttctccctcctgtgaaaggcaaacagaatcctgagatgccaaactcactgttccaaagggaaagggaaagcttggaaatggcgtcacgcaaaacctgcctctcaggagaaccagtctgtttctgaacagagagcttgcaagacggccggccatgtatctccccgggaggcctcccacactctgacagtgtcgatgagcagctgatcctcgcgagtgtgggacaaaagactagggcttgcttttatttttgttcagggacacagagccaacaccaccagctactaaaggaataaaaccacatcttgcttgtttaaagcagtaaaggaacaaaattgcataggccaggaggtgcttttgtgtctccagccgtgacttctggttaaacactcgagaaaaa

SEQ ID NO: 84433 - DNA, 452 bp, Homo sapiens
tgtggctgaacaataagcggaacagttttctttgactgtaccacccctcccccaagctgggacagtggcacacacagagaatttccctagacccatggtttctacagggggaaaagtgaattggaggaggatattccatttcctcgccattttgggtccctttgtgggagggagatatgtgaaggacatgaaaaagttcttgtgtggctattttagaaagtacttgagataggttttatctcagacatccacacacgacctctctctctatgtgctttgctggctgcaatttgtttgggattgagaagagtaatttcatcttggtatctgcaacttttatactacaaagtaaaaacctatagtagttgcacaaagtataaaaagaaaggattcaaaacatacaaccacagaaaaccagaaaaaccacaaaggaagacagtacagaggaagaa

SEQ ID NO: 84434 - DNA, 440 bp, Homo sapiens
gccttgaaattttccaactcagtgaatcctatagccacctagcacttgtcttatagcacttgtgttgtgttagggacaatattattaatggtgtttacatacaccagtaaaagactaagctcattctggatcgggattagttttaattatttttgtatcttccagtcttactgtatgcctgacacatatattaaaaatcaaataatattagcctggattcataaggggtatttttgccctctcaattaaagaatagctaagaactaaactctgtagtattgagtgtaagtccagcagaagctcagaggtaggaaggatccattggggctagagtaattgggaagctttgatgataagagcttgatgaaggaaggcgtgtgaacacctgggctgcataccaggagcaaaggcccaggggctggtaagtgagtgcattttgg

SEQ ID NO: 84435 - DNA, 636 bp, Homo sapiens
aagctgacaccaggagcaaggttgagaggaagctgtgaccccagcaggactttatgttcccaccatcccggatgtgagaatgaggaaaaaaggagatgagctgtctccccacaagcccagagatttgaccgaggagagtagaggcctcgagctctcacctaagagaaaagacatggggctccctggggtccacagctcactgcgctctccctcctgagactcctgctgccagagcacctttccccagggtcatggatgctgaagggaacacaacttagagaccactccaccatccacccagcaagcacagctaccaagacccaaagctgaggcttaccaacgcccagggtgggagggggttccatccctgaataactccatggttcccctatgcgtctgaccatcccagccagaaatacataaatcatctcagctacaaaaaaacaaacaaagacaaaaaaacaaaaagaggaggcacccacccaaaaccaagaccacaaaacgggaacaccaaacacaaaacaagaggcgggggccgtcccacgaacaccaacgggcacgacagcacgaggagatcgcagaccaccaccaccgcctcgcgcaccaagcgctcccccactggcaccaccgaccaac

SEQ ID NO: 84436 - DNA, 3263 bp, Homo sapiens
tgttcagagccgctatagctgccggcggtgtgcgactgagtcggtggcgaagacgggaacgcgacgatggcggagactctgcccgggtcgggcgactcgggccctggcacggcttctctcggcccgggcgttgcggagactgggacgaggcggctcagcgagctgcgggtgatcgatctgcgggcggagctgaagaagcggaacctggacacgggcggcaacaagagcgtcctgatggagcggctcaagaaggcggttaaagaagaggggcaagatcctgatgaaattggcatcgagttagaagccaccagcaagaagtcagccaagagatgtgttaaaggactgaagatggaggaggaaggcacagaagataatggcctggaagacgattccagagacgggcaggaggacatggaagcaagtctggagaacctgcagaatatgggcatgatggacatgagtgtgctagacgaaactgaagtggcgaatagcagtgctccagattttggggaggatggcacggacggccttctcgattccttttgtgatagtaaagaatacgtggctgcacagctgagacagctcccggctcagcccccagagcatgctgtggatggggaaggatttaagaacactttggaaacttcatcgttgaacttcaaagtaactccggacattgaagaatcccttttggagccagaaaatgagaaaatactcgacattttgggggaaacttgtaaatctgagccagtaaaagaagaaagttccgagctggagcagccatttgcacaggacacaagtagcgtggggccagacagaaagcttgcggaggaagaggacctatttgacagcgcccatccggaagagggtgatttagatttggccagcgagtcaacagcacacgctcagtcgagcaaggcagacagcctgttagcggtagtgaaaagggagcccgcggagcagccaggcgatggcgagaggacggactgtgagcctgtagggctagagccggcagttgagcagagtagtgcggcctccgagctcgcggaggcctctagcgaggagctcgcagaagcacccacggaagccccaagcccagaagccagagatagcaaagaagacgggaggaagtttgattttgacgcttgtaatgaagtccctccggctcctaaagagtcctcaaccagtgagggcgctgatcagaaaatgagctcttttaaggaagaaaaagatataaagccaatcattaaagatgaaaaaggtcgggtcggcagcggttctggtcggaacctgtgggtcagcgggctgtcctccacaacacgcgctacggatctcaagaaccttttcagcaagtatgggaaggttgtcggggccaaagtggtaacgaacgcccgcagcccgggggctcgatgctatggattcgtcaccatgtcgacatctgacgaggcgaccaagtgcatcagccatctccacagaactgagctgcatggacgaatgatctccgtagagaaggccaaaaatgagcctgctgggaaaaagctttccgacagaaaagagtgcgaagtgaagaaggaaaaattatcgagtgtcgacagacatcattctgtggagatcaaaattgaaaaaactgtaattaagaaggaagagaagattgagaagaaggaggaaaaaaagcctgaagacattaagaaggaagaaaaagaccaggatgagctgaaacccggacctacaaatcggtctagagtcaccaaatcaggaagcagaggaatggagcggacggtcgtgatggataaatcgaaaggagagcccgtcattagcgtgaaaaccacaagcaggtccaaagagagaagctccaagagtcaggatcgcaagtcagaaagcaaagaaaagagagacatcttgtcgtttgataaaatcaaagaacaaagggagagagagcgccagaggcagcgggaacgggagatccgcgaaacggagaggcggcgggagcgcgagcagcgggagcgggagcaacgcctcgaggccttccatgagcggaaggagaaggcccggctacagcgggaacgcctgcagctcgagtgccagcgccagcggctggagcgggagcgcatggagcgggagcggctggagcgcgagcgcatgcgcgtggagcgtgagcgcaggaaggagcaggagcgcatccaccgcgagcgcgaggagctgcggcgccagcaggagcagctgcgttacgagcaggagcggcggcccgggcggaggccctacgacctggaccgacgagatgatgcctattggccagaaggaaagcgtgtggcaatggaggaccgatatcgtgcagactttccccggccagaccaccgctttcacgacttcgatcatcgagaccggggccagtaccaggaccacgccatcgacaggcgggagggttcgaggccaatgatgggagaccaccgggatgggcagcactatggagatgaccgccatggccacggaggacccccagagcgccacggccgggactcccgtgatggctgggggggctacggctccgacaagaggctgagtgaaggccgggggctgccccctccccccaggggtggccgtgactggggagagcacaaccagcggctagaggagcaccaggcacgcgcctggcagggtgccatggacgcaggcgcggctagccgggagcacgccaggtggcaaggtggcgagaggggcctgtctgggccctcggggccggggcacatggcaagccgcggtggagtggcggggcgaggcggctttgcacaaggtggacattcccagggccacgtggtgccaggtggcggactggaaggtggcggagtggccagccaggaccggggcagcagagtccctcacccacaccctcatccccccccgtacccccacttcacccgccgctactaagtcccactcgctgcgagttttcgggtgggcagacgcactgttgaatctggtagccagggttccctcgaacttgggggatctttttaaaagcaaagtaaatcctgccaccatgttgtagctcaatacaatgtgaactcactttttttttttttttaaataaatgtgttcttgttctgccatttttaaatcaaggtttctgttaacgaggcattccattttccattaataaagtttaccattcgcaaaaaaaaaatgtgttcttgttctgccatttttaaatcaaggtttctgttaacgaggcattccattttccattaataaagtttaccattcgc

SEQ ID NO: 84437 - DNA, 824 bp, Homo sapiens
tggttgtgcttcctgttaggccttggggtgatgcctaagaatctccctctcgtgccaggtcgggtcggcagcggttctggtcggaacctgtgggtcagcgggctgtcctccacaacacgcgctacggatctcaagaaccttttcagcaagtatgggaaggttgtcggggccaaagtggtaacgaacgcccgcagcccgggggctcgatgctatggattcgtcaccatgtcgacatctgacgaggcgaccaagtgcatcagccatctccacagaactgagctgcatggacgaatgatctccgtagagaaggccaaaaatgagcctgctgggaaaaagctttccgacagaaaagagtgcgaagtgaagaaggaaaaattatcgagtgtcgacagacatcattctgtggagatcaaaattgaaaaaactgtaattaagaaggaagagaagattgagaagaaggaggaaaaaaagcctgaagacattaagaaggaagaaaaagaccaggatgagctgaaacccggacctacaaatcggtctagagtcaccaaatcagcgaagcagacggaactggacgcggaccggtcgtgatgcgatacactcgacacggcagagcccgtccattagcgtgacaaccacaacgcaggttccaacgagagaagctccaagagctccaggaatcgcaaagtcagaacagcaacagcacacagagacgacaatcctggtcgccccgcctcccactccccgcaacccacagggcagagagaagcgccagcaggccagccgggaaccgggagactccgccgacaccggacacgggccgccgg

SEQ ID NO: 84438 - DNA, 574 bp, Homo sapiens
tctgacccatttccccattcattggctccttcagtcggaatgtcagagcggggagaacaggaaagggaggctgagaggccacactcttaattctgctggagtttggggtggagttggtgtgaattttgatgagtcccacgcattgggtcagaccaaagatgagggatcattggaggcctctgtttgtccctgttcccctaactgagagctccccgaggaattttagttcagtgagatctttattcctacctctttaggatccaacttcgtttctgcccccggggaaaagcctttcgatttgagctagctttttccttttttcccaggccagttatagtttttatgtgatgggatggaaaaagtatcccagtcgcgaaacttgcctgacctgcagaaatgtgtagtcgtgcctggtgctgtttgaacgggatcttttccttttgcaggcgggagggttcgaggccaatgatgggagaccaccgggatgggcaggtgagtagagccccgatgccaagccctggggccactgtactgctgtgcaggcatagcggaccatttctagccaggcggccgc

SEQ ID NO: 84439 - DNA, 424 bp, Homo sapiens
  misc_feature (20)..(20): n is a, c, g, or t
tcgagctcgcgtactgtganagcacacccatttcagactaattttctggtaggtattcagttttagcacataatcatatttttagttttgttctctttcgtttttttcctgtatgagtaacattaacttttgtctctagctcttttaaggaagaaaaagatataaagccaatcattaaagatgaaaaaggtatgatttaatttaacgtggtagggagccaggtatggttcccttattttgggaggaggggcctggagatatacacactttggattcagtaatttgttttgttatgggttaccggaatcaaccacctaatggtttcttgagagactagttttagaagttcgcaagcacctgcattttatgtttctcttgtggttgtcatctatgggatggtgaaaagcacattacaagaaaggaa

SEQ ID NO: 84440 - DNA, 2936 bp, Homo sapiens
gtacccacctcctaccccacgattgaatggtgattgcattcggttcagcaccttggacattggaaaatcagtcagaagacccagacttgaacaaaaactcgaagaagactattgagaaccagccgcgtggttgtaggtgtttaaatctgtgggggccttttctcttccgtgtagcgtagaggcttacctagaggcggtcgcggcgcaggtagtgtaaccagtataactttgtgtacccgcgggttttccaatctctgtgtagctagcagttctcttcgtgttagtgtggcagccgtgccagttccacatttgtgattgctttatttccctggtaattaaaccttgtgccattctattcctgttaaatccgtagaaaatgagaaaatactcgacattttgggggaaacttgtaaatctgagccagtaaaagaagaaagttccgagctggagcagccatttgcacaggacacaagtagcgtggggccagacagaaagcttgcggaggaagaggacctatttgacagcgcccatccggaagagggtgatttagatttggccagcgagtcaacagcacacgctcagtcgagcaaggcagacagcctgttagcggtagtgaaaagggagcccgcggagcagccaggcgatggcgagaggacggactgtgagcctgtagggctagagccggcagttgagcagagtagtgcggcctccgagctcgcggaggcctctagcgaggagctcgcagaagcacccacggaagccccaagcccagaagccagagatagcaaagaagacgggaggaagtttgattttgacgcttgtaatgaagtccctccggctcctaaagagtcctcaaccagtgagggcgctgatcagaaaatgagctcttttaaggaagaaaaagatataaagccaatcattaaagatgaaaaaggtcgggtcggcagcggttctggtcggaacctgtgggtcagcgggctgtcctccacaacacgcgctacggatctcaagaaccttttcagcaagtatgggaaggttgtcggggccaaagtggtaacgaacgcccgcagcccgggggctcgatgctatggattcgtcaccatgtcgacatctgacgaggcgaccaagtgcatcagccatctccacagaactgagctgcatggacgaatgatctccgtagagaaggccaaaaatgagcctgctgggaaaaagctttccgacagaaaagagtgcgaagtgaagaaggaaaaattatcgagtgtcgacagacatcattctgtggagatcaaaattgaaaaaactgtaattaagaaggaagagaagattgagaagaaggaggaaaaaaagcctgaagacattaagaaggaagaaaaagaccaggatgagctgaaacccggacctacaaatcggtctagagtcaccaaatcaggaagcagaggaatggagcggacggtcgtgatggataaatcgaaaggagagcccgtcattagcgtgaaaaccacaagcaggtccaaagagagaagctccaagagtcaggatcgcaagtcagaaagcaaagaaaagagagacatcttgtcgtttgataaaatcaaagaacaaagggagagagagcgccagaggcagcgggaacgggagatccgcgaaacggagaggcggcgggagcgcgagcagcgggagcgggagcaacgcctcgaggccttccatgagcggaaggagaaggcccggctacagcgggaacgcctgcagctcgagtgccagcgccagcggctggagcgggagcgcatggagcgggagcggctggagcgcgagcgcatgcgcgtggagcgtgagcgcaggaaggagcaggagcgcatccaccgcgagcgcgaggagctgcggcgccagcaggagcagctgcgttacgagcaggagcggcggcccgggcggaggccctacgacctggaccgacgagatgatgcctattggccagaaggaaagcgtgtggcaatggaggaccgatatcgtgcagactttccccggccagaccaccgctttcacgacttcgatcatcgagaccggggccagtaccaggaccacgccatcgacaggcgggagggttcgaggccaatgatgggagaccaccgggatgggcagcactatggagatgaccgccatggccacggaggacccccagagcgccacggccgggactcccgtgatggctgggggggctacggctccgacaagaggctgagtgaaggccgggggctgccccctccccccaggggtggccgtgactggggagagcacaaccagcggctagaggagcaccaggcacgcgcctggcagggtgccatggacgcaggcgcggctagccgggagcacgccaggtggcaaggtggcgagaggggcctgtctgggccctcggggccggggcacatggcaagccgcggtggagtggcggggcgaggcggctttgcacaaggtggacattcccagggccacgtggtgccaggtggcggactggaaggtggcggagtggccagccaggaccggggcagcagagtccctcacccacaccctcatccccccccgtacccccacttcacccgccgctactaagtcccactcgctgcgagttttcgggtgggcagacgcactgttgaatctggtagccagggttccctcgaacttgggggatctttttaaaagcaaagtaaatcctgccaccatgttgtagctcaatacaatgtgaactcactttttttttttttttaaataaatgtgttcttgttctgccatttttaaatcaaggtttctgttaacgaggcattccattttccattaataaagtttaccattcgcaaaaaaaaaatgtgttcttgttctgccatttttaaatcaaggtttctgttaacgaggcattccattttccattaataaagtttaccattcgc

SEQ ID NO: 84441 - DNA, 2752 bp, Homo sapiens
tgttcagagccgctatagctgccggcggtgtgcgactgagtcggtggcgaagacgggaacgcgacgatggcggagactctgcccgggtcgggcgactcgggccctggcacggcttctctcggcccgggcgttgcggagactgggacgaggcggctcagcgagctgcgggtgatcgatctgcgggcggagctgaagaagcggaacctggacacgggcggcaacaagagcgtcctgatggagcggctcaagaaggcggttaaagaagaggggcaagatcctgatgaaattggcatcgagttagaagccaccagcaagaagtcagccaagagatgtgttaaaggactgaagatggaggaggaaggcacagaagataatggcctggaagacgattccagagacgggcaggaggacatggaagcaagtctggagaacctgcagaatatgggcatgatggacatgagtgtgctagacgaaactgaagtggcgaatagcagtgctccagattttggggaggatggcacggacggccttctcgattccttttgtgatagtaaagaatacgtggctgcacagctgagacagctcccggctcagcccccagagcatgctgtggatggggaaggatttaagaacactttggaaacttcatcgttgaacttcaaagtaactccggacattgaagaatcccttttggagccagctcttttaaggaagaaaaagatataaagccaatcattaaagatgaaaaaggtcgggtcggcagcggttctggtcggaacctgtgggtcagcgggctgtcctccacaacacgcgctacggatctcaagaaccttttcagcaagtatgggaaggttgtcggggccaaagtggtaacgaacgcccgcagcccgggggctcgatgctatggattcgtcaccatgtcgacatctgacgaggcgaccaagtgcatcagccatctccacagaactgagctgcatggacgaatgatctccgtagagaaggccaaaaatgagcctgctgggaaaaagctttccgacagaaaagagtgcgaagtgaagaaggaaaaattatcgagtgtcgacagacatcattctgtggagatcaaaattgaaaaaactgtaattaagaaggaagagaagattgagaagaaggaggaaaaaaagcctgaagacattaagaaggaagaaaaagaccaggatgagctgaaacccggacctacaaatcggtctagagtcaccaaatcaggaagcagaggaatggagcggacggtcgtgatggataaatcgaaaggagagcccgtcattagcgtgaaaaccacaagcaggtccaaagagagaagctccaagagtcaggatcgcaagtcagaaagcaaagaaaagagagacatcttgtcgtttgataaaatcaaagaacaaagggagagagagcgccagaggcagcgggaacgggagatccgcgaaacggagaggcggcgggagcgcgagcagcgggagcgggagcaacgcctcgaggccttccatgagcggaaggagaaggcccggctacagcgggaacgcctgcagctcgagtgccagcgccagcggctggagcgggagcgcatggagcgggagcggctggagcgcgagcgcatgcgcgtggagcgtgagcgcaggaaggagcaggagcgcatccaccgcgagcgcgaggagctgcggcgccagcaggagcagctgcgttacgagcaggagcggcggcccgggcggaggccctacgacctggaccgacgagatgatgcctattggccagaaggaaagcgtgtggcaatggaggaccgatatcgtgcagactttccccggccagaccaccgctttcacgacttcgatcatcgagaccggggccagtaccaggaccacgccatcgacaggcgggagggttcgaggccaatgatgggagaccaccgggatgggcagcactatggagatgaccgccatggccacggaggacccccagagcgccacggccgggactcccgtgatggctgggggggctacggctccgacaagaggctgagtgaaggccgggggctgccccctccccccaggggtggccgtgactggggagagcacaaccagcggctagaggagcaccaggcacgcgcctggcagggtgccatggacgcaggcgcggctagccgggagcacgccaggtggcaaggtggcgagaggggcctgtctgggccctcggggccggggcacatggcaagccgcggtggagtggcggggcgaggcggctttgcacaaggtggacattcccagggccacgtggtgccaggtggcggactggaaggtggcggagtggccagccaggaccggggcagcagagtccctcacccacaccctcatccccccccgtacccccacttcacccgccgctactaagtcccactcgctgcgagttttcgggtgggcagacgcactgttgaatctggtagccagggttccctcgaacttgggggatctttttaaaagcaaagtaaatcctgccaccatgttgtagctcaatacaatgtgaactcactttttttttttttttaaataaatgtgttcttgttctgccatttttaaatcaaggtttctgttaacgaggcattccattttccattaataaagtttaccattcgcaaaaaaaaaatgtgttcttgttctgccatttttaaatcaaggtttctgttaacgaggcattccattttccattaataaagtttaccattcgc

SEQ ID NO: 84442 - DNA, 2032 bp, Homo sapiens
ataactgacatgggcatgattattccttgagtcgggtcggcagcggttctggtcggaacctgtgggtcagcgggctgtcctccacaacacgcgctacggatctcaagaaccttttcagcaagtatgggaaggttgtcggggccaaagtggtaacgaacgcccgcagcccgggggctcgatgctatggattcgtcaccatgtcgacatctgacgaggcgaccaagtgcatcagccatctccacagaactgagctgcatggacgaatgatctccgtagagaaggccaaaaatgagcctgctgggaaaaagctttccgacagaaaagagtgcgaagtgaagaaggaaaaattatcgagtgtcgacagacatcattctgtggagatcaaaattgaaaaaactgtaattaagaaggaagagaagattgagaagaaggaggaaaaaaagcctgaagacattaagaaggaagaaaaagaccaggatgagctgaaacccggacctacaaatcggtctagagtcaccaaatcaggaagcagaggaatggagcggacggtcgtgatggataaatcgaaaggagagcccgtcattagcgtgaaaaccacaagcaggtccaaagagagaagctccaagagtcaggatcgcaagtcagaaagcaaagaaaagagagacatcttgtcgtttgataaaatcaaagaacaaagggagagagagcgccagaggcagcgggaacgggagatccgcgaaacggagaggcggcgggagcgcgagcagcgggagcgggagcaacgcctcgaggccttccatgagcggaaggagaaggcccggctacagcgggaacgcctgcagctcgagtgccagcgccagcggctggagcgggagcgcatggagcgggagcggctggagcgcgagcgcatgcgcgtggagcgtgagcgcaggaaggagcaggagcgcatccaccgcgagcgcgaggagctgcggcgccagcaggagcagctgcgttacgagcaggagcggcggcccgggcggaggccctacgacctggaccgacgagatgatgcctattggccagaaggaaagcgtgtggcaatggaggaccgatatcgtgcagactttccccggccagaccaccgctttcacgacttcgatcatcgagaccggggccagtaccaggaccacgccatcgacaggcgggagggttcgaggccaatgatgggagaccaccgggatgggcagcactatggagatgaccgccatggccacggaggacccccagagcgccacggccgggactcccgtgatggctgggggggctacggctccgacaagaggctgagtgaaggccgggggctgccccctccccccaggggtggccgtgactggggagagcacaaccagcggctagaggagcaccaggcacgcgcctggcagggtgccatggacgcaggcgcggctagccgggagcacgccaggtggcaaggtggcgagaggggcctgtctgggccctcggggccggggcacatggcaagccgcggtggagtggcggggcgaggcggctttgcacaaggtggacattcccagggccacgtggtgccaggtggcggactggaaggtggcggagtggccagccaggaccggggcagcagagtccctcacccacaccctcatccccccccgtacccccacttcacccgccgctactaagtcccactcgctgcgagttttcgggtgggcagacgcactgttgaatctggtagccagggttccctcgaacttgggggatctttttaaaagcaaagtaaatcctgccaccatgttgtagctcaatacaatgtgaactcactttttttttttttttaaataaatgtgttcttgttctgccatttttaaatcaaggtttctgttaacgaggcattccattttccattaataaagtttaccattcgcaaaaaaaaaatgtgttcttgttctgccatttttaaatcaaggtttctgttaacgaggcattccattttccattaataaagtttaccattcgc

SEQ ID NO: 84443 - DNA, 2060 bp, Homo sapiens
tggttgtgcttcctgttaggccttggggtgatgcctaagaatctccctctcgtgccaggtcgggtcggcagcggttctggtcggaacctgtgggtcagcgggctgtcctccacaacacgcgctacggatctcaagaaccttttcagcaagtatgggaaggttgtcggggccaaagtggtaacgaacgcccgcagcccgggggctcgatgctatggattcgtcaccatgtcgacatctgacgaggcgaccaagtgcatcagccatctccacagaactgagctgcatggacgaatgatctccgtagagaaggccaaaaatgagcctgctgggaaaaagctttccgacagaaaagagtgcgaagtgaagaaggaaaaattatcgagtgtcgacagacatcattctgtggagatcaaaattgaaaaaactgtaattaagaaggaagagaagattgagaagaaggaggaaaaaaagcctgaagacattaagaaggaagaaaaagaccaggatgagctgaaacccggacctacaaatcggtctagagtcaccaaatcaggaagcagaggaatggagcggacggtcgtgatggataaatcgaaaggagagcccgtcattagcgtgaaaaccacaagcaggtccaaagagagaagctccaagagtcaggatcgcaagtcagaaagcaaagaaaagagagacatcttgtcgtttgataaaatcaaagaacaaagggagagagagcgccagaggcagcgggaacgggagatccgcgaaacggagaggcggcgggagcgcgagcagcgggagcgggagcaacgcctcgaggccttccatgagcggaaggagaaggcccggctacagcgggaacgcctgcagctcgagtgccagcgccagcggctggagcgggagcgcatggagcgggagcggctggagcgcgagcgcatgcgcgtggagcgtgagcgcaggaaggagcaggagcgcatccaccgcgagcgcgaggagctgcggcgccagcaggagcagctgcgttacgagcaggagcggcggcccgggcggaggccctacgacctggaccgacgagatgatgcctattggccagaaggaaagcgtgtggcaatggaggaccgatatcgtgcagactttccccggccagaccaccgctttcacgacttcgatcatcgagaccggggccagtaccaggaccacgccatcgacaggcgggagggttcgaggccaatgatgggagaccaccgggatgggcagcactatggagatgaccgccatggccacggaggacccccagagcgccacggccgggactcccgtgatggctgggggggctacggctccgacaagaggctgagtgaaggccgggggctgccccctccccccaggggtggccgtgactggggagagcacaaccagcggctagaggagcaccaggcacgcgcctggcagggtgccatggacgcaggcgcggctagccgggagcacgccaggtggcaaggtggcgagaggggcctgtctgggccctcggggccggggcacatggcaagccgcggtggagtggcggggcgaggcggctttgcacaaggtggacattcccagggccacgtggtgccaggtggcggactggaaggtggcggagtggccagccaggaccggggcagcagagtccctcacccacaccctcatccccccccgtacccccacttcacccgccgctactaagtcccactcgctgcgagttttcgggtgggcagacgcactgttgaatctggtagccagggttccctcgaacttgggggatctttttaaaagcaaagtaaatcctgccaccatgttgtagctcaatacaatgtgaactcactttttttttttttttaaataaatgtgttcttgttctgccatttttaaatcaaggtttctgttaacgaggcattccattttccattaataaagtttaccattcgcaaaaaaaaaatgtgttcttgttctgccatttttaaatcaaggtttctgttaacgaggcattccattttccattaataaagtttaccattcgc

SEQ ID NO: 84444 - DNA, 2049 bp, Homo sapiens
  misc_feature (1253)..(1254): n is a, c, g, or t
tgttcagagccgctatagctgccggcggtgtgcgactgagtcggtggcgaagacgggaacgcgacgatggcggagactctgcccgggtcgggcgactcgggccctggcacggcttctctcggcccgggcgttgcggagactgggacgaggcggctcagcgagctgcgggtgatcgatctgcgggcggagctgaagaagcggaacctggacacgggcggcaacaagagcgtcctgatggagcggctcaagaaggcggttaaagaagaggggcaagatcctgatgaaattggcatcgagttagaagccaccagcaagaagtcagccaagagatgtgttaaaggactgaagatggaggaggaaggcacagaagataatggcctggaagacgattccagagacgggcaggaggacatggaagcaagtctggagaacctgcagaatatgggcatgatggacatgagtgtgctagacgaaactgaagtggcgaatagcagtgctccagattttggggaggatggcacggacggccttctcgattccttttgtgatagtaaagaatacgtggctgcacagctgagacagctcccggctcagcccccagagcatgctgtggatggggaaggatttaagaacactttggaaacttcatcgttgaacttcaaagtaactccggacattgaagaatcccttttggagccagaaaatgagaaaatactcgacattttgggggaaacttgtaaatctgagccagtaaaagaagaaagttccgagctggagcagccatttgcacaggacacaagtagcgtggggccagacagaaagcttgcggaggaagaggacctatttgacagcgcccatccggaagagggtgatttagatttggccagcgagtcaacagcacacgctcagtcgagcaaggcagacagcctgttagcggtagtgaaaagggagcccgcggagcagccaggcgatggcgagaggacggactgtgagcctgtagggctagagccggcagttgagcagagtagtgcggcctccgagctcgcggaggcctctagcgaggagctcgcagaagcacccacggaagccccaagcccagaagccagagatagcaaagaagacgggaggaagtttgattttgacgcttgtaatgaagtccctccggctcctaaagagtcctcaaccagtgagggcgctgatcagaaaatgagttctcccgaagatgactcgtgatacagaaaaggctttccaanngaggaaagagggtcgcaggagttgtggtagaaatttactgggttagtggactctcttcctacagagccagagactactagtatttgaaggaatcttagtgcaggcaaagtagtgggaaggtggtgggccgccgcatagggttgtgaccacagatgtccgggagtcctgacagctcgctgttctggcttcgtccatggatgtccgacagacacgtacagataggccgacttaacatgccttaaccagctggcatcaacagggaggtccatgggacaatgcatgactctgcgtggagaaatgcccataggatgaacctggtgggacctgagaaccctgctgaaaaggagaagaacagtgagcgcggaagacaggagaagtcgaccacacttgggacgatctgcattatcttacgagggtgtgcctacacgcgtgccgagaccaagaccgaaggctcagatacgggggacaaccgaacgcgggacgacaacgctgcggaccacaaagagcggaaaggcggccacctcaggccggagcaacgcgcacaaaacacgaaccgggggccccgcgaagcgcacggatacagcaccggggcaccaccgggaagccatctggagcagcgcccgccccgagcaggacggcaagccccacaagacgccggaggacatgcggcaaggctcagccagaagccaccaagagccaaagaaaaaaccaccgcagcaacgagacagagcccacaacccgcccaacagctccacacccccagatacagcaaacacgagcaaaacagcaacgcac

SEQ ID NO: 84445 - DNA, 1072 bp, Homo sapiens
cgctgtcctcaccggaggctgtgtagcatcttcctgaacttgagttattctgggaaacttgatggctgccacttgctgaaggacgagatgatgcctattggccagaaggaaagcgtgtggcaatggaggaccgatatcgtgcagactttccccggccagaccaccgctttcacgacttcgatcatcgagaccggggccagtaccaggaccacgccatcgacaggcgggagggttcgaggccaatgatgggagaccaccgggatgggcagcactatggagatgaccgccatggccacggaggacccccagagcgccacggccgggactcccgtgatggctgggggggctacggctccgacaagaggctgagtgaaggccgggggctgccccctccccccaggggtggccgtgactggggagagcacaaccagcggctagaggagcaccaggcacgcgcctggcagggtgccatggacgcaggcgcggctagccgggagcacgccaggtggcaaggtggcgagaggggcctgtctgggccctcggggccggggcacatggcaagccgcggtggagtggcggggcgaggcggctttgcacaaggtggacattcccagggccacgtggtgccaggtggcggactggaaggtggcggagtggccagccaggaccggggcagcagagtccctcacccacaccctcatccccccccgtacccccacttcacccgccgctactaagtcccactcgctgcgagttttcgggtgggcagacgcactgttgaatctggtagccagggttccctcgaacttgggggatctttttaaaagcaaagtaaatcctgccaccatgttgtagctcaatacaatgtgaactcactttttttttttttttaaataaatgtgttcttgttctgccatttttaaatcaaggtttctgttaacgaggcattccattttccattaataaagtttaccattcgcaaaaaaaaaatgtgttcttgttctgccatttttaaatcaaggtttctgttaacgaggcattccattttccattaataaagtttaccattcgc

SEQ ID NO: 84446 - DNA, 1295 bp, Homo sapiens
tctgacccatttccccattcattggctccttcagtcggaatgtcagagcggggagaacaggaaagggaggctgagaggccacactcttaattctgctggagtttggggtggagttggtgtgaattttgatgagtcccacgcattgggtcagaccaaagatgagggatcattggaggcctctgtttgtccctgttcccctaactgagagctccccgaggaattttagttcagtgagatctttattcctacctctttaggatccaacttcgtttctgcccccggggaaaagcctttcgatttgagctagctttttccttttttcccaggccagttatagtttttatgtgatgggatggaaaaagtatcccagtcgcgaaacttgcctgacctgcagaaatgtgtagtcgtgcctggtgctgtttgaacgggatcttttccttttgcaggcgggagggttcgaggccaatgatgggagaccaccgggatgggcagcactatggagatgaccgccatggccacggaggacccccagagcgccacggccgggactcccgtgatggctgggggggctacggctccgacaagaggctgagtgaaggccgggggctgccccctccccccaggggtggccgtgactggggagagcacaaccagcggctagaggagcaccaggcacgcgcctggcagggtgccatggacgcaggcgcggctagccgggagcacgccaggtggcaaggtggcgagaggggcctgtctgggccctcggggccggggcacatggcaagccgcggtggagtggcggggcgaggcggctttgcacaaggtggacattcccagggccacgtggtgccaggtggcggactggaaggtggcggagtggccagccaggaccggggcagcagagtccctcacccacaccctcatccccccccgtacccccacttcacccgccgctactaagtcccactcgctgcgagttttcgggtgggcagacgcactgttgaatctggtagccagggttccctcgaacttgggggatctttttaaaagcaaagtaaatcctgccaccatgttgtagctcaatacaatgtgaactcactttttttttttttttaaataaatgtgttcttgttctgccatttttaaatcaaggtttctgttaacgaggcattccattttccattaataaagtttaccattcgcaaaaaaaaaatgtgttcttgttctgccatttttaaatcaaggtttctgttaacgaggcattccattttccattaataaagtttaccattcgc

SEQ ID NO: 84447 - DNA, 1407 bp, Homo sapiens
tgttcagagccgctatagctgccggcggtgtgcgactgagtcggtggcgaagacgggaacgcgacgatggcggagactctgcccgggtcgggcgactcgggccctggcacggcttctctcggcccgggcgttgcggagactgggacgaggcggctcagcgagctgcgggtgatcgatctgcgggcggagctgaagaagcggaacctggacacgggcggcaacaagagcgtcctgatggagcggctcaagaaggcggttaaagaagaggggcaagatcctgatgaaattggcatcgagttagaagccaccagcaagaagtcagccaagagatgtgttaaaggactgaagatggaggaggaaggcacagaagataatggcctggaagacgattccagagacgggcaggaggacatggaagcaagtctggagaacctgcagaatatgggcatgatggacatgagtgtgctagacgaaactgaagtggcgaatagcagtgctccagattttggggaggatggcacggacggccttctcgattccttttgtgatagtaaagaatacgtggctgcacagctgagacagctcccggctcagcccccagagcatgctgtggatggggaaggatttaagaacactttggaaacttcatcgttgaacttcaaagtaactccggacattgaagaatcccttttggagccagaaaatgagaaaatactcgacattttgggggaaacttgtaaatctgagccagtaaaagaagaaagttccgagctggagcagccatttgcacaggacacaagtagcgtggggccagacagaaagcttgcggaggaagaggacctatttgacagcgcccatccggaagagggtgatttagatttggccagcgagtcaacagcacacgctcagtcgagcaaggcagacagcctgttagcggtagtgaaaagggagcccgcggagcagccaggcgatggcgagaggacggactgtgagcctgtagggctagagccggcagttgagcagagtagtgcggcctccgagctcgcggaggcctctagcgaggagctcgcagaagcacccacggaagccccaagcccagaagccagagatagcaaagaagacgggaggaagtttgattttgacgcttgtaatgaagtccctccggctcctaaagagtcctcaaccagtgagggcgctgatcagaaaatgaggttgttttttctcagttttagaccagacgctatctccttttcattggtcatgtaatgacacacataagctgtttttttctgcaattggccagccagactgacgaaattgtagttttgcttctaaagaatgtttcgtttctctttgtgtgtttttaatgggtgattcaattccttttctttttctcaacctaccatg

SEQ ID NO: 84448 - DNA, 786 bp, Homo sapiens
cccacagcaggcaggcactcgtgcagatgggtctggctgctttcctgcacggccactgtgactgcttggccacttgggactcaggacactggactcggattttcatctcccagagggtggccgtgactggggagagcacaaccagcggctagaggagcaccaggcacgcgcctggcagggtgccatggacgcaggcgcggctagccgggagcacgccaggtggcaaggtggcgagaggggcctgtctgggccctcggggccggggcacatggcaagccgcggtggagtggcggggcgaggcggctttgcacaaggtggacattcccagggccacgtggtgccaggtggcggactggaaggtggcggagtggccagccaggaccggggcagcagagtccctcacccacaccctcatccccccccgtacccccacttcacccgccgctactaagtcccactcgctgcgagttttcgggtgggcagacgcactgttgaatctggtagccagggttccctcgaacttgggggatctttttaaaagcaaagtaaatcctgccaccatgttgtagctcaatacaatgtgaactcactttttttttttttttaaataaatgtgttcttgttctgccatttttaaatcaaggtttctgttaacgaggcattccattttccattaataaagtttaccattcgcaaaaaaaaaatgtgttcttgttctgccatttttaaatcaaggtttctgttaacgaggcattccattttccattaataaagtttaccattcgc

SEQ ID NO: 84449 - DNA, 2316 bp, Homo sapiens
tgttcagagccgctatagctgccggcggtgtgcgactgagtcggtggcgaagacgggaacgcgacgatggcggagactctgcccgggtcgggcgactcgggccctggcacggcttctctcggcccgggcgttgcggagactgggacgaggcggctcagcgagctgcgggtgatcgatctgcgggcggagctgaagaagcggaacctggacacgggcggcaacaagagcgtcctgatggagcggctcaagaaggcggttaaagaagaggggcaagatcctgatgaaattggcatcgagttagaagccaccagcaagaagtcagccaagagatgtgttaaaggactgaagatggaggaggaaggcacagaagataatggcctggaagacgattccagagacgggcaggaggacatggaagcaagtctggagaacctgcagaatatgggcatgatggacatgagtgtgctagacgaaactgaagtggcgaatagcagtgctccagattttggggaggatggcacggacggccttctcgattccttttgtgatagtaaagaatacgtggctgcacagctgagacagctcccggctcagcccccagagcatgctgtggatggggaaggatttaagaacactttggaaacttcatcgttgaacttcaaagtaactccggacattgaagaatcccttttggagccaggtactgataagagaaacacgacagttatggtttgaaagttttcacactattattttaaagctgtctatattttaagctgtgttatgatcttgtaaattgctctaatggtggacaatccagatcatacaaggatcagagattggaaacccattcgtatcaccagatctgtggaagagccattctggcttcttgaggtcaaatacatttggtgcaatgtagtagtgattcttttcatgtctaaccacgtagagtggcatttaattcccccgtccccgtgattcctccatgtgtttctacacatgaaacagatcttgtgatattttgctgcagtcattttgattaacgcagttaaggcaggataaagctgttgtcagggcacttaccacctgagaagtgactggattccagaagaggaaacagagtttctccgtgaaaattttcaacatattattccccttccggactgcgtttatctcccaccgtcagaagagattctgattttcatattggattgttctgttaaaagaaattcaaagaaatttggaagttgagctgtcattgaatggtgattgcattcggttcagcaccttggacattggaaaatcagtcagaagacccagacttgaacaaaaactcgaagaagactattgagaaccagccgcgtggttgtaggtgtttaaatctgtgggggccttttctcttccgtgtagcgtagaggcttacctagaggcggtcgcggcgcaggtagtgtaaccagtataactttgtgtacccgcgggttttccaatctctgtgtagctagcagttctcttcgtgttagtgtggcagccgtgccagttccacatttgtgattgctttatttccctggtaattaaaccttgtgccattctattcctgttaaatccgtagaaaatgagaaaatactcgacattttgggggaaacttgtaaatctgagccagtaaaagaagaaagttccgagctggagcagccatttgcacaggacacaagtagcgtggggccagacagaaagcttgcggaggaagaggacctatttgacagcgcccatccggaagagggtgatttagatttggccagcgagtcaacagcacacgctcagtcgagcaaggcagacagcctgttagcggtagtgaaaagggagcccgcggagcagccaggcgatggcgagaggacggactgtgagcctgtagggctagagccggcagttgagcagagtagtgcggcctccgagctcgcggaggcctctagcgaggagctcgcagaagcacccacggaagccccaagcccagaagccagagatagcaaagaagacgggaggaagtttgattttgacgcttgtaatgaagtccctccggctcctaaagagtcctcaaccagtgagggcgctgatcagaaaatgaggttgttttttctcagttttagaccagacgctatctccttttcattggtcatgtaatgacacacataagctgtttttttctgcaattggccagccagactgacgaaattgtagttttgcttctaaagaatgtttcgtttctctttgtgtgtttttaatgggtgattcaattccttttctttttctcaacctaccatg

SEQ ID NO: 84450 - DNA, 1367 bp, Homo sapiens
  misc_feature (1367)..(1367): n is a, c, g, or t
tgttcagagccgctatagctgccggcggtgtgcgactgagtcggtggcgaagacgggaacgcgacgatggcggagactctgcccgggtcgggcgactcgggccctggcacggcttctctcggcccgggcgttgcggagactgggacgaggcggctcagcgagctgcgggtgatcgatctgcgggcggagctgaagaagcggaacctggacacgggcggcaacaagagcgtcctgatggagcggctcaagaaggcggttaaagaagaggggcaagatcctgatgaaattggcatcgagttagaagccaccagcaagaagtcagccaagagatgtgttaaaggactgaagatggaggaggaaggcacagaagataatggcctggaagacgattccagagacgggcaggaggacatggaagcaagtctggagaacctgcagaatatgggcatgatggacatgagtgtgctagacgaaactgaagtggcgaatagcagtgctccagattttggggaggatggcacggacggccttctcgattccttttgtgatagtaaagaatacgtggctgcacagctgagacagctcccggctcagcccccagagcatgctgtggatggggaaggatttaagaacactttggaaacttcatcgttgaacttcaaagtaactccggacattgaagaatcccttttggagccagctcttttaaggaagaaaaagatataaagccaatcattaaagatgaaaaaggtcgggtcggcagcggttctggtcggaacctgtgggtcagcgggctgtcctccacaacacgcgctacggatctcaagaaccttttcagcaagtatgggaaggttgtcggggccaaagtggtaacgaacgcccgcagcccgggggctcgatgctatggattcgtcaccatgtcgacatctgacgaggcgaccaagtgcatcagccatctccacagaactgagctgcatggacgaatgatctccgtagagaaggccaaaaatgagcctgctgggaaaaagctttccgacagaaaagagtgcgaagaaaaaaaaaaaaaaaaaaaaaaaaaaaacacgtggggggcacggccagggcccccgaaaaaagctctagaaaacacaccaggaggagacgaaggagcccaaagaggagaaaggaacaagggacaacacgtgtaccaagaagaaaccggggaaaagaaaagggcaagaaactcaccaacagataaaaaaaaaccgcgggggaaaaacacgagaaggtcagagaaagatccaagagagagaccaaagaagagcaaacaggagaacccaaaaaggaggaccagaaagaccgaatcaaatacccgggcagggaagagn

SEQ ID NO: 84451 - DNA, 303 bp, Homo sapiens
gatcagctggctgggttggatgttatgaaaacaaagcaaaaagcagctctttgcaatttatgcaaataacgctcttgagttacctggaatacaatgtgcgatgatgatttttctcacctggaaaaaaaacccaagcgctctaaaggctgcgggaccgttactgaacccatgttacgatgaaaacgctgagcacttcaaggggaaaaaaattgtctgactttgttcctaggcgaggcggctttgcacaaggtggacattcccagggccacgtggtgccaggtggcggactggaaggtggcggag

SEQ ID NO: 84452 - DNA, 302 bp, Homo sapiens
atccccccccgtacccccacttcacccgccgctactaagtcccactcgctgcgagttttcgggtgggcagacgcactgttgaatctggtagccagggttccctcgaacttgggggatctttttaaaagcaaagtaaatcctgccaccatgttgtagctcaatacaatgtgaactcactttttttttttttttaaataaatgtgttcttgttctgccatttttaaatcaaggtttctgttaacgaggcattccattttccattaataaagtttaccattcgcagtcttgcgtgcgcgtgcaca

SEQ ID NO: 84453 - DNA, 3118 bp, Homo sapiens
tgttcagagccgctatagctgccggcggtgtgcgactgagtcggtggcgaagacgggaacgcgacgatggcggagactctgcccgggtcgggcgactcgggccctggcacggcttctctcggcccgggcgttgcggagactgggacgaggcggctcagcgagctgcgggtgatcgatctgcgggcggagctgaagaagcggaacctggacacgggcggcaacaagagcgtcctgatggagcggctcaagaaggcggttaaagaagaggggcaagatcctgatgaaattggcatcgagttagaagccaccagcaagaagtcagccaagagatgtgttaaaggactgaagatggaggaggaaggcacagaagataatggcctggaagacgattccagagacgggcaggaggacatggaagcaagtctggagaacctgcagaatatgggcatgatggacatgagtgtgctagacgaaactgaagtggcgaatagcagtgctccagattttggggaggatggcacggacggccttctcgattccttttgtgatagtaaagaatacgtggctgcacagctgagacagctcccggctcagcccccagagcatgctgtggatggggaaggatttaagaacactttggaaacttcatcgttgaacttcaaagtaactccggacattgaagaatcccttttggagccagaaaatgagaaaatactcgacattttgggggaaacttgtaaatctgagccagtaaaagaagaaagttccgagctggagcagccatttgcacaggacacaagtagcgtggggccagacagaaagcttgcggaggaagaggacctatttgacagcgcccatccggaagagggtgatttagatttggccagcgagtcaacagcacacgctcagtcgagcaaggcagacagcctgttagcggtagtgaaaagggagcccgcggagcagccaggcgatggcgagaggacggactgtgagcctgtagggctagagccggcagttgagcagagtagtgcggcctccgagctcgcggaggcctctagcgaggagctcgcagaagcacccacggaagccccaagcccagaagccagagatagcaaagaagacgggaggaagtttgattttgacgcttgtaatgaagtccctccggctcctaaagagtcctcaaccagtgagggcgctgatcagaaaatgagctcttttaaggaagaaaaagatataaagccaatcattaaagatgaaaaaggtcgggtcggcagcggttctggtcggaacctgtgggtcagcgggctgtcctccacaacacgcgctacggatctcaagaaccttttcagcaagtatgggaaggttgtcggggccaaagtggtaacgaacgcccgcagcccgggggctcgatgctatggattcgtcaccatgtcgacatctgacgaggcgaccaagtgcatcagccatctccacagaactgagctgcatggacgaatgatctccgtagagaaggccaaaaatgagcctgctgggaaaaagctttccgacagaaaagagtgcgaagtgaagaaggaaaaattatcgagtgtcgacagacatcattctgtggagatcaaaattgaaaaaactgtaattaagaaggaagagaagattgagaagaaggaggaaaaaaagcctgaagacattaagaaggaagaaaaagaccaggatgagctgaaacccggacctacaaatcggtctagagtcaccaaatcaggaagcagaggaatggagcggacggtcgtgatggataaatcgaaaggagagcccgtcattagcgtgaaaaccacaagcaggtccaaagagagaagctccaagagtcaggatcgcaagtcagaaagcaaagaaaagagagacatcttgtcgtttgataaaatcaaagaacaaagggagagagagcgccagaggcagcgggaacgggagatccgcgaaacggagaggcggcgggagcgcgagcagcgggagcgggagcaacgcctcgaggccttccatgagcggaaggagaaggcccggctacagcgggaacgcctgcagctcgagtgccagcgccagcggctggagcgggagcgcatggagcgggagcggctggagcgcgagcgcatgcgcgtggagcgtgagcgcaggaaggagcaggagcgcatccaccgcgagcgcgaggagctgcggcgccagcaggagcagctgcgttacgagcaggagcggcggcccgggcggaggccctacgacctggaccgacgagatgatgcctattggccagaaggaaagcgtgtggcaatggaggaccgatatcgtgcagactttccccggccagaccaccgctttcacgacttcgatcatcgagaccggggccagtaccaggaccacgccatcgacaggcgggagggttcgaggccaatgatgggagaccaccgggatgggcagcactatggagatgaccgccatggccacggaggacccccagagcgccacggccgggactcccgtgatggctgggggggctacggctccgacaagaggctgagtgaaggccgggggctgccccctccccccaggggtggccgtgactggggagagcacaaccagcggctagaggagcaccaggcacgcgcctggcagggtgccatggacgcaggcgcggctagccgggagcacgccaggtggcaaggtggcgagaggggcctgtctgggccctcggggccggggcacatggcaagccgcggtggagtggcggggcgaggcggctttgcacaaggtggacattcccagggccacgtggtgccaggtggcggactggaaggtggcggagtggccagccaggaccggggcagcagagtccctcacccacaccctcatccccccccgtacccccacttcacccgccgctactaagtcccactcgctgcgagttttcgggtgggcagacgcactgttgaatctggtagccagggttccctcgaacttgggggatctttttaaaagcaaagtaaatcctgccaccatgttgtagctcaatacaatgtgaactcactttttttttttttttaaataaatgtgttcttgttctgccatttttaaatca

SEQ ID NO: 84454 - DNA, 2542 bp, Homo sapiens
tgttcagagccgctatagctgccggcggtgtgcgactgagtcggtggcgaagacgggaacgcgacgatggcggagactctgcccgggtcgggcgactcgggccctggcacggcttctctcggcccgggcgttgcggagactgggacgaggcggctcagcgagctgcgggtgatcgatctgcgggcggagctgaagaagcggaacctggacacgggcggcaacaagagcgtcctgatggagcggctcaagaaggcggttaaagaagaggggcaagatcctgatgaaattggcatcgagttagaagccaccagcaagaagtcagccaagagatgtgttaaaggactgaagatggaggaggaaggcacagaagataatggcctggaagacgattccagagacgggcaggaggacatggaagcaagtctggagaacctgcagaatatgggcatgatggacatgagtgtgctagacgaaactgaagtggcgaatagcagtgctccagattttggggaggatggcacggacggccttctcgattccttttgtgatagtaaagaatacgtggctgcacagctgagacagctcccggctcagcccccagagcatgctgtggatggggaaggatttaagaacactttggaaacttcatcgttgaacttcaaagtaactccggacattgaagaatcccttttggagccagaaaatgagaaaatactcgacattttgggggaaacttgtaaatctgagccagtaaaagaagaaagttccgagctggagcagccatttgcacaggacacaagtagcgtggggccagacagaaagcttgcggaggaagaggacctatttgacagcgcccatccggaagagggtgatttagatttggccagcgagtcaacagcacacgctcagtcgagcaaggcagacagcctgttagcggtagtgaaaagggagcccgcggagcagccaggcgatggcgagaggacggactgtgagcctgtagggctagagccggcagttgagcagagtagtgcggcctccgagctcgcggaggcctctagcgaggagctcgcagaagcacccacggaagccccaagcccagaagccagagatagcaaagaagacgggaggaagtttgattttgacgcttgtaatgaagtccctccggctcctaaagagtcctcaaccagtgagggcgctgatcagaaaatgagctcttttaaggaagaaaaagatataaagccaatcattaaagatgaaaaaggtcgggtcggcagcggttctggtcggaacctgtgggtcagcgggctgtcctccacaacacgcgctacggatctcaagaaccttttcagcaagtatgggaaggttgtcggggccaaagtggtaacgaacgcccgcagcccgggggctcgatgctatggattcgtcaccatgtcgacatctgacgaggcgaccaagtgcatcagccatctccacagaactgagctgcatggacgaatgatctccgtagagaaggccaaaaatgagcctgctgggaaaaagctttccgacagaaaagagtgcgaagtgaagaaggaaaaattatcgagtgtcgacagacatcattctgtggagatcaaaattgaaaaaactgtaattaagaaggaagagaagattgagaagaaggaggaaaaaaagcctgaagacattaagaaggaagaaaaagaccaggatgagctgaaacccggacctacaaatcggtctagagtcaccaaatcaggaagcagaggaatggagcggacggtcgtgatggataaatcgaaaggagagcccgtcattagcgtgaaaaccacaagcaggtccaaagagagaagctccaagagtcaggatcgcaagtcagaaagcaaagaaaagagagacatcttgtcgtttgataaaatcaaagaacaaagggagagagagcgccagaggcagcgggaacgggagatccgcgaaacggagaggcggcgggagcgcgagcagcgggagcgggagcaacgcctcgaggccttccatgagcggaaggagaaggcccggctacagcgggaacgcctgcagctcgagtgccagcgccagcggctggagcgggagcgcatggagcgggagcggctggagcgcgagcgcatgcgcgtggagcgtgagcgcaggaaggagcaggagcgcatccaccgcgagcgcgaggagctgcggcgccagcaggagcagctgcgttacgagcaggagcggcggcccgggcggaggccctacgacctggaccgacgagatgatgcctattggccagaaggaaagcgtgtggcaatggaggaccgatatcgtgcagactttccccggccagaccaccgctttcacgacttcgatcatcgagaccggggccagtaccaggaccacgccatcgacaggcgggagggttcgaggccaatgatgggagaccaccgggatgggcaggtgagtagagccccgatgccaagccctggggccactgtactgctgtgcaggcatagcggaccatttctagccaggcggccgc

SEQ ID NO: 84455 - DNA, 4172 bp, Homo sapiens
tgttcagagccgctatagctgccggcggtgtgcgactgagtcggtggcgaagacgggaacgcgacgatggcggagactctgcccgggtcgggcgactcgggccctggcacggcttctctcggcccgggcgttgcggagactgggacgaggcggctcagcgagctgcgggtgatcgatctgcgggcggagctgaagaagcggaacctggacacgggcggcaacaagagcgtcctgatggagcggctcaagaaggcggttaaagaagaggggcaagatcctgatgaaattggcatcgagttagaagccaccagcaagaagtcagccaagagatgtgttaaaggactgaagatggaggaggaaggcacagaagataatggcctggaagacgattccagagacgggcaggaggacatggaagcaagtctggagaacctgcagaatatgggcatgatggacatgagtgtgctagacgaaactgaagtggcgaatagcagtgctccagattttggggaggatggcacggacggccttctcgattccttttgtgatagtaaagaatacgtggctgcacagctgagacagctcccggctcagcccccagagcatgctgtggatggggaaggatttaagaacactttggaaacttcatcgttgaacttcaaagtaactccggacattgaagaatcccttttggagccaggtactgataagagaaacacgacagttatggtttgaaagttttcacactattattttaaagctgtctatattttaagctgtgttatgatcttgtaaattgctctaatggtggacaatccagatcatacaaggatcagagattggaaacccattcgtatcaccagatctgtggaagagccattctggcttcttgaggtcaaatacatttggtgcaatgtagtagtgattcttttcatgtctaaccacgtagagtggcatttaattcccccgtccccgtgattcctccatgtgtttctacacatgaaacagatcttgtgatattttgctgcagtcattttgattaacgcagttaaggcaggataaagctgttgtcagggcacttaccacctgagaagtgactggattccagaagaggaaacagagtttctccgtgaaaattttcaacatattattccccttccggactgcgtttatctcccaccgtcagaagagattctgattttcatattggattgttctgttaaaagaaattcaaagaaatttggaagttgagctgtcattgaatggtgattgcattcggttcagcaccttggacattggaaaatcagtcagaagacccagacttgaacaaaaactcgaagaagactattgagaaccagccgcgtggttgtaggtgtttaaatctgtgggggccttttctcttccgtgtagcgtagaggcttacctagaggcggtcgcggcgcaggtagtgtaaccagtataactttgtgtacccgcgggttttccaatctctgtgtagctagcagttctcttcgtgttagtgtggcagccgtgccagttccacatttgtgattgctttatttccctggtaattaaaccttgtgccattctattcctgttaaatccgtagaaaatgagaaaatactcgacattttgggggaaacttgtaaatctgagccagtaaaagaagaaagttccgagctggagcagccatttgcacaggacacaagtagcgtggggccagacagaaagcttgcggaggaagaggacctatttgacagcgcccatccggaagagggtgatttagatttggccagcgagtcaacagcacacgctcagtcgagcaaggcagacagcctgttagcggtagtgaaaagggagcccgcggagcagccaggcgatggcgagaggacggactgtgagcctgtagggctagagccggcagttgagcagagtagtgcggcctccgagctcgcggaggcctctagcgaggagctcgcagaagcacccacggaagccccaagcccagaagccagagatagcaaagaagacgggaggaagtttgattttgacgcttgtaatgaagtccctccggctcctaaagagtcctcaaccagtgagggcgctgatcagaaaatgagctcttttaaggaagaaaaagatataaagccaatcattaaagatgaaaaaggtcgggtcggcagcggttctggtcggaacctgtgggtcagcgggctgtcctccacaacacgcgctacggatctcaagaaccttttcagcaagtatgggaaggttgtcggggccaaagtggtaacgaacgcccgcagcccgggggctcgatgctatggattcgtcaccatgtcgacatctgacgaggcgaccaagtgcatcagccatctccacagaactgagctgcatggacgaatgatctccgtagagaaggccaaaaatgagcctgctgggaaaaagctttccgacagaaaagagtgcgaagtgaagaaggaaaaattatcgagtgtcgacagacatcattctgtggagatcaaaattgaaaaaactgtaattaagaaggaagagaagattgagaagaaggaggaaaaaaagcctgaagacattaagaaggaagaaaaagaccaggatgagctgaaacccggacctacaaatcggtctagagtcaccaaatcaggaagcagaggaatggagcggacggtcgtgatggataaatcgaaaggagagcccgtcattagcgtgaaaaccacaagcaggtccaaagagagaagctccaagagtcaggatcgcaagtcagaaagcaaagaaaagagagacatcttgtcgtttgataaaatcaaagaacaaagggagagagagcgccagaggcagcgggaacgggagatccgcgaaacggagaggcggcgggagcgcgagcagcgggagcgggagcaacgcctcgaggccttccatgagcggaaggagaaggcccggctacagcgggaacgcctgcagctcgagtgccagcgccagcggctggagcgggagcgcatggagcgggagcggctggagcgcgagcgcatgcgcgtggagcgtgagcgcaggaaggagcaggagcgcatccaccgcgagcgcgaggagctgcggcgccagcaggagcagctgcgttacgagcaggagcggcggcccgggcggaggccctacgacctggaccgacgagatgatgcctattggccagaaggaaagcgtgtggcaatggaggaccgatatcgtgcagactttccccggccagaccaccgctttcacgacttcgatcatcgagaccggggccagtaccaggaccacgccatcgacaggcgggagggttcgaggccaatgatgggagaccaccgggatgggcagcactatggagatgaccgccatggccacggaggacccccagagcgccacggccgggactcccgtgatggctgggggggctacggctccgacaagaggctgagtgaaggccgggggctgccccctccccccaggggtggccgtgactggggagagcacaaccagcggctagaggagcaccaggcacgcgcctggcagggtgccatggacgcaggcgcggctagccgggagcacgccaggtggcaaggtggcgagaggggcctgtctgggccctcggggccggggcacatggcaagccgcggtggagtggcggggcgaggcggctttgcacaaggtggacattcccagggccacgtggtgccaggtggcggactggaaggtggcggagtggccagccaggaccggggcagcagagtccctcacccacaccctcatccccccccgtacccccacttcacccgccgctactaagtcccactcgctgcgagttttcgggtgggcagacgcactgttgaatctggtagccagggttccctcgaacttgggggatctttttaaaagcaaagtaaatcctgccaccatgttgtagctcaatacaatgtgaactcactttttttttttttttaaataaatgtgttcttgttctgccatttttaaatcaaggtttctgttaacgaggcattccattttccattaataaagtttaccattcgcaaaaaaaaaatgtgttcttgttctgccatttttaaatcaaggtttctgttaacgaggcattccattttccattaataaagtttaccattcgc

SEQ ID NO: 84456 - DNA, 151 bp, Homo sapiens
atgacatatacattgtatggctgatgactttgtgcatttctaatttattccatgaccccacttgtttaatttgtttggattaactatatgctatttgtttgtactgagattttgttttatttttttaattacaggttatttgtaaaagact

SEQ ID NO: 84457 - DNA, 671 bp, Homo sapiens
atttgagcagacttgaagaggagagaaactgagacacgcagggcttgtggtccctgacaaggaggaccctgagggcaaccacaccttgccatgcagagcacctggcttctcatctgccaagctcactctgacccggctgcaggaagggaaggagccaaccccggactcaagactcaaggggaccagaaccagggagatgagacataccagggctgggcagctgtgggggtccttccagagaggagctgagatacgcctacctggaggggcccctgggcctggaggggctcctcagtgtgactgggtgaagtgttttcagaggaccagggttgaggttgggggcatctcatccagaccctgccggcatctgccccagaacccaagggcccctccttcctccctcctcaatggaaatgctggagatgtcctcagtcaccctctgagcactcacacatcaccccttatttggaaatttttctcactctaaccttccttcctgccgcaccttctgccccatccccaggctctggcctctctctctcctcttctaccctttagcaggtaatgactcagttcccactgaggagccagctgtaggtgagagtttgggctctcggtgaggttgggagaaggaaaaggcttatgggccagggggtgggagggagaatggg

SEQ ID NO: 84458 - DNA, 234 bp, Homo sapiens
ccaaaaccaccaacctctcatcttctaagtgactccatcaccaccggccaccgggacctgcggcctcattgctccagcccgccccactcgaccgtcagactcgctcatcgaactctttttgattaaccctttctgtgttcatcccacggaaaactgtgtgtccggcaggggggaggggggaggctaggggcagttgctacctttcctccatctcctcccaccacccatgcctcc

SEQ ID NO: 84459 - DNA, 429 bp, Homo sapiens
ggtgagccagatacagtggctcacacctgttattagcaacactttggaaggccaaggcaggaggaggaggatcgggtgagcccagaagttcaagaccagcctgggcaacagagcaagattctgtctctaagaaaaggaaaaagaaaatgaatagatagtggtattagatgttaatgacatcagttgtttttattctttattctttcttagaaacagattagttttctcgaattaaagaactaccatttttcttttttctacaactttcaagagctggtgaagaaatgatgtttagatttaatagatatagtagcagtcatatattaatagaatagaaactgagactctaggaaaaagatagacatgagataaggagtaggcatggtagacatttctagattatttatgaaaatgttgtagaattcattt

SEQ ID NO: 84460 - DNA, 431 bp, Homo sapiens
agcgggggtttttcatcggggagtgggagtggactgaaggcttggccgctccgcctcactgagccggctcagccagcgcagctgttcctggaacgccagtcccttaggatgggagagagcggagaaggcaaagaggaacagactgggaaagagactggatagattctaatatggtgaaaacatcagaagcagttcagggactaggaagtgggaactctagagatgacagacattctgctgggtggtttttaaagtttcttccagagtcatctgcctcattaacaacaatttttgtggaagaagtctgtctttgattttatgaactcacgtgactccttggtctgttacgaatgcacaatgctccagtccttcaataagcccattacatactttcaccatgtcatctataggtgctttttctccagtgtaaa

SEQ ID NO: 84461 - DNA, 766 bp, Homo sapiens
agcgggggtttttcatcggggagtgggagtggactgaaggcttggccgctccgcctcactgagccggctcagccagcgcagctgttcctggaacgccagtcccttaggatgggagagagcggagaaggcaaagaggaacagactgggaaagagactggatagattctaatatggctacatcctggtgggaggcaggacactgaagtacttagaacccctcagaatggccagatcctgctcatgcttgggctagaagaatggaacctttgtaattctggacttgtaaatggaaacacatcacttactgtgaaccacatcccagacagacatgggcaggtgaaaacaaattcttccagatggcctgacagcacctgtctacagtacagtattgaggcacacaggaccttggaaataaaagggaatattacaaatactgcagagacacaaggattagttgttgtttgtttaagggagaaacatccagaagaaacaattagtaatatttctttactgcttgagtacattttatcatcagatggccaatcatataactgggtttattcaagaaatttttttctgtaaaatataaagtgaatcacctatctaattttgataacagaaagcccagggagcagcagcttaaaccataagagcatatactgtttacctgaagagagagaaggtggttccaaagtgctctccaaagccccatgatgtcaggacatgggtcagcatctctacagctctcctgcttctctctcatggg

SEQ ID NO: 84462 - DNA, 254 bp, Homo sapiens
tgagctggttctcatctagaccaaagtcataagataaagataaagatgcatttacagatttcgagaaagcatacatcagggaaaataaaaaattaacctggcctatctatccagttacctgggtcaaaacctcatttttttttaatttgaaaagtttagtacaaaaaaaagtttaagacatggagagcctgattctccatatagattccctgtcttccagtggcagtagatatttggaggtataaaagtgaaaa

SEQ ID NO: 84463 - DNA, 709 bp, Homo sapiens
attattttacagatgaggaaaatgaggaccagatactaccccactcactatagtagctaaaagttttaaaaatagtgacaacatcaagtgttgacaaagataaggagcagctggaagtctcatacactgctggtaggagttcagccactttggaaaagaattcagcagtttcttataaagttaaacatacacttgccaagtgattcaacaatcctactcctagatattgaccttgatggtcacccaaaaacctctgctttattcatcatcacccataactgctgctttattcataatcacccataactggaacaacccaaatgtccttccacagatgtgtggatgcacaaaccatggcccatccactcaatggaacactactctgcaataaaatccgtggcagtatgggataatttcaaaggaatcctgctgagtgaaagcagctagcctcaaaagattacatgctgtataattccaattcgatgacattctggaaaaggcaaaactgtagtgatggagaacagatctgtgcttgcagatctgtttatagtcacatcagagatgtgactatcaacagcatcagggtgttctttaggatggtggaactgttcagcatcctgactatggtggtggttacataaatgtacacatgtattagaattcatagaactgtatgacaacgacaaaaagtcagtacaaacaatgagga

SEQ ID NO: 84464 - DNA, 552 bp, Homo sapiens
ctgtctctgcagagcctttggcaagttcagcctcctcccaccccggaatgagtgacaatgcacctgcttccttggagagcggcagcagctccacccctactaattgcagtacctcctcggccatcccgcagcccggtgcagccaccaagccttggcgcagcaaatccctcagcgtgaagcacagtgccacggtatccatgctctcggtcaagcctcctgggcctgaggcccccaggcccacacctgaagccatgaagccggcccccaacaatcagaagtccatgctggaaaagctgaaacttttcaacagtaaagggggctcaaaggcaggtgaggggccggggtcccgggacacaagctgtgagcggctggagactctgcccagcttcgaagagagcgaggagctggaggccgccagtcgcatgctcaccaccgtgggccctgcttccagcagccccaagattgcactcaagggcattgcccagaggacttttagccgggcactgaccaacaagaagagttctctgaaaggcaatgagaaagagaaggaga

SEQ ID NO: 84465 - DNA, 865 bp, Homo sapiens
ctagggactagggaggctgaggcaggagaaccacttgaacccaggaggcggaggtggcagtgagctgagatcatgcccaggcactccagcctgggcaacagagtgagattctgtctaaaaaataataattatcgaatgggtaatgcttgtgactctgcagcctggctttcagagcaattaacaagagctgggggtcaggatcagtatgtcatattaaacaaggaaaaaacagaaccaaaactttttttttttttaagaacagggttggtggagattgggatttataataaatgactgtgttcttcctaaaaaaaaagaataacaaaacacaaaaaataaacaaaaacaaaagaaaacaacacacaatcaaaaaagataccacaaaaagcccaccacatttaccactacacacaattttcccgtcccacagcgcaccactattatgaccctccccttacacacctccgcacgtacacccctttcatcaacacaatcatcaaaaatattgcaaaaaccctctacaaactgtgaaacacccattgaaacaacacccctactaacccctaaagacacaacatactacgacacaacacaccacacacaaactcttccaccccactaacactccactctcaacccttccaaaccacgtccaaatcgctatacaaccaaaccctactacacatctcaccccttcacacaaaattactcccacccacccccacacaacccccccaccctcatcaatcacacatcagcataccacctccatcatcatcaccccccatcccacccacacatactccaacatccacccgaccaccccaccaccaatcagtcaccaataccaccaacacccgacacc

SEQ ID NO: 84466 - DNA, 205 bp, Homo sapiens
gcaaagcattttactacataaacgttttagcccctataaaaacatccggagatccttttgttgttcatgagcatgacaattgggtgttttcatgcagcgagtgagatgtgccaccctggaaccttgttacgacgtcgcatgttacctgtctgacctgaaaaataattaataagtaaaacatacggaagccagtttctcatggcta

SEQ ID NO: 84467 - DNA, 780 bp, Homo sapiens
caggctccaggccctggcttagagggagcggggagtctggacttcaggctggatcccttcctcttcctggagcgggtgctggcccccaacccgcttgcgtcagggacaaaaggactccttccctttccagcctggaaagcccctctgctgcaggctggaggaagggaccttgggcccagcctatagtcagcggtgtctatgggcatggatctggacggggaaaaggacaaagcagcctccatccacagttcattccgggaccaggcccttgcaggcacgcgctgggctcctgtgggaagacagtaagggccccaggacagacctcctctccgggcatctgggttcctagatggcagaggtggcagagtggggtgggatggcccaattgggagctttagcttccggcaaagagctgagcacagtacatcttcaatgtgtaagattctcctgggagaccagggcccagctggtggtgagctgggggaagtgggtgatactgccgtgggaggagccacctggccctctggggaagtgcactcgctgtctgcagcgcccaggcctgggtagctgggtgggggctggggggccatctgtgctcagggtgcctgcacctgggccttctctgccctgggccaagcctgcccgagcctctctgtcctctgcctgcccagctggacatctctgggcctctctggagaccagtggggtgggctgtgggggcgtcatattgccctggcttggcatccctcttgtggctgtacccctcccagcagccccagg

SEQ ID NO: 84468 - DNA, 370 bp, Homo sapiens
tgcttgagcccaggagttggaggctgcagtgagctatgatcatgtcactgcactccaacctgggtgacagagggagaccttgtctctaacaacaaaaaacaccagttttctctccagtagggtcttaatattttcacttcttccataaaactgcctacaatcttctttaagttgcctttatggttaataaatgtaaaatgttgatattttcagtgaactcctctgtagactacaatatttttaattgggcaattagtctctctacagttgctgatgtaccggaaaacctcagagaaaattctactaaatgaaagatactttcaataccattttttgtactgaaatgtattaataacttaatattttcttt

SEQ ID NO: 84469 - DNA, 370 bp, Homo sapiens
tattttggcaggtagaaggacttcttgtttgtatagaagtacacttggctttattaaagtataggaaaattcactaatatccatttactgtactatattttattagtaaaagaaagattttaaaatcaaagaggtagtcatatacattggtaattcttaatattctttactcaggtaatttgtcattatttatttagacatgaaaatactatgagcctctataaccttaagttccagtgcaaattattattttgttctgttttttttttccaccaacaatctttgcattgtgctagcacacaattctcacagtttaataaaggagcttcttttgtattttaagagctgtgcagagcaagtactgtatatc

SEQ ID NO: 84470 - DNA, 503 bp, Homo sapiens
aaactagaacattaccttctctccaggtctccagttctatcaccctaattctagaacatcagctcctccctgagtctccaactgaaagaccctcaatgcaacaacatcagctcctccccaagtcttcagctgcaagaccctcaaactagaacatcagctcctccccgggtctgcactgcacgaccctcaatctagaacatcagctcctccccgggtcttcagctgcatgaccctcaaactagaacatcagctcctctccaggtctgcagctgcacgaccctcaatctagaacatcagctcctccccgggtcttcagctgcacgaccctcaaactagaacatcagctcctctccaggtctgcagctgcacgaccctcaatctagaacatcagctcctccccgggtcttcagctgcatgaccctcaaactagaacatcagctcctctccaggtctgcagctgcacgaccctcaatctagaacatcagctcctctccgggtctgca

SEQ ID NO: 84471 - DNA, 906 bp, Homo sapiens
cggaaaggcgcctgggctggtgacggtgtcaagtgtaggcaagaaatacggctgatcaagaagcgacttcacctccctcgcacaacactgagtccctttgcggcaggggccctccccgccgcgaaccctacttggaaccttgcgccatgcgatgtctctctcattctaggccacggaagccctgggtcaccctttcagcctggttctctccggtggtgctggcttgtttctcctgtctgttggggtcagctgcgtccagcctcggctcctgcaggattgcccgggcaacccagaggagatgggcgggcgtggaggtcctccctggatgacccttcccaccatttcaacatcattaggaatttaacaggcttttgcaagaaggcccagtctccctgcttcctggcctttctatttaaaagcacccatcttcaccttctcccaaaggctctggaagttttacagacagcatctttctagcctcgccctgcgtctctttctagtcatttgactgaggctgaacaaagcccagatgggagtttcattcccttcacctcccccaactcccagctgaaggaggctggccccagacacaggacacagcttcctgaccctgcgggcaggagcctggcttgttggtgacgggcaggagcctggcttgttggtgagtgggcctcctcattgctgctggagttttccatcctcattccacaacaagccaagtcagcaagttgctgccaggaaccttcacaccttgtgctttgggatctgaggggaaacacacacaccggcaccaccctccctgagcccgggaatgaagccagcatcagcggagagcaacctactgaggaaaatgatggagtaattccctgggcacacttcaggcgtggtgccaggtaacaggccctg

SEQ ID NO: 84472 - DNA, 579 bp, Homo sapiens
cccaccgtggagcagaccactcagacccaccggagacccagagttacacactgctgtgtccgtgtgtgcgcgcctgtgtccgtgtgtgcttgggtgtgtcgtgtcattgtgagtgtgctggtgtgtgtgcaccagtgggagtaggggagtgtatattagtgcatgtgtgagtttcagtgtgtatgtgttagtgtgttacgggaaaggggtcctgatccagaccccaagagagggttcttggatctcgcgcaagaaataattcaggatgagtccacagtgaaaagcaaaagcaagtttattaagaaagtacaagggattgggcgcggtggctcgcacctgtaatcccagcactctaggaggccgaggagggcagatcaactgaggtcaggagtttgagaccagcctggccaacatatagtgaaaccctgtctctactaaaaatacaaaaaaaaaaaaaaaaaaaaattagctgggtgtagtggcatatgcttgtagtctcagctacttgggaagctgaggcaggagaatcgcttgaacctgggaggcggaggttgcagtgagctgagatcacgctactcc

SEQ ID NO: 84473 - DNA, 599 bp, Homo sapiens
gagggattgaaggcggtggtcgctaagctaggtctaagacggacagccagggcgacaaccagtctctcgctacgtgtccccagcttccctgtttccgagcgcctctcaaggcgcacgctctggacttgttcagatgggggaagggaactggtctggaactccccactattcccgaggttcccacgcctccagatccggagaggccgtttcgctccagtggcctggcccccctgccccctcagcctagccgttcttgatcgtaagtgctaaaaggaacaaagaaggagaattcaagaatccacacataagcccaaaccctgacaggagccttttcctctcccatctcctgcctacgcttcctcctagtagctttttaactgctggcggttaagttactttgactggtttgaattaaacgcaaaataggtttaggctgagaaatgggccagacccttggcgatctgagaaagaaagactgagtccggatgtcaagaggcctgggcctcacgagggagtttgtctgcttatttgaacacctcagagttgaagatcttgttactgctatttctgtgctggtgaatcagtacagaccttgatgc

SEQ ID NO: 84474 - DNA, 108 bp, Homo sapiens
cctccgaacccaattgctcaagcagcttccttccccaacgccagcgccagttcctctcccgttggggcccgggaagggcagctaacgctggacactgggacggccgcg

SEQ ID NO: 84475 - DNA, 369 bp, Homo sapiens
ggtagtaaagcatcccttccctcaacaccatgggtgtacaaaccagattcaatcttgttttctaacaccaccatttattgaggcctaaacagaaatatgagcccgtaggagccacctcttgcattgtctcttcaccatctacaaaattgaaaccaaactccccaacatggcatggaaaactctgcatgaactttttacatctccattataatttgtagcaggtctccaagtgcctgctttgccttcttgaatctgatgctctcgttctgtggtcctcaaattgggtgcagtggttccatgcattaaaatcactgggggagctttaaaaatggagatgcccaggctatatcccaaacctcttaaatggga

SEQ ID NO: 84476 - DNA, 885 bp, Homo sapiens
ggtcaaaaaaaggttcagaggaaaaagaacagatttgcgaccgggcacgttggctcatgcctgtaatcccagcactttgggaggccgaggtgggtggatcacctgaggtcaggagttcgagaccagcctgaccaacatggagaaaccccgtctctactaaaaatacaaaaaaaattagccaggcgtggtggcgcatgcctgtaatcccagctactcgggaggctgaggcaggagaattgcttgaacctgggaggtggaggttgtggtaccagcctgggcaacaagagcaaaacttcatctcaaaaacacaaacaaacaaacaaaaaagaacagatttgcttttttcttaataaagaaaaatgttttgaattcactctgtagaaatttaaaactgcttgatgttttagtgatcaaaataaaattatcaaagctaaaaataccaaatagatatgtcactaaattgaaaaaacacacaaccacaacaaaacaaaaaaaacaaaaaaaaaacaaaaaaaaaaaaaaaaaacaaaaaaaaaaacaaaaaaaaaaaaacaaacagaaaaaacacaaaaaccaggacaacaacaacaacacgctaaccaaaagcaaagaaaagagcgggggcgcccactgtaacaaacacgcggacagcaggcagacagcagaacgcggacacacaccactaaagacactgtagtcaagggaggcgggggggcacccaagagacgaggcagggcaaagacaaggaaggcgagggggggatgccgactgacggagaaacgacaagagcaggagagccagaccgcccaccgagcggaggtgaggcgcggagggcgagaacaaaaattgcgggaggaggagcgaaactggggggggaaagaagag

SEQ ID NO: 84477 - DNA, 275 bp, Homo sapiens
tatggtgaaaagatatatatatatttagaattaggcagctggactcagtttagatgatcccaattttgttggcaacatccaaagcatcataatcaggagccagtcgaacatataccttcttctctccatcaggccgaatcagggtgttgcccttggccacatcattgtcatagagcttcttcacagcctgtttaatctggtgcttgttgactttaacatccacaatgaacacaagtgtgttgttgtcttccatcttcttcatggcgactcagtgg

SEQ ID NO: 84478 - DNA, 640 bp, Homo sapiens
gcacccggccgctagaatttttgaagtatttgcaactatgtactttttgaaggaaaaaaaccttcattctcatgtcgctatgtagaatattcttcatcattaagcagcaccataactatcatctagtgattagaattttatttttccataaaaatatgaggcactgtttttgttttggacaaaactacacatttttctttaaagatttacaaactcctatgtaatttgaaagttgctatactgggagtaatctgaaaagcttagaaagttcatttccttttatatttccatcttaaatgtgctgctttttctattcgaagtttacaaagaaacaagtaaatgggatgtcgtgcatgtatgcacatgctcacacgtgtataaatcagtgtccatttaaaaaatattaacatttaggtaaatagagtattacatattatactctttagatgatcaagactctaatctgtgttgacacttcagaatttattaaaagatcttcccttacttttcagtaatttaattagtttctttaagcctgacataacgaggaggagcccaaacaacataatcaagttttaccttgggaggaaaaaaagttttacctgctagaaagaattaataaaatattgctatacattca

SEQ ID NO: 84479 - DNA, 727 bp, Homo sapiens
cattttagctttgccatccgcggacggcttgagtgttaaccagctcggtggaccgtttgcgtttctgcgagggcagcggcttcctctagaataaagaatgaagaaaattgaaatgatctctgaaactcgagaatagttatgtaaaagagaaaaaacaaagtctatcgttcaaaggctactgaaccaggaaacaggcagcccgcgttaaaatcccagctctgggatcaactggttagattattttcattcaggcatcttttctttctgcactacttcatctaccagttgctaacattgaatgaacctttacagtgttccaggtactgttttaagagattttctatactcatataacatttttgaaagaaaaagtgaaatataggcctacatgttcagcctcaacgtgaacgtgatgaggatgaagacctttatgataatccactttcacttagtgaatcgggattggactgctgcattctaaaaataatggtgagaagaatgaataaattagagtttactatgtaataaaaccttctaaaaaagaggagaggtagcagaatttacaagaaggttaaacctgaccttactgaagagaatgataccctcatagcagcgcatcttctttgctcacagaaagctccttggacaaatgtgtctcgagtttcaagtgagcaaaccttcaatgtgtctgccattttggggaagaacgtgtaaccttggcagtgaa

SEQ ID NO: 84480 - DNA, 305 bp, Homo sapiens
aaacattatagccttcgggcattagcccaggagacacagttgagggtcctaggtgctttcacttaaggcagggctgttgagtcggtgaggggatgagggcatctcaaaagaaggctggctttcaggattgcacagagatgttcctgctcccagcagactggggtaaaatttcctgggaatgagggcatttctgaggaaaagagaagggaaattttgttgactacaagttgctatagtataaatgggagaattaatctatttttaaatgctcagatgtaaagatacattcttattgttgaatccat

SEQ ID NO: 84481 - DNA, 386 bp, Homo sapiens
agaagcaccaaaagactgtgatacacctaggtagtacttttttcaactctacctgtgaaagattttaagggttttttttttccccctgagggaaatttgcatttcactggagggcaaatcagctgtatttttttttttttctggttatcccactaatgagtcctgtgaccctaggcagtcagttgcttttcagggcctctctgtcttcctctggggaatgctacatgattgctaaggttctttactaaaaactcaacattctatgtctcattacctccttagcacctaaggtcaaggtgtccctagggaatggtgacaggttggtgccatgccttagtgccatgctatgtatgcacaaaaggtgctactccaaggcacctgcaagt

SEQ ID NO: 84482 - DNA, 245 bp, Homo sapiens
ttacctgcaaaattgagaaataatgggttgatgggagaattaaataaatttacatatgcaaactgtttagaaaaatgcctgagcctactctgtatgttatttattagtcgtattattttctttcctttaagacagagtttcacactttcacccaggctggagagcagtggcgcgatctaggctcagtgaaacctccatcccctgggttcgagcgattcgcctgcttcagcctccccagtaaactg

SEQ ID NO: 84483 - DNA, 534 bp, Homo sapiens
atacccactatttaatccagtaatttattgggtaaattttacccagtatctttttatttgacaattaggtctttcagtgttttactgttctcatgtaattatacgaatcttttagctttattattagcttcctaagttattagagcctatctcagaattaaatcacagtatgtaatctttatgaaaatcagatttgacatagtatttcccatattctaaatcttcagtttgaaaaaaatgtgtttgtgcatacacacacacacacacacataagtatatacatacatactttttgaaatgcaacacacttataatttgagagctttaaacatttgagtttttacagtgtttgagaaatctctagtctgttattagtgctggttgtccgatatagacactttaaagctgtgaaagcattagaggcagaagaagtgacatggaggtagttgagccaggtggaccagtgttaatcagtccagctttggagtgtttatgtagaaacatacatgtctatggcagtctatccacatttga

SEQ ID NO: 84484 - DNA, 831 bp, Homo sapiens
ccggagccgccgctttggtcacagtgaccgccaccattgcccggggatgggtccctgagacttggcgaagtaggagccctgtgtgatcgtgcgtcagagtcggggctgagaccagccctggccagggcagttaccaggacggtctccggaggccgagattcgcggagggtccaccagtaggaagaaaccccaggaggaagaaacctcagacagatcgccggggaggcagcgcgggatcccagcctcaggcgtgcgcggacggtgtgcgggtgaatctccccaaaagtggcgcccttgtgatgtcgaggacaggtctccctgtgtgcccgtgggctgctgtctcaccggtggctcgtcgtcgcggagagcagaacccggcagcttcaggggctgcctgggggtgggtgttacctgctgtatgtctgtgtgcgttatgggtgtgtgtgtgtgtgtctgtgtgtctgtgtgtgtgcgcgcgcacgcgcgtctgtgtgcccactactgtctcttacgtctctgtctctctctctctcccttctcgctctttccgtcgccctctctttctgtctctgtccgtctgtgtgtgcatgcgccttgggacacatgttccctgtgcgccggaggctgggtttcttgcacgtcggcctttcttctggtcagcctctccccgcgtctctgcctgggtgttgtggccagttggcaatcgttttcccggcggttccggtttgggggtctgtgaaggcctgggcaatgtgggcatctgtgtcggagccgcaggggttttcattccctccccacccggagcagcctctttgctagcctagatccaga

SEQ ID NO: 84485 - DNA, 169 bp, Homo sapiens
gaccaaaaaaaaaaataatattattttaatatcagataaagtgaattacacggcaaggaaaattactagaaacaaaagaaatatggccaggcacagtggctcacacctgtaatcccagcactttgggaggccgaggctggaagatcacttgaggccaggagtttgagac

SEQ ID NO: 84486 - DNA, 863 bp, Homo sapiens
gggggactgagcagcatcctgatccctgcccactagttgcccatagcacccccgcccctagtcccgacaaccagaaacgtctccagatgttgacaggtgttccctgaggagcagaaccaccccccagttgagaactgctgttttaggccaactgtatgacaagatagatttcattgtaacagatggtctctgcctaaatatttgtagattctttttttcttggtaacattgtgccattggagttacacatcaacccgaccaaattcggcacgattgtggagtggctgttgggcgtggcgggaagcagtttcagtccggcgttctccctcgtcccttgggggaggtgactggtgtgcctcctcacctctcactcattgcccacccagagcccaggggacggtcactgctcacccacgatcaggcatgtcctcgtgtcaccgatgatgaagcggccctaggtgcgtgaggatctggctttccaagagcctgctcttccaggtgcactgagtgacgtcttacaatgttgtttgtaagacttgctccccatgccaaaaaccgcagtccctgattttaggacttccgcctgcactgagaagtaacatgctccctgctggggttttttgcaaaggaatgtaatcaaagaggtttgccggttttctgatccaggagagtgctggtttgtgcgccctggattctgtggtcctccctgtcctcctggggtgacttcttgaaacctatgccaggtgctggctgtggctcaggtctcgctcctttaagcatctccccagcaggaaacaagtcaagaaccactgccgggaaacaggatcagcggccagagattccccactttggcagaaccatga

SEQ ID NO: 84487 - DNA, 356 bp, Homo sapiens
tttatctgtatttcttttgtatatgggttaaatgtttccgttatattttctaattggctattgctcgtataaatagatgtggttttaggcacatattttatatctggctcctatactaaaaatcttttatcatttccaacagttttcagttatgctcttgggtttgaaggtagacaataatgtcatctacacataatgatacttctgttttctctttttaaatgcttatagctcttttatttttattgctttgcttgtgctataaattctagaatgaagttaaataatcatagcagatatccttttttctgatttaattataatgctcctgaaattttattaagtatgatgactgt

SEQ ID NO: 84488 - DNA, 655 bp, Homo sapiens
taatttattctatagagcctattctgtctctccccgcttcctatgtgaagtcttccctgactcaagtggtctcagttttccctgaactcttgttgacttcatcttccttaactgtcaaccatgcattgtcttccagcttgcttgtatatcttctttgtccatagccaaggctgatcagcataggacaatcaggacaatatgaatgatgctcaaatatgtgctaacagtcattttgctgactgttctggagactcccattccttttgaaaacaaagatggacttttcaaatgaagttatagttcagggactttgttttgaattattttgtaagacctgaactaataaaagccctatacagagagacattcggtagctattattattggttatctttaatgtgtacaatgctttgagcgtgatggctcaaaattactattcttagtatttataagttctactgactagattttcaatctgtcatctcagttcatatagtatatattataaattgaatcaataaaggtaaggctcattaggagattatttgccatgattaatgattgtggaagaaagaaattcatattttttccacatatttcatcttattttaatagtaatgtccttaaactttactataaaaaaatataatgtctc

SEQ ID NO: 84489 - DNA, 1535 bp, Homo sapiens
tcttaaaaatattcttttaaaacttctaattattaggtttttttttatctcttcagtacattaaaatgtctggtggtaggaaaatactggactcatatatgactgtctacatgatttgcagggcccagcgcaaaatgaagtggatgttgtacctcgttcaaagtgttaagcgtttcaagatggcaacaggagagcattaggccaagtatgaggtcattatgtacatgggtccttgtgtgaccacacaggtcacaggaacatgaagctagacctgagtgtatattcagataggtaaatcttacagatttttaaaactcaataaaagaaaaactacatttcatgtgtgaacacaaaaattggaattaaattggcaatagcattgggatttgtgctcagagtcacagtttacatctgaccacaatttctatatgaattttttaagataaaacagtaagaattttaaagaaggtttctgaaatttaaaaattataataacataattaactttgatattttaattccatgtaatttaaaacatttaatagatatataatgttccactattaatttaactagaagtataaaaataaaacatatataataaaaatattctacttatttttaaattatctatattatactgagtaaaagaaaatttaggaatataaataaatgagcatttttgaacatgtaaaaatattttcttgctgtttttaggagacttttagcaggacaggagcttacctctcatctacctctgcttggacaaaccagtgatgtgatttgcaaataggctgtaacttcaccgaaaacacatcacagtaaagaaaggtagtgactttcagagaatttgacctaacttagaatttgtaaaagagaaaagcattgtccttatgcctaaagtacatgactgtttctttttaagttacatgtatatttacctgaccaatttgttttactctgtattttaagttatcaggtgaaatggttttagaataaattaatgagttgtttcttctgaataaatgtgcatgttacaaatgcaaacacgtgtatgtattatacaactatgcagcttcaagagctgacttatttctatcagctttttattcacttaaaaaaatcaggctactgaagcatattagaatttaattacaccaattagtactgccacatcagacatatgatgtgccttcaattaagaagtacctaatgggtattagtacaatttagcttcataattaaagttctaagaacagcacaaattaaacattatgattacaaaacattaaaaatctactggtgaaattaaagctgaatatttaacttctccttttgagctgattttaaaaaagaaaatcaggattatataaaatgcaatgttattattgaagcattctgaatttaaaaacagaaattaagctcacatgcccataaatatgtgcatatacaatgattaaatatttagtaaaatacccaacctaacacttgtgccatctaataagcattaaaggttatcattttggagtttcaaa

SEQ ID NO: 84490 - DNA, 1045 bp, Homo sapiens
tcttaaaaatattcttttaaaacttctaattattaggtttttttttatctcttcagtacattaaaatgtctggtggtaggaaaatactggactcatatatgactgtctacatgatttgcagggcccagcgcaaaatgaagtggatgttgtacctcgttcaaagtgttaagcgtttcaagatggcaacaggagagcattaggccaagtatgaggtcattatgtacatgggtccttgtgtgaccacacaggtcacaggaacatgaagctagacctgagtgtatattcagataggtaaatcttacagatttttaaaactcaataaaagaaaaactacatttcatgtgtgaacacaaaaattggaattaaattggcaatagcattgggatttgtgctcagagtcacagtttacatctgaccacaatttctatatgaattttttaagataaaacagtaagaattttaaagaaggtttctgaaatttaaaaattataataacataattaactttgatattttaattccatgtaatttaaaacatttaatagatatataatgttccactattaatttaactagaagtataaaaataaaacatatataataaaaatattctacttatttttaaattatctatattatactgagtaaaagaaaatttaggaatataaataaatgagcatttttgaacatgtaaaaatattttcttgctgtttttaggagacttttagcaggacaggagcttacctctcatctacctctgcttggacaaaccagtgatgtgatttgcaaataggctgtaacttcaccgaaaacacatcacagtaaagaaaggtagtgactttcagagaatttgacctaacttagaatttgtaaaagagaaaagcattgtccttatgcctaaagtacatgactgtttctttttaagttacatgtatatttacctgaccaatttgttttactctgtattttaagttatcaggtgaaatggttttagaataaattaatgagttgtttcttctgaataaatgtgcatgttacaaatgca

SEQ ID NO: 84491 - DNA, 209 bp, Homo sapiens
agagatgggaatctcaacatggtgcccaggccaggtgggacttgaacttctggactcaagcaatcctcccacgtcagcttcccaagtagctggaactatagggatgcaccatgaactactaatttaaaataaactttctcctttattagtattttttagtagagacggggtttcaccatattggccagggtggtcttgaactcctagcc

SEQ ID NO: 84492 - DNA, 141 bp, Homo sapiens
ctcacagaaaaacagctggaaggagtttggaggagaaaaaaatggatgtgataaaggaggcaattaaaaacagcaggaaaaacaaagagccgtgccagatagtaatctattactacacatgattgtctctggaatagttta

SEQ ID NO: 84493 - DNA, 485 bp, Homo sapiens
tgaggattaattgaaacattgcaagtacaatactcagcataaggctcagaacacagaacacattccataaatggtgctatgattggtcctgggatattgggtcctggtctggttggcagtgaaggcaaggaaaacatgtgtgtgggatatgctgacagtttaggggatgtcctagagtttcccatagttgtcccagtcagtttgatcttggtattatgcactaggctgtgtactgtttggccccagttaagattccaggtctgagaacatttttgaagcccctagatggatgggctgaggtgatgaaagaggtaactttgatatgaactatgcctcaataagtggggttctgcaaactgggggaaggcagggcttgaagcttgacagctttattagttcaaagagtgttttccccaaatatgatttaatttaattttaacccttatagcttgcatcaccaaaattgtccccaaatgaagaaacaa

SEQ ID NO: 84494 - DNA, 753 bp, Homo sapiens
  misc_feature (27)..(27): n is a, c, g, or t
aagcaggctggtacgccccggggttanggatccagctccgccgagaggccgctcgcgccgggtccttcctcttccccaagtgcaggcagagcccccggagccatggccagcccttccggcagctccgaagccactggcaagccccgaggcaggatggccggcccaggagggaggaggacgacgtccctcccgaagagaagaggctgcggctggggctggaggggggaagcgcacagcccgaggactgcgaggacgggaaggacgcgccgcggccgggcagggaggagaccggcacccagacaggtggcgacggcagaggagatctactgtgcctgccatacagcctggttgagggtcaggactacaagtctgaaaattcaaccctcctccccggtgccaagaacagcctgcaagactccgtaagtagaagcattttgctgaacagattagattttgaaactacttttgcatccttttcagcctctttggtctccgtcatcaatcaccgggaatggtttttacctgaaactgatcttgctggagaattaactgggtttgaggggaataaattttccagagcacttgcacaatttctatcacttgggccgtattcccagcctctggtacatggtgtgagagctgtattctgtcctctaaaaaagaccaggcccacttggtggacagatccggggcacagtggttggtgacaaggctgcaaattggtccctctgcgccctggtgtgacggccccag

SEQ ID NO: 84495 - DNA, 360 bp, Homo sapiens
ttttcttctaaatggtaatttatagattttcagttcttatttatttattttaaagagactcttgtctgaaaaaaacaaacaaaaaagcagtattttcatatgatttagattattaagatgtcttcatggtgtctggtagcgtgtttaccctttgacataataaatggctgttgattaggagcaaccacggataccaagctgcagccaggtggtgagggcatcacctcccatgtgatggaaagagtgcctgcttgctgtcaggagatgtggctaggatcctggcactgctactgacctgacacttaagcgtgggaaagccagtcaaccagctgcccagagccttagctttctcacctataa

SEQ ID NO: 84496 - DNA, 810 bp, Homo sapiens
ccgtctcagaaaaaaaaaaaagaaaaggcctccttttaccatcctgaaatgacattcacattcatgtacattacaagtcttgctggtgtgggacagccccccagcaccagacctctgcccattcagtgccaaagcaccctcaaggaggaattcccaaaacacaccccgagggcaggcaggaacaggacccttgtctgtctggttcagcgcggaatccccaccacctaatacaagaccctgaatgcactaagtaaataattgcagtctggataaaaaaaaaaaaaaaaaaaaaaaaaaaaaaaaaaaaaaaaaaaaaaaaaaaaaaaaaaaaaaaaaaaaaaaaaaaaaaaaaaacaaaaaacaaaaaaacaaaaatagcagcaaacagacagaaagaagacaaaagaaacacaacacaaaagagaggaagaggagaggcgatgaacgtgacagatcacgcagacagacggagaaacgcgagcgaaagaggatgaagaaacggatcaagaaagaggaacggagcggtcggcgggatgagagtgatgcggaagtgataagtaacgaatgtgaataacaaagaccaatgacaggcgccgtaaatcaccacgatcgaaatcaaagcatgaatgataaggtttcaactaaaagagagaaaaaaaccacagagacgaggacgcagaaacgagagacagatcagataaatgaagatatacagaaaacaagaacataagcaaaaaaaaaagagcaaaaaaatactaaaaataagaatacatttaacttatgaaaagacaaaagagatatatagtacat

SEQ ID NO: 84497 - DNA, 444 bp, Homo sapiens
gaaggctgtatatcagctgtatatcttcaaagtaattggtgaaagcagggttttgggggactgcaggagggcgattttgctagagtataaggtttctacctttccactaactagttctctgaatttcatctaatgatttaaaggtgaatgtggggatattttattagtaactaccttctatatcacattattgaattattctgtacttactctgaacactgaatgtttgaaccaaaaactaacttcttcagtaatagtttacttcacacgtcacccctctcgcattagttttgttaaatcagttttttctcaagcttagtatttctaacattttgtcatcaattaaaagaattactagaaattaggagttttcttgagggtagtaaagggaaagattcatggtttgcagatgattatattactcatttaattgtttagcttata

SEQ ID NO: 84498 - DNA, 351 bp, Homo sapiens
ttaatatacgtctttctttaatatacaatgagcttataaagctttaatactttttaaatagctatcttatgtctgctgttattttgttgtaccttaatgacgtaatggatttttaactaataaaatacacatattaaaagatataaagagtcacgagaattaaagtcagttctatttgaataatatataaatcccactgaggtttagtatttaaatcactttatgaaattaatcctacttagaactgacaaaaacataattttgatgtacaaaacaataatacttcaagtataataaagctgttgacttaataaatattttctacgccatggtagaaagtcaatattttaa

SEQ ID NO: 84499 - DNA, 373 bp, Homo sapiens
attttcccttagctattctatcgtatgtgtcatatgtctgtgatatctccaaatagtaaaataaaatttaaaaatccatccatttctcagctgggcacggtggctcacgccagtagtcccagcactttgggaggccgagacgggtggatcacaaggccaggagatcgagaccatcctggctaacacggtgaaaccccatctctactaaaaatacaaaaaaattagctgggcatggtggcagacgcctgtagtcccagctacttgggaggctgaggcaggagaatggcgtgaacccgggaggcggacttgcagtgagccgagatcacgccactgcactacagcctgggtgacagagcaagactccatttcaaaa

SEQ ID NO: 84500 - DNA, 439 bp, Homo sapiens
  misc_feature (51)..(51): n is a, c, g, or t
ccaagtaatgtagtggaggttgtttttacaaaaacagaaaaatatgcctcnccacatagaaccagagcagaaatcagagagaaaatcacccacaaacccaggaaatcctccaattgcattttatcttatttccttcagtatctctgggcaaatttttttttttttttcctttttgagatgaagtctcactccagcctgggcaaccagagcgaaactccgtctgaaaatatatatatatatatttagagtagtgcttgtcacatagtaagcctttgttgttgttagcgcttactgtgtaacaaatcactgcaggctcaaaacaacagtcatttattcagctcataaatctgcaagttaggacagttggccctctgtatctgtgggtaccacactggagaattcagcaacggtggatagaacatattcttacaaaaaaaat

SEQ ID NO: 84501 - DNA, 387 bp, Homo sapiens
tgagacgaagtctcactctgttgcctaagctggagtacattggtgtgatcttggctcactgcaacctccacctcgcaggggaatcgcttgaaccccggaggcggaggttgtggtgaactgagatcgcgccattgcactccagcctgggcaaccagagcgaaactccgtctgaaaatatatatatatatatttagagtagtgcttgtcacatagtaagcctttgttgttgttagcgcttactgtgtaacaaatcactgcaggctcaaaacaacagtcatttattcagctcataaatctgcaagttaggacagttggccctctgtatctgtgggtaccacactggagaattcagcaacggtggatagaacatattcttacaaaaaaaat

SEQ ID NO: 84502 - DNA, 795 bp, Homo sapiens
cgacaagggcctccttgaggatggaaggcaggaggagggaaaggatcagaaaaaataaccattgggtactaggcctagtacctgggtgataaaataatctgtacaacaaactcccgtgaaatgattttaattatataacaaaacttgcacatgtacccctgaacctaaaataaaagtttaaaataaaaaaagagccaaattaaattattaaaataataaaataatttcttttctttttgaagttttaagacacatcaattaggaagcctggaggcatcttagatggcagacataagccttttatgttcaatgtaaataattatattaagtgttaattacccaaataaactaactaaaagacagatattaacagagtagatttaaaaacatgacacaattatatgctgtctaccagaaacttcaaatataacaatatatgcacactaaaagtaaaaggaggggaagagatatatcatgtaaacattaatcaaaagaaagcaggagtgactatgctactatcagataaaaacacagacttcagagaaaaaaaaattaccagatacttagacattccagagtcaaaatgtcataaaagggccaatttaccaagaaaatatagcaatcctacacgtacatgtaccaaatacagatcctcaaaatatgtcagagactgatagaactgaaaggagaaatagacaaatcataaatccatgctttatacaaaaatttactcaaacagatcatggacttaagtgtgaagtacaatactataatttttttagggaaaaaaaccct

SEQ ID NO: 84503 - DNA, 1032 bp, Homo sapiens
ctgccttagcctcccaaagcactgggattacaggcatgagccacgaagtatggccatagagcactaaggtgtcactggccccagagcagagtttccaggctgcagaagtgagcctcagctacctgacttcaccttacctcaccctctagatcctccctccaacctgtcccccaagctagagaagtgaggcttaatggtaagagcacacccagctggaagtcataaggcctgtgatcaagtgctgacccctttattgtgtgacatgggacaagcatctgtgcctctgtggcctttgctgttcttgtcttgatcagagcctacatgaactggagcctgcatctccctgcctgtccacactggggctgcaacagtgggcaatccaggaagttgtcaagcaccagggcctttttggagtggaagtagcgcttctgctttgtgggcctcggatctccccacttctgactcagccttcctccatcagtttcacatgggaaggcacagaccctggcactatcctgcagcccaatccataactctgaactcaactctggattctaattacttgtgcatgttacctgtccagagagagctatgtgtccagacaccaccagagggtctcaggaaggagccaggcaagggactccaggatgcaatggggaggggggcagaagaggtagacattcagaccaccactcctccctttaagacaactgctgtctccaccctgtctcctgctgtcttctgtaaagccaccagggtggagacaaggtagagccgagtcatccacccagctgccttgcctggggtggggcccagctgcaagcctggactccagacaggcttccctggtgcttacaaccttcccattctgcctgcacttgggtatccaaatcccttgggctacagactagaaagagacagagaaggggcagggggtaccaggtgcggtagctcatgcctatacatcccagcactttgggaggccaaggccaaggcaggtggattacttgagcctaggagttcgagaccagc

SEQ ID NO: 84504 - DNA, 487 bp, Homo sapiens
taaggtcagtgcttttagcttgagacccttaggttggactttcatattatcttaaaaatctgcggggcacagtggcttatgcctgtaatcccaggactttaggaggctgagtggatcacctgaggtggatccacctgaggtcaggagtttgaaatcagtgtggccaagatagtgaaaccccgactccactaaaattacaaaaaaatcagtcagccgtggtggtgctggtggcctgcgcctgtaatcccagctgctcggaaggctgaggcaggagaatcgcttgagctggggatgtggaggttgcagtgagcggagatcatgctactgcagcctgggagactgtctcaaaaacaaaaaacaaaacaaaacaaaaaaacttgtaacaatttttactaaatttatttaaagatggtaaagtttctactcaccttttatttttgccttgtaataatttcaaattagtactttatcttaaaacattttattt

SEQ ID NO: 84505 - DNA, 446 bp, Homo sapiens
acaggtgtgcaccaccacaccaggctaattttttgggtatttttactagaagacagggtttcaccatgttggccagcgtggtcttgaacgcctgacctcagatgatccacccaccttggcctcccaaagtgctgggattacaggcatgagccaccacggccagcccacaatgatattacaaacctattaaaaatgatacttagacagaattgtcagtattattcaagaacatttaggctataggatgttaaatgacaaaaggaaggacaaaaatatatatgtatgtgaccctacccataaaaaatgaaatattcacagaatcagatctgaaaacacatgtcccagactgcatactggggtcgtcatgaggtgtctccttccttctgtgtacttttccttgaatgtgcacttttataacatgaaaaataaaggtggggaaaaaagtc

SEQ ID NO: 84506 - DNA, 215 bp, Homo sapiens
tactactactaaattcgcggccgcgtcgacgaatttctatttggtctattcttttggttcctgagagagaaatgatgaagtctccaagtgtaattgtggatttctctatttctcctttcattttcttcagctttgcttcatctgtgttgaagctctattcttagatgcattcacatttatcaattgttgcaccctctacatctcttggtaatttt

SEQ ID NO: 84507 - DNA, 606 bp, Homo sapiens
aaggagaaagcttaaataacttgcccaagatgacacagctagcacagggcagtgcttgagtaacttcccgaggttacacaggtagtgagaggtggaattgctaggttgttcagcaccacacttttctcccctctacctcaatggttcctggctctgtgtgggtgtctcctagcagataaaatggccctcttccatttacatttgtcttatccttatatcttcaaaatggttcgtaagacaaaaagagcctgcccttgatagactgcctcccactgcagcaagtctagcactgagcagccctaagactagaatgccaacttcgtagagggaggatagataggaaaggctcctgagacctggggcctgggagaaggaagtagtaggttcaagattaagaggaggtgagtgatacgtgtggctcagacataaaatgtaatgcccaccaaaaaactcagtcattcaatctaagtaatatttactgaaatgatttttaaaatcacagtatgagaaacccgtgaagaacaaaatattcaaacttgttaaataaagacaggatccggcagggccagtgtggtggtgaggcaagtgaggctaagttatgtaaat

SEQ ID NO: 84508 - DNA, 246 bp, Homo sapiens
cgaggcggcaggggggctcaggccctccagggccacgtgacgtccacagcacggccccggctggggggcaggctgtcccgtggctctgcaccccgcgttataaacaccaaggtgggatgaaatgcatcctctctgcttagcacgggccttgctcaccagcctggctcctcagacacacctgggattgccccttccaggacaggccagcccctttcctgctttcccaaaatggtctgggtggcagga

SEQ ID NO: 84509 - DNA, 514 bp, Homo sapiens
atatttgtcttgttcacaatctgtattcccagcatacacaagagatgctcaaaacatttgctgagtaaaataatgaaaactcatattagaagctgtaacagtgtagggagtgcttgatttggcagataaggaaaacaaaacaagaaatgcaaaaacactccctgcactccaagtgaagacatcaggaagcatctatttatccctagttcaaataagccaaataattataaaagttaaaaagtcgtttgccaatctttcggttattaatgtcagagtcttcagtgaacaactaaaaagtatcaacactgaatcagtgctataatatatccaattttaatagcacctacaagatatcctgaagatactgtctctcaaacttagtctcttgccagcccatcattatccaacctttatgctcctttttaatgggagcagaaaaggaatttggcctagcaagatcttgctgaaccgtaagaactaactcaaattgtctctttaggatactactgctaac

SEQ ID NO: 84510 - DNA, 490 bp, Homo sapiens
attgccttttgatgccaaaggtccacaaaatccaaattattctttcccttgtgggtcatgcttttggtgccaaatctaggaaatcattgccaaattcactgtaatacagcttttgccatgtattttcatctaacagttatacagctaagatggacactcacatatttcgttcattttaacttctgtacatgttaggtatgggtacaacgtcatcctgttgcatgtggatgtgcattgcccaacagcatcattctacagaaacattaagctatcccccattgaatagtcacagcagacttttcagtaattgttagactttatgtaaattattagactttattagactttctgtgttatcttgttgcattgtctatttctgcgttattacgctagtaccaaacagtttttattagtatggatttgtaataagttttgaaatcaggaagtgtgagttcaccaactttgttctggctttttttttttttttttt

SEQ ID NO: 84511 - DNA, 640 bp, Homo sapiens
ctgctgccatgcagttcccctgtgccctgtgggcttgtcctgctgtcatgccacccctgtggccctgtggggcctgcgctctgtgcctgggggcgctgggaaccggcagcctggatgccgtgatggtgctggtggagcatgctgatgcctggagcccctgtggctgctctgaatgcatgtgatgctcgtggtccccagcatccttgagccaccaggagtgagggctgctgctccctgagacctggctccaaggaggatgccacagccgcctgccagctccggtctgcaccatgagtgatgagcggcggctgcctggcagtgcagtgggctggctggtatgtgggggcctctccctgctggccaatgcctggggcatcctcagcgttggcgccaagcagaagaagtggaagcccttggagttcctgctgtgtacactcgcggccacccacatgctaaatgtggccgtgcccatcgccacctactccgtggtgcagctgcggcggcagcgccccgacttcgagtggaatgagggtctctgcaaggtcttcgtgtccaccttctacaccctcaccctggccacctgtttctctgtcacctccctctcctaccaccgcatgtggatggtctgctggcctgtcaa

SEQ ID NO: 84512 - DNA, 428 bp, Homo sapiens
ccactgagtctctctaggttctgtctcgcaccctccagagtgcgtgtggtgtgccaaggcctccggcgtactttccgcttcttgctcatctgctccagttagcctgatgttaaaggtataatgagccactgtgatgttctgagttgaaccagatcatacaggccctctgggactactttgctggagggtgggagggttaacgaggcctggggcaggactacaaacgtacactactgcctagcctatgtgagagtgaactgagtttcatctttctgataggaatggaaaagaaggcattcctagatcagtgtgtgcacactgcgtcctggggggatgttactgtactctagcaaaggtaccacatctggcacagcagctgtgaatggcgctgcttcttagttaagtttgtggtagctcactgtcatcac

SEQ ID NO: 84513 - DNA, 826 bp, Homo sapiens
atatggtctaaacagaaacatgtatcctaaaaccataactctaaacttgttaatttttatcataatctcttttcttaacttcagacagatcttctaccatatctactattgtgtgtagtaaagaagcacttatttcaaagttctacaatttgattaggtacctttagtttcttttcctttttataaatgtaggtaaaaggattttaatattttttatttaaaataacaggcatacaaaattgacaaatgggatctaattaaactaaagagcttctgcacagcaaaagaaactaccatcagagtgaacaggcaacctacaaaatgggagaaaatttttgcaatcaactcatctgacaaagggctaatatccagaatctacaatgaactcaaacaaatttacaagaaaaaaacaaacaaccccatcaaaaagtgggcaaaggatatgaacagacatttctcaaaagaagacatttatgcagccaacagacacatgaaaaaatgctcatcatcactggtcatcagagaaatgcaaatcaaaaccacaatgagataccatctcacaccagttagaatggcgatcattaaaaagtcaggaaacaacaggtgctggagaggatgtggagaaataggaatgcttttacactggtggtgggactgtaaactagttcaaccattgtggaagacagtgtggcaatgcctcagggatctagaactagaaataccatttgacccagccatcccattactgggtatatacccaaaggaatataaatcatgctgctataaagacacatgcacacctatgtttattgtggcactactcaca

SEQ ID NO: 84514 - DNA, 278 bp, Homo sapiens
tcactccatgcaggcagccatttgcctgcacttcagccctatctacaactgacggctatcagtaagtacctaataaactccagatgccaaaccagaagtggctccttccttcgtgatcagtatgggggtgcccctagtgagcaagctgggggcgaggaggtgggaatggggagggaggaaacgtgctcctggaatctggtcagctgggtttaagttttatctcttcatggtttatcaaacgtttactaaagcctggtccagcccaggccctaactgag

SEQ ID NO: 84515 - DNA, 392 bp, Homo sapiens
tgagagggagggctgctgggccaggggcaaggctggcgccaggccgtagggaccggcttagtcaggagcacgggtccatggtaaaacccaaaggcacccccacacactaggatggctaatgcccaaagaacagaatgtgttatgctggcgacactgtggagaaactggaactcttgcgcactgttggtgggaatgtaaaatggtgcagccactgtggaaaacaggatggcagttcctcaaaaagttataaacagaacgaccaaatgattcagcaattccacttctgggtccattctcaaaagaatcgaaagagatacttgtacacacatgttcatagtggcttactcacaattgccaaaaggtagaagcaacacaagtgtccacgaacggat

SEQ ID NO: 84516 - DNA, 650 bp, Homo sapiens
gcggaagagagatcaaagggaagacaagaaatatcctgggaggtttcaggatctaaagttaccatgaagtcaacctaacctcctctggaggtcctcccagtcctcccgtggctggcgatggtgaatcgagtttccgtctccagtttgccaaggcggacaaagccgacacaatgggcctgtccactatcttctttcatatacacaaaatgtcagcttttcctgtttctaactggcaacatcccgcctgatgaccagcttagcaaattagagactctccatgggattccatctgtgtcttagttcgggcttctctaacactgtaccatacataaactgggtggctgattcacaacagaaattgatttctcacagttccggaggttggaagtccgagatcaaggtgccgacatggtaggtttatggtgagggccttttgttctggttgtagactgccacctcctcattgtatcctcagggggcagaaagagggcgagagagctccccgaggtcccttttataagggcattagtcccattcagactaatgggactaaatccagactctgtgctgagtgttgtggattttttgcatgttcatcctccccgcaggcaactggagatgtattgtccccagagggtacaatagagaat

SEQ ID NO: 84517 - DNA, 920 bp, Homo sapiens
tacaaaaattagccaggcatggtggtacacatctgtaatcccaggtattcggaggctgaggctggagaatcgcttgaacctgggaggcggaggctgcagggagccgagatcacgccactgcacttcagcctgggcaatgaagtgagactctgtctcaaaataaacaaacaaaaagaaaccaaacaaatatcttctcccagtgtatcaactgtctttcgattttgtttatttattttcttttttaaactctgcctggttttccctttcccatagaaaccccaataaaagcgatggcctaggctttaccctcagtcctgcttctgcctgaccaaactgtatctctcctgtggctctgtgtgatgtgacttgtcctcttctccaaggaagtattagtcataaattcttctttcagtggcactgatctgtgtcatcactcagtcaaccgcataaattaagacctaggcacagaacaactctgtttctatttctataaaattctagaaaatgcaaactaaaccataatgacagagaatattagtggtttcctagggatgggatgtgggcaaagagagacgaaggaaggagggattaccaaggaggacagggaaacttcgggatgagggatatgctcattatcttgactggtgatggttttacaggtgggccaaaactaatcaaactttacacttcatctatatgaccagctatcatatgtcaattatacctcaataaagctgtttaaaaacatttagggtatatctactggaaagtaaaactttttaattatagactctatcatcacgtgcatagaaaaatccaaaggattctacaaacaagctactagaaccactgactgcatcaagatgcaggtacaaagttaatattcaaaatcaactatatttctatacaagagcaacaaa

SEQ ID NO: 84518 - DNA, 177 bp, Homo sapiens
tcgagatcgcgccattgcatttcagcctgggcaacaagagcgaaactctgtcccaaaaaaagaaaagaaaagaaaaagaacaaaatgccttttcctctctttgtttccatggagaatataacctggaggggaatgaatatagatggaaaggaccagcaacatgacctttttcccact

SEQ ID NO: 84519 - DNA, 375 bp, Homo sapiens
agaacttgagggacacatgcggttaagaggaactgtggaagaaaaatgtactagagaaagggaggagctgtgggaaagggggctctgggatcataacagtaacaagcccttatatattaatagctcttaatgtatgcaatcacagccacatattatgtgtagtaaatcatttcatcttcatgacagtacaatgaggtaggcactattagaatccccatattacagataaggaaattgaggccccaatagggtaagctcaggaaggtgattgcagagataggacccaagccagctgtttgctgggctgcctctcccctgggagaatgacctagaatggaggaggcaggagatagccagcagggaccaacattctct

SEQ ID NO: 84520 - DNA, 160 bp, Homo sapiens
ccagctgcgtcagctcctccccggaaggccccagctgtacctgctccatcccagaaggccccagccgtacctgctccatcccagaaggccccagccatacctgctccatcccggaaggcctcagctgcgtcagcttctccccgaaaggcctcagccgtac

SEQ ID NO: 84521 - DNA, 332 bp, Homo sapiens
tctttatatatttgctgacaccctgcctcattccaaaaaggatctgacagctcttagtctattccccttctgtcttcacccatccccatgactgcagtaaatataactttgataaatacagtaaatgccaacaaaacaaaaatccttcctcttctcctcatgaacgaaaaaaatccaagatttcccccaatgatattttctgcacattaattcattagttctttataggtagagaacacatccttttagttattttgatacattgttacttagcgtcttctacaccagaggtccccaatccccaggctacacatcagtactggtctgcagcc

SEQ ID NO: 84522 - DNA, 454 bp, Homo sapiens
aattctttttttttaaataaattactcagtttcaggtattctaagcaacagaaaatgaactaatattcatgctgatttatagcagaacagtgtaagtcaacattctttcaaaaccaggataaaaattatctcatcataagttatcactgctcacgtacgtaaccacggacgggttatctaaccactccacacctattttttttccttgttaaaatgttgatgctacctgtctctaagtaaattaaatgagctaataatacacacagaatttaaaacaatgcctgaataatcaatcagtgttgcctattacattatttatccctgttatgctcttctgtaccctctttagaaaataattccaagactgaaattataactctagacaggtgtggtggctcacacccatacactcagcactttgggaggccaaggcaaaatcgcttgaggtgaggca

SEQ ID NO: 84523 - DNA, 704 bp, Homo sapiens
tgcggaaatacggcttggctgagtgccgcgttcggccagggccagctcccaggaacagccgggctgcgaggccatgacccagggcctgggaacacagtgaggcctggccatgctgcgaggcctcagaggggcggactgcttaggaggccaacgaccttcctaagggtgggcagtcagggaagggccaacagcatgcccgctgtgtcctcaggcgggccctccctccctgggaccctcccagtgccagcctcctgcctgggccaggctgggagctccctgactgctctggtccctgggctgctcccacgagcctgactctgacggtgtctgctgcacatcatccgcggagtcccgagtttcggccactgcggtcgtccccatttcacagccaggaaacagaggacaggggaagtcaactggaggtcacgcggtggtgagtgacagagtgggtgttgcaggcaaccactggacagagccacaaccacactctccccagcacaccccactgcccctgtgctgggggactgctccccatttcacagatggggaaaccaaggctggcgggaggagcagcaggagcacatccgtggactctaagtcagcaccctgcctgcacacgcagccccaatccccatagtgaggtttgcctccccggcatgaaccaggaacgtccggcctcatcgggaggctggcaccaaaatcca

SEQ ID NO: 84524 - DNA, 420 bp, Homo sapiens
acacccaacatttcccttataccttcttccaactgctctcctgccatttccagaagttgctttcatttcattcactaaacagtttacgaactgaattaaaataaatgagatgcaaataaattcccaggctttctccctcattttcaaattacattttcagtccactcaacctgttataatctcatagtgattttcatttaagagagctaaatggatatgtgattgttgttacaggaactaacaccagacaattaaatgttgaggtgttgatagataaaactgtgttttgatttgcataaacacgatgccagcaaatctaaccctggcagaaattcagttataagacttgtgtgcctaacttgggctaattaccacaagtaccattattaaagaaagagttttaatatttggagttgggat

SEQ ID NO: 84525 - DNA, 369 bp, Homo sapiens
gtgctggggttttatacacatcatctcactcaactcttacaaccaccccacgcaacaaaatcaacaccaccacccttctcgaggaggaagccgagacctgccaggtggtaagggacaaacccagcagagaactccatccttcccttaactccacagggaatcccaagaaagggaatctcaagtccttcttggtaggtgagttaggagctttccatcaacagggagcagtggttaaggacacgtggagaatcccagctccttggacagggtgttccccctcgacattcttgtctgtaacatggggtgatggccaggcgcggtggctcacgcctgtaatcccagcactttgggaggccgaggcgggtggat

SEQ ID NO: 84526 - DNA, 665 bp, Homo sapiens
aagacagccacctcgccaagatcgtgtctcccctttctgaggaagcccagagctgatgactggccatatggatataaaacgcacaaccccctcaggggaactccgactcgggcatctctgaaggactatggggtccagtgcagcacagagtgggacattactttctgctgggaagacccacttcccaatcaagggagcatttggtctgagtcctgaagggtggttggttaagtggcaaatacgcagagctggagaatgaaggatttttttttttaatactttaagttctaggatacacgcgcacaatgtgcaggctcagctttctcatcactgaactggagatacaggtaatagtaatatctacccctggaggtatttttaaatacttccacagtacctgacacgtggtaagttttaacaatgctgatggaggaaacatttggatgtttccagccaaattggaggaatcaacgagtcttgtctactgattagatatagaggtcggaagatggaggatggaggtgaagccaagatggctctaggtatctggcctgagcaagagaactgacaacagttggtatttgggtttgacttgaaggcaactgtgggccatctagatggagagaggtacagtggcatcttggaatttctaaaataaaatacat

SEQ ID NO: 84527 - DNA, 332 bp, Homo sapiens
tgtggtttttaaataagaccagatccttttcaaaataaacctaattgagtttgaaggtataaggaaattttaaaaagcacttctgctcttggtagcatttctgttgatgaactgtgatgacatgtatctttttagtagcctttctacctcatgagattgttgtaaggataaagtagatgttccagaaagtcaaaatctataaacggaagaaagtggtatattttgagctcaggaagctttgtgggtatccattctggatttcctttccagaattttgcacacctccattaccttagtcaaattttgcctaggagtttatgttcagattgggg

SEQ ID NO: 84528 - DNA, 123 bp, Homo sapiens
taagtggttctttctaattttttagaaagtctctcttgctgtgcatttaactacttcagtaaaaatactgacaaggagccaaaccaggagaaaaaatctacttattaaactggaaataatgta

SEQ ID NO: 84529 - DNA, 682 bp, Homo sapiens
aaagaaaaaaaaactttgaaattttaaaatattatcagttaaattaaaataaatgtgcaatttatcaaaatttatgggatgcagcaaaagcagtggataggaggaaattattagcattaagtgcagatattagtaaagaagaaatatctaaaattaatcgtctaagcttctaccttagaaaactagagaaagaaaagcaatttaagcctgaagtaaaaggaagaaaagaaataataaaattagagcagattaataaaattgaaaacagaaaaacgagagagaaaaaaatcctccccaaaatccaaagctgattcattcaaaaaaattaataaaagtgatgaacttatagccaggctaatcaagaacaaaggagagatgacatttattatcaatgtgagaaatgaaagagggataatcactactgagcccaaagacatgagaaaaacaataaaggaatactattaacatttctatgcctacaaatttgataacttagataaatgggacaaatttcttgaaagacataaactaccaaaactcacacgagcataaatagatagtcagcaaaggtctatatctattgaagaaattgaatcataattaataaacgtacaaaaaagaaagactcatgtcctgacaattacactagtgaattttaccaaatatttaagtaagagatgat

SEQ ID NO: 84530 - DNA, 376 bp, Homo sapiens
tattctgattagccctcgcattttaaaaacatgaagccagtatacttaatctctaagacttttaagttattttttcctactaacttctgtggagagcaactttgagacaactgtttaactggatattattctaccaaacatatctgattattattagctttataaaaagatggtaggtttgttttataacttaggtagtagaaagaatattatatttagaatcaaatagactttggtattactcttatcacttactaagtgtgaccttgatatagttaacttctctaaggctaaattttctcatctctaaaatgggagataatagaagtctcagaatagattgcctagagaatgaaagaggaagaatatgtctaaa

SEQ ID NO: 84531 - DNA, 144 bp, Homo sapiens
aattggatgaataaattttgtgtatttgtttttctttaagtcatattagtttctaattacatgtccaacaagagaataggaaagtctacaaataaataatatgtcatttttacatgacattaccatctatcatcaataaaacct

SEQ ID NO: 84532 - DNA, 274 bp, Homo sapiens
tcccaaaataaggtagtagttaactagcatagcaccttgccatactcctcaacctttccccacctcttcttctgtttcacttttctctttatccctttatcctcattcattcattcagcaaacaattattgctttttcctccctgacaggcctgggctggatgctggttatataagcagaaataaacaaggccctgtttatttacagatctcgttctccaggaatacaatgtctacctgcttgcttgtttgcttgcttccttccttccttcctt

SEQ ID NO: 84533 - DNA, 179 bp, Homo sapiens
cccttgtaaatctgaaagtgctgttggtagcaaccagggatgggcagaggcagccctgtcctgagggtgacatgaaagtgagagcaagctgaagctccagttggcttagtcttcaaaagtgtcactttcagattatatccctcagctttaaaatatccttctttgaagtccatccctgc

SEQ ID NO: 84534 - DNA, 175 bp, Homo sapiens
tcatggaaaataaagacaattttgcttaaaggcaatattagtatatgctgcctttataagatctattagcaaacgtctagtgagtattacttcaagtctctgtcactactaagaccaaagcgcctgagtctttcaaccaatctgctcacctttctattttcctgtgccaaaccct

SEQ ID NO: 84535 - DNA, 176 bp, Homo sapiens
ttccctggagccatttctgtctctgtgaaataggcaatttaaggtccatcccatcctaaaagcttttagcttgtgaaaagcttcttttcttgcttttaaaaccttcactctgcgtttagaataaatggcattcctggatctgttaaataggcagttaataatgccacagaaactac

SEQ ID NO: 84536 - DNA, 365 bp, Homo sapiens
aaagttcgtgtcacattctttttacgttttcagacaaggtgtggctctgttgcccaggctggagtgcagtggcgcaatctcagctcactgtaacctctgcttcccaggctcaagtcgtgggatttcgccatgttgtccaggctggtctcgaactcatgagctcaagccatctacctgcctcagcctcccaaagtgctggggctataggtgtgagccaccagcaggtatcacattcttgagaacaattgataatttgtatcaggagtcttaaaattgtttataatctttgaacaattttgccagtcaataatgccatttctaagaaactatctgaaaggagttaccagaaattcattttttccaaa

SEQ ID NO: 84537 - DNA, 816 bp, Homo sapiens
gcggtgcgaagagccgggcggcggccagagccctccccgcgctgccagtgggacgcggagccagggatccccggctttgccccggggctggggtgcaacagactcttaacttggtcctcgcgccccgccaaccgccccagggcaggaaacgcccagaaccaccaccgcgccgcgctccacaaaagccccgggagttccaagacgggagggatcgggcgcgctccagaggcaggagggtcccccacaccctcaggctcatgcccagctcccccatcgggcagcccccagccccatgaggaccctcaggccggggcgagagcccggcacagcccggaccgaaattttgccgctgccttagagcgttagacaggatgtggctgggccgccgggccctgtgcgctctggtccttctgctcgcctgcgcctcgctggggctcctgtacgcgagcacccgggacgcgcccggcctccgggtacctcttgcgccgtgggcgcccccgcaaagcccccgcaggcccgagctgccagatcttgctcctgagccccgctacgcacacatcccggtcaggatcaaggagcaagtagtggggctgctggcttggaacaactgcagttgtgagtccagtggggggggcctccccctccccttccagaaacaagtccgagctattgacctcaccaaggcctttgaccctgcagagctgagggctgcctctgccacaagagagcaggagttccaggcctttctgtcgaggagccagtccccagctgaccagctgctcatagcccctgccaactccccgctccagtaccccc

SEQ ID NO: 84538 - DNA, 401 bp, Homo sapiens
tggacagccttggaacaacttaaaaaatacaataggtctcaacccaccactgtgtctcagtgctggcctccgcctgccccaggcctgttcttttaacactagatactaaattcagaatgagtcccttctgagtcaattactgtggtgagaacaacagaataaactgaacgcatcccatcctcttatctccattgttttctgtttttccctgacttcacttacccactgaggaaaataacatcccccatgatgaatttttccctcatcctttaaaactcataaaccaggaggagccccttttggtgccaaaagaagaaagcacaacactgtgaacctggtttccctcctcaataaggaacagtagagtggacctggagacaaagttgtcagagcattctctg

SEQ ID NO: 84539 - DNA, 963 bp, Homo sapiens
gcttgggggaccgtcctccccttccctatcggccccagaagatagctgccctgtcatctccgcgagaacaggccctctgcccatccccttcccttgaagtggctgtctcctccccgctcagttctggaagatgtccgctccatctcatcgtcccgaaggatgctcacatatattctgagcttcctgcctctgtcagatcagaaagaggcctccctcgtgagttgggcttggtaccgtgctgcccagaatgcccttcgggagcaaccaggccttacctccctggacctcagtggctgctcagaactgactgatggggcgctcttggccgtgagccggggcctgcggcacctgcggcgcctgagcctggggaagctgcagcggctgacagatgcaggatgtacagctctgggtggcctgcaggagctgcagagcctcgacatggccgagggcgggaactggcccaggccctgggctgtatgcacggggctccatcccagctggcctccctcagcctggcccactgctcttcattgaaggatgcctcagtgctctccatgatcccagcactgggctgagcctcagggtgctagacctgtcctcctgtgtggccctcacaacaggaccctgcaggccatctgcacctacctcaccacctctcagtcctgcgcctggcgtggtgcagaggagctctgtgactgggggcttcggggggcctggggggaggcctgtgccaggggacccaggtgtggggaccctcgaggtcttgagaggaacgcgggtggcccctgggaatcagactgcccctccttgcccctcccaaagtcctctgtaggagtaattcaaagggcaaaacctcagggacggaacctgagaaaggcaaagggctcttcccacaagcaggcccagagctggagcatcaggcctcaggtaccaagggacgccgtcagaagcacacagggcccc

SEQ ID NO: 84540 - DNA, 467 bp, Homo sapiens
gtgtggtggtgcatgctggtgagcccagctaattgggaggctgaggcacaagaatcacttgaacaggcaggcagaggttgcagtgaaccgagatcacgctactgcattccagcctgcacagcagagtgagaccctgtctcaaaatagtaataataataataataataataatagtaataaaaataaaaattaaagaaaaacagagcccaacgtcaaagcaatatatacgctttttagcaattacgctgaggcgggaggatcacgaggtcatcctggctaacacagtgaaaccctgtctctactaaaaatacaaaaaattagctgggagtgttggtgggcacctgcagtcacagctactggggaggctgaggcaggagaatggcgtaaacctgggaggcgaagcttgcagtgggccgcaatcgtgccactgcactccagcctgggcgacagttcaagattccgtcttt

SEQ ID NO: 84541 - DNA, 397 bp, Homo sapiens
gttataattatcttgttttattatttattgtttatctcttactgtgtataatgtagaaattaaactttaccataggtatatacatattggaaaaagcatcttatatacagggtttgttactatctgtggtttcaggcatccactgggggtcttggaacatatcccttgcagataagagggaactgctgtatccatagaataaaaacaccccatcttgaagataggaggattctgtaaattgggatggggtcagggaatctgaattttaaaagtttcccatgtgatttgatgcccagccaaggctggggaccactgtcttgaaatataatgctgaggaagatactgtctttgattttcctgtaattcgagtgcaaatctcagctgaacttatggcttg

SEQ ID NO: 84542 - DNA, 1123 bp, Homo sapiens
atcaggaagggtcacgtgttagagctgtggtttacattaatatatacagtgttaggaggagcataaagaggaaaacaccattgtggcaaagtaatcctgtggaaaccagagagagagagatttgataaagtcttggtgactgacctgagtacgaaaccagtggtggtggtagtgggaatctttagattaatgaatattgatttattcataagctacaaaattcaaagggcacccagtttctctttctagaggtaattactatgttcagattcctgggacctttccaggtatctgatgtataaatacctctctctctttccctctctttctaacacagatattagtattcctctgtgtcttactttatccccttaatagtatatcttggaaatcattgttttctttaaaaaaatgttttaattgaggtaagcattcattatacagtaaatgtcttgttccttttaactggctgcataccctgtcaacctatggctgtgccaacactggagagagtctgggttgagtatagtctttttgccattataaacagggttgcagtgaacattcatgtgtatacttctttgtacctatgtatgagtgtatcctggataaattcctaaaagtgacgccactggattggaggtcatttttttttaaactttttattttgaaataattatagattcataagaagttgcaaaaacaggacagagaggccccagttgcccttcacctagtttctcccaatgatagcatcttacataacatgatacagcatggtatatcatatcaaaaccagcacattggtacaatctacaaaccttattcagatttcaccagttttacatgcccttgtgtgcatgtgtgtctgtgtctttgtggttttatgtgcttttatcaggagtagatttgtataacctcaaacaagatgcagaactgttctgtcagcacaaagatcccttgtgctacctcatagtcacaccaaacctcctctcctccttttgtcatcacggcattcctaactgttgacaagcagctaatctgttctccatctctgtaactttgttattttgagaatataattgaaatcgtatagcatggtaaccattgagatgggtttttt

SEQ ID NO: 84543 - DNA, 505 bp, Homo sapiens
cctagccaaatctggattccaggcatttgcaaaacaaataatgatattaccacaattgccatgattacgatgtaaccatgatttgtgaccatgaagcacccataaatttaactgacctacattgtgactgagcccacagcctaacattatcctttaagtaactgagtttaccacctcatgccatctagtaggcaattatcagttttgctcacttgcccctttattatatgatgtgtatttccttatacctgtgcttcattaatatagccaacattcactgaatacctactctgtgccaggcactgttaatacagaaatgaataaggtaccccatttgataggggagatggatatcaacaaaatttacaagtaccacaacctgtaaccctcatgctctaggcggatgttattgataaagtggctcatccatgtcatcaccaggtaactaagctggtgactttagcctaggccttctaagcagtgtagctcctctgtacccctccta

SEQ ID NO: 84544 - DNA, 800 bp, Homo sapiens
tggcagggccatggcggaggcccgagtctcccagcctggggcatctccacgctctgtaacgctgagctccaggcacccgtgaagccccacgggtcaaggctggtgggccggggctgggaggcctgcacgcctgggttctgggtccctaaaccagtacccatccaccacagccaccatgatctggcttcgaaacaggaggtgccttgagccgctccagggcaccccgaagtgggtccctgttctgggggagctgcaaaagaccctccagaagggcgagtacctgcccctccgtccgctgcccatgttcgagagtaactttgttcaggtgacccatcaagggggcccagtgttcgtgaatcacagaaccaaccggctggccatgggcgtggccgcctccctgccaggcctggtgttgcctgacatcttgctgatcggccagcccgccgaggacagggactgctccggcctcgtgctgaccaggatgatcccctggacctcgtccacctctgcgtccatgacctctctgcctggcgcctgaagctgcgcctggtctcgggccgccagtactacctggccctggacgcccctgacaacgaggtgggcttcctgttccactgctgggtccgcctcatcaacctgcttcaggagccggctcccacctggacccccaggaccacgcgcacggcccccctggatatgccgctggccgaagcgcctgcctccacctggcacctgcaggaccagcccatcagcagacatgcagtcagggtttgctgagcgcaactttccgcatagacggg

SEQ ID NO: 84545 - DNA, 291 bp, Homo sapiens
tcatctttgttagatcggtgttcccaagtatcttactgaccaagagacgtccttaccaagaacatgagttaaatcatgttcacttaactctgctaattcagtgtaatttatttctaatatgttaatacgcaaaatattttcaaacatatacatcttcatgatacttaaatcttttaaaatttccaaccagaggccgggcgcagtggctcacgcctgtaatcccagcactttgggaggctgaggcgggcggatcacaaggtcaggagatcgagaccatcctggctaacacgg

SEQ ID NO: 84546 - DNA, 364 bp, Homo sapiens
ctgtgctggatacaacttagaaagacagactcagaaattgccattgccaggttgtctacctcctgttcactgacatttagcctgtgcatggtctcaattcttttctgtctgcaggctcttagatcatttagctctaagagatgggagttgaaacatgtctgcttgaagtggaccagttcccttctctatatgtaccaggaccaaattatggaataggttgtgttggagaagttgaaggtggaaactggaatgggcaagagtaggcagtgatagggacggtacttagaacgttggagaagtaagggaaaggagaggaatgagtgagccaaccacgttccatctctcttgcccttagaaccataca

SEQ ID NO: 84547 - DNA, 209 bp, Homo sapiens
tctttcttttcttatctatcttcttcaccatgtgtcttcggggcctggaacatagtagatgctcaataaatattgattgaatgaatgaatgaataaatctgcttacacctctcatgcttcaaacagggaaaggctagattatttagaagtcttgtcggggataataatgagctcagtgaagccctctagttctcactcgagtttctccc

SEQ ID NO: 84548 - DNA, 370 bp, Homo sapiens
ataagagacaaggtcaaaaggaaaatgtctttacatatgaagccttccatttacagcttaactatccctggaggccacatctaaggacaacccttttaaaaagccatggtgtgtaaatgaatatgtattttgtgtatattcagtatattcaaggtaaatagttgtttttattaaaataacaagggaaaaatagtggaccttcctcgctcatgaagaacatgagaggatgaactgtttaggtcaaattttaaaagaccaggctgggtgcggtggctcacacctgtaattccaacactttgggaggccaaggcaggcagaccacctgaggttgggagtttgagaccagcctgaccaacatggagaaaccctg

SEQ ID NO: 84549 - DNA, 488 bp, Homo sapiens
cttattccttttggacagaatcccaattagtctagatatttttaggcgaagatagcttcatctcaggaaaggtcagatcggttcctgattaggaatgggcatgtgtattaggccttttgcattgctgtaaagaaacacctgaggctgggtaatttatagggaaaagaggcttaattggcttacagttctgcaggctgtacaagcatggctccagcatctgcttctggtgagggcctcaggaagcttccgatcatggtggaaggcaaagggggagcaggcagtgtcccatggtgaaagcaggaacaagagagagaaggggaggagccgggctcctttaaacaactggctgtcttgtgaactaacagagccagggctcactcagagattaccacagagagggcaccaagccattcacgagggatctgccgccatgatccagtacctcccaccagccccacctcctacactggaggtcacatttcaacctg

SEQ ID NO: 84550 - DNA, 450 bp, Homo sapiens
cttgcgggaggccgtgctgctggcaaggacatgcctaaagccagctttggagatggcggttccagctgtgcctgcatgcactcagacacactgagcctgaagaaggcgggcactcacggtccttccaggagtttggggtgtggaactggaggcactccccatccccagcagtaccacctggctctgcttcagtttcctcggatggaggatgtgactacacttcctccaggcagctctgccacgctcagctcctcctcctcatcctcagctgaggcagatgaaagccaagtgccatctcccacctgggagcggggtcggccacaggcctggtgctgggcagtgaggtggctgcctgctttcctattacattttgcatgttccatcattttaaaagaaacccttggatgagtgagctttgccccgtcagctgactctcgttactgagaacag

SEQ ID NO: 84551 - DNA, 861 bp, Homo sapiens
tgctcagtggaagctggttctgaacaatgttaactgccccacccgtgtccatgaagggcagtggaagagcaaggggcggtttaattacctgggatgtaaaacagcaggcacccccactgccctcctcagctgttggggtggcagggtggagttgagggcctcactcgttttcacctttgcacaatcagtcacacatttgttatatgacagctatgtgccacacacccatgttcagtaaggtggaagccagctgcaggcgtggtccacagttccagacatctctgaaggatgtgacaccaactttcaggcagaacatttagaaagagtgaaataaagtgaaacagatcaaccagcctattgagtatctacgtgttttttttacaggcaagaactgaggaggcaatactatttagaatccttgataaacagttccaaaagaaaaaaaaaaacaggctttggtgactctcatgggccctccgtgccaagagtctatggctctgtgatatattaaatcaggcttgttaattatttaatctaacagctgccatgcaccctcattttaaaaacagatgaggcaatgtttacattttctccatgtcctccatttggaagtgtcttagtttgttttgtgttgctgtaacagaataccacagactgggcgatttatagacaatagaaattaatctggctcatggttctagaggctaggaagtccaagagcttggcactggcctctggtgagggccttcatgctgtgtcattgtgggcaaaagagcaaaacttgctttgataaaatcactcttggcaataactgaccctcctctcataataacattaattcattcatgacagcagaaccct

SEQ ID NO: 84552 - DNA, 3336 bp, Homo sapiens
ggcctggaaagtgggagatttcattcgcccgggttaaaaatccagaggaagacagaagagaggagtcctaggaactgagcagattttagagacgcaaatgatgtttaagagagccttgtgatttgtagcaagcatgggcactgctttttcttactaatgtggtagatctacacgaacattctaggctgttctgctcagagcgaggaaccactgctcctcaatggggagggaacataccacccagccaggcttagcgttgggttttatcctttaataaaagttttataatgattcctgttcaccttaaagtgtgattatggagatgattggctccatatttcaccacgtcattccttcaactcaccagacacctttctttagttgaaataaaccagcatgacctggagatcatggtgactgtaagctaagtctgttttcatgccagatttcagccccacccagagtgtgctctagatgttgttgatttgaatggttttcccagttcccactccacatggggaagttgaatgaatgcacacctgctgctcacttcttgtgaggctgccttttgtgatcaaataacaggaagttctgctttagaggagggcacgatgaccatgtggcagtctgcaagtggaattttgggatggcagcccgaggaacatccagagttactgtgtgacttggtcctgccattgttagctttgaaatcacaggcattgggctctgttttgacaccattcattggactgcgggacagtcattctttacgttctctcttgagctggtgagagaggaggaagagggaagtcaagagcaacctccaaggcctatgtcagcctcttctccttgggtcttggggtgggttagaactgggttccagtctggccagatgggttgctggctgcactgagggtgattcttctcagaagatgggctgcctgtggtcaggacagggcataccagtctggactccaccttcccagacacctactttaaggacctgtggaaactgggtgatccaattatagggctggggcaaccctgctttggccaccctcatttacaaacttaggttgggagcttgggtttcctgtctcacttccaaaagccttcaagatggcagcagatggacacaccctctcatttcttgtgtcttgtctgtcagatggcaggaggcctgtatcagtaaatttgaggaaaatgttctctcctgggccagcctcacagcttgcgttgggtgtgttggaattgttctcttcggccttgttctgccttgtgatcttttcaattcagtgaataaaccaggtatccattttttcaccaacccaccctgtagattgtcagctttttgtttgagagatgcctggtctcacagttacatgtatcagagtgtgtgtaagttgtctgtgttagaaaggttggggtgggggctttgttgcaggggattagactgttctttcttcatcataatttgagatacatcctgagtatgactgtctaaccctttctgtgtggcagaaaaatatgttttccaggtagtttttactactacagagagtctgtaaataagtgctttaaaaaaataacaaaccaataagatatttgtctcctatataaacattctgtgtatttagcacttgaaaatcaacaaatccagaatttaaaaaaatgccacagacttttcaaagcccaactgtacttttttgagaatttgtccgtacctactaatatgccttattcttcttcacctagtgttttaaaagtcctgggtagaaagagttttagaaatgtaatcagttgttcagcttcaataatatagagatctaacatagtcagtcctcaggccccctaaagaaacaagcaagaaagtgagggccatcactagggttggctttggggaggggaaaactaaggactgcttttgccaaatgatatttttgataatgtaaggaaacacagggaccacaaaacctttttttttttttaagtgtgaaagattagtgccttttggcatacttttgattttagaggatatagtatcggcattgacaaatcacgtagaaacaaagaatgctatagatgacaacagtattaaatgttactcctgattctgcagaacagcttttgaagatactggggggtatcttcaagcctcagagcagcttgtttcagatagaaattctctatgggttgaaatgccaaaaacagaaaacatgatgttgactcatgtaatttagtccattttagcagagcctttagtgttaacaccagtggcgaggagcattgcatattctctgtcagcagcagcactcccacaccaggtggttctgggctctctgtaggctggtcctagtaggtgacacccagcaacacccctgttggacaggattgattgttcgcagtcttagaccaacacttcagtcagaaatgttactgggaggaggaaaggaaaatcactttttttcctccatgtggaaatgaggagagaggaaagtggattgcaaaccaaaatgtgagtcagtgtgatgaagcagtggctctgtcatctcggcctttatccaataacaaaccagcatctcttaaaggcgcttttggcctagacacccctgaagtttggatgaagtctggtggattccctgtccgttgtatttctgtgtgcctgttcccttcattgctgtgagttgggagtgcattgagagatgatgtccatctgatatattcctgtgaaataaactgccagcaaactttctaacttgtattttaactgttaaagaagagattaaaaacttcggctttggacatgtccacattatggactgtcatcttatttttaaaagtcattctttacgtttaaaattttaaaataaaaaccttctgaggtattgatgtagtccaccgtgtaaatgttaccttctctccatgctgccattatgccaaaacaaaagctgtgataaaaaaagtgcttgagagagtgtgttgataagaaagtgatttatttacagatggaagtctttgtttcatgaagctaccaaactttaaaaagaatgtcacccttttttttgtttgttatggaaaccagagattgtaaaatggaaaaagaatcgttttttttgttgactttttgatgctggcacgaggtttttgtccacttttttcatatatctgtgtataaaaaaattgttgtttactatggaattagtattacattttgaggtaaacaaaagaatttgtattgcttgataaatattagcttgtaaatttaaagtttctttacttcaattaacttaaaggaccaataaacccataaaagatgctttctttaaaaaaaaaaat

SEQ ID NO: 84553 - DNA, 3282 bp, Homo sapiens
ggcctggaaagtgggagatttcattcgcccgggttaaaaatccagaggaagacagaagagaggagtcctaggaactgagcagattttagagacgcaaatgatgtttaagagagccttgtgatttgtagcaagcatgggcactgctttttcttactaatgtggtagatctacacgaacattctaggctgttctgctcagagcgaggaaccactgctcctcaatggggagggaacataccacccagccaggcttagcgttgggttttatcctttaataaaagttttataatgattcctgttcaccttaaagtgtgattatggagatgattggctccatatttcaccacgtcattccttcaactcaccagacacctttctttagttgaaataaaccagcatgacctggagatcatggtgactgtaagctaagtctgttttcatgccagatttcagccccacccagagtgtgctctagatgttgttgatttgaatggttttcccagttcccactccacatggggaagttgaatgaatgcacacctgctgctcacttcttgtgaggctgccttttgtgatcaaataacaggaagttctgctttagaggagggcacgatgaccatgtggcagtctgcaagtggaattttgggatggcagcccgaggaacatccagagttactgtgtgacttggtcctgccattgttagctttgaaatcacaggcattgggctctgttttgacaccattcattggactgcgggacagtcattctttacgttctctcttgagctggtgagagaggaggaagagggaagtcaagagcaacctccaaggcctatgtcagcctcttctccttgggtcttggggtgggttagaactgggttccagtctggccagatgggttgctggctgcactgagggtgattcttctcagaagatgggctgcctgtggtcaggacagggcataccagtctggactccaccttcccagacacctactttaaggacctgtggaaactgggtgatccaattatagggctggggcaaccctgctttggccaccctcatttacaaacttaggttgggagcttgggtttcctgtctcacttccaaaagccttcaagatggcagcagatggacacaccctctcatttcttgtgtcttgtctgtcagatggcaggaggcctgtatcagtaaatttgaggaaaatgttctctcctgggccagcctcacagcttgcgttgggtgtgttggaattgttctcttcggccttgttctgccttgtgatcttttcaattcagtgaataaaccaggtatccattttttcaccaacccaccctgtagattgtcagctttttgtttgagagatgcctggtctcacagttacatgtatcagagtgtgtgtaagttgtctgtgttagaaaggttggggtgggggctttgttgcaggggattagactgttctttcttcatcataatttgagatacatcctgagtatgactgtctaaccctttctgtgtggcagaaaaatatgttttccaggtagtttttactactacagagagtctgtaaataagtgctttaaaaaaataacaaaccaataagatatttgtctcctatataaacattctgtgtatttagcacttgaaaatcaacaaatccagaatttaaaaaaatgccacagacttttcaaagcccaactgtacttttttgagaatttgtccgtacctactaatatgccttattcttcttcacctagtgttttaaaagtcctgggtagaaagagttttagaaatgtaatcagttgttcagcttcaataatatagagatctaacatagtcagtcctcaggccccctaaagaaacaagcaagaaagtgagggccatcactagggttggctttggggaggggaggaccacaaaacctttttttttttttaagtgtgaaagattagtgccttttggcatacttttgattttagaggatatagtatcggcattgacaaatcacgtagaaacaaagaatgctatagatgacaacagtattaaatgttactcctgattctgcagaacagcttttgaagatactggggggtatcttcaagcctcagagcagcttgtttcagatagaaattctctatgggttgaaatgccaaaaacagaaaacatgatgttgactcatgtaatttagtccattttagcagagcctttagtgttaacaccagtggcgaggagcattgcatattctctgtcagcagcagcactcccacaccaggtggttctgggctctctgtaggctggtcctagtaggtgacacccagcaacacccctgttggacaggattgattgttcgcagtcttagaccaacacttcagtcagaaatgttactgggaggaggaaaggaaaatcactttttttcctccatgtggaaatgaggagagaggaaagtggattgcaaaccaaaatgtgagtcagtgtgatgaagcagtggctctgtcatctcggcctttatccaataacaaaccagcatctcttaaaggcgcttttggcctagacacccctgaagtttggatgaagtctggtggattccctgtccgttgtatttctgtgtgcctgttcccttcattgctgtgagttgggagtgcattgagagatgatgtccatctgatatattcctgtgaaataaactgccagcaaactttctaacttgtattttaactgttaaagaagagattaaaaacttcggctttggacatgtccacattatggactgtcatcttatttttaaaagtcattctttacgtttaaaattttaaaataaaaaccttctgaggtattgatgtagtccaccgtgtaaatgttaccttctctccatgctgccattatgccaaaacaaaagctgtgataaaaaaagtgcttgagagagtgtgttgataagaaagtgatttatttacagatggaagtctttgtttcatgaagctaccaaactttaaaaagaatgtcacccttttttttgtttgttatggaaaccagagattgtaaaatggaaaaagaatcgttttttttgttgactttttgatgctggcacgaggtttttgtccacttttttcatatatctgtgtataaaaaaattgttgtttactatggaattagtattacattttgaggtaaacaaaagaatttgtattgcttgataaatattagcttgtaaatttaaagtttctttacttcaattaacttaaaggaccaataaacccataaaagatgctttctttaaaaaaaaaaat

SEQ ID NO: 84554 - DNA, 2992 bp, Homo sapiens
ggcctggaaagtgggagatttcattcgcccgggttaaaaatccagaggaagacagaagagaggagtcctaggaactgagcagattttagagacgcaaatgatgtttaagagagccttgtgatttgtagcaagcatgggcactgctttttcttactaatgtggtagatctacacgaacattctaggctgttctgctcagagcgaggaaccactgctcctcaatggggagggaacataccacccagccaggcttagcgttgggttttatcctttaataaaagttttataatgattcctgttcaccttaaagtgtgattatggagatgattggctccatatttcaccacgtcattccttcaactcaccagacacctttctttagttgaaataaaccagcatgacctggagatcatggtgactgtaagctaagtctgttttcatgccagatttcagccccacccagagtgtgctctagatgttgttgatttgaatggttttcccagttcccactccacatggggaagttgaatgaatgcacacctgctgctcacttcttgtgaggctgccttttgtgatcaaataacaggaagttctgctttagaggagggcacgatgaccatgtggcagtctgcaagtggaattttgggatggcagcccgaggaacatccagagttactgtgtgacttggtcctgccattgttagctttgaaatcacaggcattgggctctgttttgacaccattcattggactgcgggacagtcattctttacgttctctcttgagctggtgagagaggaggaagagggaagtcaagagcaacctccaaggcctatgtcagcctcttctccttgggtcttggggtgggttagaactgggttccagtctggccagatgggttgctggctgcactgagggtgattcttctcagaagatgggctgcctgtggtcaggacagggcataccagtctggactccaccttcccagacacctactttaaggacctgtggaaactgggtgatccaattatagggctggggcaaccctgctttggccaccctcatttacaaacttaggttgggagcttgggtttcctgtctcacttccaaaagccttcaagatggcagcagatggacacaccctctcatttcttgtgtcttgtctgtcagatggcaggaggcctgtatcagtaaatttgaggaaaatgttctctcctgggccagcctcacagcttgcgttgggtgtgttggaattgttctcttcggccttgttctgccttgtgatcttttcaattcagtgaataaaccaggtatccattttttcaccaacccaccctgtagattgtcagctttttgtttgagagatgcctggtctcacagttacatgtatcagagtgtgtgtaagttgtctgtgttagaaaggttggggtgggggctttgttgcaggggattagactgttctttcttcatcataatttgagatacatcctgagtatgactgtctaaccctttctgtgtggcagaaaaatatgttttccaggtagtttttactactacagagagtctgtaaataagtgctttaaaaaaataacaaaccaataagatatttgtctcctatataaacattctgtgtatttagcacttgaaaatcaacaaatccagaatttaaaaaaatgccacagacttttcaaagcccaactgtacttttttgagaatttgtccgtacctactaatatgccttattcttcttcacctagtgttttaaaagtcctgggtagaaagagttttagaaatgtaatcagttgttcagcttcaataatatagagatctaacatagtcagtcctcaggccccctaaagaaacaagcaagaaagtgagggccatcactagggttggctttggggaggggaaaactaaggactgcttttgccaaatgatatttttgataatgtaaggaaacacagggaccacaaaacctttttttttttttaagtgtgaaagattagtgccttttggcatacttttgattttagaggatatagtatcggcattgacaaatcacgtagaaacaaagaatgctatagatgacaacagtattaaatgttactcctgattctgcagaacagcttttgaagatactggggggtatcttcaagcctcagagcagcttgtttcagatagaaattctctatgggttgaaatgccaaaaacagaaaacatgatgttgactcatgtaatttagtccattttagcagagcctttagtgttaacaccagtggcgaggagcattgcatattctctgtcagcagcagcactcccacaccaggtggttctgggctctctgtaggctggtcctagtaggtgacacccagcaacacccctgttggacaggattgattgttcgcagtcttagaccaacacttcagtcagaaatgttactgggaggaggaaaggaaaatcactttttttcctccatgtggaaatgaggagagaggaaagtggattgcaaaccaaaatgtgagtcagtgtgatgaagcagtggctctgtcatctcggcctttatccaataacaaaccagcatctcttaaaggcgcttttggcctagacacccctgaagtttggatgaagtctggtggattccctgtccgttgtatttctgtgtgccgggtccggaccccggcaacacagagtacaagagactggcaggagagaagagaggagaaacagagaaggagagagaaagggagagacagaaggagagaatgaacggtggcaagctagaaatctagaaggaaagcaatacaaggagagggagaaagacagaaagcagaaaaaagaaaagagaaggaagggaaaggaagaggaaagggggaaaaggcaagacaagagagggtaaaaggaagagacagagggagagagagaatgacagtggtgtataatttattcccttctgtgattcaagactcagtctccagccacaaaaaggatctaaaa

SEQ ID NO: 84555 - DNA, 123 bp, Homo sapiens
agaataaatggctgcaagcatgaaagacaagctctatatactaaacaaaaagttgatctaatttaatggtgtcataattttaaaaattgtgttgattgcaaatttttttttttttttttttga

SEQ ID NO: 84556 - DNA, 724 bp, Homo sapiens
gaaatctcgttgagtttgggaggccttacttctgcatatttgaatctggtgaccaaattaaacattgttctaactgtagtggtctgatcattctaccaaggccatgactgtgaagagcactgtgggtgatggctggtggctcaccggagccggcttgtgcacggcgcccgaagccaaagaaatctgaagacccgaccttactattggcaaagacagacaaacactctacaaatagtgcttgaaaaatgccactgtttggttcagatggtgaagaggaactcaggaaggcctggcagtctctaggaggctagggcagtggttctcaaatgatagggtgtacagaaattccctggaggacttgtgacaacaaagattgctaggcctactcccagggtttctaattcagcaggtctggggatggagctcaagtatctgcatttctaacaagtccccggtggtgctgatgctgcttgcatggaccagttttgagaaccatacttggagaaacacttggttaggaaaactatgtctgttacagattgatcaaagggctcttaagttccttttgtacaataaatcactgcgatatcaaatgaggtaaatgaacatgctctttgaactcttaacttctagaccaatataaaacattctaaatatgaaatggaaacatttacaattgttattgattctcatcaatgcaatgttcaataaagataagaatcac

SEQ ID NO: 84557 - DNA, 444 bp, Homo sapiens
  misc_feature (333)..(333): n is a, c, g, or t
ctacagtacccatctccattttcagagagctccgatggaaatttctatgaactaattctcctgcacatactttggtacaagtgggctactggagccaccttccttcgttcaatcaaacagcatttattcagcttatttaatgaacactatccaagatacttgggggacagaaatgaaaagatggggagacctgtcaaacatatggtactatgtctatgcaaaataacattggaatgtagattcacagtggaaggcagggcaggcatggaagaattctgagaatgagtgtgacagctcctacctgtaacagctcttcaagctcctgctggaagnggtcagtcagcaaatctactagctggctcgggcaaagtccgcccggctggaggaaagtgaattccgggatttacagagcaggtagagggcatgcggcccagccctcaagca

SEQ ID NO: 84558 - DNA, 417 bp, Homo sapiens
tcaaaactgggcaaagtgcacacttcagtagcacatatactaaaaatggaacaacacagattattagcatggcccctggaaaaaaaaatttaatgggcaaagcacttgaatagacatatctaagatgtacaaatggccaataagcagatgaaaagatgctccacatcattagtcattaggaaaatgcaaaccaaaaccacaatgagaatgaccatatgattcagcaattccacttctgcgtgtataccccaaagaatcgaaagcagggtccggaagagctgtggacaccatgttaacagcagcattattcacaatagctaagaggtggaagtaacccaagaatctataaagggatgaaaggataagcaaaatgtggaacatacatacacttaaattttattcagccttaaaaaggaa

SEQ ID NO: 84559 - DNA, 744 bp, Homo sapiens
ccttttgctatactcacagtcttgttttcccagcctcttttactagtctttcaggaggtttgctcttagaactggtgatgtaaagaatggaagtagctgtatgagcagttcaaaggccaagccgtggaatggtagcaatgggatataatacctttctaagggaaacatttgtatcagtatcatttgatctgccatggacatgtgtttaaagtggctttctggcccttctttcaatggcttcttccctaaaacgtggagactctaagttaatgtcgttactatgggccatattactaatgcccactggggtctatgatttctcaaaattttcattcggaatccgaaggatacagtctttaaactttagaattcccaagaaggctttattacacctcagaaattgaaagcaccatgactttgtccattaaaaaattatccatagtttttttagtgcttttaacattccgacatacatcattctgtgattaaatctccagatttctgtaaatgatacctacattctaaagagttaattctaattattccgatatgaccttaaggaaaagtaaaggaataaatttttgtctttgttgaagtatttaatagagtaaggtaaagaagatattaagtccctttcaaaatggaaaattaattctaaactgagaaaaatgttcctactacctattgctgatactgtctttgcataaatgaataaaaataaactttttttcttcaaatgtgttt

SEQ ID NO: 84560 - DNA, 159 bp, Homo sapiens
ccacgtaacattttggacaacaacggactgcatatacaacagtggtcccataaaattatcatgaagctaaaaaaaactcctccaggctggctatagtggctcacacctgtgaccctgtaacgctgggagtcctgagctcagaagctcgagaccagcctg

SEQ ID NO: 84561 - DNA, 284 bp, Homo sapiens
acatatacatatacatattatacatatgcatacatgtaatttcttagctacatctctaatgattagatagataggggaaagaatccattctgagaaagaaaatggtactattgggtgatgagcagagtcctcagagaataaaataaaacagttcatttctgtttctatcaagtcgtttatcaattcccactatatctgtcttcaaagtgcttttttgcccgttatttcccccagggtcctggctctcagacaagaagagaggatagcactggaacctctagatc

SEQ ID NO: 84562 - DNA, 192 bp, Homo sapiens
tccatggtactcttcccgctaatgcggggcaccttcctaatactcggctctgtgcatttcactcgcagctgacacacttcagtggccccaattttcatggaatatttaaagacgggctctggtgggtaatcaaggaaagaccaggcaactcaggagggcctgaaaggtgcacgattctcagccaggtgtgga

SEQ ID NO: 84563 - DNA, 826 bp, Homo sapiens
ggaggatcggtgtgaaataacgggcccatataaatccctctgccgcccgcctgcaagatggattggccgcattgaaattcctccgcgaggataattaaactcggggcctcatccgggcaaaattacattcctgtaatggcgtcgctcggggtcccgggaaattgctccgtgggctttcagcggcggtttttatcgccggccggggtgtgcctgtctgcggctcgcctctcctccgggaccgtaaagctgctgccgtgatttatcctccccttctcccaaatccgattaaatggaggagctcggggccggggcgccgcggggcccgggagccgggagggggcggcgggaaggacggggccaaggaggggaggacaaacggcccctcagagagtggcggatttgcctttatttacagccgcggctttctttttattttttattttttatggggtttggtgagcttttcccgtctttctcgtgctgcgttcaagcacgatgcagggacggcaggggtttggaactggataggccttgtcgccctgttccaaagggcagggcaggtcctgtctgggagacaaggaggcctaggaaagatgagggccaggaagcctcccccacctccttccatcaggggaagggcgagcgaaaggggagagaaaacccacgttcaggagagcatgggggcgggaggggagggcgctgcttatcccaactcgcgtagttgaaacctgagcagaggctcgggcaagcctggagtgacctcgcaaccttacagcgggtcgcaggtgcccgttattcctagactgtcccaggagccaggaaagag

SEQ ID NO: 84564 - DNA, 499 bp, Homo sapiens
gacgcctgcttatctcaaaggtgggttgtggggatccacatgaaacaaggaatagcctctcatggtcagaggtcaatggatgctgccgttctgagggtggctgccaccacctgatgcagggtgcggcttccaccatacccaggagcagctggccttggaagtgagccatgtgacctgccttccgggcagacccctagcggagctgagcatggtggtggggtgtcagcagggtgtctgctttgccaagtcctttgcggacctgccctgagttcctccactcttcctggccaggggactccaagcgtgtgggcgttgtcagtaagtgtcaagcctgtgggcgttgtcactaagtgtctgcaaacatctgtgattcctcccagacacatcgctggctggagaggggacgtcgctcgagacgtctgcagggtgaggcagcctcgctggcaaggggcctgatgggcagccctgcgtggaagatgtccccagggaggacacagca

SEQ ID NO: 84565 - DNA, 436 bp, Homo sapiens
ccagggatccttaatggctaggggtatgtcttagaacttgagacagcaatgagttcagaaggcttagctccagggagaggagggatacatatgttcaggagcaatgaggccattgtacacctcaacagaaaactaccattttaccatttgtcctttggtttccctaaggcatggtctggagattcttcactgacaatcactagcactggaatagcaaagtcacagtgattcaggattagcaatagtcatgggacgtgaaatacaaaagtaaaaaaggattgactaggcaaataccataagccaaagactaaggagttgttattatatggtcaggtatatgtgaatgtcaggtggccagcaggaaaggtgcagaaagtggtttctaaacagacgggaaattctcagtgtgcagataatctgtcaaacctagagggaa

SEQ ID NO: 84566 - DNA, 734 bp, Homo sapiens
ccggagccaggagccgcaaccaattcaggtctgccttgggggtgttcagtgttttttattttgctcatcacagtgaattttaagactgctcagtgtttgggtctgcactgcgtttatgagctataacacttactgcaaaggtctgcagttttactgctgaagccagtgagaccaggaacccaccttaaggaagaaactccagacccatctgaacatctgaaagaacaaattctggacacaccatctttaagaactgtaatcctaactgcaaaggtgcgtggcttcattcttgaagtcagtgaaaccaagaacccaccaattccggacacaccagcacattgggagaccgaggcaggcagaacacctgagatcgggagttttgagaccaacctgatcaacatggagaaaccccgtctctactaaaaatacaaaattagctgagtgtggtggcacatgcctgtaatccagctactctggaggctgatggaggagaatcgcttgaacctaggaggcagaggtggcagtgagccgagatcgtgccattgcactccagcctgggaaatgagagaaactccgtctcaaaaaaataaataaattgattgtgatgtcatgaaggtgcaaagacagttaaagattactgatattgttacaacactgtgttgattgtagtagtgggagaaaatactgttttctgattagtttatcagatatagctcattatatatgtggtgaga

SEQ ID NO: 84567 - DNA, 1089 bp, Homo sapiens
  misc_feature (1)..(2): n is a, c, g, or t
  misc_feature (4)..(4): n is a, c, g, or t
  misc_feature (388)..(388): n is a, c, g, or t
  misc_feature (405)..(405): n is a, c, g, or t
  misc_feature (416)..(418): n is a, c, g, or t
  misc_feature (426)..(427): n is a, c, g, or t
  misc_feature (454)..(457): n is a, c, g, or t
  misc_feature (474)..(474): n is a, c, g, or t
  misc_feature (498)..(498): n is a, c, g, or t
  misc_feature (965)..(965): n is a, c, g, or t
  misc_feature (1086)..(1087): n is a, c, g, or t
  misc_feature (1089)..(1089): n is a, c, g, or t
nncnggccgtcggtaacagaaaactcagtgcatactttgctgttgttaggttgtcaatatagtctttctgtaggatggatagcatgtttgagaggtgccaaacaagaacttttggggttagtagtgtgtcttgtggagggtattacaggactgtgtaattataggactctaacttgacatggcttggcacccacttgcagctagtgggtacagggtacaaaagatgttagagaaaagctctacagattacgtacttctgtgtcttcgtatgctcaacactgtcctttgtcctccatgaaagatgaaggaagcaaattatgtatgtactttctttgaccttctttaatctctgatactttttagattgcatgattttactaggcttgtntttagggaaattacttncataaatactnnngtagattnngaatcaaaactcagtctttttaatttnnnngtagtctataaactagnttcattatgatggacttgattagnccaaagttaattttagaaattgtcaggtagcatagtgtcttcccatgatcaggaggctttctgaaggactgagtctgtaaatgaaaaaataatttatgtatgaatagcatgtatttctgaagagcttagagtgccttgtagaatttttttctcaattttattcttgaggtttataatttgggggccaaatagatagagctcatcattttcttgtttggaagttgaggctgcgacatgtccaaggttatgaagtctcttttgggaagaacagaaaccaggtctccaaatctggactcatggtttgttcagatgtgtctggacaaatggttgtcaatgttttgtcctgttttttcaaaggaactgttcttcctttgggacaaccttttggtgtttgggaaagtaataagatcttggatttttcaaattaacattaagttgtaagaactaaaattttctttgaaccacantactgtgtaattcactgataattgacatattggctgggcagcctatctcttccatatccagcgtaaatgaataggaggtgtttgtgattttttttttctccctttatttaacattgagtcnnan

SEQ ID NO: 84568 - DNA, 490 bp, Homo sapiens
agaagaagacataagtctctcataaaataagagtttttaaaagttgctgatattaactttctaattgtttacatttcagctaagttagagtttactataataaaaatttaaaacaaggtcaatatctctaaaaaagtaaaagttctgactaaatacttttgcatggatgtctgaataagtattcatacagtgccttttctaagcactggatagcagtaaacacaaaagacagaaatcccttcctttagggaaattacacctcagtaaggaagatagacccaaacaaagaaacaaacaaaaaagtaaattatgtttatatgagaaggtgacaaatgcagtgaaggaaaactaagcagagaagggggatagaaagagcaggaaaacagtaaagtggaattacaactttaaatacggagatccagaaagatctcaaaaaaaaaaaactctatgcataagtatatgccttagtttttttagcttaaatcataaa

SEQ ID NO: 84569 - DNA, 448 bp, Homo sapiens
gccattactgcttagtctgtaatgaaagctttactgcttctatgctgtgctcaagagaaaaccaacaacggaagcgaagacttacttgctccttcacagaattgcagcaaagctctctgctgggcaatggtgacaggaaagtgtgtaattgacttgttgaagataatcatgagaccatcttaacattacttgccttataagttagaaatagtatggatatcactctttgtaaataataatttttgtaaatgttttttgttcataattttcccaatcacctatttcacaaaatcctgaatatgcaattatttattatgacacgttactgcaactagggctcccattccagaacaaagtttaattctatatgtaagttgttactgaaatgtgatttctttttctggaaaataaatgaaaaatatgaaaataaattgaattgtgaatatca

SEQ ID NO: 84570 - DNA, 490 bp, Homo sapiens
ctaaaatggaataaaatacataaaacccaaatattaaatcattgagagaaatttttaaaatagtcttagattccttctttttaatgattccttgatgggtgggtgaggtggcacacacctgtaatcccagcactttaggacgccaaggcgggtggctcacttgaggccaggagttagagatcagcatggccaacttgccgaaaccccgtctctactaaagatgcaaaaattaaccaggcgtgctcatgcgaggctgtaaccccagctactcagggaggctgaggtgggagaattgcttgaacccaggaggcggaggctgcagtgagtcgaggttgtgccactgcactccagcctggacgacagagcaagactctgtctcaaaacaacaacaacaacaaaataataataattataattctacgacagccatttcatgaaaaaatagaatttatcttcccgtaatacacattactgtcaataaacattccca

SEQ ID NO: 84571 - DNA, 451 bp, Homo sapiens
tgtgtatatatagtgtgtatatagtgtatatagtgtgtgtatatatatattgtgtgtatatatatcgtgtggatatatattgtgtggatatatatatagtgtatatatattgtggacatatgtatagtgtgtatatatattgtggacatatatagtgtatatatattttggacatatatagtgtatatatattgtggatatatatatagtgtgtatatatattgtggatatatatatagcgggtatatgtagtggatatatatagtatatatatattgtggatatacacacacacacaatagctgggcattgtagtgcatgcttgtagtcccagttactcaggaggctgaggtagaaggataacctgagcccagggagattgaggctgcagtgagccgtgatcagtcgctccattgccctccagcctgggcgacagagaccctgtctccaa

SEQ ID NO: 84572 - DNA, 339 bp, Homo sapiens
ttttgctttccagttgtgattatctataccaatcgaaacttgtactggtgcttttatttagatcctactcccaagtatgtatttatttttaaaaatttatgtaagctatattttttttggctataataactttcctaataattcttttagataggatttgagagtgatatactttctgtattgttacatatcagaaaatatatttattttgcccctgtacatgattagtttaactgggaatgaattctgtgttcctaatcatttcccctcagattttcaaaaaaaattgcttcattgtttccaatgaaatatctgacatcaaataattttttctttgcg

SEQ ID NO: 84573 - DNA, 350 bp, Homo sapiens
ggggaaaagaggagggttgtttcaaatgcacagtttcagttttgcaagggaagggttatggaagtggatggtgctgatggtggcacaacattgtgaatgtacctaatgcttctgaaatgtatgcttaaaaatggttaagatggtagtttatgttacgtgtattttactatagtgaaaaaaaagtatgttcgagtatgtttcagaaatactggcttagagcaaatttcgaccacactctgtgaactggaggacacccctgtgcaaccaacatgccagtctgtactctttaaaaggagccattgctgactttccttggacctagtgtcctctttctttctctctctctctct

SEQ ID NO: 84574 - DNA, 331 bp, Homo sapiens
aaaatttagttttcctcatacagatactgtacacaattttgctacatttgtacttaagtatttcattcttgaagtgctgagtaagtgctattgtgttttttgaatcaaatccaattgttcattgctggtataaacaaaagcgactggcttttgtatattgaccttaaattctccaataacttattagttcaattttttgctacaattattagtttaattatttgctacaatttttgttgattctttgggatttcccacattaaaattatgtaatctgtgaacaaagttttattttttctacccaatttgtgtgcatctccttccttttttg

SEQ ID NO: 84575 - DNA, 377 bp, Homo sapiens
gagtttagacctcagtggaattgactcatgtgaaatgagtgatagtggaagtcaagtgccagacagtctgcctagcacaccatccccagtagagtctactaaatcgttttctgtgcactctgacagagaaagcagcatcacaaatgatatgggctttagtgatgacttctctttacttgaaagccaagagagatgtgaggaggagcttcttcaattactgacacatattttgaattatgtaatgtgtaagggactagaaaagtctgatgatgatacttggattgaacgaggacaagtgttttcagcactaagtaaaccaggaatatccagtgaactacttcgaccatcagatgaaataaaactaacgtaagcattta

SEQ ID NO: 84576 - DNA, 879 bp, Homo sapiens
ctactgctgctagcaaataaccagcaaaatgtagaaaatgaaaaaccaattttctgtagacaacctggagaaaagagtgcctgcccctgacttagcggggcagagaatgacaatttttaaagtttgccttttctgaaggttgcttttagcccagtgctgcctcagcagcaaggggcaagcagagtcattgcgcatgtggcgcttccagctctacctgtggagctggcctgggctcagataatcccctgtgactggccattggagcggcggagctcctgaggctagttcacagcacccagaggtctcttacagtcaacagattgcatactgttgacagactgcaatccgtctgtgttccccacaccaactccatttccaagatgggaattttattcaggaactcatttttgagttcccaacatgttgacttcgcatccatttctgctcaccaaggcagaaccatagcagtggtgtgtgacaaagatgcaaatggagggcagcccaaacaatggaaaagagaagattttcagcccattcttggggctaagtgaggttttgatttatggtagaagacagttctaaaaagcagctggcagcatgggcttcaatttgtggcccttctgagttcaaacagaaggaaggaaaaggagccacataaagtgtacacattcaattcatcttagaatgatagctcccaccttattacactgtacaactatttaataatctgggttacacacatccagaggtgaaataaagaaattttcacttacaaatgtgtatttccaacatgctaagttaacctccagagagaagtgcctgtaatctctgttcctggtgtcactttaaagcttttgcttcatgactgtagctgttgtt

SEQ ID NO: 84577 - DNA, 402 bp, Homo sapiens
ttctgatcctacctaatgtagtcagccacctggggaatttactactccagcagggctaggtggggtctgaggatggtggtggaaaatcatatctccttctcactccctggtccaagtgtatgtatggaggtggaggactccctggctactccaatcttgtatcactactcttcaccctgtggggagtgtgtctggctgtgggtctctgtcttctgatacgtatagggatttttgataggaaaatgaagtgcagcatgtactctgatccccatcttgaggcaattctgagtgtttgttttgaatgtgacttgcctgatgtgattcaacaaacaattctgtgtttttgacatgccctcctttctgccaattatgtcttagaatttgccccttgtaaaaaaaaaa

SEQ ID NO: 84578 - DNA, 427 bp, Homo sapiens
cttgagaatcaacttttagatgacttgaatgataaatttttgataaattaaaaaatatttataattgtgtacatcgaaagtctcatgttttacaaaactcactccagaattctagagtgaagtcctgtctttcttaggaagcaatggaaaggtattaaatatctctcaagtgtttaattcattgtattctctactaggtatagattgttgtctctcagtttctaaattaaacagttgccttctcaagactttggtgatgatgattatgatgatggcaattacaatattaatatgactgagtgtttggatatcaaagatgagaagaggcctttcctttctaaaagaagtgattttttttgtgtgtggttgatttgtatttaatttcatttaggtaggtttggttctggatggatactagatttttgtg

SEQ ID NO: 84579 - DNA, 3430 bp, Homo sapiens
cgtgacgcgtgggctcgcgatttggtagtcaatatctgcagtggaaggcgctgtggaaggcgctgtgggttgaggtcgccgcccacctctcctaggggaactatggagctggcagctgaaagactcagtgaagcaacgaggatgccggggagagggaaggggctgggctctgggcggtgccaagtctgtgagggggcgcggtcaccgcccagggttcccacgaacgccaaggcggccacgtcctgctccccctggtgaagaagctgccctgggcttgtcgtcctagggtctccagacatgtctgaggtgaagagccggaagaagtcggggcccaagggagcccctgctgcggagcccgggaagcggagcgagggcgggaagacccccgtggcccggagcagcggaggcgggggctgggcagacccccgaacgtgcctgagcctgctgtcgctggggacgtgcctgggcctggcctggtttgtatttcagcagtcagaaaaatttgcaaaggtggaaaaccaataccagttactgaaactagaaaccaatgaattccaacaacttcaaagtaaaatcagtttaatttcagaaaagcttgagtctactgaaagcatcctgcaggaagctacatcatccatgtctttgatgacccagtttgagcaggaagtatccaacctccaagatatcatgcatgacattcaaaataatgaagaggtgctcactcaaaggatgcaaagccttaatgagaaatttcagaatattacggatttctggaagagaagcctagaagaaatgaacattaatacagacattttcaaatcagaagcaaaacatatacattctcaagtaactgtccaaattaactcagctgagcaggaaataaaattgctcactgaacggctaaaagatttggaagatagcacactaagaaatattagaacagtaaaaagacaagaagaagaagatctcctgcgagtagaggagcagctaggctctgatacaaaggcaattgaaaagttagaagaggaacagcatgccctctttgccagagatgaagatctgactaataaactttccgactacgaacccaaagttgaagaatgcaagacacatttgccaacaattgaaagtgctattcactctgttctcagagtctctcaggatctgatagaaacagaaaagaaaatggaagacttgactatgcagatgtttaatatggaagatgatatgctgaaagcagtgtctgaaataatggagatgcagaaaacccttgaaggaattcagtatgataatagcatattaaagatgcaaaatgaactggatattctaaaagaaaaagttcatgattttatagcatactcaagtacaggagaaaagggaactttaaaagaatataatatagaaaataaaggaattggtggtgatttttaaattcatgacatttattctgatgaaccatatcattatacataaattgattagtccattgattttgagttactttgatacgcctcatcttatcctacattattggaaaataaatgagatgtccacacaaatggattatccacataatcaaagcttatctttttaagcactaaaacttacttcattgtaactatttgaaatagaaatagttctttaaaaatatttctctacttttaaaacaagatacttaatatttttaatgttttttaaagcattaatggacatcatcattaatttcacctattatattgtacccacatatattgatgtctccaggggctaataaagagtatttaccacttcactaaatgaccccaatttgccattttcaaacctatgtctcataccttttctgtcacctgaacttactgtcaggttggttggtaatgtgcctgcctcagccagttcactttcttaggtaattcactgcaggttaagaatccacacaaccaagttcatgggaattttgtgtaaaataaaagataacatgcctgagggagagcctggtgcctttgctatgaattaatatgcactttctgaaaactctaaagcctgggaaacattttagtttttgttaaggttctaaactgtgctacagatacttgtaagacttttaaaatcagagtaagtatgttcttacataaggcctttcttaggaattatgtgtatataaatctttgaaatatctttatatacctgagttttaggttccaactgtgttagacatgagtttgctagatccatggtctctagatggtttacttaaataggccaggcgcagtggctcacacctgtaatcctagcactttgggaggccgaggtgggcagatcacgaagtcaggagatcaagaccatctggctaacagggtgaaaccctgtctctactaaaaaatacaaaaaattagccaggcgtggtggtgggtgcctgtagtcccagctactcaggaggctgaggcaggagaatggtgtgaacccgggaggcagagcttgcagtgagccgagatcgcgccactgcactccagcctgagtggcaaagtgagactctgtctcaataaataaataaataaataaaaataagcctgtggcctgttttgagggaaaagtaacataactctgataattaattatgataataactatgatagttaaaaatacgtcattttaaagatttcccaaaccacaccactaaatttgttttatgaattgattttattttatttgaaattatataatgtagtcaactgcaatatggaagtttgttcttgtttctttgtcaataaccttaccagttttataatgcagtttttgatggaattaaacacaaagaacttgaaagcagtcagttacaaaaaggtagttgtggtcaagtagttttaatatgtaaatttgcaagtttttggagaacccccaaactccttctccactggagttaggagggcctgtggtagacagcgtgaatcatgaaaataagcctggagagttctgttattaaggggcatagcattaatttttgcagtcttaaaattacacttcttgacttctgaatgtctcttatttgcgtgcactgacaaaattctatttgtttacttttatattaatggtaataaaatagattataaagtaagctggaactttgttgttttaacctccatcctgtcaaggcaaatgtgatctcttatcttatatcctttacgtttaaatatttttttctcaccgatcaccacatttaatatgaggttattatgaacttatatataccatggtaatggttactgaaagtaaatggaaacaaggtggctactgttctctataatgacacaagggaaaggaagaaaactgcacttctacaagtataacatgagaaaactattaaagtatatatgcgtttgtatgtatgtatagatatctagatagatatatcctgtatttatgaagaggtttt

SEQ ID NO: 84580 - DNA, 1213 bp, Homo sapiens
tgatgtatggctatgtcgtccacgcgctcgggctgcactgtcctgctccccctggtgaagaagctgccctgggcttgtcgtcctagggtctccagacatgtctgaggtgaagagccggaagaagtcggggcccaagggagcccctgctgcggagcccgggaagcggagcgagggcgggaagacccccgtggcccggagcagcggaggcgggggctgggcagacccccgaacgtgcctgagcctgctgtcgctggggacgtgcctgggcctggcctgtggcagaaatctgaagctatcatggaacaattgaagtcttttcaaataattgctcatctaaagcgtctacaggaagaaattaatgaggtaaaaacttggtccaataggataactgaaaaacaggatatactgaacaacagtctgacgacgctttctcaagacattacaaaagtagaccaaagtacaacttccatggcaaaagatgttggtctcaagattacaagtgtaaaaacagatatacgacggatttcaggtttagtaactgatgtaatatcattgacagattctgtgcaagaactagaaaataaaatagagaaagtagaaaaaaatacagtaaaaaatataggtgatcttctttcaagcagtattgatcgaacagcaacgctccgaaagacagcatctgaaaattcacaaagaattaactctgttaagaagacgctaaccgaactaaagagtgacttcgacaaacatacagatagatttctaagcttagaaggtgacagagccaaagttctgaagacagtgacttttgcaaatgatctaaaaccaaaggtgtataatctaaagaaggacttttcccgtttagaaccattagtaaatgatttaacactacgcattgggagattggttaccgacttactacaaagagagaaagaaattgctttcttaagtgaaaaaatatctaatttaacaatagtccaagctgagattaaggatattaaagatgaaatagcacacatttcagatatgaattagtttgacattattgagattagactaaggtaatttttttaatgggacctctcatgagaagactggtaaatcaaaaataatgatattttggagcaaaagtcattttatatttaatcctattttgtacagtaaaaataaaactttaaaacaggttgattttccaaaataaatatgctaaaaccta

SEQ ID NO: 84581 - DNA, 1331 bp, Homo sapiens
tgatgtatggctatgtcgtccacgcgctcgggctgcactgtcctgctccccctggtgaagaagctgccctgggcttgtcgtcctagggtctccagacatgtctgaggtgaagagccggaagaagtcggggcccaagggagcccctgctgcggagcccgggaagcggagcgagggcgggaagacccccgtggcccggagcagcggaggcgggggctgggcagacccccgaacgtgcctgagcctgctgtcgctggggacgtgcctgggcctggcctggtttgtatttcagcagtcagaaaaatttgcaaaggtggaaaaccaataccagttactgaaactagaaaccaatgaattccaacaacttcaaagtaaaatcagtttaatttcagaaaagtggcagaaatctgaagctatcatggaacaattgaagtcttttcaaataattgctcatctaaagcgtctacaggaagaaattaatgaggtaaaaacttggtccaataggataactgaaaaacaggatatactgaacaacagtctgacgacgctttctcaagacattacaaaagtagaccaaagtacaacttccatggcaaaagatgttggtctcaagattacaagtgtaaaaacagatatacgacggatttcaggtttagtaactgatgtaatatcattgacagattctgtgcaagaactagaaaataaaatagagaaagtagaaaaaaatacagtaaaaaatataggtgatcttctttcaagcagtattgatcgaacagcaacgctccgaaagacagcatctgaaaattcacaaagaattaactctgttaagaagacgctaaccgaactaaagagtgacttcgacaaacatacagatagatttctaagcttagaaggtgacagagccaaagttctgaagacagtgacttttgcaaatgatctaaaaccaaaggtgtataatctaaagaaggacttttcccgtttagaaccattagtaaatgatttaacactacgcattgggagattggttaccgacttactacaaagagagaaagaaattgctttcttaagtgaaaaaatatctaatttaacaatagtccaagctgagattaaggatattaaagatgaaatagcacacatttcagatatgaattagtttgacattattgagattagactaaggtaatttttttaatgggacctctcatgagaagactggtaaatcaaaaataatgatattttggagcaaaagtcattttatatttaatcctattttgtacagtaaaaataaaactttaaaacaggttgattttccaaaataaatatgctaaaaccta

SEQ ID NO: 84582 - DNA, 1485 bp, Homo sapiens
cgtgacgcgtgggctcgcgatttggtagtcaatatctgcagtggaaggcgctgtggaaggcgctgtgggttgaggtcgccgcccacctctcctaggggaactatggagctggcagctgaaagactcagtgaagcaacgaggatgccggggagagggaaggggctgggctctgggcggtgccaagtctgtgagggggcgcggtcaccgcccagggttcccacgaacgccaaggcggccacgtcctgctccccctggtgaagaagctgccctgggcttgtcgtcctagggtctccagacatgtctgaggtgaagagccggaagaagtcggggcccaagggagcccctgctgcggagcccgggaagcggagcgagggcgggaagacccccgtggcccggagcagcggaggcgggggctgggcagacccccgaacgtgcctgagcctgctgtcgctggggacgtgcctgggcctggcctgtggcagaaatctgaagctatcatggaacaattgaagtcttttcaaataattgctcatctaaagcgtctacaggaagaaattaatgaggtaaaaacttggtccaataggataactgaaaaacaggatatactgaacaacagtctgacgacgctttctcaagacattacaaaagtagaccaaagtacaacttccatggcaaaagatgttggtctcaagattacaagtgtaaaaacagatatacgacggatttcaggtttagtaactgatgtaatatcattgacagattctgtgcaagaactagaaaataaaatagagaaagtagaaaaaaatacagtaaaaaatataggtgatcttctttcaagcagtattgatcgaacagcaacgctccgaaagacagcatctgaaaattcacaaagaattaactctgttaagaagacgctaaccgaactaaagagtgacttcgacaaacatacagatagatttctaagcttagaaggtgacagagccaaagttctgaagacagtgacttttgcaaatgatctaaaaccaaaggtgtataatctaaagaaggacttttcccgtttagaaccattagtaaatgatttaacactacgcattgggagattggttaccgacttactacaaagagagaaagaaattgctttcttaagtgaaaaaatatctaatttaacaatagtccaagctgagattaaggatattaaagatgaaatagcacacatttcagatatgaattagtttgacattattgagattagactaaggtaatttttttaatgggacctctcatgagaagactggtaaatcaaaaataatgatattttggagcaaaagtcattttatatttaatcctattttgtacagtaaaaataaaactttaaaacaggttgattttccaaaataaatatgctaaaacctatttttgcaactttacatagcaagaactttatccatccttctgacatacatgttgttacccacacacacacac

SEQ ID NO: 84583 - DNA, 1154 bp, Homo sapiens
cgtgacgcgtgggctcgcgatttggtagtcaatatctgcagtggaaggcgctgtggaaggcgctgtgggttgaggtcgccgcccacctctcctaggggaactatggagctggcagctgaaagactcagtgaagcaacgaggatgccggggagagggaaggggctgggctctgggcggtgccaagtctgtgagggggcgcggtcaccgcccagggttcccacgaacgccaaggcggccacgtcctgctccccctggtgaagaagctgccctgggcttgtcgtcctagggtctccagacatgtctgaggtgaagagccggaagaagtcggggcccaagggagcccctgctgcggagcccgggaagcggagcgagggcgggaagacccccgtggcccggagcagcggaggcgggggctgggcagacccccgaacgtgcctgagcctgctgtcgctggggacgtgcctgggcctggcctgtggcagaaatctgaagctatcatggaacaattgaagtcttttcaaataattgctcatctaaagcgtctacaggaagaaattaatgaggtaaaaacttggtccaataggataactgaaaaacaggatatactgaacaacagtctgacgacgctttctcaagacattacaaaagtagaccaaagtacaacttccatggcaaaagatgttggtctcaagattacaagtgtaaaaacagatatacgacggatttcaggtttagtaactgatgtaatatcattgacagattctgtgcaagaactagaaaataaaatagagaaagtagaaaaaaatacagtaaaaaatataggtgatcttctttcaagcagtattgatcgaacagcaacgctccgaaagacagcatctgaaaattcacaaagaattaactctgttaagaagacgctaaccgaactaaagagtgacttcgacaaacatacagatagatttctaagcttagaaggtgacagagccaaagttctgaagacagtgacttttgcaaatgatctaaaaccaaaggtgtataatctaaagaaggacttttcccgtttagaaccattagtaaatgatttaacactacgcattgggagattggttaccgacttactacaaagagagaaaccgtcgattcgaggtgatcctctg

SEQ ID NO: 84584 - DNA, 504 bp, Homo sapiens
gctaccgactagagtgctcacaaaaaaaccccaatttaccagatagatttctaagcttagaaggtgacagagccaaagttctgaagacagtgacttttgcaaatgatctaaaaccaaaggtgtataatctaaagaaggacttttcccgtttagaaccattagtaaatgatttaacactacgcattgggagattggttaccgacttactacaaagagagaaagaaattgctttcttaagtgaaaaaatatctaatttaacaatagtccaagctgagattaaggatattaaagatgaaatagcacacatttcagatatgaattagtttgacattattgagattagactaaggtaatttttttaatgggacctctcatgagaagactggtaaatcaaaaataatgatattttggagcaaaagtcattttatatttaatcctattttgtacagtaaaaataaaactttaaaacaggttgattttccaaaataaatatgctaaaaccta

SEQ ID NO: 84585 - DNA, 660 bp, Homo sapiens
gtaagtggacgcgaggctgcctgggccggcctcctgtgggccccctgctgtttgggctcccacccggctcaacatccagccggaggtgatccaacctcccagacctgggccttctgtgcctctgtcttgaccccaaaggaaggaaacagcccagccttgtttttccctttcgggcgtttcttgtatctcatttccccccgtgctggtagcatgcccctatcgctcagaaggagttgaggctaaggtttgggaacgagccatttgttaagagctgcagattcggccacgctttctgaagctcccgctacacgtcagaagcgttcacgttgttataaaccgttacttcctgtccgctgtgccccattccgggacacatctgccccaccctactcaccccataaatacctaatggaaatacttgcaaccttaaaacagatcattatgtttggagaccgaggcaggtggatcacttgaggtcaggagttcgagactagcctggccaacatggtgaaaccccatctctaccaaaaatacgaataatcagccgggcgtggtggcgggcgcctgtagtcccagttcctccggaggctgaggcaggagaatcgcttgaacccgggaggcggaggttgctatgagccaagatcgcatcactgcactcca

SEQ ID NO: 84586 - DNA, 1413 bp, Homo sapiens
cgtgacgcgtgggctcgcgatttggtagtcaatatctgcagtggaaggcgctgtggaaggcgctgtgggttgaggtcgccgcccacctctcctaggggaactatggagctggcagctgaaagactcagtgaagcaacgaggatgccggggagagggaaggggctgggctctgggcggtgccaagtctgtgagggggcgcggtcaccgcccagggttcccacgaacgccaaggcggccacgtcctgctccccctggtgaagaagctgccctgggcttgtcgtcctagggtctccagacatgtctgaggtgaagagccggaagaagtcggggcccaagggagcccctgctgcggagcccgggaagcggagcgagggcgggaagacccccgtggcccggagcagcggaggcgggggctgggcagacccccgaacgtgcctgagcctgctgtcgctggggacgtgcctgggcctggcctgtggcagaaatctgaagctatcatggaacaattgaagtcttttcaaataattgctcatctaaagcgtctacaggaagaaattaatgaggtaaaaacttggtccaataggataactgaaaaacaggatatactgaacaacagtctgacgacgctttctcaagacattacaaaagtagaccaaagtacaacttccatggcaaaagatgttggtctcaagattacaagtgtaaaaacagatatacgacggatttcaggtttagtaactgatgtaatatcattgacagattctgtgcaagaactagaaaataaaatagagaaagtagaaaaaaatacagtaaaaaatataggtgatcttctttcaagcagtattgatcgaacagcaacgctccgaaagacagcatctgaaaattcacaaagaattaactctgttaagaagacgctaaccgaactaaagagtgacttcgacaaacatacagatagatttctaagcttagaaggtgacagagccaaagttctgaagacagtgacttttgcaaatgatctaaaaccaaaggtgtataatctaaagaaggacttttcccgtttagaaccattagtaaatgatttaacactacgcattgggagattggttaccgacttactacaaagagagaaagaaattgctttcttaagtgaaaaaatatctaatttaacaatagtccaagctgagattaaggatattaaagatgaaatagcacacatttcagatatgaattagtttgacattattgagattagactaaggtaatttttttaatgggacctctcatgagaagactggtaaatcaaaaataatgatattttggagcaaaagtcattttatatttaatcctattttgtacagtaaaaataaaactttaaaacaggttgattttccaaaataaatatgctaaaaccta

SEQ ID NO: 84587 - DNA, 1296 bp, Homo sapiens
ggcaggcggtacgcccggggtaacgggattgccctgggcttgtcgtcctagggtctccagacatgtctgaggtgaagagccggaagaagtcggggcccaagggagcccctgctgcggagcccgggaagcggagcgagggcgggaagacccccgtggcccggagcagcggaggcgggggctgggcagacccccgaacgtgcctgagcctgctgtcgctggggacgtgcctgggcctggcctggtttgtatttcagcagtcagaaaaatttgcaaaggtggaaaaccaataccagttactgaaactagaaaccaatgaattccaacaacttcaaagtaaaatcagtttaatttcagaaaagtggcagaaatctgaagctatcatggaacaattgaagtcttttcaaataattgctcatctaaagcgtctacaggaagaaattaatgaggtaaaaacttggtccaataggataactgaaaaacaggatatactgaacaacagtctgacgacgctttctcaagacattacaaaagtagaccaaagtacaacttccatggcaaaagatgttggtctcaagattacaagtgtaaaaacagatatacgacggatttcaggtttagtaactgatgtaatatcattgacagattctgtgcaagaactagaaaataaaatagagaaagtagaaaaaaatacagtaaaaaatataggtgatcttctttcaagcagtattgatcgaacagcaacgctccgaaagacagcatctgaaaattcacaaagaattaactctgttaagaagacgctaaccgaactaaagagtgacttcgacaaacatacagatagatttctaagcttagaaggtgacagagccaaagttctgaagacagtgacttttgcaaatgatctaaaaccaaaggtgtataatctaaagaaggacttttcccgtttagaaccattagtaaatgatttaacactacgcattgggagattggttaccgacttactacaaagagagaaagaaattgctttcttaagtgaaaaaatatctaatttaacaatagtccaagctgagattaaggatattaaagatgaaatagcacacatttcagatatgaattagtttgacattattgagattagactaaggtaatttttttaatgggacctctcatgagaagactggtaaatcaaaaataatgatattttggagcaaaagtcattttatatttaatcctattttgtacagtaaaaataaaactttaaaacaggttgattttccaaaataaatatgctaaaaccta

SEQ ID NO: 84588 - DNA, 1001 bp, Homo sapiens
tgatgtatggctatgtcgtccacgcgctcgggctgcactgtcctgctccccctggtgaagaagctggcagaaatctgaagctatcatggaacaattgaagtcttttcaaataattgctcatctaaagcgtctacaggaagaaattaatgaggtaaaaacttggtccaataggataactgaaaaacaggatatactgaacaacagtctgacgacgctttctcaagacattacaaaagtagaccaaagtacaacttccatggcaaaagatgttggtctcaagattacaagtgtaaaaacagatatacgacggatttcaggtttagtaactgatgtaatatcattgacagattctgtgcaagaactagaaaataaaatagagaaagtagaaaaaaatacagtaaaaaatataggtgatcttctttcaagcagtattgatcgaacagcaacgctccgaaagacagcatctgaaaattcacaaagaattaactctgttaagaagacgctaaccgaactaaagagtgacttcgacaaacatacagatagatttctaagcttagaaggtgacagagccaaagttctgaagacagtgacttttgcaaatgatctaaaaccaaaggtgtataatctaaagaaggacttttcccgtttagaaccattagtaaatgatttaacactacgcattgggagattggttaccgacttactacaaagagagaaagaaattgctttcttaagtgaaaaaatatctaatttaacaatagtccaagctgagattaaggatattaaagatgaaatagcacacatttcagatatgaattagtttgacattattgagattagactaaggtaatttttttaatgggacctctcatgagaagactggtaaatcaaaaataatgatattttggagcaaaagtcattttatatttaatcctattttgtacagtaaaaataaaactttaaaacaggttgattttccaaaataaatatgctaaaaccta

SEQ ID NO: 84589 - DNA, 1398 bp, Homo sapiens
  misc_feature (1397)..(1397): n is a, c, g, or t
cgtgacgcgtgggctcgcgatttggtagtcaatatctgcagtggaaggcgctgtggaaggcgctgtgggttgaggtcgccgcccacctctcctaggggaactatggagctggcagctgaaagactcagtgaagcaacgaggatgccggggagagggaaggggctgggctctgggcggtgccaagtctgtgagggggcgcggtcaccgcccagggttcccacgaacgccaaggcggccacgtcctgctccccctggtgaagaagctgccctgggcttgtcgtcctagggtctccagacatgtctgaggtgaagagccggaagaagtcggggcccaagggagcccctgctgcggagcccgggaagcggagcgagggcgggaagacccccgtggcccggagcagcggaggcgggggctgggcagacccccgaacgtgcctgagcctgctgtcgctggggacgtgcctgggcctggcctgtggcagaaatctgaagctatcatggaacaattgaagtcttttcaaataattgctcatctaaagcgtctacaggaagaaattaatgaggtaaaaacttggtccaataggataactgaaaaacaggatatactgaacaacagtctgacgacgctttctcaagacattacaaaagtagaccaaagtacaacttccatggcaaaagatgttggtctcaagattacaagtgtaaaaacagatatacgacggatttcaggtttagtaactgatgtaatatcattgacagattctgtgcaagaactagaaaataaaatagagaaagtagaaaaaaatacagtaaaaaatataggtgatcttctttcaagcagtattgatcgaacagcaacgctccgaaagacagcatctgaaaattcacaaagaattaactctgttaagaagacgctaaccgaactaaagagtgacttcgacaaacatacagatagatttctaagcttagaaggtgacagagccaaagttctgaagacagtgacttttgcaaatgatctaaaaccaaaggtgtataatctaaagaaggacttttcccgtttagaaccattagtaaatgatttaacactacgcattgggagattggttaccgacttactacaaagagagaaagaaattgctttcttaagtgaaaaaatatctaatttaacaatagtccaagctgagattaaggatattaaagatgaaatagcacacatttcagatatgaattagtttgacattattgagattagactaaggtaatttttttaatgggacctctcatgagaagactggtaaatcaaaaataatgatattttggagcaaaagtcattttatatttaatcctattttgtacagtaaaaataaaatatacaagtaggaaaccgtcgattcgana

SEQ ID NO: 84590 - DNA, 866 bp, Homo sapiens
cgctcgcgcctctccctccacacctctctgcaagctgagggagccggcttcggccttggccggcccagaaaggggctcccacagtgcagcggcgggctgaagggctcctcaagtgccgccaaagtgggagcccaggcagaggaggcgccgagagcgagcgagggctgtgagggctgccctcatgctgtcacctctcacctgggtctggagctgcagctgtgcccagaagtgtgggctcccgctggccttgtggagcgcacaactctggccacaccccccacttcagccagtttcttctcagcagccactccagagggaccacctctggcatcttaaatacattaccagctctgctccaagattttttctccctgggatcaggctggagtgcagtggcatgatcatagctcactgtaacccccaactcctgggctcaagcaattccctcctcagcctcctgagtggctagaacttcagggatgtgtcaccacacccaggtctaagtcatcagaaaagaacattagaacattctcacagagccttacaatctgaaaacccactgcctttcgaaaggatcaggcaagtggttggactaaattacattcccgctgacagtacgaatttggaatagagatgtacaaagacacgagggaaatgcttggaagctctcaagtgcggagaattctttgcacagactccctctctctgcacagatgaacaccatgagcttgctggaaggggttcaaagaacagcccacagcagcactcgagtttgctaaagtgactgacgttggcttcagtttggaatccaaaggcgacaactgacaaggaagagcggaagggaagggagaagtgagatttgaaca

SEQ ID NO: 84591 - DNA, 724 bp, Homo sapiens
  misc_feature (33)..(33): n is a, c, g, or t
gacgtaacttccggtgtacacagccggtccaangcggtgcgctgggggccggggcgcgtcgcaggaaaggacttagaagccttacaaatacatctgtgcattcttgcttcagactttacaactgagggccagcccagtctggaagcatctcttattaatgttacaaggaaaccgctacctcagcaaacaaaaggaatggaggaggagacttacaacaaacgccatttaaaaaaaaaagaaaaacttgttttcaggaaacattagaggaaatttggagaatttcagcattgcatagaagcagccttacaggtaaacggatttgacgggcaggctctgtcaaaattctgcagaagtttgatcttccttcttaaggactttgtgtgaagtaattctttactgcttttaaattgctgttgatcagcttctgggtttttgggttctaacttttttgggtatattgaagacacagtgtattacattatattacatttttaaacgttaagttatttttctgccattgtaaatacaagtatcaaaatattcttgcaaagaagtaaacatttttctcagcaagcatatccttttagtaagagagtggaatgctaaacagttcttatccagcattttggacatcttttattttttgtcagagatcctgtctacactgaaaatattaattatataaacctgttgtctctcacctctacattggatcacatggtca

SEQ ID NO: 84592 - DNA, 302 bp, Homo sapiens
cctgttggttcacaagtctcttccctactctgcatccagtgatatcacctcgggagcttgaaatctctgtaatgggagtacttaccttatggaaatcagcaaactttagaaattggggattcttccttctatcagagagatgagtgttacacttatcagcacaccattgaaaaccagaaacctctgaaagtgagaggaagagcagtgggaaagggatcaggtttggtaatgcttaagacggagctctgaaggatacaatttgaggcctggagaaggcatcatatgtatcatacatcaatttc

SEQ ID NO: 84593 - DNA, 497 bp, Homo sapiens
acagaggttgcagtgagtcgagattgtgccactgcactccagcctgggtgatacagcgagactccatctccaaaaagaaaaacaaaattctaggaagatattgaacagtggtaatctctgaaaagtgggaatgtaatttttttattttgctttactgtattctctagttttctataacgcagttaatgaattgctgggatgatgcctccagtgaatgaaagggggtgctatctagggtgtgagttcactttaaagcagggagcaaggacaacacatccacaacattggagggaaagcaggaaaagagagcttggaggtcttggactggtttcctgggtctccaacagccgagcactatgtctaggaggaggaaagcaatcaccccaaattccacaagtccaaacaggctgaagaagcgggtgttttgcaccagttgcatgtaagtttctgaagctggagcttagggctgcctgatttttgagggaattgcaaactct

SEQ ID NO: 84594 - DNA, 412 bp, Homo sapiens
tctgatccacctctgttgacaccctgagtggagggcctgagaggaaagagcctgctgatcaggcccctcgacttgagtgaagggcaggcagggagggtcctatggctcctgggaggagccgaagggtggatcgcctgtcaaagccaagagccctgatggcgggcgccagggaaaaggccctgaggcggggtcacagccctggaggggcagcgtccacactcctgcacagtgcagggcacctgggactctcaaaacccgccggctgctgcaccttctgggaccgggagagtgtcagctgggtgaatcccgcacacgggcgcgggggcgcggcgcgtagttgtggaaccggataccccgcgggctgctggctccagcgcctccacctgccactgggccaaccccctgggcctcc

SEQ ID NO: 84595 - DNA, 204 bp, Homo sapiens
ccaggaagtggaggttgaagtgagccgtgattgtgccactgcactctagcctgggcaacagagagagactctgtctccaaaaaaaaaaaaaagtttcatattttactctacattcagataaataacatttgccatttgtaaggcttttcattttgaatatttagttgtatttattatatactaggcatcattcttgttgctgtt

SEQ ID NO: 84596 - DNA, 463 bp, Homo sapiens
ttgattcatattcattacaactctagaaaaaaggctggcaaaaaaactaccccaggggcaaatctggcttacttgtctttggaaagaaaaattgtactggaacacagccatgcctatttgtttacatattgcctatgggagttttcacacttaccatggcagagataagtagtttctacagagaccacatggcccacaaagcctaacatatttattgtctctttacagaaaatgtttgcaacccctgttctacaggaattttatctctagaatctagagatatgatatgcaaatttaaaatatatagatatagcaacacctttaaaaacataagtggaggccgggcacggtggacgcacctgtagtcctagctacccgggaggctgaggcaggagaatcgcttgaaccggaaggcagaggttgcagtgagccaagatcgcgccactgcactccagcctggtga

SEQ ID NO: 84597 - DNA, 460 bp, Homo sapiens
ccaacagtggagagagatgctctcatctttgaactctagggcctaatggttgcccaggtcagctatatctcccttgttttcttagtgaagtagttattctctcttctatcctttgaagcaattcccttctgcctgcaaagtttggtttgaaccttaaaggttttcaaaagcactaagaaatacttctgttttagtaacgttatattttccttcagtatttctagtttacatgtaatatctgtcaagtggcacattttttaggttctctctgttgtaccaatagacaacttgaaggagcttttatgtgcgtaccacttaatttgtgtatgaggaggacagaaccttaaccttgctgaaaagaggagtcgataagaaaatcacaagaagtgtttaacctgtgatgacaattttaacttgccattttttcatttttcacaaggtcagatataaagtgtgcagt

SEQ ID NO: 84598 - DNA, 426 bp, Homo sapiens
tactacctccattactttccatttttcaggttacaaaataagaaaacaatggatttgagtataattttttgtcacacagtgaagttgtctcgctgggtgagatattagatactgtgttcacatgtaatacattaaagttcaaaaaaattttaaagttatgtttcattcattcattcatttagaatagagatgggtctcactatgttgcccaggctggtctcaagctccagccttcaagtgatcctcccatctaggcctcccaacatgctgggattataaatgtgagccacgaagcccagctgaagttattaaaaaaattttaacagcacaagtagccagggatactggatggaaactttctactttaaatctctaatttaacattttcatctcaaaatttaaaacctctcccacactttttggctt

SEQ ID NO: 84599 - DNA, 403 bp, Homo sapiens
ctgctgtattttaaaatgccctctcaaactaaaggaaagaatgggtcatgcactgccactgtctcacgaccccttttcaaagaaacaaaaaaggaaacaaaaaaacaatagaacaagatcctaccagaatgacctccacatagtgatcattcttaagtacagagtatagatatgcagctcacataaaactgctgcattccagcaatcaatgcagtcccaaagtaatccacagatttaggcagttcaatctgcgacccttttcactaggaagaaatgctaaatcattacaagcgccaccatcttagagcagcagcaactgcaatagcttgcactcataattctcttatggttaactgctcacccattgcctctgaggaaatcttgtattgtaatctgaacttaa

SEQ ID NO: 84600 - DNA, 242 bp, Homo sapiens
tcaaggtcacacagcaatttagtgaaagggccacacacagaactaagggcaccgagggctagggtgtccactatatcacactgcctgtcattttgttggtggactaccttgccccttatttatttatttattattagtattatttttttgagacggaatcttgctctgtcgccctggctggagtgcagtggcgtgatctcggctcactgcaacatctgcctcctgggttcaagcgatttctg

SEQ ID NO: 84601 - DNA, 322 bp, Homo sapiens
aagtaaagacttaaacatgtttaaaagataattggaagactccagttaagaggatgaaattaaatattcaagagatacttgaggatcaagtaagcttcctgagaaactgggaggaataggatccaaagcatagcatgagggactattagccttagatagaggaacagtcatttttctctaacagcagcagacgggcctaggttatgtaaggaagctaagggagtactttctgatgcctgctgttttctctgaaatagaaaaccaagtcattttctaagagtgatgagtgaggactagagcaggcagtttgaggagactgagg

SEQ ID NO: 84602 - DNA, 424 bp, Homo sapiens
aaactatggaacagcattttgaatgacaatgaatttctttcaaaaactatggaggccagaagaagtggcacagtatttttcaaacagtgaaagagaagaattgtcaatagcaaattttatatccaacaaaactacactttaaaatgaaggtaagatattttatttcatacatcattagggatatacaaattaaaacaaaaatgtgatattactgtacacctatcaagattggccaaatttcagaatacttatgacaccaaatgctggtgagaatgtgaaacaacaggaactctcattgccgttggaaagcaaaatgttacagctactttgaaacagaactcctataagatagattgggtccacagtgtatgactgattatgatgtgagtggtgggtatcctgtgaaatttggcaatgtgatgat

SEQ ID NO: 84603 - DNA, 586 bp, Homo sapiens
atcaccctctacgaggaccggggcttccagggccgccactacgaatgcagcagcgaccaccccaacctgcagccctacttgagccgctgcaactcggtgcgcgtggacagcggctgctgggtgctctatgagcagcccaactactcgggcctccagtagttcctgcgccgcggcgactatgccgaccaccagcagtggatgggcctcagcgactcggtccgctcctgccgcctcatcccccacgccagctcccacaggctcaggatctatgagcgagaggactacaggggccagatggtggagatcactgaggactgctcctctcttcacgaccgcttccacctcagtgagatccactccttcaacgtgctggagggctcctgggtcctctacgagctgcccaactaccaggggcggcagtacctgctgaggccgggggactgcaggtggtgccaggactggggggccacggatgcgagagtgggctccctaaggagagctgtggagctctactgaaatgtttgtactctatcccttgcttcatctggaaactaataaaatatttcctgtgtgttctatgcaaaaa

SEQ ID NO: 84604 - DNA, 232 bp, Homo sapiens
caaactttttccagagctacgtggactctagccccagccctgcccctaaccagcagtgtgaccttgggcaaagcagttaccgtctctggtatttggtcaggtgaccagatcttgaaagtccccttggtggtaacattctgtaagttgatgactccgctcctggggaaatttccagggtaagcaatgacagttgactagcacatttgccctgctgtgttccactttaccagtt

SEQ ID NO: 84605 - DNA, 1158 bp, Homo sapiens
cgagaggtggggtggggggattacaaacctctaacagcaccacaggctgcccggggaacatctgctactacagccttgcagcccggagtcccggattttactggttcccgtgcctgcggacaggcccccagggctagcggctttgtggagggaacactgggtatcctctccacagtccaggtgctgggaggccctccttggcttaggaggacacttccaaagctggggcgccccaaggaggcaccagtggccagaatgtccacgcagagcacccaccccctgaaacctgaggccccacgtctgccacctgggatccccgagtcccactgcagctagtcgagtctggacgcacaacagcgaactcgccgtgtcgctagctgtatgtctgcgcgtagcgcgtcattccacgagagggacgactgtcgaggctgactctgttggagaatcagagggcgtgaaagtccattcattcgtccagtcgtgtgggccgtctgcgcccactgtagccttggatgatagaatcctggctagctttctcgtgatcgcctagtgtcacacgatgcatgtcccgtgtggcatgcgttcggacggagggagctctagccgtatagtgagtcgttcactcattcgcgtctccgcctcatgggtacaaaggcaagagacgtcactggcagtgaagtcatctgacctgctggcatcacggtccatggggggctcatcatagcgccacactgcaatttgtctgtgtcgcgtgtcactcgcgccttccggcagcagggcaggggccccatcctgctgtggcgctacctgcaccacctgggcagccagccggccgtgcgccgggccgcgctcatgtgcgaggacgcgctggtacccttctatgagaggttcagcttccacgccgtgggcccctgcgccatcaccgtgggctccctcaccttcatggagctccactgctccctgcggggccaccccttcctgcgcaggaacagcggctgctgaactgggctgcccacctggctgccaacatgatccccgtctctgccctgggctcctcttagctcagctgagcatggagacagcagtttccagagagtggagagagcagggctaaataaagaggagataaggtggcttctcacggcctgaaaaaaaaaa

SEQ ID NO: 84606 - DNA, 1035 bp, Homo sapiens
cgagaggtggggtggggggattacaaacctctaacagcaccacaggctgcccggggaacatctgctactacagccttgcagcccggagtcccggattttactggttcccgtgcctgcggacaggcccccagggctagcggctttgtggagggaacactgggtatcctctccacagtccaggtgctgggaggccctccttggcttaggaggacacttccaaagctggggcgccccaaggaggcaccagtggccagaatgtccacgcagagcacccaccccctgaaacctgaggccccacgtctgccacctgggatccccgagtccccgagctgtcagcggcgccacacactccctgccagtgagtttcgctgcctcaccccggaggacgctgtcagcgcctttgagatcgagcgtgaagccttcatctccgtcttgggcgtctgccccctgtacctggatgagatccggcacttcctgaccctatgtccagagctgtccctgggctggttcgaggagggctgccttgtggccttcatcatcggctcgctctgggacaaggagagactcatgcaggagtcactgacgctgcacaggtctgggggccacatagcccacctgcatgtgctggccgtgcaccgcgccttccggcagcagggcaggggccccatcctgctgtggcgctacctgcaccacctgggcagccagccggccgtgcgccgggccgcgctcatgtgcgaggacgcgctggtacccttctatgagaggttcagcttccacgccgtgggcccctgcgccatcaccgtgggctccctcaccttcatggagctccactgctccctgcggggccaccccttcctgcgcaggaacagcggctgctgaactgggctgcccacctggctgccaacatgatccccgtctctgccctgggctcctcttagctcagctgagcatggagacagcagtttccagagagtggagagagcagggctaaataaagaggagataaggtggcttctcacggcctgaaaaaaaaaa

SEQ ID NO: 84607 - DNA, 323 bp, Homo sapiens
tgtcccagattatctaaggtggaatgcctttgcgaaaagcattagtttgtaatcatatcgtataacaaagaaactgtgctgactagttctagttagctttaagataaggataaattaggttttcaatttaatggtaaaacacactctgctttcttaactctgttactacctatttagtgtttgttttcctcttactgtgaaagtaacatgctgattatagggaatatataaaaaaagataaaaagcactcaattctattgactaatgataacctcaacacttcggtgtataccatatattttttaaataggcagattacattg

SEQ ID NO: 84608 - DNA, 429 bp, Homo sapiens
agtagctgggacttctggcgtgtgccaccatgcccggctaatttttgtatttttagtagagatggggtttcaccatattggccaggctggtctcgaactcctgacctcatgatctgcccacctcggccttccaaagtgctaggattataggggtgagccactgtgcccagtgctgctccttttttcttgcaacatgcggattaccatacctttcctcttttcacctttagcccactttttccctttaaatactgaagccctcagcatcatctctggagaaaaggcacagaccagactgtttctgggattccctatttagttcttccaggcatgtccttaaccttggcaaaattaacttctaaattgttttagacctgtgtcagataatttttggtgtacagtatgtggtcactttcccccaagatttaa

SEQ ID NO: 84609 - DNA, 452 bp, Homo sapiens
tgcaggatctgtgtctttagatctagctgtctgaacttggacctcagttgccacattcgtgaaatggggaaaatatctataagctcataggattgctgtggtgatcaaagaacttgaggaattcaggaaaaacttcacaggaaaatgtggactggaggcaggccttgcaggtaccagggaaggggaagcaggaatggcctggagtagtgaggacccagcacaagccagcctcaatgctttgaagatcaattaggagagacttaaaagatgagaggataggcaggaaacatgaaggtttataagcacaggagaaaactgtgaacagactaatcttcttaaagggtcaaagaaaagtaaatttttttttttttgccttttcagcatgtgccaatgtctacatcaaggccattcatatgagtgactcaaaggcaacctgcttgtcaagtaattgg

SEQ ID NO: 84610 - DNA, 464 bp, Homo sapiens
gtcagggtttttgcttgcttgtttttgtgtgtgtggttgtttttgcatgctctagttcatttagagcactaaattaaatgtgttcattcactttttcattccataaatattttaccgcttacaaagtgacagatgttgtgctaaagctggagatagaatggaaagcaaaggatagacacgggctctgccacaaggcttagttcagtaaactaagcatcacacaatgaatgttaaattgtaacggtgaagtgccaggacaaaaagatagagagcagtcagagtgtgtaataggaggactaaaccttgacaaggaatcagggaagttttcctaaggaaggattattgtactgacatttgaaggaaaagtagtggttgggcattgaggacaggggtggaaagtgtgggaacagtattgcaaactgagcagcatttgaaaagcactggacatggcacatttgaggaac

SEQ ID NO: 84611 - DNA, 100 bp, Homo sapiens
atgacatagagaacgataacattgctttgggagattaaaaattcaaatttaaaaaaaatgtgacagtggtcagcaagattgctaatattgagatgaaata

SEQ ID NO: 84612 - DNA, 752 bp, Homo sapiens
ctccggaagcaccgatttccagcgctgacggccgcgcctggtttcccagcgagtcctcttggcagctcccgcagctccccgccgggagcacgagtgggagcgaacccagagcccgcccaggcctcgggcctcggcaactcctcacaggtccacgagatggcgctgcaggccagggcccgggccgcggcctcacagcccgcctcgggcgagagcgggagatagactgcggaccccggcaagcggggcacggaggcacagccaccgacacaggcagagccgggtccggagcccggcacaggccgccgagggaccgagggactccggggctgcggacacactgagcggagggcttgaggctcggggtggggccttctcccctgctgccagaaccgcccggcagcgccagctcggcgaccttccaggctgctgcagaccccagcttgtcctcttctgcgcgcccgcggggctgggccctcgcgttctctctgcgggaagtgagccgccggcctccggcctcctgggcccctccgaagggggctgtggctggcatccgcagcgcgcggggcgcacggccctaggagcgcggggcccactcgacggtgaggacttacgggcgggataggggaaggatcggcggggatccagcgctcctccagcggagagggccccctcggctccgacccgccctcctcaccaccctcatccggctcttcagggcggggtcttcagggtcgagggcaggatgtgccctg

SEQ ID NO: 84613 - DNA, 784 bp, Homo sapiens
gggaaaataagcacagggagactgtcagagaaagccactgatcactgaagctggaaaacataattcaccgtcagaagatgatttttaaatacaaagaacaattatataaatagtttggtgggatgaatatgggataaacttaagaataaaaatcagtgcatctacaatgccaaatattatgtaacataagtctacaacatctttctgtcccaaccttgaattaaaactctgaagaaaatggtttcattcatgaaaccatgattttagcttctgttaatgaatgacttgcctttaagccaaaaattatttatcgaatccgacactcatgtgagaaatcctaactttatggattcacctcctttctcaatccttccccaagaagctcacatctattacagattggtatagatctgagtaaaatgcaatgtaagggaagatctgggttcagagggtagataaatgtatgagtttgtcttatctattttggaatgcaagctcagtgtccatttaacataaagcatcagctgaaaaagttaaacatcaaccactttgtaaatatttgtaatgaattacttcaataactgcacattttaaaactcacagaggattaaagtagtaggataaagtattccaataactaactgtcctcctaactcttctatgaagtaaacaatctttgtttatatttgagactacatttaaaagcaaatatagatttgttttaatcgtgctatgtattggtttatctttctcactgttcccatttgttaatgcagaaaatact

SEQ ID NO: 84614 - DNA, 6207 bp, Homo sapiens
  misc_feature (5018)..(5018): n is a, c, g, or t
  misc_feature (5160)..(5160): n is a, c, g, or t
  misc_feature (5162)..(5162): n is a, c, g, or t
  misc_feature (5227)..(5227): n is a, c, g, or t
  misc_feature (5270)..(5270): n is a, c, g, or t
  misc_feature (5373)..(5373): n is a, c, g, or t
gaattctaggcccagttctgtgtttcccctgtgtgttcctaggcaggtcagtttccctccatgggcctctgtaagatgaggagttggagaggtacattctcaggctactttcaactcccagccaagtgactcaagagtcccaggcagcaccagcacccctatctccaaggcctcctgatgtgtgtctctatttagaacttaatccaacctacccaacatcagatcagtgtcttaccagcccaaggtccctggggagcctcctagagggagagagccctgcccacccagattgagggtaaaggcctccccgtgctcatttttgtaccaccacagtgcttggcacatggtagacatcaaaatgtgtgtgctgaaagtataattgaagttgtgtatatatgtcagctagagtgtctggaggggcagaaatgtgggtctaaaacatacaaatgctccaaatggggtgtgggcaagggtctgtctacaccaggctgtgattacctgctcacatacatgtgtctatctgagtaggggtatgttatctatttttctacaccacagggtgaggaacaggtatatgtgtgcatgtgtatgcatccgtgtgtgtgtgtatgtgtgtgtgcatgagtgtgtgtgtgtgtgtccaaagccacctcttcaacctgtgccatttgtatctgtgtctggcccaatgagagtgttgaaaggtgagccacaagataaaacagcaacttcctacctcccttatcaagacagctgtctgacctacctccccttggccactcttgggattactggggttggcttcagtattttcagatttttcagaaggggaggagaatgcttgagtctcatccaggaacttaggcagttctcagcactgcctgctcctcctccctcaaataaccaagtctgaagaccaggagagaaagccgctggtggactggtcacctgtctggcagtgggaggaggagagtgagaggtttctaggtaggaatccagacttagaccctcccctccacccccagatgggtggtgcacaggctcatctcgcggcccctccccactccaccctaacatggatacgcccccaacaaccaaggaaagatctcccatcggctgactccacagatacacacatgtccccacagacacacacacgcccatgcagaggcacagacatccaggcacatctttccctttctctgtctttcccttggtttgaatttcgtttagccacatatgttgtgtgtgcgtgagggtgggtgggggaggggcagacagggatgagggatggcatggtgccaacatctacctatggggctcgggccagggacgccccttacagccatcctgggagggggtctcagctgtccctttgtggccaaggggaccctcctggggagtgggggcaagcacagaggtcctttctccccaacccggggtctggtccctgacccaccttgggggcctgcaggggaggaaatggacagagcgggaccctgagggagcatagaattggccaccacgagcccccagtgtccagccttgccaccccattgttcccgtgagggggtctctatatacagggggcaactcctcccaccttcctctcaatccctgctttccctgcgttgggcggggaggggagggcggcagaaatatttatttatttcctttatttatttaatttttttttttttttttggagtagagagtgacagatggcggcgggtcccgggggagccggctctcccccagtgcagacgcatgccaatcaccgtctctcatgtgatagctgctgcccgtgacgtgccaagcccatatggcctggcatagaggctggtaccccgcctggtagagatgccacactcgctccgcggttcgcatggcgctctgaagacgccggcgcccgccgccttgaggagccgctgcccccgctccctgaagatgggggaacaatgaaataagcgagaagatccctcttctcccccctctctctcttgccccctccccccctcccctcccctctccccttgactcctctccgaggtaagttgtccgaaagggagcgagatctgacccgccggttgggaggaggggcggcagcttcggccgacaggagggtcctcaaatacctccttcctgggatgatgcccccctcattgggtgggcatcggaggggccccaggttctctctcccttaggggctgcagcccagggggctgcagaggaggtgtctctgcctgcgatgggctcggtggggggggaaggcaggatcacggagggggatatgcgaagaggccgagacggaggacccctccatggttgtcccaaaaagcctgccacctttccccaccaccgaaaaaagggaagcaaacaaacaaatttggatttttcccccatcaatcccaaaatacaacgagatctgaagagccttgtgggagggagtcagcttgaagggggaagggggtccctgaccgcagaggggacggactgggctcgcttctctcagtctcctccccacgccccgctgcttcagtcctcgccgcccagagccggctccgggagctggggacgcatcggctagaggagacgatcctcccgcctctggaattgggggtgcgggggtgggggccgagcaaggggcggcgcgcagccaagttgcaaattggattagggagcgtgggggtgagagccacgggaggggtgagggagctgggccggggggcccgggccgcgagagcgcggagcggggcagctgtccccaccggcggccgaccagcctctctccaccgccaggagagaacgggctttcagggcgagcgcgccgcctcccctggcaaagatatctggtccctaaaacccccacccggtccctgccctgaccctgagaagaagcaggcgcggggagcagccccccattcaagcgaggggcggagccggggcccagcgccggggagagggcctgggccgagatcccaggccggcagccgggtagggctgggccggctctgggcggggcaggcggcggaggtgggcatccagggtagcctaggcaggagcccgcacgagactcgggggtggaggagggttgtgggggggcgtcggtaccccagcgcgcccctcactttgtgctgtctgtctccccttcccgcccgcggggcgccctcaggcaccatgctgacccgcctgttcagcgagcccggccttctctcggacgtgcccaagttcgccagctggggcgacggcgaagacgacgagccgaggagcgacaagggcgacgcgccgccaccgccaccgcctgcgcccgggccaggggctccggggccagcccgggcggccaagccagtccctctccgtggagaagaggggacggaggccacgttggccgaggtcaaggaggaaggcgagctggggggagaggaggaggaggaagaggaggaggaagaaggactggacgaggcggagggcgagcggcccaagaagcgcgggcccaagaagcgcaagatgaccaaggcgcgcttggagcgctccaagcttcggcggcagaaggcgaacgcgcgggagcgcaaccgcatgcacgacctgaacgcagccctggacaacctgcgcaaggtggtgccctgctactccaagacgcagaagctgtccaagatcgagacgctgcgcctagccaagaactatatctgggcgctctcggagatcctgcgctccggcaagcggccagacctagtgtcctacgtgcagactctgtgcaagggtctgtcgcagcccaccaccaatctggtggccggctgtctgcagctcaactctcgcaacttcctcacggagcaaggcgccgacggtgccggccgcttccacggctcgggcggcccgttcgccatgcacccctacccgtacccgtgctcgcgcctggcgggcgcacagtgccaggcggccggcggcctgggcggcggcgcggcgcacgccctgcggacccacggctactgcgccgcctacgagacgctgtatgcggcggcaggcggtggcggcgcgagcccggactacaacagctccgagtacgagggcccgctcagccccccgctctgtctcaatggcaacttctcactcaagcaggactcctcgcccgaccacgagaaaagctaccactactctatgcactactcggcgctgcccggttcgcggcccacgggccacgggctagtcttcggctcgtcggctgtgcgcgggggcgtccactcggagaatctcttgtcttacgatatgcaccttcaccacgaccggggccccatgtacgaggagctcaatgcgttttttcataactgagacttcgcgccggctcccttctttttcttttgcctttgcccgcccccctgtccccagcccccagagcgcagggacacccccatcctaccccggcgccgggcgcggggagcgggccaccggtcctgccgctctcctggggcagcgcagtcctgttacctgtgggtggcctgtcccaggggcctcgcttcccccaggggactcgccttctctctccccaaggggttccctcctcctctctcccaaggagtgcttctccagggacctctctccgggggctccctggaggcacccctcccccattcccaatatcttcgctgaggtttcctcctccccctcctccctgcaggcccaaggcgttggtaagggggcagctgagcaatggaacgcgtttccccctctcattattattttaaaaacagacacccagctgccgaggcaaaaaggagccaggcgctccctctttcttgaagagggtagaagttagggcgccggagcccgggcctggaacgccctcacccgcaacctccagtctccgcgttttgcgattttaattttggcgggaggggaagtggattgagaggaaagagagaggccaagacaatttgtaactagaatccgtttttcccttttcctttttttaaacaaacaaacatacaaaaaaaaaaaaaaaaaaaaaaaaaaaaaaagctaanaggcgacggaagccgaacgcagagtccggatcggagagaaaacgcagtaaggacttttagaagcaataaaaggcaaaaaaaacaaaaaacaaaaaaacaaacaaaaaaaaaccactactaccaataatcaaagacacaaatntntatgcaaggaggctccactgagcctcgcggcccggcccggccccgggatgccccgcccggcctgngggccgccccgcccgagcgcggatctgtgcactttggtgaagngggggcccgcgccgccccctccccctccccaggttcttacaatcagtgactcggagatttggggccccagtgccactgccctcccccgccccgtccccgttgngcgtcatgctgttttttaaaaacctgtttccaaatttgtatggaatggcaaactgttggggggtcggtttggggagggagggtttgcatgaaagacacacgcacaccacaccgcacgcacaagcaggcccggcgccggcgtccggggggcagaaggaggtgagctcgccggctcctcctccccgcggccattctgtcccctcctggggtgaggggtggggatggagacctgggggcagccccacccctgcccggactgtgcctcggtgggtgccacctggcgatttccggtgtctggagagagtattttttggtccaaggagtcctcttggctttagctggtgggtgggcggggagaggtctgagggctcctactggaggttcccccaaaaaggggcaaaaggagaccctctgcccaccggaggcaggggatcaggcatccaaatacacgatgcaaaaatgcaatcccacaggcgacacacccacacactcacccacacacacgcaattttaccttcctcttgtagcgaagatgaaactcccgtcggacacccgaagtgcattgcgtgtttctgttcagtttaatgacgattaataaatatttatgtaaatgagatgcaaagccggaccggtttctcacggtggcctcatttcattgaggggggagagaaggtttgagctggggctggggtgatgaaggcagagtgtcaagtgactgtgcagaggccaaacagagggaccctggacattcttgggtagtattctctccctaaccaccccccatacacccactgggctatactagctacccctcccagacccaacccaggctcgc

SEQ ID NO: 84615 - DNA, 5084 bp, Homo sapiens
  misc_feature (3895)..(3895): n is a, c, g, or t
  misc_feature (4037)..(4037): n is a, c, g, or t
  misc_feature (4039)..(4039): n is a, c, g, or t
  misc_feature (4104)..(4104): n is a, c, g, or t
  misc_feature (4147)..(4147): n is a, c, g, or t
  misc_feature (4250)..(4250): n is a, c, g, or t
gaattctaggcccagttctgtgtttcccctgtgtgttcctaggcaggtcagtttccctccatgggcctctgtaagatgaggagttggagaggtacattctcaggctactttcaactcccagccaagtgactcaagagtcccaggcagcaccagcacccctatctccaaggcctcctgatgtgtgtctctatttagaacttaatccaacctacccaacatcagatcagtgtcttaccagcccaaggtccctggggagcctcctagagggagagagccctgcccacccagattgagggtaaaggcctccccgtgctcatttttgtaccaccacagtgcttggcacatggtagacatcaaaatgtgtgtgctgaaagtataattgaagttgtgtatatatgtcagctagagtgtctggaggggcagaaatgtgggtctaaaacatacaaatgctccaaatggggtgtgggcaagggtctgtctacaccaggctgtgattacctgctcacatacatgtgtctatctgagtaggggtatgttatctatttttctacaccacagggtgaggaacaggtatatgtgtgcatgtgtatgcatccgtgtgtgtgtgtatgtgtgtgtgcatgagtgtgtgtgtgtgtgtccaaagccacctcttcaacctgtgccatttgtatctgtgtctggcccaatgagagtgttgaaaggtgagccacaagataaaacagcaacttcctacctcccttatcaagacagctgtctgacctacctccccttggccactcttgggattactggggttggcttcagtattttcagatttttcagaaggggaggagaatgcttgagtctcatccaggaacttaggcagttctcagcactgcctgctcctcctccctcaaataaccaagtctgaagaccaggagagaaagccgctggtggactggtcacctgtctggcagtgggaggaggagagtgagaggtttctaggtaggaatccagacttagaccctcccctccacccccagatgggtggtgcacaggctcatctcgcggcccctccccactccaccctaacatggatacgcccccaacaaccaaggaaagatctcccatcggctgactccacagatacacacatgtccccacagacacacacacgcccatgcagaggcacagacatccaggcacatctttccctttctctgtctttcccttggtttgaatttcgtttagccacatatgttgtgtgtgcgtgagggtgggtgggggaggggcagacagggatgagggatggcatggtgccaacatctacctatggggctcgggccagggacgccccttacagccatcctgggagggggtctcagctgtccctttgtggccaaggggaccctcctggggagtgggggcaagcacagaggtcctttctccccaacccggggtctggtccctgacccaccttgggggcctgcaggggaggaaatggacagagcgggaccctgagggagcatagaattggccaccacgagcccccagtgtccagccttgccaccccattgttcccgtgagggggtctctatatacagggggcaactcctcccaccttcctctcaatccctgctttccctgcgttgggcggggaggggagggcggcagaaatatttatttatttcctttatttatttaatttttttttttttttttggagtagagagtgacagatggcggcgggtcccgggggagccggctctcccccagtgcagacgcatgccaatcaccgtctctcatgtgatagctgctgcccgtgacgtgccaagcccatatggcctggcatagaggctggtaccccgcctggtagagatgccacactcgctccgcggttcgcatggcgctctgaagacgccggcgcccgccgccttgaggagccgctgcccccgctccctgaagatgggggaacaatgaaataagcgagaagatccctcttctcccccctctctctcttgccccctccccccctcccctcccctctccccttgactcctctccgaggcaccatgctgacccgcctgttcagcgagcccggccttctctcggacgtgcccaagttcgccagctggggcgacggcgaagacgacgagccgaggagcgacaagggcgacgcgccgccaccgccaccgcctgcgcccgggccaggggctccggggccagcccgggcggccaagccagtccctctccgtggagaagaggggacggaggccacgttggccgaggtcaaggaggaaggcgagctggggggagaggaggaggaggaagaggaggaggaagaaggactggacgaggcggagggcgagcggcccaagaagcgcgggcccaagaagcgcaagatgaccaaggcgcgcttggagcgctccaagcttcggcggcagaaggcgaacgcgcgggagcgcaaccgcatgcacgacctgaacgcagccctggacaacctgcgcaaggtggtgccctgctactccaagacgcagaagctgtccaagatcgagacgctgcgcctagccaagaactatatctgggcgctctcggagatcctgcgctccggcaagcggccagacctagtgtcctacgtgcagactctgtgcaagggtctgtcgcagcccaccaccaatctggtggccggctgtctgcagctcaactctcgcaacttcctcacggagcaaggcgccgacggtgccggccgcttccacggctcgggcggcccgttcgccatgcacccctacccgtacccgtgctcgcgcctggcgggcgcacagtgccaggcggccggcggcctgggcggcggcgcggcgcacgccctgcggacccacggctactgcgccgcctacgagacgctgtatgcggcggcaggcggtggcggcgcgagcccggactacaacagctccgagtacgagggcccgctcagccccccgctctgtctcaatggcaacttctcactcaagcaggactcctcgcccgaccacgagaaaagctaccactactctatgcactactcggcgctgcccggttcgcggcccacgggccacgggctagtcttcggctcgtcggctgtgcgcgggggcgtccactcggagaatctcttgtcttacgatatgcaccttcaccacgaccggggccccatgtacgaggagctcaatgcgttttttcataactgagacttcgcgccggctcccttctttttcttttgcctttgcccgcccccctgtccccagcccccagagcgcagggacacccccatcctaccccggcgccgggcgcggggagcgggccaccggtcctgccgctctcctggggcagcgcagtcctgttacctgtgggtggcctgtcccaggggcctcgcttcccccaggggactcgccttctctctccccaaggggttccctcctcctctctcccaaggagtgcttctccagggacctctctccgggggctccctggaggcacccctcccccattcccaatatcttcgctgaggtttcctcctccccctcctccctgcaggcccaaggcgttggtaagggggcagctgagcaatggaacgcgtttccccctctcattattattttaaaaacagacacccagctgccgaggcaaaaaggagccaggcgctccctctttcttgaagagggtagaagttagggcgccggagcccgggcctggaacgccctcacccgcaacctccagtctccgcgttttgcgattttaattttggcgggaggggaagtggattgagaggaaagagagaggccaagacaatttgtaactagaatccgtttttcccttttcctttttttaaacaaacaaacatacaaaaaaaaaaaaaaaaaaaaaaaaaaaaaaagctaanaggcgacggaagccgaacgcagagtccggatcggagagaaaacgcagtaaggacttttagaagcaataaaaggcaaaaaaaacaaaaaacaaaaaaacaaacaaaaaaaaaccactactaccaataatcaaagacacaaatntntatgcaaggaggctccactgagcctcgcggcccggcccggccccgggatgccccgcccggcctgngggccgccccgcccgagcgcggatctgtgcactttggtgaagngggggcccgcgccgccccctccccctccccaggttcttacaatcagtgactcggagatttggggccccagtgccactgccctcccccgccccgtccccgttgngcgtcatgctgttttttaaaaacctgtttccaaatttgtatggaatggcaaactgttggggggtcggtttggggagggagggtttgcatgaaagacacacgcacaccacaccgcacgcacaagcaggcccggcgccggcgtccggggggcagaaggaggtgagctcgccggctcctcctccccgcggccattctgtcccctcctggggtgaggggtggggatggagacctgggggcagccccacccctgcccggactgtgcctcggtgggtgccacctggcgatttccggtgtctggagagagtattttttggtccaaggagtcctcttggctttagctggtgggtgggcggggagaggtctgagggctcctactggaggttcccccaaaaaggggcaaaaggagaccctctgcccaccggaggcaggggatcaggcatccaaatacacgatgcaaaaatgcaatcccacaggcgacacacccacacactcacccacacacacgcaattttaccttcctcttgtagcgaagatgaaactcccgtcggacacccgaagtgcattgcgtgtttctgttcagtttaatgacgattaataaatatttatgtaaatgagatgcaaagccggaccggtttctcacggtggcctcatttcattgaggggggagagaaggtttgagctggggctggggtgatgaaggcagagtgtcaagtgactgtgcagaggccaaacagagggaccctggacattcttgggtagtattctctccctaaccaccccccatacacccactgggctatactagctacccctcccagacccaacccaggctcgc

SEQ ID NO: 84616 - DNA, 2097 bp, Homo sapiens
gaattctaggcccagttctgtgtttcccctgtgtgttcctaggcaggtcagtttccctccatgggcctctgtaagatgaggagttggagaggtacattctcaggctactttcaactcccagccaagtgactcaagagtcccaggcagcaccagcacccctatctccaaggcctcctgatgtgtgtctctatttagaacttaatccaacctacccaacatcagatcagtgtcttaccagcccaaggtccctggggagcctcctagagggagagagccctgcccacccagattgagggtaaaggcctccccgtgctcatttttgtaccaccacagtgcttggcacatggtagacatcaaaatgtgtgtgctgaaagtataattgaagttgtgtatatatgtcagctagagtgtctggaggggcagaaatgtgggtctaaaacatacaaatgctccaaatggggtgtgggcaagggtctgtctacaccaggctgtgattacctgctcacatacatgtgtctatctgagtaggggtatgttatctatttttctacaccacagggtgaggaacaggtatatgtgtgcatgtgtatgcatccgtgtgtgtgtgtatgtgtgtgtgcatgagtgtgtgtgtgtgtgtccaaagccacctcttcaacctgtgccatttgtatctgtgtctggcccaatgagagtgttgaaaggtgagccacaagataaaacagcaacttcctacctcccttatcaagacagctgtctgacctacctccccttggccactcttgggattactggggttggcttcagtattttcagatttttcagaaggggaggagaatgcttgagtctcatccaggaacttaggcagttctcagcactgcctgctcctcctccctcaaataaccaagtctgaagaccaggagagaaagccgctggtggactggtcacctgtctggcagtgggaggaggagagtgagaggtttctaggtaggaatccagacttagaccctcccctccacccccagatgggtggtgcacaggctcatctcgcggcccctccccactccaccctaacatggatacgcccccaacaaccaaggaaagatctcccatcggctgactccacagatacacacatgtccccacagacacacacacgcccatgcagaggcacagacatccaggcacatctttccctttctctgtctttcccttggtttgaatttcgtttagccacatatgttgtgtgtgcgtgagggtgggtgggggaggggcagacagggatgagggatggcatggtgccaacatctacctatggggctcgggccagggacgccccttacagccatcctgggagggggtctcagctgtccctttgtggccaaggggaccctcctggggagtgggggcaagcacagaggtcctttctccccaacccggggtctggtccctgacccaccttgggggcctgcaggggaggaaatggacagagcgggaccctgagggagcatagaattggccaccacgagcccccagtgtccagccttgccaccccattgttcccgtgagggggtctctatatacagggggcaactcctcccaccttcctctcaatccctgctttccctgcgttgggcggggaggggagggcggcagaaatatttatttatttcctttatttatttaatttttttttttttttttggagtagagagtgacagatggcggcgggtcccgggggagccggctctcccccagtgcagacgcatgccaatcaccgtctctcatgtgatagctgctgcccgtgacgtgccaagcccatatggcctggcatagaggctggtaccccgcctggtagagatgccacactcgctccgcggttcgcatggcgctctgaagacgccggcgcccgccgccttgaggagccgctgcccccgctccctgaagatgggggaacaatgaaataagcgagaagatccctcttctcgcttatttcattgttgccgatcgcagggagcgggggcagggccgcaaggcgggggcgcggcgtttagagcgcatggaacgcggagcgagtgtggcatttacaggcggggc

SEQ ID NO: 84617 - DNA, 207 bp, Homo sapiens
ggagtggtagaacccagcatcttgtgaacatcagaccacagaaaaggcagcacttctgattcctgttcttagcctaggaactaggctttgcaaatggctctgaattttttttttttttttgagatggagtctcgctctgtcgcccaggctggagtgcagtggcacgatctcagctcactgcaagctctgcctcccaggttcatgcca

SEQ ID NO: 84618 - DNA, 1080 bp, Homo sapiens
tttgccattcatctattttgatcagttagttcctcaactttccttactactcccatctcctttgtaacatatacttctcagtaataaatggccagtgctctccagacatcctagcatcaacaacttctgggattgcagggtaccaaaaagctctgggggaacatacccttgtagaatccctcccacatccttgataacctgaggtgcagtaaactggggatgataggatgaatgccaggaaactaaaacaagtagggttatatttggtgttaagaacttgaaattgcatcccatatttggaaacccatgatccatccatcctagggctctcacttaataaccccagcatccatttatttagcactctctatactctgcaaagtgctctacatacataattttaattaatccccacagccttatgaggtaagtatcatactaattttccagatgggggactgaggttcagagagattatttttcctaaatcacacagaaactatgtatcttagaactggagtttgaacctaggtttctgacttctacattcctgtactccacctatcaagaagtacaaagaagggccttttcagcctagaaacacatgtgataaagctcctatgagattgtgctccttgttcatctgtcatctgctgtgctggtaaggtggctagtaatagtgggtacccaattaacatgctgaataatgtgaaaacgtgagtggaaaacaaaactttatttaaatggttgattcagaatgatgttttagaaataaatattaaatgctgttatgttttgattttccttcatttaaacttaaaacagttagtggtactgtcagcctttttgaggggcccatagtaggtgggctcaattaaaaattaatttgaattcaacttccacatttctatgtctgtgaccttttcttcctttatttcccctattcctgtcctttatgttttaatctctcccgccaatctccatttccttttattggttataagactgttgagttgaaggactcaaatcatttgaaaataaatattcccaagaaaaagcaggataacagaataaccagtt

SEQ ID NO: 84619 - DNA, 398 bp, Homo sapiens
  misc_feature (137)..(137): n is a, c, g, or t
tcagcttggttcaaggttcgcaaattagagcagttccttccagggtggttcacacttgagctggtgcccagttatgaattcagctcgcgggcctggtatttgtggcctttgccctccacagagccttcgcagccccntttagccctcacacgtttatcatcatctccctccaaccagggtggatatttggggagttagagaggctcttgctgctgcacagcagtacctcctgtctagcctggattaggggtccctggaggctcctctttggctgaggaggggctactagaagcaaacccactcagtcccttgaaaccctacctccctcaccctgttcaggcctgtgcccacatcatctggcctctgaggcctccctgatcattcttagaatagccatc

SEQ ID NO: 84620 - DNA, 1163 bp, Homo sapiens
gatcacttgagcccaggagttggaggctacagtgagctatcatcctgtctgtagtcccagctactcgggaggctgagtcaggagaatcacttgaacccaggaggcagaggttgcagtaagttgagatcgcaccactgcactccagcctgggtgacagagcgagactccatctcaaaaaaaaaccccaaaaaacaaaaaaccctacagtgtccggggctgtctggaaggtgacacccttaggtgagggtggcagagaaggctcaggatcatggccttggggctctctctggcttctccctgtggtccaaattttatcatgtaatgggcagcctcgggtgacccccaagaagaggtgccaaggcaccccctgacctgccttatacaggaacagaaaaaggcaaaagggatgaattttgctaaaaggatgccaaagccagagggaaaggagtgggactgacctgaggcagggccactcctccagatcggctctgtggttgccttcccttttaaatgcgcgttttcccttcacccatctgtccactccgattggccttgtttaaacagtgcttgtctcctctttctgtctgggggcacctttctctcttcctgcctctctgtttctgtttgcttctgtcattgtttctgtctttctgtttctctttctccttctcttcccatttctatctctgcctgactttgtctgttcgtctgtctctctgtctgcctcctgtctctctctcttcctttccatccctctcccccggcatgggcctctctcccatgctgccagcccctctgtagcccaccctgtggttctcttccatcagctgcttcctgcatgctctatggaggttttctgttgtttgaacaataaagaaagcttggctagtggaacccattgtttaaaaaggagaaaaaaaaaagagcaaacagaaatggccgtgcaagagccccctcccatccctgggatgagacaaaagccacattggccacccatctactggctcagagggggagcacagtttagggtcactgtctttcccccattctgcattcccaatgcggagaccttcttttcttttttattattgcattcctgtccctgagcactgagaagaagcccagctcgccctcgcccagggtccgtgacaaggcggcggccg

SEQ ID NO: 84621 - DNA, 833 bp, Homo sapiens
tgaacagttggagaaaataattttgttttgtatttgcatattttgctatatattttcttttttgttgattacaaaaattatacagatattatttagcttatcctcaggtattctgattagcttttttagctacactttcccatttacctaccttttagtcagaaaattatgttatacttttatgaattaactttgttattcaagtacaatttatttatttatttattattattttttgaaatggagtttcactcttgtcgctcagagtagagtgcagtggtacgatctcagctcactgcaacctccatttcccgggaggatcgcttgaatccaggaggcagaggttgcaatagctgagattgcacccctgcactccagcctgggtgacggagtgagactctgtctcaaaaaaaaaaaacacattgttattcggagtgttcagtcacaaggtcagcctattttatcaaaatgtaccagcaaaagattgttgttagcatatatgaaatttagtcacgatgtacactattttgtctctgtaagatttattcactgtgtatgtgtgtgtgtgtgcatgtgcgtgtgtgcatgcgcatgcgtgcacgcgcccgcacagaggatcacggtgaggtggtgggagcacccaggttctctctttcattgcaatgccgtttgttgcagcatggttcattgtaattgcagaggagaggacagtctcaatgaagagcgtcgatatgtatacaccacactgtagtatacagaggagaacactgtgctgtagaaagaatgaggtagatctaaatactactgcgaaacagtctccaggagagattcag

SEQ ID NO: 84622 - DNA, 445 bp, Homo sapiens
gggtcaggggtggcaagactcctaaggagggaaacgacagaaatgattctgttcttgcgagccccaaagcaagagtacttttctgatgggtaaagtggtatttctttccaggctgcaaagctctccacctttttcctttggtctcagtcagccccagccatgggggcaaatcaagttggggtcaactcggctgccagagacctaagttgccacaagggtcaccgacgacctaagcagcaagtttccttcgtccagcctcctgcccccacgcacattgcctccacagcaaactccacctgactcagcttgtttaactccaatcctgcagccctcccggcctcagcagggtcagggggcgcgggtctgcgccaagacggttaggaggcccaagtcctgggactggacggttactgcgctcccttgggcgcagccgctggcggcgtgg

SEQ ID NO: 84623 - DNA, 667 bp, Homo sapiens
cttgaacccaggaggccgaggttgcagtgagccgaactcgtaccactacactccagcctgggtgacagagtgagactctgtctcaaaaaaaaaaaaaaaaaattatttgaagaagtctaaattttctgacactgcttgtattataggtatatactacttaaaactctatgctaacatacacaaaaagcaacaaactactatatcagattatatatttatgtgctttaatttgtataaaatatattttgggggttgttatttacccttataattagatgaacttcttttgagaagttgaatgaaatgtaaaaaacatttttcaattttaagttatattttaagaacaccaagaattttgctgcagtggatccttctggtagagggaagattcagtcttttaaaattttattttagcatgctctgtgtccaaaaccctgtgccaggcaacaaaaaagacacataaaagtagccaacttggtccctgcccttgggcactcacagtcaaggtcatcagtattttaaaataaaatatcacctaacatagggaaataaaattatgatcccagataacagtagagaagatgagagaaggaccctagcagttaaaaaggtcaggagaggctttgtgagaagggaaacattaaatagtattaaagattatgtaaga

SEQ ID NO: 84624 - DNA, 392 bp, Homo sapiens
atctccaaagtgttgtctttttgtatgctaatgttcactgatagcttcaggatggaggtggtcaccagaaggacaaaggcatgattatagggttggaacttctgggcccacctccccaacttccagggagaagagcggggctgaaagacagactgatcagcaatggcctgtggtttgatcataatgaagcctccataaaaacccaagttgacagagtttggcaagcttttagatagctgaacacatggaggctcccagaggatggcatgcccagtgagggcatggaagcttcacacccctttcttcataccttaccatacacatctcttcatctatattctttgtaatatcttttataataaaccagtaaatgtaagtaactatttctctga

SEQ ID NO: 84625 - DNA, 172 bp, Homo sapiens
tgcacagaagaaaagggccttggagggcagagggcaggctatgaccagggccctgggcaagtcaggccaactcactaggggagggccacgctggggcggcagggtcaggggcttcagggggctcgggggacccaccagaagccatctgagaacagtgtccactggtcaagcc

SEQ ID NO: 84626 - DNA, 453 bp, Homo sapiens
ctcagtaaatatgttccagtttggagctgatctcaacaatgatgtgttatgccttagcatcagcctgaagcatacgcactgctgcagtgagccagtcttctgagctgtttcacccaggaatgcattcagaccaactgcagaagaatgaaagaagtgtcaaatagttaaagaatctagcccacacagaaagggagcttctggtcaggagttcttcagagaggatatggtgggtatttacttgggcctcaagggtccagcttcaggttctttgccatcagtggtggagaccagtgatacacagcaaggaacacgtcttggaactactgatcctgaccatcctgcccaagaactccaggcctgggtataggagcatcccagagtataggaaagaggctgtctgtactgaagaacttggagaggaagctgaatgatctgagaggaaaggtaaaatga

SEQ ID NO: 84627 - DNA, 591 bp, Homo sapiens
tgctacttaactctcactcaagccatgaagatgggacttggaggaaatccttatggaccagctggaactgggaaaacggaatcagtaaaggctttaggtggacttcttggaagacaagttttagtctttaattgtgatgagggcatcgatgtgaagtcaatgggacgaatatttgttggtttggtgaagtgtggggcctggggttgttttgatgaatttaataggctggaagaatctgtactgtcagcagtttctatgcaaatccagacaattcaagatgctttgaagaatcatagaactgtatgtgaactgcttggcaaggaggtagaagtaaattctaattctggaatttttatcactatgaatcctgctggaaaaggttatggaggaagacaaaaactgcctgataatcttaaacagcttttcaggcccgtagctatgtctcatccagacaatgagcttattgcagaagttattctctattcggaaggctttaaagacgctaaagtattgagcagaaaattggtagctattttcaatctatctagggaacttttgacacctcagcaacattacgactacggtttcagc

SEQ ID NO: 84628 - DNA, 1585 bp, Homo sapiens
ataacagcacttactactttctgatattgtcatcttgtttgtcagtttttctcttctagagaaatctttgtgagggcaggttcttggctctctactgattacttgagtctccattgcccagccttcttgttgtatcagttttaatatagcaaaccaaaataggatcttaattttaaaaaatagtaatgctacttaagatttgattactcttaagacctagtgtttctgtatgctaactccctttttataatgtaaaatgaattattctctcataatatttttctttcttttcttttctttttcttttttttttttttttttaaatgatttagatggggtctgcctgtgttggcccaggctagccacgaactcctgggcacaggcaatcctcttgcctcagcctcctaaagtgctgggattacaggtgtgagccaccatgcctgggcagtctcataataattttcattcctgactttttttcagatctagtctctagaaagaaacttgtgcataccaagacagtatggccaaaaacctatcctggcaagtgttaatgctatgtttccactcctgaacaccaggaactgaacattgttgtgtttgggtattgtgagtatggaagtcattcaattatttttcaaagcgggcttagtacatgatgttttgttaagctaccttgagaactggagtttgtgtttaagtttcagtgagataagggtagacctcctaatgcctgtgaaaattttgatatattttataatgtaccacctgacatcataatgtactgcctgacatccaaatcatctttttgagttttataaatctccaaacttcaaaactagtagatgctggtataaaacctaataatttcagttcaatctttacattctccagggtccacttttcattctcttaagtacaagcctatttctcagtttggcatagtgccaagaacattgataaatgttggccccaaaatgattgtcaaagttctgttcacttaaattcactgtaattagtaagaatagttatcatttattttgggtgccttcaaagtagactgtgctaggcaacaatttctcttgataatctcacaatagccttggcatttgaagaaactttggcctagaaacatttatgcccccaagatcacacaactagaaagaagcagaagttgatttatctcctaaatctatgtgacttcaaagctggtcatcctaccactatgcctggttgcctatatcatttaatgtgatgaaggcactaatgtgacacccacaccgggctcaatttattagtaatccttctatatcacagccacacaagtgcttagagttcctggctgagatcagtctatataattatattacacttctcaagtttagtagtgctagacaaataggaagggagttttacattctttgtttatttgcaataatttcatgattgtcgtaattaaactatagcccgagtttaaagaagaagccagccaaaaaaaaaaaattacccccttccattataaaaaatatgaggtccccacaaggggaccaatattcttcccaatttccaatggttatcctagcta

SEQ ID NO: 84629 - DNA, 223 bp, Homo sapiens
ctatttccagggtatttcggctattatgagtaaagcacatataaaaatttgtacacacagtcttagaggacataagtttcacttggctaaatgcctaggagtgaaattgccaggttgtacagtaaccctatgttcaattttataagaaattgccatacttctgagatgggagagttcccttgaccccttctcgggacttgcgacaggggtgtggcctacttac

SEQ ID NO: 84630 - DNA, 569 bp, Homo sapiens
ctcagcactctccaccccggtctgtggttgccacagtctcctaagtgctgtgagctccagcgctcacccagagatggaaagtttgcttctctttctacccagatgaggagatcgaatcccagagagaggaggtgatttatgtgagggttttgcgaggctggaagtcacgcccacagcctcttgccaggcagcagtgggggcctcagcccccaggcctctgccagagtggccccaaactgctgacttcagcatttcactggccagggcagatcagatttcttttctggcacttggccaccctgcacacccttcccccatcactattttgagctgagctcccctgtcccctcctcccagggctgtggccctcacacccaaagcctcactccaggctgaggcctttccacctcttgacccaccaccttccctccagccagggaaggctgggctggtcacggccatgtctatccaggccttgccagggacgccttcagacacagagccaggggccagctgccctgtgcaaatggcgctgctagctcaagacagccgtccagggtgctcagcac

SEQ ID NO: 84631 - DNA, 281 bp, Homo sapiens
  misc_feature (3)..(3): n is a, c, g, or t
  misc_feature (6)..(9): n is a, c, g, or t
  misc_feature (12)..(12): n is a, c, g, or t
  misc_feature (30)..(30): n is a, c, g, or t
  misc_feature (34)..(34): n is a, c, g, or t
  misc_feature (36)..(36): n is a, c, g, or t
  misc_feature (50)..(50): n is a, c, g, or t
  misc_feature (143)..(143): n is a, c, g, or t
  misc_feature (241)..(241): n is a, c, g, or t
  misc_feature (244)..(244): n is a, c, g, or t
  misc_feature (252)..(252): n is a, c, g, or t
  misc_feature (254)..(254): n is a, c, g, or t
  misc_feature (262)..(263): n is a, c, g, or t
  misc_feature (265)..(268): n is a, c, g, or t
  misc_feature (281)..(281): n is a, c, g, or t
acngannnnaanggaattatcgaatgaatngaananaatcatcgaatggnctcgaatggaatcatcttctaatggaaaggaatggaatcatcgcatagaatcgaatggaattatcatcgaatggaatcgaatggtatcaacancaaacggaaaaaaacggaattatcgaatggaatcgaagagaatcttcgaacggacccgaatggaatcatctaatggaatggaatggaataatccatgnacnggaaggcnanatcatcgnntnnnntcgaatggaatcn

SEQ ID NO: 84632 - DNA, 241 bp, Homo sapiens
aaagtcatgctctttgccactgtacttgtgtcaatgtttctcaaattttagtgtgtagcatccagaatccagaatcacttggatgtctcataaagacagatgaataggccccgccctcagtgtcagatgcattaggtgtgagatttttgcatttctaacaagttcccaggtaatgctgatgctgctgggctgagaccacactttgagaaccactgactatgtagtagtttaaattttgatg

SEQ ID NO: 84633 - DNA, 232 bp, Homo sapiens
gtgatctgcccacctcagcctcccaaggtgctgagattacaggcgtgagccactgcgcctggctttatgcatcagtttcctgatgctactataacaaatgatggctaacttagtgtcttaatacatcacaaatctgtctgacagagcagaaggtcgacgcagagcagaaggtcgacgcagagcaaaaagtcgaagcagagcacgaaggtcgacacagagcagaaagtcgacg

SEQ ID NO: 84634 - DNA, 445 bp, Homo sapiens
gggggctatacactgaaaatcactgttagaagactgctgaattggacaaaggcccctcaaaggagaaatgatccagcacttggtttttctgcttccctgaaaccctcatctcaacaaagatgccctgttatctccactgtgggtcctgaagccttagacaagtacagaagtgaaatgtacatctacataaaaaaatgatacacagtactaacttcatgcctgtgggtatagagccagaaatgtcacagcacacctgcatatctatcacattgtcacagcagcccctagatgcaattattcctgaattacagagaaacaaatggaggtaccaggcagctgtgactgttgtctacagagaagacacacgtggaaggcaatttttcttggtcatgaaaattgtcaaatgtacataaaggtgaaataaatagtgtaataaatccccaaa

SEQ ID NO: 84635 - DNA, 322 bp, Homo sapiens
tagatttttctgttctatttaaatagaaggtaaataaaagcatgtttatagaagcaggtaatggagatcttagatatctgaattagggataaatagatgtcccaacacctggggaaagttcatgtggcagtatatgcttcagaagactacagccatgtctatatgaagggcagatcttgtatctcttctcctgccccaatgtgggcatgctggcagggtaccaaaatcatctctttcttttgtacttgaaccatgtgacacttccttgggacaaaaaggcacttagagcataaaccaaatacaataggggtagagaacactg

SEQ ID NO: 84636 - DNA, 1027 bp, Homo sapiens
atggagaaagaatgaacttaaaagttgtacttcaatgaataccatcaagaaagtgaaaaacaaactcacagaatgggagaaaatattttcaaattatctatcttataagagacttgtatacagaatatttaaaggactattacagcttaataataaaaacacaacccaatttcaaagtggacagaagattcgaatagacatttattctaagaagataaacaagtggccaaaagtatatttaaaatgctcaaaataattagttattaaagaaatgcaaatcaaaaccacattgagcacatcatatccattaggatgactaaaatcaagaagtaaggcaataacaagtattgatgaggtaggttaggaactctttacacattgctgatgaaaatgtaaatgatgcagctcttttggaaaatagtctgacagttcctaaaaatgctaaacttagtattagcattttgattcagtaattccactgctaggtatatactcaagagaaatgaaaatatttatccacacaaaactgtacaaatgttcatagcaatattattcataatggcaaaaggtagacacaatccaaatgtccatcaactgatgaatggaaacataaaaagtggtatatgcatacaatggaatattattcagccattaaaaaggaaacaagtactgatacatgctccaatatggatgagcattgaaaatattttgataagtgaaagaagtcatgaaagtgtacataattgcatgattctatatatatgaaatgttcagagtaggcaaatatgtagagacaggaagtagatgagtagttgctgaggattggtgggttaggggatgaagccagggaatggagtcactgctaatgatacagaagttctttcaggttgatgaaatgttctgaaattgattatggcaatcattgcacaactttgtagtatactagaaacttttaaattgtacacttttaatcaatgaattgcttggcattatatcacaataaagctgttaaaaacaaacggaaggg

SEQ ID NO: 84637 - DNA, 366 bp, Homo sapiens
tttccccaggggagctggggaattcctgccaagcaccttgaataggaggggcctcacagagggcagggccagggtccagcaggggtggggggttcctgctctgcccctgcccgtccccacccagtcttgccctcccatcctctcatctattcccccgctggagacggaagatcttttattttctattatttataacttcagacttgggccccctgttctttctttcccattaacttgagtgacctgtgtgagagacagacagatgccccacgaggatggctggacaaggacttttactttttattacataaaaatattaaaaaataaataaaaaaaataaaattttaaactaacttaaaaaaaaaa

SEQ ID NO: 84638 - DNA, 420 bp, Homo sapiens
ttttttttcagacagggtctcactctgtttgaccagactggagtacagtggcacgatcacagcccactgtagctttggcctccggggctcaattgatcctcctgtctcaggttcctgagtagctgggagtataggtgtgcgccaccatgcccagctaatttttgtattttctatagaaacaggatttcaacatgttgctcaggctaatctcaaactcctgggctcaagcaatctgcccaccttggcttcccaaagtgcacaggattacaggtgtgagccaccacacctggcctgcaatggatatttttaaataagcatcaaaggcaaaattcaattccagagaatccagaaggatgtggcgtcaggaagcagacataagaggggccaggaagccggcaggaggatgaggatgaacttggg

SEQ ID NO: 84639 - DNA, 389 bp, Homo sapiens
agacctcttaaactcaaaataggtatgtggatgttataatccacaatagatgtgtgaaaacctttcctgtactttttccattttagatgatattgaatacacccttttccagagggcttcaatagtagtagtgcttaatttcttcctgaagagtttagttttctgactgggtaggctcctttgttgtttcatgtgatgacatcattatctagtgttttcttttctcattcctgtgtaaaccaatgtctcatcacaccagaaaaacctgatcatatatatgctcgttttctgaataaaattcttctgggggcatttcatatataccagtaaggtccagtcttgattgtggtattacagaagcctccatgacttctccctcttacgttcta

SEQ ID NO: 84640 - DNA, 525 bp, Homo sapiens
tcagtaggaacccaagttgaaatgcctctgggggctggggcttataaacatgctcagggatgggagaagcaggtgaggcttgagcctgatgagcagggaggccagaaactgaatccggaagctacagtgagctgttctacctgcaaaaggaaaacgcaaaagaaccgcagattcaccccccaagacgagaagaggaagatggctgtgggtggacattgtctcatgaagacgaaactggggcctcaagcctgctttctaggttcccacgaggtacccaaataagaaccttccttgccagcaggggccttaacaccaaatcttcgagtttgagagcgccctctagtgttcatgcccatggcagtgttctcagttctggatttggggctcttgtaaacacagcttcttggtgatggtgaactcaagtcaaagggtacccactaatgaaacaatgaatggaactaagcgcatcagcagaacaatcagtgacagaatttggaccctagatccgcaaaatagaccaactcc

SEQ ID NO: 84641 - DNA, 1124 bp, Homo sapiens
catctgcgtcagcctcccaaagtgctgggattacaggtgtgagccaccacacccagacattcatctttatttttaaaggacatttttactgaacataaaattctctgagttggcagttttttctttcagcaatcttaagatgtttatgccttctggcttcaacagttggagcaagaagattgctgtaattcttatcttggttcctctggatatttttaaggttttctttctatcagcaatttgattacgatgtgcctcataaggatttatttgtgtttatcctgcttggggtttattgagctttgtggacttgtacatttatagttgtcactacagttggaaatttttaagccattatttctttaaatacgtttctatctcaagaagtacagttatctccaaatgagcgtcatctacatgtccacaactctgatcagaccactcttagagccagtaatgattattttaatacctaccatactttgtgtatatttactcctcagtaaatatttgtagagctgcacatagggaatttctttaacacctttaaagtttatttatttaaataagaaatacatgcccatggtaaatatttcaaatagtacaaaaatatttcaaatagtacaaaaaaggaggtattctgtgaaaagtaagtctttgtttcaccaaagataccaatccctgccccctccccgtcctaaggccatcactgttagcatttccttttttctcctcccaaaattgtctgtgcatgttcaagtatatatggatatatatccttgtgctagcatactatatacactgttctgcatctttttaaagtttaataatcttggcgatcattctatatcagtacatataaagtgggctttttatgaatggcctaacattacatcatacagatgtatcataatttaattaagtggtgccctgttggtggatattcaagtcgtctggtcttttgctattgcaaataatgttgcagtaaagtaaaatgtaaaataaaagtaaatgtcttacttacttaaaaacctattttaaaagtaaatgatggactttaggaggttaagaattaaaaattaataaacatataaataaatgaggtactctagcacttggggtca

SEQ ID NO: 84642 - DNA, 638 bp, Homo sapiens
catctgcgtcagcctcccaaagtgctgggattacaggtgtgagccaccacacccagacattcatctttatttttaaaggacatttttactgaacataaaattctctgagttggcagttttttctttcagcaatcttaagatgtttatgccttctggcttcaacagttggagcaagaagattgctgtaattcttatcttggttcctctggatatttttaaggttttctttctatcagcaatttgattacgatgtgcctcataaggatttatttgtgtttatcctgcttggggtttattgagctttgtggacttgtacatttatagttgtcactacagttggaaatttttaagccattatttctttaaatacgtttctatctcaagaagtacaggatgctcttggtgtcttcacggggattggttccccgaattcccctggtgtacccaaatctgtggatgctccaatcccttatgaaatggcatactatttgcatgtaacccatgcacatcctcctgtatactttaaaccacctcactttgggaggccgaggcaggcagatcacgaggtcaggcagattgagaccatcctggctaacacggagaaatcctgtcgctacttaaaataccaaacaatttat

SEQ ID NO: 84643 - DNA, 1763 bp, Homo sapiens
ggagccacgccccgcacagttaacagacgggcgctcagggagctagggagctgtgaagctgctggaggagttggcgtccggggagcaagggccatggccaccgtgcaggagaaggctgctgcgctgaacctctcggctctccacagccccgcgcacaggcctccgggtttcagtgtagctcagaagccatttggagccacgtatgtatggagcagcatcataaacactcttcaaacacaagtggaagtgaaaaaacgaaggcaccgtttaaaacgacataatgactgctttgttggttcagaagctgtggatgtcattttttctcacctaattcagaataagtattttggtgatgtagatattcctcgagccaaagtggtgagagtgtgtcaagcgcttatggactacaaagtatttgaagcagttccaaccaaagtctttggaaaagacaaaaaacctacatttgaagatagtagttgcagcctttatagattcaccacaatacctaaccaagacagtcagttaggcaaagagaacaaactatattcacctgccaggtatgcagatgcattatttaagtcatccgatatcagatcagccagtttagaggacctgtgggaaaatctgagtttaaagcctgccaactcccctcatgtaaatatctctgcaaccttgtctccacaagttattaatgaagtgtggcaagaagaaacaattgggcgtctactacaacttgtagaccttccacttcttgactccttactgaaacagcaagaggctgtacctaaaattcctcaacctaagaggcagtccaccatggtcaacagcagtaactatctggatcgagggattctcaaggcttatagtgactctcaggaagatgagtggctctcggcagcaattgactgtttagaataccttccagaccaaatggtggtggaaataagcagaagctttcctgagcaaccagaccgaacagacttagtgaaagaacttctgtttgatgccattggcagatattacagtagtagggaacctctgttaaatcacttatctgatgttcataatggaattgcagaactcttagtgaatgggaagacggaaatagctttagaagctacccagctccttctaaagcttttagatttccaaaatagagaagaatttagaagactactgtatttcatggctgttgcagcaaatccttctgagtttaaattacagaaagaaagtgacaaccgaatggttgtgaaaaggatattctcaaaagctattgttgacaataaaaatttatccaaaggcaaaacagatcttctggtactctttttaatggatcatcagaaagatgtttttaagattcctggaactctacataaaattgtaagtgttaagcttatggccatacagaacggaagagatccaaatagagatgcaggatatatttattgccagagaattgatcaacgtgactattccaacaatacagagaagacaaccaaagatgagctgttgaatttactaaaaactcttgatgaggattcaaaactttctgccaaagagaagaaaaaattgctaggtcaattctataagtgtcacccagacatctttattgagcattttggagactgagtttttaatatctgtatataagttgtgtattttaagaataaattatgtatcctaaatatccaatcacatttgtaagcgtggaagctctaaatttgaaactgtacttaataaaaatttttttgtataaaaaaaaa

SEQ ID NO: 84644 - DNA, 864 bp, Homo sapiens
ggagccacgccccgcacagttaacagacgggcgctcagggagctagggagctgtgaagctgctggaggagttggcgtccggggagcaagggccatggccaccgtgcaggagaaggctgctgcgctgaacctctcggctctccacagccccgcgcacaggcctccgggtttcagtgtagctcagaagccatttggagccacgtatgtatggagcagcatcataaacactcttcaaacacaagtggaagtgaaaaaacgaaggcaccgtttaaaacgacataatgactgctttgttggttcagaagctgtggatgtcattttttctcacctaattcagaataagtattttggtgatgtagatattcctcgagccaaagtggtgagagtgtgtcaagcgcttatggactacaaagtatttgaagcagttccaaccaaagtctttggaaaagacaaaaaacctacatttgaagatagtagttgcagcctttatagattcaccacaatacctaaccaagacagtcagttaggcaaagagaacaaactatattcacctgccaggtatgcagatgcattatttaagtcatccgatatcagatcagccagtttagaggacctgtgggaaaatctgagtttaaagcctgccaactcccctcatgtaaatatctctgcaaccttgtctccacaaggtaagctaaggatgaagcaaagtaagaagtagaagacaaacttcaaagttatttaaaattttttaatcttaatctttattagattttaaatattcaaagtacagagaaagagtgcactatgtattaaagctgtttatgttcaattttaacagaagtctattatctttaacaaatagatc

SEQ ID NO: 84645 - DNA, 1709 bp, Homo sapiens
ggagccacgccccgcacagttaacagacgggcgctcagggagctagggagctgtgaagctgctggaggagttggcgtccggggagcaagggccatggccaccgtgcaggagaaggctgctgcgctgaacctctcggctctccacagccccgcgcacaggcctccgggtttcagtgtagctcagaagccatttggagccacgtatgtatggagcagcatcataaacactcttcaaacacaagtggaagtgaaaaaacgaaggcaccgtttaaaacgacataatgactgctttgttggttcagaagctgtggatgtcattttttctcacctaattcagaataagtattttggtgatgtagatattcctcgagccaaagtggtgagagtgtgtcaagcgcttatggactacaaagtatttgaagcagttccaaccaaagtctttggaaaagacaaaaaacctacatttgaagatagtagttgcagcctttatagattcaccacaatacctaaccaagacagtcagttaggcaaagagaacaaactatattcacctgccaggtatgcagatgcattatttaagtcatccgatatcagatcagccagtttagaggacctgtgggaaaatctgagtttaaagcctgccaactcccctcatgtaaatatctctgcaaccttgtctccacaagttattaatgaagtgtggcaagaagaaacaattgggcgtctactacaacttgtagaccttccacttcttgactccttactgaaacagcaagaggctgtacctaaaattcctcaacctaagaggcagtccaccatggtcaacagcagtaactatctggatcgagggattctcaaggcttatagtgactctcaggaagatgagtggctctcggcagcaattgactgtttagaataccttccagaccaaatggtggtggaaataagcagaagctttcctgagcaaccagaccgaacagacttagtgaaagaacttctgtttgatgccattggcagatattacagtagtagggaacctctgttaaatcacttatctgatgttcataatggaattgcagaactcttagtagatttccaaaatagagaagaatttagaagactactgtatttcatggctgttgcagcaaatccttctgagtttaaattacagaaagaaagtgacaaccgaatggttgtgaaaaggatattctcaaaagctattgttgacaataaaaatttatccaaaggcaaaacagatcttctggtactctttttaatggatcatcagaaagatgtttttaagattcctggaactctacataaaattgtaagtgttaagcttatggccatacagaacggaagagatccaaatagagatgcaggatatatttattgccagagaattgatcaacgtgactattccaacaatacagagaagacaaccaaagatgagctgttgaatttactaaaaactcttgatgaggattcaaaactttctgccaaagagaagaaaaaattgctaggtcaattctataagtgtcacccagacatctttattgagcattttggagactgagtttttaatatctgtatataagttgtgtattttaagaataaattatgtatcctaaatatccaatcacatttgtaagcgtggaagctctaaatttgaaactgtacttaataaaaatttttttgtataaaaaaaaa

SEQ ID NO: 84646 - DNA, 688 bp, Homo sapiens
atattaaaaagaactacacatatcttttaagctcatgtagaaatttatcctgatggcttgaaatagctactgaattaggtaccatgtgtatatttgttattctttgccttttaaataatcttcccttgccttttaaataatcttcccctctcccctatagggaagatgagtggctctcggcagcaattgactgtttagaataccttccagaccaaatggtggtggaaataagcagaagctttcctgagcaaccagaccgaacagacttagtgaaagaacttctgtttgatgccattggcagatattacagtagtagggaacctctgttaaatcacttatctgatgttcataatggaattgcagaactcttaggtaagtaagatctaactggatactagcatttatcttttggaggaaacaagaaaaagttagttctcaaactgaaccagaatagtactactacaagctgggagtggatctggattaattcatggaaagtatgtttgttcaaaaacttctaggggtcatttggaaagaggctttaacaagctctgaagttatgcagaaacttctggttacccaggagtataatgctgctctcattcaccggaagcttaagcataaagcagcaattctctttttttagaagagttatcagcaccaccattactcccctttcaatctcttc

SEQ ID NO: 84647 - DNA, 1554 bp, Homo sapiens
ggagccacgccccgcacagttaacagacgggcgctcagggagctagggagctgtgaagctgctggaggagttggcgtccggggagcaagggccatggccaccgtgcaggagaaggctgctgcgctgaacctctcggctctccacagccccgcgcacaggcctccgggtttcagtgtagctcagaagccatttggagccacgtatgtatggagcagcatcataaacactcttcaaacacaagtggaagtgaaaaaacgaaggcaccgtttaaaacgacataatgactgctttgttggttcagaagctgtggatgtcattttttctcacctaattcagaataagtattttggtgatgtagatattcctcgagccaaagtggtgagagtgtgtcaagcgcttatggactacaaagtatttgaagcagttccaaccaaagtctttggaaaagacaaaaaacctacatttgaagatagtagttgcagcctttatagattcaccacaatacctaaccaagacagtcagttaggcaaagagaacaaactatattcacctgccaggtatgcagatgcattatttaagtcatccgatatcagatcagccagtttagaggacctgtgggaaaatctgagtttaaagcctgccaactcccctcatgtaaatatctctgcaaccttgtctccacaagttattaatgaagtgtggcaagaagaaacaattgggcgtctactacaacttgtagaccttccacttcttgactccttactgaaacagcaagaggctgtacctaaaattcctcaacctaagaggcagtccaccatggtcaacagcagtaactatctggatcgagggattctcaaggcttatagtgactctcaggaagatgagtggctctcggcagcaattgactgtttagaataccttccagaccaaatggtggtggaaataagcagaagctttcctgagcaaccagaccgaacagacttagtgaaagaacttctgtttgatgccattggcagatattacagtagtagggaacctctgttaaatcacttatctgatgttcataatggaattgcagaactcttagtgaatgggaagacggaaatagctttagaagctacccagctccttctaaagcttttagatttccaaaatagagaagaatttagaagactactgtatttcatggctgttgcagcaaatccttctgagtttaaattacagaaagaaagtgacaaccgaatggttgtgaaaaggatattctcaaaagctattgttgacaataaaaatttatccaaaggcaaaacagatcttctggtactctttttaatggatcatcagaaagatgtttttaagattcctggaactctacataaaattgtaagtgttaagcttatggccatacagaacggaagagatccaaatagagatgcaggatatatttattgccagagaattgatcaacgtgactattccaacaatacagagaagacaaccaaagatgagctgttgaatttactaaaaactcttgatgaggattcaaaactttctgcc

SEQ ID NO: 84648 - DNA, 2101 bp, Homo sapiens
ggctgggtcccggcgcggggcgggcggcgtggggcgttcggccgcctgcgcctgtcaacggccggctgggcgagcacagcacagctgcgaccacttggccaacgcccccgccgagcgggcggatcgagttcctctctggctggtgggctgcaagcggcagagcccgcccgcacagcccagcttttttctttctacccagactctcaacttgaccgcgcgttggtctgtgcgcccgctaacgtgccaggcacgcgccggggagctccgggatatgctccgcggtgctaccggtgacaagtgtggtatctggaatttgtgtagttctttgccccctgtctcaaccacaaaccttgacgacacagtatggccaggggccgagctcctcccttgcccactttgttctccagactgctaggagtcaagagtcagcttgtctccccagactcttcctgggagggatgagaggtttatgtgagttctactggcaggaatttggcataaaaggtttcagtgtagctcagaagccatttggagccacgtatgtatggagcagcatcataaacactcttcaaacacaagtggaagtgaaaaaacgaaggcaccgtttaaaacgacataatgactgctttgttggttcagaagctgtggatgtcattttttctcacctaattcagaataagtattttggtgatgtagatattcctcgagccaaagtggtgagagtgtgtcaagcgcttatggactacaaagtatttgaagcagttccaaccaaagtctttggaaaagacaaaaaacctacatttgaagatagtagttgcagcctttatagattcaccacaatacctaaccaagacagtcagttaggcaaagagaacaaactatattcacctgccaggtatgcagatgcattatttaagtcatccgatatcagatcagccagtttagaggacctgtgggaaaatctgagtttaaagcctgccaactcccctcatgtaaatatctctgcaaccttgtctccacaagttattaatgaagtgtggcaagaagaaacaattgggcgtctactacaacttgtagaccttccacttcttgactccttactgaaacagcaagaggctgtacctaaaattcctcaacctaagaggcagtccaccatggtcaacagcagtaactatctggatcgagggattctcaaggcttatagtgactctcaggaagatgagtggctctcggcagcaattgactgtttagaataccttccagaccaaatggtggtggaaataagcagaagctttcctgagcaaccagaccgaacagacttagtgaaagaacttctgtttgatgccattggcagatattacagtagtagggaacctctgttaaatcacttatctgatgttcataatggaattgcagaactcttagtgaatgggaagacggaaatagctttagaagctacccagctccttctaaagcttttagatttccaaaatagagaagaatttagaagactactgtatttcatggctgttgcagcaaatccttctgagtttaaattacagaaagaaagtgacaaccgaatggttgtgaaaaggatattctcaaaagctattgttgacaataaaaatttatccaaaggcaaaacagatcttctggtactctttttaatggatcatcagaaagatgtttttaagattcctggaactctacataaaattgtaagtgttaagcttatggccatacagaacggaagagatccaaatagagatgcaggatatatttattgccagagaattgatcaacgtgactattccaacaatacagagaagacaaccaaagatgagctgttgaatttactaaaaactcttgatgaggattcaaaactttctgccaaagagaagaaaaaattgctaggtcaattctataagtgtcacccagacatctttattgagcattttggagactgagtttttaatatctgtatataagttgtgtattttaagaataaattatgtatcctaaatatccaatcacatttgtaagcgtggaagctctaaatttgaaactgtacttaataaaaatttttttgtataaaaaaaaa

SEQ ID NO: 84649 - DNA, 346 bp, Homo sapiens
tattacatgatatatctttattcactcaacattaattgagcatctaatatacagaagacattgtgttgctgatcacttgaagaatgcaaaggtagctttttaagagctactctatttgtacttcatgagttcagctctaaatttcttttattcagcattttacatcatctacctcaaattattcaattggagtaaagtgttacatacatgctaaagcacaattaaatatgtgaaaagattcagttagcaaaaaataaagaaaaattggatttaaaatagtgcacattgataattcttaaaatattctattctattctgattatatcagccatctaagtcactcagt

SEQ ID NO: 84650 - DNA, 84 bp, Homo sapiens
gaaagaggagactcctgccctcagcagtcccaggcccagaacacaggccgctgggagatgacggcggtgtctgcgtgggtgtgc

SEQ ID NO: 84651 - DNA, 405 bp, Homo sapiens
gaatgaaaatggcatatttgaacataaacttagggcagatttttactacttttgaaaaaatgttggaaaatatttctgtatgaaacgtaaaacaacttttaattttttttagaagttgagaggattctattttgcaaagctgtattatgaagctaaagaatatgatcttgctaaaaagtaagtacaaactgtaacatgtattctttttttaaaatcaatgccttttctcattttcttctttgaaataggtaaaaatatgttcttagtagttcttcctaagtgtattctggaataagggatttatcactcagactgatgctaaggaccagcctagattccattgagattgaaaccgtaattagtgttttctgcatgctgctgctttataccaagggcaagaaattg

SEQ ID NO: 84652 - DNA, 824 bp, Homo sapiens
tctgttcactcatgtgtaaaataggggtaataattgtaaattacttcatagaattcttgtgagttaaagtatgtaaaaacgttattattgtgcctggcacccagtaagcattcaaaaaatgttagctaattaacctctgatattaccacatactccagtgaggtatgcattctctgtttttcttttaagtctttaaatagaacagtcataagacttgacttgtgcctttttggattaatgaacatttttaggactggtagcttttagaaatggctttatgaggttatctatgtcgtatccaaaaagtagagatgctagaaaatttcatattattttgtgctctggcctttgttcataatccaaacaaaatacaatttcctaaactttattgtttctatcataagaaataaaatgtaatacacttaaataggtagcaacaccaaatactttaattaatattttatagaatacacaactgcatctttttgtcatagtattaagaggaaatatgtgtagcataagtgtcaatcttgctgtatttttattaaaaccttgacaatctgaactgcagataactttatttaatagaggcatcattgttattattgccaaacctcttctcactgcacagtaggatccagctgcaggaagttagctgtgactggggctgatgtctatgaagtacatctaatccatctcatcaagtttatagaggacttgaagtgtagccaagaaaattaatgagtggcataattgagcagactcagctgtggagtgatcatgtttctttccacagtatttctgcacttgagtgtattgcatca

SEQ ID NO: 84653 - DNA, 629 bp, Homo sapiens
ggatttgctcctgggtgtccagcaggaaggagactgtgtgcacctcgcccgactgcggccggagcgcggcgctgacttttccaggcggcgggggtccgtctgtcccggcggcggacggacgaaggacggacgccggagaaagagggcggcggcctgggccgaggcgggtccccaactccggcggcggcggcggcggcttggccttgggggcgggcatgagcccccgggggccgagtggtggccgccagggctgacccggcgcggcaagcggcccggcccagccatcttgactgcgcaccgcggccccagaggaaacttgcggcgcctccgccctctctgtccggcggagtcaccgccgcccggcgcggcggggagaagtggtcgggcgcgcggagaggaggcgagcgagcgcgggacgatgagccgaggcccggccgctctgcgccgcgagggctgagcgcgacccggggccagcagagcggacctacggactgtggcgcgcgcctgcagccgccttcaaacccccggagcggcggaaaggagtgcggaagggccctgcccaggctgcgggccgcgccgctgcggacgcgcccctagaaggggttagattatcggcagacccccctccc

SEQ ID NO: 84654 - DNA, 780 bp, Homo sapiens
acaacacctacctccttgtaatctccatttgcatacattggtctctaatgtgtcatgtaaacctacacataaatgaatctaggttgtttttgcatccacatgtcagccttgcttaaagaagaaaatatccctctgtcaatatccaacccagaatgcggtagagtattcttggctacagttcttcacccctccctactttcatgacctttgctgtgtgatttttcagtacctctcaataaagtggcagagtatgtttttctgactttttgctgtaatgtatattgcctcaactgatacagtaaagtcacctctaggtaacctaggtcttaggaggtttatgtgtttccgcttgtcttcttgccattgccgtgaaaagagctcccccatgtgcctgattttctcttagttttggcttcagattgaacacatgaggagctcagacctcagggagtgccaagcccagctctttgcatagctagaacagagtacaggaagcccagcctagatcagccaacttccagcgaaaccaaaagcacatgagctaagtaatttcttattgttgtatgatgttgatattttgtagttgtttgttatgcagcattactataccagtaacaaactggtatcaagaataattgcccatagacctgatttccttcaactattcttggtatatcataattcccatttcaccaaatatcttagatgttttcttctgaaaccattccagtggtcctagtgttcatcttaaagttgggctcagtgatcttgagatatatc

SEQ ID NO: 84655 - DNA, 246 bp, Homo sapiens
tgaagtgtaatttatctcatttccttttgtcacttgtgcttttggtgttttatctcagaaaccaaggtcacaataatttactcatgttttcttctaacagattgtatggttttagatctttaggtatatgatacatttttagttccttttttgcatggtatgaggaagtgatatatattcattcttttgcatgtagacactggttgtcccaggacaattttttgaaaagactattcattaccaatt

SEQ ID NO: 84656 - DNA, 706 bp, Homo sapiens
ggggaggtagctcaccagctccagggttccctttttgagcctcaaatcacaggactgggtgtgccgaaggtgatggcctggtgcctggcgctacatcacccatcacccatcacccaggcaccgcctggtgcagagctgggccagggaggcttccagaggaggcagatggggcaggagcagggtgatcacagcacatggaggcctgagcttctcagggacagtaggaggcgttcctccccagagcccgcaggcacctgctgggtgctcactggctccagacgtggatctgcagctgggaatcaagtgatcgagaccttcaattctggcgggggtggggatgggtggcgacagtaaccaaattcacaagatatttatagattgtcagaagtgtcatgaagaaaataaaacaagggatgtgacagggagtgtcaggggagtgcaggggcgatggctgcatttaagctccttctggctgctctgtgcaggaggaggactcacaggggtggctgtggaggcctggggccagagaggccactgtccccaggggccaggctacagtctacgaagcagggagggcttggagccatgaagccagagaggtggaggctgggggccaggccaagaacaggaggggagtcggagcagagccaagctggactccctgtgtctttgggactctgccttgatactgccatcggtaacccac

SEQ ID NO: 84657 - DNA, 368 bp, Homo sapiens
gtccctgtcaaaacatgggaaaacatttctatttaaaaaggtcacatatcatgtcaaatgacggatgtaagagtgacattttaaacagccctaattccctttagctatcaaatttctaatggagctcacgcaatagctatagcttctataacttactcttcctcttctcaatgtttcctcccttattatcataaaaggtctcctaagcatcctcctccacccctccccctcagctctttcttcctaatgattatgaggatctgggtgcagaggcattcacctgtaatcccagctatgtgggaggctgaggttggaggattgcttgcgctcaggagttcaagaacagccggtgcaacatagtgagaccc

SEQ ID NO: 84658 - DNA, 649 bp, Homo sapiens
tcatagtctggccacagcctaatttcccagtgttattttcagttattctctcccatgactcctagaaacacccttgaccaaacgttgtgtctttgatcggaaatgctgtctattgaaatataccttttattttcttgagtggaccttaaacctaatttttgtctgaatgaatatcagagtttctgtatatagtgttgagaacacataattcaaggttcaagaatgtagtattgaaatttttactattttatctttatcaaaagcctggttgcaaaaacaaaatcacctaaagtaatgaaacttttggaagacttcctgaaggccatgttatcaatccattcttccatacatccttaaatgtaccattgtgtatccaatttttgtctagtataaatatattgtgcatttatatttgatcacagtaactcaggattcttaggatgggattagtgggtgaaaatgtatgaatatttttgagactgttgatacatatagttaaattgccgaaaaagatatgttattttacatgccaacttttaatacatatactatattgcatgttactaaatgtgtatagtgaatacttggttaaataaattagaaggacttcacttatctaaaataaaaaatcctttataagttacctgat

SEQ ID NO: 84659 - DNA, 875 bp, Homo sapiens
tcagcctcccgagtagctgggattacaggcacccgccgccatgcctggctaattttgtatttttagtagagacagggtttcaccgtgttagccaggatggtctcaatctcctgaccttgtgatccatctgccttggcctcccaaagtgctgggattacaggcgtgagccactgtgcccggccttcttttttagaatgtgtaaactagacacaatttttctcatgtcatgcacataaaagcagtattttccagcagtggtcgctcactctccttgctgggcagacagtcagtgtatccagggtgcagtgattttggagtatccaggtgtggatgaactatttacttgtggttggagtgcttcccagattctcatagccaggggcccaggcatggtggctcaagcctgtaatcccaacactttgggaggctaaggcaggaggatcacttgagtctaggaatttgagactagtctcagcaacatagggagaccatgtgtctacagataattttaaaaattagttggggtagtggtgcacgcctgtagtctcagctattcgggaagctgaggtggaaggattgcttgagcttggcagggtgagattggagtgagccatgattgtgccattgcacgccagcctaggcaacagagcaagaccctgtctcagaaaaaaaaaaaaaaaattagccaggcatgctgacatgtgcttgtagtcccagttactgggtgggaggataacttgaacccaggagtttgaggctgtggtgagctatgatcatgcctctgtactccagcctgggtgacagagtgagaccctgtctcaaaataaataacagtgtaagttaaataataataaagagattttctcctggctctg

SEQ ID NO: 84660 - DNA, 449 bp, Homo sapiens
taatgacaatttatagttggaaaactagaaaatatcataaaatacactgtactgtgataagttctaaaagaaaactgcctaaaacttaataatctgaatctatacatggtttgttcttattatattttataggtcacctgaatatctacattaacttttagcaaagtttatacacttgaatttcttctttgcaggaaaagaggagtatcatcatagaacaagtataacatatataaagataacttcaaaatcataaaaatactatattaaaattcataaaataaagatctcatcctttctaatccatatctaaacgtgcttccaactaatagggtaattacttataaagcttcccaaatgagtttccatttttgagctgagatgagggtatatatatcatttgacccaggaagagaaaatattttgtataataatctaatgtgattaag

SEQ ID NO: 84661 - DNA, 1070 bp, Homo sapiens
tcctctgtcttaattttagcccagaaagacccatgttggacttctacagaactgtaagataatacatgtgtttttttttaagtcactaagattgtagcaatttgttactgcatcaatagaaaactaatagaacaaggtatttcccaacagctgagtgcaagtttatggagaaggtttcatttataagctgttagcagcagcactcccagaaattggaggatgggtgcactcgtcattaaagggttggcagtgttcactttagtaaatctgcctaattctgggatgcaatttaaggaagcctactgtttgtgattttggttgcttttttgtttgtttgttttggttctttttagagagctattccttacctcaaggtaaaaaacatattctcttacatgttctttaaatacaattttaattgggttttatacatataaatatttaatccatcccttctgaaatttgtgtgtgtgtgtggtaggaagtagaaatttacctttttccagatagatagcaaattgtctcagtctcatttattgaggagtcagtcttctttccctattgatttgaaatattataacccaaatttccacaaatgcatgggttagtttctgggcactagtgatttgctcacctaatcccaaatcagcaccacacttatttaattattatagctttacagtatgacttcatatcttatgagtaaaatttgttctcttaaaaaattgtcttggctatatgagggtattggtgatgttgactccatctcttatttaaatatatatatgtaaatatatatgtaaacggctttattgagatataatttacacatcatacaattaacccacttaaagtgtacaattcagatttttagtatactcacagacatgtgccagcatcactgcaatcaactttagaaaccctttaccaaataacatcctatgaagaaaccctgaaagaaatccctcattctcccctccccctgagcccctggcaaccactaatgtactttctatctgtatggatttgcctgttccagataataaataaaaatggagtcatacagtgtg

SEQ ID NO: 84662 - DNA, 316 bp, Homo sapiens
tacatggcgggagcaggagcaagagagacagtgggggaggtgctacacacttttaaacaaccacaactcactatcatgacaatagcaccaagaggatggtgctaaaccattcaggagaaaccacccccatgatccaatcacctcctaccaggcccctcctccaacactggggattacaattcgacatgagatttgggcgggaacacagatccaaaccctatcactcacccagggcagcgttctcctgtctgcatggccagcaagaggcagactcaggactggatctcaagtctctcttctctgtcctttgctacct

SEQ ID NO: 84663 - DNA, 562 bp, Homo sapiens
cccagcactgtgggaggctgaggcaggagttccaggctgcagtgagctgtgaccgcaccactacattgccagcctgggtgacagagtgagaccctgtctcaaaaaaagaaaaaatattgccaggaggtggagaattcagggtcacggcatcatggggacccacctagcaggctctggggcccttgtcccacccctgccaaggcccctctagccatgcagggtggggtgggattttccttcgtcctctcccaccatcactccgggagacagggggcctgaagtgcaggcgggagggctgctgtgggcatttgtgaagggtgcaggaggtgtttaagggaatggagagtgcacttccctacctacccagagggctctgggactgcccccacccccagtactcaccagaatcccgggagagagaagctgaaagcagggcaggggcacatcacagcactgagcgtcctgggccccggttcctgttccacctgccagagaacccgtgttcaacatcagaaggggcgttggcggggccctgggccaggcctgcctggatgcgcggccg

SEQ ID NO: 84664 - DNA, 888 bp, Homo sapiens
actgttgtgtagcacagagcctggtacagaatcatgctctgtaaatacctgctggatggtcgggtgggtcacaggtcagtggttgtgggcaacttgtgaaagttcagttggatgccagacccagccagcagagctgaattcaacatggaagccactttgtaaatggcagtgtccgatgggtttcagcctgaaaatgggagctgtggcaacactgccagctccccgcagggacctggcacccctagaaatggggttatcgtctcagccggcctcaacccactttctcgtccccagcaccaagaggtttgaggacatgattgcacccttccgtctgaatgatggcttcaaggatgaggccactgtcaacgagatgcggcgggactgcccctggaagatctcagatgaggagattacgaagaacagagtcaagtcccttcggcaggtgaggctgaatgagattgtgctggattactcccgagacgctgctctcatcgtcatgtaagtagtgcccggctggtgggaggaccagtctgtccagagtcaggtgtctcagctctgggaaggggctcagcaggggcaccacggagggcccaagccttcccctaggaagcagaagggccaaagttcccataaacatagccctggcgattcttagcatgtggctgggcctgagcccgccccacacctgagctccagctggcaggggtcgagggcctcacgtgtcccaggcatcagtgacctccccttgccattgctttttcctgttggctgccttttcctaccaaattccacttggcaaagagggaacccagctctttcaagagggacatcaactcctggttgttcaggaattacttggccctccttggctatcggccattcccagct

SEQ ID NO: 84665 - DNA, 4895 bp, Homo sapiens
  misc_feature (970)..(970): n is a, c, g, or t
  misc_feature (2323)..(2323): n is a, c, g, or t
cccctccctggacacccaggcgacaatggcagaactgcccacaacagagacgcctggggacgccactttgtgcagcgggcgcttcaccatcagcacactgctgagcagtgatgagccctctccaccagctgcctatgacagcagccaccccagccacctgacccacagcagcaccttctgcatgcgcacctttggctacaacacgatcgatgtggtgcccacatatgagcactatgccaacagcacccagcctggtgagccccggaaggtccggcccacactggctgacctgcactccttcctcaagcaggaaggcagacacctgcatgccctggcctttgacagccggcccagccacgagatgactgatgggctggtggagggcgaggcaggcaccagcagcgagaagaaccccgaggagccagtgcgcttcggctgggtcaagggggtgatgattcgttgcatgctcaacatttggggcgtgatcctctacctgcggctgccctggattacggcccaggcaggcatcgtcctgacctggatcatcatcctgctgtcggtcacggtgacctccatcacaggcctctccatctcagccatctccaccaatggcaaggtcaagtcaggtggcacctacttcctcatctcccggagtctgggcccagagcttgggggctccatcggcctcattttcgctttcgccaatgccgtgggtgtggccatgcacacggtgggctttgcagagaccgtgcgggacctgctccaggagtatggggcacccatcgtggaccccattaacgacatccgcatcattggcgtggtctcggtcactgtgctgctggccatctccctggctggcatggagtgggagtccaaggcccaggtgctgttcttccttgtcatcatggtctcctttgccaactatttagtggggacgctgatccccccatctgaggacaaggcctccaanggcttcttcagctaccgggcggacatttttgtccagaacttggtgcctgactggcggggtccagatggcaccttcttcggaatgttctccatcttcttcccctcggccacaggcatcctggcaggggccaacatatctggtgacctcaaggaccctgctatagccatccccaaggggaccctcatggccattttctggacgaccatttcctacctggccatctcagccaccattggctcctgcgtggtgcgtgatgcctctggggtcctgaatgacacagtgacccctggctggggtgcctgcgaggggctggcctgcagctatggctggaacttcaccgagtgcacccagcagcacagctgccactacggcctcatcaactattaccagaccatgagcatggtgtcaggcttcgcgcccctgatcacggctggcatcttcggggccaccctctcctctgccctggcctgccttgtctctgctgccaaagtcttccagtgcctttgcgaggaccagctgtacccactgatcggcttcttcggcaaaggctatggcaagaacaaggagcccgtgcgtggctacctgctggcctacgccatcgctgtggccttcatcatcatcgctgagctcaacaccatagcccccatcatttccaacttcttcctctgctcctatgccctcatcaacttcagctgcttccacgcctccatcaccaactcgcctgggtggagaccttcattccaatactacaacaagtgggcggcgctgtttggggctatcatctccgtggtcatcatgttcctcctcacctggtgggcggccctcatcgccattggcgtggtgctcttcctcctgctctatgtcatctacaagaagccagaggtaaattggggctcctcggtacaggctggctcctacaacctggccctcagctactcggtgggcctcaatgaggtggaagaccacatcaagaactaccgcccccagtgcctggtgctcacggggccccccaacttccgcccggccctggtggactttgtgggcaccttcacccggaacctcagcctgatgatctgtggccacgtgctcatcggaccccacaagcagaggatgcctgagctccagctcatcgccaacgggcacaccaagtggctgaacaagaggaagatcaaggccttctactcggatgtcattgccgaggacctccgcagaggcgtccagatcctcatgcaggccgcaggtctcgggagaatgaagcccaacattctggtggttgggttcaagaagaactggcagtcggctcacccggccacagtggaagactacattggcatcctccatgatgcctttganttcaactatggcgtgtgtgtcatgaggatgcgggagggactcaacgtgtccaagatgatgcaggcgcacattaaccccgtgtttgacccagcggaggacgggaaggaagccagcgccagaggtgccaggccatcagtctctggcgctttggaccccaaggccctggtgaaggaggagcaggccaccaccatcttccagtcggagcagggcaagaagaccatagacatctactggctctttgacgatggaggcctcaccctcctcattccctatctccttggccgcaagaggaggtggagcaaatgcaagatccgtgtgttcgtaggcggccagattaacaggatggaccaggagagaaaggcgatcatttctctgctgagcaagttccgactgggattccatgaagtccacatcctccctgacatcaaccagaaccctcgggctgagcacaccaagaggtttgaggacatgattgcacccttccgtctgaatgatggcttcaaggatgaggccactgtcaacgagatgcggcgggactgcccctggaagatctcagatgaggagattacgaagaacagagtcaagtcccttcggcaggtgaggctgaatgagattgtgctggattactcccgagacgctgctctcatcgtcatcactttgcccatagggaggaaggggaagtgccccagctcgctgtacatggcctggctggagaccctgtcccaggacctcagacctccagtcatcctgatccgaggaaaccaggaaaacgtgctcaccttttactgccagtaactccaggctttgacatccctgtccacagctctgagtgtgtgggataagttggaacttgattgcctctagtccacagggatgagactcatgttctgttgcactttaagtggcagcatctgatgatctcaccgaaaaagatggtagatttccaaatctggctggactccacttccatgggacacattccctgggtcttgtgtttatgggctagagaaatagcagatggagctgcaaggaaaactctctaaagcatcctattccttttaaaggatttcttttgattttgatgaccattaattaagagttcagtctttgatttgtatgcaaattggagtcccaatgctgggcgtgaatcttgacagtttctacagaccttcctgggtgaaagttcctaaatcatgccctgcttcctccaataggagaatgggagcctcacctgtaggacctacaggctctctaaggaatgcaggtctctctctgagcctccacagccaggcaaatacatatatatatattttttttttagatgaagttttttctcttgttgcccaggctagggtgtaatggcatgatctcaggtcactgcaacctcctcccgggttcaagcatttcttctgtctcagcctcccgaatagctgggattacaggcacctgccatcacaccagctaatttttgtatttttagtagagatggggtttcaccatgttgaccaggctggtgttgagctcctgacctcaggtgatccacccacctcggtctcccaaagtgctggggttacaggcctgagccactgcgcccggcccaggcaaatttcttgaaccacttctcactcccgtcactttcaataaggggtctttgatgtcttcactggttctttggacgagggacttttcgaacttttttggttgcaacacacagtaagaaatatacttcacactgagacttgcagcgcacacacacggaaacgaccaaaacaaaaatgtcacaaaacaatacttacccttccctgggggacgtcctccagtatgttctgttctgtttatttttcactgttggttgcaatccaataaaatgactttgggatccactcatgggtggggacccacacatttgaaaaaacaacaaaacagagacaaaacaaaaacaaacaaacacaaagagaaacaaaaacctgttgtgcgcgcggcgccctcaggcccacgagaaacaaagctctctccaacacacccattgccgttgtgggcgcgccgcgggcccccccaggagaggtcagcgcggacaccacgtgtgcgccaccagcgtgggtctcccaaaagggagaaaacacccacgaggcggacaagaaagacaacaggggcgccggagggaattcaccgcaccccaataaatacaaaaaacacgcgcccggggggcgcggcaacccaccaggagcgcggttcctctgggcaaacaaacatctctcacaaagataggacgactccccagagacgagggcgacaacaataacccgggggagactacatcatacaacacaacggggggaggaggtctacccaaagggacgagaggcctcccggattatcatccacaaaattataagcgccgcccccggctcccgtcggtgggtgaactcaccgagcagagcaacaccacaccacacacagcagcaaccagcgagacagaacacgaaacaagcaaacaaagacgaagaactacaacagacaagaacgcgaacacaccaacacagcaaacaaccgacacgaaaacgacggtgag

SEQ ID NO: 84666 - DNA, 4868 bp, Homo sapiens
  misc_feature (970)..(970): n is a, c, g, or t
  misc_feature (2323)..(2323): n is a, c, g, or t
cccctccctggacacccaggcgacaatggcagaactgcccacaacagagacgcctggggacgccactttgtgcagcgggcgcttcaccatcagcacactgctgagcagtgatgagccctctccaccagctgcctatgacagcagccaccccagccacctgacccacagcagcaccttctgcatgcgcacctttggctacaacacgatcgatgtggtgcccacatatgagcactatgccaacagcacccagcctggtgagccccggaaggtccggcccacactggctgacctgcactccttcctcaagcaggaaggcagacacctgcatgccctggcctttgacagccggcccagccacgagatgactgatgggctggtggagggcgaggcaggcaccagcagcgagaagaaccccgaggagccagtgcgcttcggctgggtcaagggggtgatgattcgttgcatgctcaacatttggggcgtgatcctctacctgcggctgccctggattacggcccaggcaggcatcgtcctgacctggatcatcatcctgctgtcggtcacggtgacctccatcacaggcctctccatctcagccatctccaccaatggcaaggtcaagtcaggtggcacctacttcctcatctcccggagtctgggcccagagcttgggggctccatcggcctcattttcgctttcgccaatgccgtgggtgtggccatgcacacggtgggctttgcagagaccgtgcgggacctgctccaggagtatggggcacccatcgtggaccccattaacgacatccgcatcattggcgtggtctcggtcactgtgctgctggccatctccctggctggcatggagtgggagtccaaggcccaggtgctgttcttccttgtcatcatggtctcctttgccaactatttagtggggacgctgatccccccatctgaggacaaggcctccaanggcttcttcagctaccgggcggacatttttgtccagaacttggtgcctgactggcggggtccagatggcaccttcttcggaatgttctccatcttcttcccctcggccacaggcatcctggcaggggccaacatatctggtgacctcaaggaccctgctatagccatccccaaggggaccctcatggccattttctggacgaccatttcctacctggccatctcagccaccattggctcctgcgtggtgcgtgatgcctctggggtcctgaatgacacagtgacccctggctggggtgcctgcgaggggctggcctgcagctatggctggaacttcaccgagtgcacccagcagcacagctgccactacggcctcatcaactattaccagaccatgagcatggtgtcaggcttcgcgcccctgatcacggctggcatcttcggggccaccctctcctctgccctggcctgccttgtctctgctgccaaagtcttccagtgcctttgcgaggaccagctgtacccactgatcggcttcttcggcaaaggctatggcaagaacaaggagcccgtgcgtggctacctgctggcctacgccatcgctgtggccttcatcatcatcgctgagctcaacaccatagcccccatcatttccaacttcttcctctgctcctatgccctcatcaacttcagctgcttccacgcctccatcaccaactcgcctgggtggagaccttcattccaatactacaacaagtgggcggcgctgtttggggctatcatctccgtggtcatcatgttcctcctcacctggtgggcggccctcatcgccattggcgtggtgctcttcctcctgctctatgtcatctacaagaagccagaggtaaattggggctcctcggtacaggctggctcctacaacctggccctcagctactcggtgggcctcaatgaggtggaagaccacatcaagaactaccgcccccagtgcctggtgctcacggggccccccaacttccgcccggccctggtggactttgtgggcaccttcacccggaacctcagcctgatgatctgtggccacgtgctcatcggaccccacaagcagaggatgcctgagctccagctcatcgccaacgggcacaccaagtggctgaacaagaggaagatcaaggccttctactcggatgtcattgccgaggacctccgcagaggcgtccagatcctcatgcaggccgcaggtctcgggagaatgaagcccaacattctggtggttgggttcaagaagaactggcagtcggctcacccggccacagtggaagactacattggcatcctccatgatgcctttganttcaactatggcgtgtgtgtcatgaggatgcgggagggactcaacgtgtccaagatgatgcaggcgcacattaaccccgtgtttgacccagcggaggacgggaaggaagccagcgccagagtggaccccaaggccctggtgaaggaggagcaggccaccaccatcttccagtcggagcagggcaagaagaccatagacatctactggctctttgacgatggaggcctcaccctcctcattccctatctccttggccgcaagaggaggtggagcaaatgcaagatccgtgtgttcgtaggcggccagattaacaggatggaccaggagagaaaggcgatcatttctctgctgagcaagttccgactgggattccatgaagtccacatcctccctgacatcaaccagaaccctcgggctgagcacaccaagaggtttgaggacatgattgcacccttccgtctgaatgatggcttcaaggatgaggccactgtcaacgagatgcggcgggactgcccctggaagatctcagatgaggagattacgaagaacagagtcaagtcccttcggcaggtgaggctgaatgagattgtgctggattactcccgagacgctgctctcatcgtcatcactttgcccatagggaggaaggggaagtgccccagctcgctgtacatggcctggctggagaccctgtcccaggacctcagacctccagtcatcctgatccgaggaaaccaggaaaacgtgctcaccttttactgccagtaactccaggctttgacatccctgtccacagctctgagtgtgtgggataagttggaacttgattgcctctagtccacagggatgagactcatgttctgttgcactttaagtggcagcatctgatgatctcaccgaaaaagatggtagatttccaaatctggctggactccacttccatgggacacattccctgggtcttgtgtttatgggctagagaaatagcagatggagctgcaaggaaaactctctaaagcatcctattccttttaaaggatttcttttgattttgatgaccattaattaagagttcagtctttgatttgtatgcaaattggagtcccaatgctgggcgtgaatcttgacagtttctacagaccttcctgggtgaaagttcctaaatcatgccctgcttcctccaataggagaatgggagcctcacctgtaggacctacaggctctctaaggaatgcaggtctctctctgagcctccacagccaggcaaatacatatatatatattttttttttagatgaagttttttctcttgttgcccaggctagggtgtaatggcatgatctcaggtcactgcaacctcctcccgggttcaagcatttcttctgtctcagcctcccgaatagctgggattacaggcacctgccatcacaccagctaatttttgtatttttagtagagatggggtttcaccatgttgaccaggctggtgttgagctcctgacctcaggtgatccacccacctcggtctcccaaagtgctggggttacaggcctgagccactgcgcccggcccaggcaaatttcttgaaccacttctcactcccgtcactttcaataaggggtctttgatgtcttcactggttctttggacgagggacttttcgaacttttttggttgcaacacacagtaagaaatatacttcacactgagacttgcagcgcacacacacggaaacgaccaaaacaaaaatgtcacaaaacaatacttacccttccctgggggacgtcctccagtatgttctgttctgtttatttttcactgttggttgcaatccaataaaatgactttgggatccactcatgggtggggacccacacatttgaaaaaacaacaaaacagagacaaaacaaaaacaaacaaacacaaagagaaacaaaaacctgttgtgcgcgcggcgccctcaggcccacgagaaacaaagctctctccaacacacccattgccgttgtgggcgcgccgcgggcccccccaggagaggtcagcgcggacaccacgtgtgcgccaccagcgtgggtctcccaaaagggagaaaacacccacgaggcggacaagaaagacaacaggggcgccggagggaattcaccgcaccccaataaatacaaaaaacacgcgcccggggggcgcggcaacccaccaggagcgcggttcctctgggcaaacaaacatctctcacaaagataggacgactccccagagacgagggcgacaacaataacccgggggagactacatcatacaacacaacggggggaggaggtctacccaaagggacgagaggcctcccggattatcatccacaaaattataagcgccgcccccggctcccgtcggtgggtgaactcaccgagcagagcaacaccacaccacacacagcagcaaccagcgagacagaacacgaaacaagcaaacaaagacgaagaactacaacagacaagaacgcgaacacaccaacacagcaaacaaccgacacgaaaacgacggtgag

SEQ ID NO: 84667 - DNA, 2451 bp, Homo sapiens
gacatctactggctctttgacgatgtctatggtcttcttgccctgctccgactggaagatggtggtggcctgctcctccttcaccaggcaagaagaccatagacatctactggctctttgacgatggaggcctcaccctcctcattccctatctccttggccgcaagaggaggtggagcaaatgcaagatccgtgtgttcgtaggcggccagattaacaggatggaccaggagagaaaggcgatcatttctctgctgagcaagttccgactgggattccatgaagtccacatcctccctgacatcaaccagaaccctcgggctgagcacaccaagaggtttgaggacatgattgcacccttccgtctgaatgatggcttcaaggatgaggccactgtcaacgagatgcggcgggactgcccctggaagatctcagatgaggagattacgaagaacagagtcaagtcccttcggcaggtgaggctgaatgagattgtgctggattactcccgagacgctgctctcatcgtcatcactttgcccatagggaggaaggggaagtgccccagctcgctgtacatggcctggctggagaccctgtcccaggacctcagacctccagtcatcctgatccgaggaaaccaggaaaacgtgctcaccttttactgccagtaactccaggctttgacatccctgtccacagctctgagtgtgtgggataagttggaacttgattgcctctagtccacagggatgagactcatgttctgttgcactttaagtggcagcatctgatgatctcaccgaaaaagatggtagatttccaaatctggctggactccacttccatgggacacattccctgggtcttgtgtttatgggctagagaaatagcagatggagctgcaaggaaaactctctaaagcatcctattccttttaaaggatttcttttgattttgatgaccattaattaagagttcagtctttgatttgtatgcaaattggagtcccaatgctgggcgtgaatcttgacagtttctacagaccttcctgggtgaaagttcctaaatcatgccctgcttcctccaataggagaatgggagcctcacctgtaggacctacaggctctctaaggaatgcaggtctctctctgagcctccacagccaggcaaatacatatatatatattttttttttagatgaagttttttctcttgttgcccaggctagggtgtaatggcatgatctcaggtcactgcaacctcctcccgggttcaagcatttcttctgtctcagcctcccgaatagctgggattacaggcacctgccatcacaccagctaatttttgtatttttagtagagatggggtttcaccatgttgaccaggctggtgttgagctcctgacctcaggtgatccacccacctcggtctcccaaagtgctggggttacaggcctgagccactgcgcccggcccaggcaaatttcttgaaccacttctcactcccgtcactttcaataaggggtctttgatgtcttcactggttctttggacgagggacttttcgaacttttttggttgcaacacacagtaagaaatatacttcacactgagacttgcagcgcacacacacggaaacgaccaaaacaaaaatgtcacaaaacaatacttacccttccctgggggacgtcctccagtatgttctgttctgtttatttttcactgttggttgcaatccaataaaatgactttgggatccactcatgggtggggacccacacatttgaaaaaacaacaaaacagagacaaaacaaaaacaaacaaacacaaagagaaacaaaaacctgttgtgcgcgcggcgccctcaggcccacgagaaacaaagctctctccaacacacccattgccgttgtgggcgcgccgcgggcccccccaggagaggtcagcgcggacaccacgtgtgcgccaccagcgtgggtctcccaaaagggagaaaacacccacgaggcggacaagaaagacaacaggggcgccggagggaattcaccgcaccccaataaatacaaaaaacacgcgcccggggggcgcggcaacccaccaggagcgcggttcctctgggcaaacaaacatctctcacaaagataggacgactccccagagacgagggcgacaacaataacccgggggagactacatcatacaacacaacggggggaggaggtctacccaaagggacgagaggcctcccggattatcatccacaaaattataagcgccgcccccggctcccgtcggtgggtgaactcaccgagcagagcaacaccacaccacacacagcagcaaccagcgagacagaacacgaaacaagcaaacaaagacgaagaactacaacagacaagaacgcgaacacaccaacacagcaaacaaccgacacgaaaacgacggtgag

SEQ ID NO: 84668 - DNA, 2037 bp, Homo sapiens
gtggaaggagctctgagggacggtaaacagactcgctgttctgaaaacaaactgggagctgggcgtgtggagcggccccgtggtaatctctcttctaccactttttcatgccttgcagcactttgcccatagggaggaaggggaagtgccccagctcgctgtacatggcctggctggagaccctgtcccaggacctcagacctccagtcatcctgatccgaggaaaccaggaaaacgtgctcaccttttactgccagtaactccaggctttgacatccctgtccacagctctgagtgtgtgggataagttggaacttgattgcctctagtccacagggatgagactcatgttctgttgcactttaagtggcagcatctgatgatctcaccgaaaaagatggtagatttccaaatctggctggactccacttccatgggacacattccctgggtcttgtgtttatgggctagagaaatagcagatggagctgcaaggaaaactctctaaagcatcctattccttttaaaggatttcttttgattttgatgaccattaattaagagttcagtctttgatttgtatgcaaattggagtcccaatgctgggcgtgaatcttgacagtttctacagaccttcctgggtgaaagttcctaaatcatgccctgcttcctccaataggagaatgggagcctcacctgtaggacctacaggctctctaaggaatgcaggtctctctctgagcctccacagccaggcaaatacatatatatatattttttttttagatgaagttttttctcttgttgcccaggctagggtgtaatggcatgatctcaggtcactgcaacctcctcccgggttcaagcatttcttctgtctcagcctcccgaatagctgggattacaggcacctgccatcacaccagctaatttttgtatttttagtagagatggggtttcaccatgttgaccaggctggtgttgagctcctgacctcaggtgatccacccacctcggtctcccaaagtgctggggttacaggcctgagccactgcgcccggcccaggcaaatttcttgaaccacttctcactcccgtcactttcaataaggggtctttgatgtcttcactggttctttggacgagggacttttcgaacttttttggttgcaacacacagtaagaaatatacttcacactgagacttgcagcgcacacacacggaaacgaccaaaacaaaaatgtcacaaaacaatacttacccttccctgggggacgtcctccagtatgttctgttctgtttatttttcactgttggttgcaatccaataaaatgactttgggatccactcatgggtggggacccacacatttgaaaaaacaacaaaacagagacaaaacaaaaacaaacaaacacaaagagaaacaaaaacctgttgtgcgcgcggcgccctcaggcccacgagaaacaaagctctctccaacacacccattgccgttgtgggcgcgccgcgggcccccccaggagaggtcagcgcggacaccacgtgtgcgccaccagcgtgggtctcccaaaagggagaaaacacccacgaggcggacaagaaagacaacaggggcgccggagggaattcaccgcaccccaataaatacaaaaaacacgcgcccggggggcgcggcaacccaccaggagcgcggttcctctgggcaaacaaacatctctcacaaagataggacgactccccagagacgagggcgacaacaataacccgggggagactacatcatacaacacaacggggggaggaggtctacccaaagggacgagaggcctcccggattatcatccacaaaattataagcgccgcccccggctcccgtcggtgggtgaactcaccgagcagagcaacaccacaccacacacagcagcaaccagcgagacagaacacgaaacaagcaaacaaagacgaagaactacaacagacaagaacgcgaacacaccaacacagcaaacaaccgacacgaaaacgacggtgag

SEQ ID NO: 84669 - DNA, 1070 bp, Homo sapiens
ggacaggtggttttttcttgtgacggtggtgcctgagtaactggagttgggaactggaggggcttggccgtgtcaaagattccactgcgcccggcccaggcaaatttcttgaaccacttctcactcccgtcactttcaataaggggtctttgatgtcttcactggttctttggacgagggacttttcgaacttttttggttgcaacacacagtaagaaatatacttcacactgagacttgcagcgcacacacacggaaacgaccaaaacaaaaatgtcacaaaacaatacttacccttccctgggggacgtcctccagtatgttctgttctgtttatttttcactgttggttgcaatccaataaaatgactttgggatccactcatgggtggggacccacacatttgaaaaaacaacaaaacagagacaaaacaaaaacaaacaaacacaaagagaaacaaaaacctgttgtgcgcgcggcgccctcaggcccacgagaaacaaagctctctccaacacacccattgccgttgtgggcgcgccgcgggcccccccaggagaggtcagcgcggacaccacgtgtgcgccaccagcgtgggtctcccaaaagggagaaaacacccacgaggcggacaagaaagacaacaggggcgccggagggaattcaccgcaccccaataaatacaaaaaacacgcgcccggggggcgcggcaacccaccaggagcgcggttcctctgggcaaacaaacatctctcacaaagataggacgactccccagagacgagggcgacaacaataacccgggggagactacatcatacaacacaacggggggaggaggtctacccaaagggacgagaggcctcccggattatcatccacaaaattataagcgccgcccccggctcccgtcggtgggtgaactcaccgagcagagcaacaccacaccacacacagcagcaaccagcgagacagaacacgaaacaagcaaacaaagacgaagaactacaacagacaagaacgcgaacacaccaacacagcaaacaaccgacacgaaaacgacggtgag

SEQ ID NO: 84670 - DNA, 484 bp, Homo sapiens
gcggccgctggctctgctctgacccgcccccacctcctgcagtggaccccaaggccctggtgaaggaggagcaggccaccaccatcttccagtcggagcagggcaagaagaccatagacatctactggctctttgacgatggaggtcagtgacccccttggatcagccctcctgcccggcgggggcggggtggtggtggtcttccttccttctccttcctggcctgctctcaaaggggacaggggctcctgggcccagcagtgagctcaggggagcccagagggacccctctgtctggcctctagttttttggttataaaatgggaagctttgagagaagagctgaagtcgccatgagatggaaacttctgactggatggcccttaggggcacaggcaggtgatataaatggggagatgggcggtgcccaggaaagctggaggaatatttttcacttcacaatgaaatataacctctcccatta

SEQ ID NO: 84671 - DNA, 452 bp, Homo sapiens
cgtcactttcaataaggggtctttgatgtcttcactggttctttggacgagggacttttcgaacttttttggttgcaacacacagtaagaaatatacttcacactgagacttgcagcgcacacacacggaaacgaccaaaacaaaaatgtcacaaaacaatacttacccttccctgggggacgtcctccagtatgttctgttctgtttatttttcactgttggttgcaatccaataaaatgactttgggatccactcatgggtggggacccacacatttgaaaggcatggccacctttctgttgtgccttgcatttgtccacacacagggagtctggctgagctggggaaaggccacggctgggtgtcattgccattttcccagctcatctcaccgggaagaaaagcagattgacagaacacgtgaggaggggtattgatggcaggagagtc

SEQ ID NO: 84672 - DNA, 504 bp, Homo sapiens
actgttgtgtagcacagagcctggtacagaatcatgctctgtaaatacctgctggatggtcgggtgggtcacaggtcagtggttgtgggcaacttgtgaaagttcagttggatgccagacccagccagcagagctgaattcaacatggaagccactttgtaaatggcagtgtccgatgggtttcagcctgaaaatgggagctgtggcaacactgccagctccccgcagggacctggcacccctagaaatggggttatcgtctcagccggcctcaacccactttctcgtccccagcaccaagaggtttgaggacatgattgcacccttccgtctgaatgatggcttcaaggatgaggccactgtcaacgagatgcggcgggactgccctgggattacaggcgtgagccacggtgcccagctgcagatagtgatataatttatagtgtagtcaattgtgttgaactgccgcttgcaacattttcttgtgtgacttaaggcattaga

SEQ ID NO: 84673 - DNA, 3313 bp, Homo sapiens
  misc_feature (768)..(768): n is a, c, g, or t
aagaattagcatggcccctgcgcaaggatgacacgcaaattcgtgaagcgttccatatttttcatttccaacttcttcctctgctcctatgccctcatcaacttcagctgcttccacgcctccatcaccaactcgcctgggtggagaccttcattccaatactacaacaagtgggcggcgctgtttggggctatcatctccgtggtcatcatgttcctcctcacctggtgggcggccctcatcgccattggcgtggtgctcttcctcctgctctatgtcatctacaagaagccagaggtaaattggggctcctcggtacaggctggctcctacaacctggccctcagctactcggtgggcctcaatgaggtggaagaccacatcaagaactaccgcccccagtgcctggtgctcacggggccccccaacttccgcccggccctggtggactttgtgggcaccttcacccggaacctcagcctgatgatctgtggccacgtgctcatcggaccccacaagcagaggatgcctgagctccagctcatcgccaacgggcacaccaagtggctgaacaagaggaagatcaaggccttctactcggatgtcattgccgaggacctccgcagaggcgtccagatcctcatgcaggccgcaggtctcgggagaatgaagcccaacattctggtggttgggttcaagaagaactggcagtcggctcacccggccacagtggaagactacattggcatcctccatgatgcctttganttcaactatggcgtgtgtgtcatgaggatgcgggagggactcaacgtgtccaagatgatgcaggcgcacattaaccccgtgtttgacccagcggaggacgggaaggaagccagcgccagagtggaccccaaggccctggtgaaggaggagcaggccaccaccatcttccagtcggagcagggcaagaagaccatagacatctactggctctttgacgatggaggcctcaccctcctcattccctatctccttggccgcaagaggaggtggagcaaatgcaagatccgtgtgttcgtaggcggccagattaacaggatggaccaggagagaaaggcgatcatttctctgctgagcaagttccgactgggattccatgaagtccacatcctccctgacatcaaccagaaccctcgggctgagcacaccaagaggtttgaggacatgattgcacccttccgtctgaatgatggcttcaaggatgaggccactgtcaacgagatgcggcgggactgcccctggaagatctcagatgaggagattacgaagaacagagtcaagtcccttcggcaggtgaggctgaatgagattgtgctggattactcccgagacgctgctctcatcgtcatcactttgcccatagggaggaaggggaagtgccccagctcgctgtacatggcctggctggagaccctgtcccaggacctcagacctccagtcatcctgatccgaggaaaccaggaaaacgtgctcaccttttactgccagtaactccaggctttgacatccctgtccacagctctgagtgtgtgggataagttggaacttgattgcctctagtccacagggatgagactcatgttctgttgcactttaagtggcagcatctgatgatctcaccgaaaaagatggtagatttccaaatctggctggactccacttccatgggacacattccctgggtcttgtgtttatgggctagagaaatagcagatggagctgcaaggaaaactctctaaagcatcctattccttttaaaggatttcttttgattttgatgaccattaattaagagttcagtctttgatttgtatgcaaattggagtcccaatgctgggcgtgaatcttgacagtttctacagaccttcctgggtgaaagttcctaaatcatgccctgcttcctccaataggagaatgggagcctcacctgtaggacctacaggctctctaaggaatgcaggtctctctctgagcctccacagccaggcaaatacatatatatatattttttttttagatgaagttttttctcttgttgcccaggctagggtgtaatggcatgatctcaggtcactgcaacctcctcccgggttcaagcatttcttctgtctcagcctcccgaatagctgggattacaggcacctgccatcacaccagctaatttttgtatttttagtagagatggggtttcaccatgttgaccaggctggtgttgagctcctgacctcaggtgatccacccacctcggtctcccaaagtgctggggttacaggcctgagccactgcgcccggcccaggcaaatttcttgaaccacttctcactcccgtcactttcaataaggggtctttgatgtcttcactggttctttggacgagggacttttcgaacttttttggttgcaacacacagtaagaaatatacttcacactgagacttgcagcgcacacacacggaaacgaccaaaacaaaaatgtcacaaaacaatacttacccttccctgggggacgtcctccagtatgttctgttctgtttatttttcactgttggttgcaatccaataaaatgactttgggatccactcatgggtggggacccacacatttgaaaaaacaacaaaacagagacaaaacaaaaacaaacaaacacaaagagaaacaaaaacctgttgtgcgcgcggcgccctcaggcccacgagaaacaaagctctctccaacacacccattgccgttgtgggcgcgccgcgggcccccccaggagaggtcagcgcggacaccacgtgtgcgccaccagcgtgggtctcccaaaagggagaaaacacccacgaggcggacaagaaagacaacaggggcgccggagggaattcaccgcaccccaataaatacaaaaaacacgcgcccggggggcgcggcaacccaccaggagcgcggttcctctgggcaaacaaacatctctcacaaagataggacgactccccagagacgagggcgacaacaataacccgggggagactacatcatacaacacaacggggggaggaggtctacccaaagggacgagaggcctcccggattatcatccacaaaattataagcgccgcccccggctcccgtcggtgggtgaactcaccgagcagagcaacaccacaccacacacagcagcaaccagcgagacagaacacgaaacaagcaaacaaagacgaagaactacaacagacaagaacgcgaacacaccaacacagcaaacaaccgacacgaaaacgacggtgag

SEQ ID NO: 84674 - DNA, 1991 bp, Homo sapiens
cacatgaaaaaaagatgcccaggagaattcaaaaggcaccagcaccagttactcttcattgacaggacagagcactttgcccatagggaggaaggggaagtgccccagctcgctgtacatggcctggctggagaccctgtcccaggacctcagacctccagtcatcctgatccgaggaaaccaggaaaacgtgctcaccttttactgccagtaactccaggctttgacatccctgtccacagctctgagtgtgtgggataagttggaacttgattgcctctagtccacagggatgagactcatgttctgttgcactttaagtggcagcatctgatgatctcaccgaaaaagatggtagatttccaaatctggctggactccacttccatgggacacattccctgggtcttgtgtttatgggctagagaaatagcagatggagctgcaaggaaaactctctaaagcatcctattccttttaaaggatttcttttgattttgatgaccattaattaagagttcagtctttgatttgtatgcaaattggagtcccaatgctgggcgtgaatcttgacagtttctacagaccttcctgggtgaaagttcctaaatcatgccctgcttcctccaataggagaatgggagcctcacctgtaggacctacaggctctctaaggaatgcaggtctctctctgagcctccacagccaggcaaatacatatatatatattttttttttagatgaagttttttctcttgttgcccaggctagggtgtaatggcatgatctcaggtcactgcaacctcctcccgggttcaagcatttcttctgtctcagcctcccgaatagctgggattacaggcacctgccatcacaccagctaatttttgtatttttagtagagatggggtttcaccatgttgaccaggctggtgttgagctcctgacctcaggtgatccacccacctcggtctcccaaagtgctggggttacaggcctgagccactgcgcccggcccaggcaaatttcttgaaccacttctcactcccgtcactttcaataaggggtctttgatgtcttcactggttctttggacgagggacttttcgaacttttttggttgcaacacacagtaagaaatatacttcacactgagacttgcagcgcacacacacggaaacgaccaaaacaaaaatgtcacaaaacaatacttacccttccctgggggacgtcctccagtatgttctgttctgtttatttttcactgttggttgcaatccaataaaatgactttgggatccactcatgggtggggacccacacatttgaaaaaacaacaaaacagagacaaaacaaaaacaaacaaacacaaagagaaacaaaaacctgttgtgcgcgcggcgccctcaggcccacgagaaacaaagctctctccaacacacccattgccgttgtgggcgcgccgcgggcccccccaggagaggtcagcgcggacaccacgtgtgcgccaccagcgtgggtctcccaaaagggagaaaacacccacgaggcggacaagaaagacaacaggggcgccggagggaattcaccgcaccccaataaatacaaaaaacacgcgcccggggggcgcggcaacccaccaggagcgcggttcctctgggcaaacaaacatctctcacaaagataggacgactccccagagacgagggcgacaacaataacccgggggagactacatcatacaacacaacggggggaggaggtctacccaaagggacgagaggcctcccggattatcatccacaaaattataagcgccgcccccggctcccgtcggtgggtgaactcaccgagcagagcaacaccacaccacacacagcagcaaccagcgagacagaacacgaaacaagcaaacaaagacgaagaactacaacagacaagaacgcgaacacaccaacacagcaaacaaccgacacgaaaacgacggtgag

SEQ ID NO: 84675 - DNA, 3113 bp, Homo sapiens
gcggaaacatggcggcgggaagggagtgagccgccccgcgcccccgccgcgccctcagatggagaaattagcatacaaagaaactgacttgtcagaagtcagagcaaggtattggtggatccagggataaatcccaaacttcttaacccctagaccggtttttagtccattgactatgcagcctaatgtgatagactggagtgatgttagaaaacacaaatatggtcacctatcagagtctgcatcccaatatcaagaagctgctgacatcctggatctaggtcattttacctgggacaaatacctaaaagaaacatgttcagtcccagcgcctgtccattgcttcaagcagtcctacacacctccaagcaacgagttcaagatcagtatgaaattggaagcacaggaccccaggaacaccacatccacctgtattgccacagtagttggactgacaggtgcccgccttcgcctgcgccttgatgggagcgacaacaaaaatgacttctggcggctggttgactcagctgaaatccagcctattgggaactgtgaaaagaatgggggtatgctacagccacctcttggatttcggctgaatgcgtcttcttggcccatgttccttttgaagacgctaaatggagcagagatggctcccatcaggattttccacaaggagccaccatcgccttcccacaacttcttcaaaatgggaatgaagctagaagctgtggacaggaagaaccctcatttcatttgcccagccactattggggaggttcggggctcagaggtgcttgtcacttttgatgggtggcgaggggcctttgactactggtgccgcttcgactcccgagacatcttccctgtgggctggtgttccttgactggagacaacctgcagcctcctggcaccaaagttgtgattccaaagaatccctatcctgcctccgatgtgaatactgagaagcccagcatccacagcagcaccaaaactgtcttggaacatcaaccagggcagagggggcgtaaaccaggaaagaagcggggccggacacccaagaccctaatttcccatcccatctctgccccatccaagacagctgaacctttgaaattcccaaagaagagaggtcccaaacctggcagcaagaggaaacctcggactttgctgaacccaccacctgcctcaccaacaaccagcactcctgaaccggataccagcactgtaccccaggatgctgccaccatccccagctcagccatgcaggccccaacagtttgtatctacttgaacaagaatggcagcacaggcccccacttagataagaagaaggtccagcaactccctgaccattttggaccagcccgtgcctctgtggtgttgcagcaggctgtccaggcctgtatcgactgtgcttatcaccagaaaaccgtcttcagcttcctcaagcaaggccatggtggtgaggttatctcagccgtgtttgaccgggaacagcataccctcaacctcccagcagtcaacagcatcacctacgtcctccgcttcctggagaaactctgccacaaccttcgtagtgacaatctgtttggcaaccagccctttacacagactcacttgtcactcactgccatagagtacagccacagccacgacaggtacctaccaggtgaaacctttgtcctggggaatagtctggcccgctccttggaaccacactcagactcaatggactctgcctcaaatcccaccaaccttgtcagcacctcccaaaggcaccggcccttgctttcatcctgtggcctcccaccaagcactgcctcagctgtgcgcaggctatgctccagggggtcggaccgatacctggagagccgcgatgcctctcgactgagtggccgggacccctcctcatggacagtcgaggatgtgatgcagtttgtccgggaagctgatcctcagcttggaccccacgctgacctgtttcgcaaacacgagatcgatggcaaggccctgctgctgctgcgcagtgacatgatgatgaagtacatgggcctgaagctggggcctgcactcaagctctcctaccacattgaccggctgaagcagggcaagttctgaaccaggagaggcagcctagacaaccaagtggcagcaggtgggggcattcttctaggaatgaggggcatcagcccaccccaggcacctcagtggggttccgggccacctcaggactccaagaggctgtgtggagccaccactcctagccacagctgccatgataagtccttccatgaaggactgaggagggagagtgggggtccagggctggtgctgctcttccctcagctctgccggggctctaaggtccctctatttatttctcaaccctggctggcctctcaccaggagtttaggctgaatgccttccacgtgatggaggaaaaggccaactctgtcctggtcttgctgtggcaccccatcgccccacagctcgtaccttctcaccagattcccctgaatccaaactcgtggtgcaaacctctaccttttttacaaaaagatcttattgttaatttattgtttctggcacttgggcaaaccctgtagttaatactcctcccacactagacactgggtttcaggaggagggagactgccctgctttggtcccagagaggccctctgcagataggcgtggcccctcttcagaggacactaccctagggcactttctctttgaggtggagagacccataaagccttgaccacatcactccatatggggaggagaaggatccctgtcaccttctcctctcttcacggggcccttttgcagccctaggcctcatctgtgggaagggagtccctggctcatactgcccccaccacagctccttgccctggccagaactgctgtcgaagaaaatcaggccggaaggccaagaaggcgctaagggggatgggagggcaggttttccaggctggagtcggttccacccactcgcctgtccacaggcttccttgtaagcaagtcagcagcacagctactcacgctgccatctggacttattttatgtcaatctgtttataaataaaaaccaatataggt

SEQ ID NO: 84676 - DNA, 3532 bp, Homo sapiens
gcggaaacatggcggcgggaagggagtgagccgccccgcgcccccgccgcgccctcagatggagaaattagcatacaaagaaactgacttgtcagaagtcagagcaaggtattggtggatccagggataaatcccaaacttcttaacccctagaccggtttttagtccattgactatgcagcctaatgtgatagactggagtgatgttagaaaacacaaatatggtcacctatcagagtctgcatcccaatatcaagaagctgctgacatcctggatctagggttgtaaagaagattacatgagctaatggatgtgaaaacatcttaaaaactctcaaatacttttcaactttggaggattattatgattttcattctgttcagcggctatactcagactttactctaaaagtcaaatcttctgacattctttgaagtgaagcattctatgaatgtgagctgaagaaatgaatgaaatgaaataatgcagcatctagtgctttttgcatggcccaaaggggctctgtgctgctccactacagaggaaacttcaagaaatgctggtttgctacagtgttttagcttgtgagattctctgggaccttccctgctccatcatggggtcacctctaggtcattttacctgggacaaatacctaaaagaaacatgttcagtcccagcgcctgtccattgcttcaagcagtcctacacacctccaagcaacgagttcaagatcagtatgaaattggaagcacaggaccccaggaacaccacatccacctgtattgccacagtagttggactgacaggtgcccgccttcgcctgcgccttgatgggagcgacaacaaaaatgacttctggcggctggttgactcagctgaaatccagcctattgggaactgtgaaaagaatgggggtatgctacagccacctcttggatttcggctgaatgcgtcttcttggcccatgttccttttgaagacgctaaatggagcagagatggctcccatcaggattttccacaaggagccaccatcgccttcccacaacttcttcaaaatgggaatgaagctagaagctgtggacaggaagaaccctcatttcatttgcccagccactattggggaggttcggggctcagaggtgcttgtcacttttgatgggtggcgaggggcctttgactactggtgccgcttcgactcccgagacatcttccctgtgggctggtgttccttgactggagacaacctgcagcctcctggcaccaaagttgtgattccaaagaatccctatcctgcctccgatgtgaatactgagaagcccagcatccacagcagcaccaaaactgtcttggaacatcaaccagggcagagggggcgtaaaccaggaaagaagcggggccggacacccaagaccctaatttcccatcccatctctgccccatccaagacagctgaacctttgaaattcccaaagaagagaggtcccaaacctggcagcaagaggaaacctcggactttgctgaacccaccacctgcctcaccaacaaccagcactcctgaaccggataccagcactgtaccccaggatgctgccaccatccccagctcagccatgcaggccccaacagtttgtatctacttgaacaagaatggcagcacaggcccccacttagataagaagaaggtccagcaactccctgaccattttggaccagcccgtgcctctgtggtgttgcagcaggctgtccaggcctgtatcgactgtgcttatcaccagaaaaccgtcttcagcttcctcaagcaaggccatggtggtgaggttatctcagccgtgtttgaccgggaacagcataccctcaacctcccagcagtcaacagcatcacctacgtcctccgcttcctggagaaactctgccacaaccttcgtagtgacaatctgtttggcaaccagccctttacacagactcacttgtcactcactgccatagagtacagccacagccacgacaggtacctaccaggtgaaacctttgtcctggggaatagtctggcccgctccttggaaccacactcagactcaatggactctgcctcaaatcccaccaaccttgtcagcacctcccaaaggcaccggcccttgctttcatcctgtggcctcccaccaagcactgcctcagctgtgcgcaggctatgctccaggggagtgttaaaaggatcaaatgaaagaagggatatggaatcattttggaaactaaatcgttccccaggggtcggaccgatacctggagagccgcgatgcctctcgactgagtggccgggacccctcctcatggacagtcgaggatgtgatgcagtttgtccgggaagctgatcctcagcttggaccccacgctgacctgtttcgcaaacacgagatcgatggcaaggccctgctgctgctgcgcagtgacatgatgatgaagtacatgggcctgaagctggggcctgcactcaagctctcctaccacattgaccggctgaagcagggcaagttctgaaccaggagaggcagcctagacaaccaagtggcagcaggtgggggcattcttctaggaatgaggggcatcagcccaccccaggcacctcagtggggttccgggccacctcaggactccaagaggctgtgtggagccaccactcctagccacagctgccatgataagtccttccatgaaggactgaggagggagagtgggggtccagggctggtgctgctcttccctcagctctgccggggctctaaggtccctctatttatttctcaaccctggctggcctctcaccaggagtttaggctgaatgccttccacgtgatggaggaaaaggccaactctgtcctggtcttgctgtggcaccccatcgccccacagctcgtaccttctcaccagattcccctgaatccaaactcgtggtgcaaacctctaccttttttacaaaaagatcttattgttaatttattgtttctggcacttgggcaaaccctgtagttaatactcctcccacactagacactgggtttcaggaggagggagactgccctgctttggtcccagagaggccctctgcagataggcgtggcccctcttcagaggacactaccctagggcactttctctttgaggtggagagacccataaagccttgaccacatcactccatatggggaggagaaggatccctgtcaccttctcctctcttcacggggcccttttgcagccctaggcctcatctgtgggaagggagtccctggctcatactgcccccaccacagctccttgccctggccagaactgctgtcgaagaaaatcaggccggaaggccaagaaggcgctaagggggatgggagggcaggttttccaggctggagtcggttccacccactcgcctgtccacaggcttccttgtaagcaagtcagcagcacagctactcacgctgccatctggacttattttatgtcaatctgtttataaataaaaaccaatataggt

SEQ ID NO: 84677 - DNA, 2912 bp, Homo sapiens
gcggaaacatggcggcgggaagggagtgagccgccccgcgcccccgccgcgccctcagtgatagactggagtgatgttagaaaacacaaatatggtcacctatcagagtctgcatcccaatatcaagaagctgctgacatcctggatctagtcctacacacctccaagcaacgagttcaagatcagtatgaaattggaagcacaggaccccaggaacaccacatccacctgtattgccacagtagttggactgacaggtgcccgccttcgcctgcgccttgatgggagcgacaacaaaaatgacttctggcggctggttgactcagctgaaatccagcctattgggaactgtgaaaagaatgggggtatgctacagccacctcttggatttcggctgaatgcgtcttcttggcccatgttccttttgaagacgctaaatggagcagagatggctcccatcaggattttccacaaggagccaccatcgccttcccacaacttcttcaaaatgggaatgaagctagaagctgtggacaggaagaaccctcatttcatttgcccagccactattggggaggttcggggctcagaggtgcttgtcacttttgatgggtggcgaggggcctttgactactggtgccgcttcgactcccgagacatcttccctgtgggctggtgttccttgactggagacaacctgcagcctcctggcaccaaagttgtgattccaaagaatccctatcctgcctccgatgtgaatactgagaagcccagcatccacagcagcaccaaaactgtcttggaacatcaaccagggcagagggggcgtaaaccaggaaagaagcggggccggacacccaagaccctaatttcccatcccatctctgccccatccaagacagctgaacctttgaaattcccaaagaagagaggtcccaaacctggcagcaagaggaaacctcggactttgctgaacccaccacctgcctcaccaacaaccagcactcctgaaccggataccagcactgtaccccaggatgctgccaccatccccagctcagccatgcaggccccaacagtttgtatctacttgaacaagaatggcagcacaggcccccacttagataagaagaaggtccagcaactccctgaccattttggaccagcccgtgcctctgtggtgttgcagcaggctgtccaggcctgtatcgactgtgcttatcaccagaaaaccgtcttcagcttcctcaagcaaggccatggtggtgaggttatctcagccgtgtttgaccgggaacagcataccctcaacctcccagcagtcaacagcatcacctacgtcctccgcttcctggagaaactctgccacaaccttcgtagtgacaatctgtttggcaaccagccctttacacagactcacttgtcactcactgccatagagtacagccacagccacgacaggtacctaccaggtgaaacctttgtcctggggaatagtctggcccgctccttggaaccacactcagactcaatggactctgcctcaaatcccaccaaccttgtcagcacctcccaaaggcaccggcccttgctttcatcctgtggcctcccaccaagcactgcctcagctgtgcgcaggctatgctccagggggtcggaccgatacctggagagccgcgatgcctctcgactgagtggccgggacccctcctcatggacagtcgaggatgtgatgcagtttgtccgggaagctgatcctcagcttggaccccacgctgacctgtttcgcaaacacgagatcgatggcaaggccctgctgctgctgcgcagtgacatgatgatgaagtacatgggcctgaagctggggcctgcactcaagctctcctaccacattgaccggctgaagcagggcaagttctgaaccaggagaggcagcctagacaaccaagtggcagcaggtgggggcattcttctaggaatgaggggcatcagcccaccccaggcacctcagtggggttccgggccacctcaggactccaagaggctgtgtggagccaccactcctagccacagctgccatgataagtccttccatgaaggactgaggagggagagtgggggtccagggctggtgctgctcttccctcagctctgccggggctctaaggtccctctatttatttctcaaccctggctggcctctcaccaggagtttaggctgaatgccttccacgtgatggaggaaaaggccaactctgtcctggtcttgctgtggcaccccatcgccccacagctcgtaccttctcaccagattcccctgaatccaaactcgtggtgcaaacctctaccttttttacaaaaagatcttattgttaatttattgtttctggcacttgggcaaaccctgtagttaatactcctcccacactagacactgggtttcaggaggagggagactgccctgctttggtcccagagaggccctctgcagataggcgtggcccctcttcagaggacactaccctagggcactttctctttgaggtggagagacccataaagccttgaccacatcactccatatggggaggagaaggatccctgtcaccttctcctctcttcacggggcccttttgcagccctaggcctcatctgtgggaagggagtccctggctcatactgcccccaccacagctccttgccctggccagaactgctgtcgaagaaaatcaggccggaaggccaagaaggcgctaagggggatgggagggcaggttttccaggctggagtcggttccacccactcgcctgtccacaggcttccttgtaagcaagtcagcagcacagctactcacgctgccatctggacttattttatgtcaatctgtttataaataaaaaccaatataggt

SEQ ID NO: 84678 - DNA, 3781 bp, Homo sapiens
gcggaaacatggcggcgggaagggagtgagccgccccgcgcccccgccgcgccctcagatggagaaattagcatacaaagaaactgacttgtcagaagtcagagcaaggtattggtggatccagggataaatcccaaacttcttaacccctagaccggtttttagtccattgactatgcagcctaatgtgatagactggagtgatgttagaaaacacaaatatggtcacctatcagagtctgcatcccaatatcaagaagctgctgacatcctggatctagggttgtaaagaagattacatgagctaatggatgtgaaaacatcttaaaaactctcaaatacttttcaactttggaggattattatgattttcattctgttcagcggctatactcagactttactctaaaagtcaaatcttctgacattctttgaagtgaagcattctatgaatgtgagctgaagaaatgaatgaaatgaaataatgcagcatctagtgctttttgcatggcccaaaggggctctgtgctgctccactacagaggaaacttcaagaaatgctggtttgctacagtgttttagcttgtgagattctctgggaccttccctgctccatcatggggtcacctctaggtcattttacctgggacaaatacctaaaagaaacatgttcagtcccagcgcctgtccattgcttcaagcagtcctacacacctccaagcaacgagttcaagatcagtatgaaattggaagcacaggaccccaggaacaccacatccacctgtattgccacagtagttggactgacaggtgcccgccttcgcctgcgccttgatgggagcgacaacaaaaatgacttctggcggctggttgactcagctgaaatccagcctattgggaactgtgaaaagaatgggggtatgctacagccacctcttggatttcggctgaatgcgtcttcttggcccatgttccttttgaagacgctaaatggagcagagatggctcccatcaggattttccacaaggagccaccatcgccttcccacaacttcttcaaaatgggaatgaagctagaagctgtggacaggaagaaccctcatttcatttgcccagccactattggggaggttcggggctcagaggtgcttgtcacttttgatgggtggcgaggggcctttgactactggtgccgcttcgactcccgagacatcttccctgtgggctggtgttccttgactggagacaacctgcagcctcctggcaccaaagttgtgattccaaagaatccctatcctgcctccgatgtgaatactgagaagcccagcatccacagcagcaccaaaactgtcttggaacatcaaccagggcagagggggcgtaaaccaggaaagaagcggggccggacacccaagaccctaatttcccatcccatctctgccccatccaagacagctgaacctttgaaattcccaaagaagagaggtcccaaacctggcagcaagaggaaacctcggactttgctgaacccaccacctgcctcaccaacaaccagcactcctgaaccggataccagcactgtaccccaggatgctgccaccatccccagctcagccatgcaggccccaacagtttgtatctacttgaacaagaatggcagcacaggcccccacttagataagaagaaggtccagcaactccctgaccattttggaccagcccgtgcctctgtggtgttgcagcaggctgtccaggcctgtatcgactgtgcttatcaccagaaaaccgtcttcagcttcctcaagcaaggccatggtggtgaggttatctcagccgtgtttgaccgggaacagcataccctcaacctcccagcagtcaacagcatcacctacgtcctccgcttcctggagaaactctgccacaaccttcgtagtgacaatctgtttggcaaccagccctttacacagactcacttgtcactcactgccatagagtacagccacagccacgacaggtacctaccaggtggaccttcgtgggaccacagcttaaacttcaaggtgtcaggaagacctccaaggctctcctcatccaaaagagatgcacctgatactgtccatcttaatatcctgtttctttcctttgttataatagttgctaatatttttagctacctgtattttgtcatctgcctcactatagtaaatgttccatgaggatagagacaatatctttttcaccattctcagtatccatcatcctaactgtcatatggtgaaacctttgtcctggggaatagtctggcccgctccttggaaccacactcagactcaatggactctgcctcaaatcccaccaaccttgtcagcacctcccaaaggcaccggcccttgctttcatcctgtggcctcccaccaagcactgcctcagctgtgcgcaggctatgctccaggggagtgttaaaaggatcaaatgaaagaagggatatggaatcattttggaaactaaatcgttccccaggggtcggaccgatacctggagagccgcgatgcctctcgactgagtggccgggacccctcctcatggacagtcgaggatgtgatgcagtttgtccgggaagctgatcctcagcttggaccccacgctgacctgtttcgcaaacacgagatcgatggcaaggccctgctgctgctgcgcagtgacatgatgatgaagtacatgggcctgaagctggggcctgcactcaagctctcctaccacattgaccggctgaagcagggcaagttctgaaccaggagaggcagcctagacaaccaagtggcagcaggtgggggcattcttctaggaatgaggggcatcagcccaccccaggcacctcagtggggttccgggccacctcaggactccaagaggctgtgtggagccaccactcctagccacagctgccatgataagtccttccatgaaggactgaggagggagagtgggggtccagggctggtgctgctcttccctcagctctgccggggctctaaggtccctctatttatttctcaaccctggctggcctctcaccaggagtttaggctgaatgccttccacgtgatggaggaaaaggccaactctgtcctggtcttgctgtggcaccccatcgccccacagctcgtaccttctcaccagattcccctgaatccaaactcgtggtgcaaacctctaccttttttacaaaaagatcttattgttaatttattgtttctggcacttgggcaaaccctgtagttaatactcctcccacactagacactgggtttcaggaggagggagactgccctgctttggtcccagagaggccctctgcagataggcgtggcccctcttcagaggacactaccctagggcactttctctttgaggtggagagacccataaagccttgaccacatcactccatatggggaggagaaggatccctgtcaccttctcctctcttcacggggcccttttgcagccctaggcctcatctgtgggaagggagtccctggctcatactgcccccaccacagctccttgccctggccagaactgctgtcgaagaaaatcaggccggaaggccaagaaggcgctaagggggatgggagggcaggttttccaggctggagtcggttccacccactcgcctgtccacaggcttccttgtaagcaagtcagcagcacagctactcacgctgccatctggacttattttatgtcaatctgtttataaataaaaaccaatataggt

SEQ ID NO: 84679 - DNA, 3549 bp, Homo sapiens
gcggaaacatggcggcgggaagggagtgagccgccccgcgcccccgccgcgccctcagatggagaaattagcatacaaagaaactgacttgtcagaagtcagagcaaggtattggtggatccagggataaatcccaaacttcttaacccctagaccggtttttagtccattgactatgcagcctaatgtgatagactggagtgatgttagaaaacacaaatatggtcacctatcagagtctgcatcccaatatcaagaagctgctgacatcctggatctagggttgtaaagaagattacatgagctaatggatgtgaaaacatcttaaaaactctcaaatacttttcaactttggaggattattatgattttcattctgttcagcggctatactcagactttactctaaaagtcaaatcttctgacattctttgaagtgaagcattctatgaatgtgagctgaagaaatgaatgaaatgaaataatgcagcatctagtgctttttgcatggcccaaaggggctctgtgctgctccactacagaggaaacttcaagaaatgctggtttgctacagtgttttagcttgtgagattctctgggaccttccctgctccatcatggggtcacctctaggtcattttacctgggacaaatacctaaaagaaacatgttcagtcccagcgcctgtccattgcttcaagcagtcctacacacctccaagcaacgagttcaagatcagtatgaaattggaagcacaggaccccaggaacaccacatccacctgtattgccacagtagttggactgacaggtgcccgccttcgcctgcgccttgatgggagcgacaacaaaaatgacttctggcggctggttgactcagctgaaatccagcctattgggaactgtgaaaagaatgggggtatgctacagccacctcttggatttcggctgaatgcgtcttcttggcccatgttccttttgaagacgctaaatggagcagagatggctcccatcaggattttccacaaggagccaccatcgccttcccacaacttcttcaaaatgggaatgaagctagaagctgtggacaggaagaaccctcatttcatttgcccagccactattggggaggttcggggctcagaggtgcttgtcacttttgatgggtggcgaggggcctttgactactggtgccgcttcgactcccgagacatcttccctgtgggctggtgttccttgactggagacaacctgcagcctcctggcaccaaagaaggaccattttggcaacaatgaaaggacggattcagatgctggagtcagggatgccagttaacaagctgttataatattccagttgtgattccaaagaatccctatcctgcctccgatgtgaatactgagaagcccagcatccacagcagcaccaaaactgtcttggaacatcaaccagggcagagggggcgtaaaccaggaaagaagcggggccggacacccaagaccctaatttcccatcccatctctgccccatccaagacagctgaacctttgaaattcccaaagaagagaggtcccaaacctggcagcaagaggaaacctcggactttgctgaacccaccacctgcctcaccaacaaccagcactcctgaaccggataccagcactgtaccccaggatgctgccaccatccccagctcagccatgcaggccccaacagtttgtatctacttgaacaagaatggcagcacaggcccccacttagataagaagaaggtccagcaactccctgaccattttggaccagcccgtgcctctgtggtgttgcagcaggctgtccaggcctgtatcgactgtgcttatcaccagaaaaccgtcttcagcttcctcaagcaaggccatggtggtgaggttatctcagccgtgtttgaccgggaacagcataccctcaacctcccagcagtcaacagcatcacctacgtcctccgcttcctggagaaactctgccacaaccttcgtagtgacaatctgtttggcaaccagccctttacacagactcacttgtcactcactgccatagagtacagccacagccacgacaggtacctaccaggtgaaacctttgtcctggggaatagtctggcccgctccttggaaccacactcagactcaatggactctgcctcaaatcccaccaaccttgtcagcacctcccaaaggcaccggcccttgctttcatcctgtggcctcccaccaagcactgcctcagctgtgcgcaggctatgctccagggggtcggaccgatacctggagagccgcgatgcctctcgactgagtggccgggacccctcctcatggacagtcgaggatgtgatgcagtttgtccgggaagctgatcctcagcttggaccccacgctgacctgtttcgcaaacacgagatcgatggcaaggccctgctgctgctgcgcagtgacatgatgatgaagtacatgggcctgaagctggggcctgcactcaagctctcctaccacattgaccggctgaagcagggcaagttctgaaccaggagaggcagcctagacaaccaagtggcagcaggtgggggcattcttctaggaatgaggggcatcagcccaccccaggcacctcagtggggttccgggccacctcaggactccaagaggctgtgtggagccaccactcctagccacagctgccatgataagtccttccatgaaggactgaggagggagagtgggggtccagggctggtgctgctcttccctcagctctgccggggctctaaggtccctctatttatttctcaaccctggctggcctctcaccaggagtttaggctgaatgccttccacgtgatggaggaaaaggccaactctgtcctggtcttgctgtggcaccccatcgccccacagctcgtaccttctcaccagattcccctgaatccaaactcgtggtgcaaacctctaccttttttacaaaaagatcttattgttaatttattgtttctggcacttgggcaaaccctgtagttaatactcctcccacactagacactgggtttcaggaggagggagactgccctgctttggtcccagagaggccctctgcagataggcgtggcccctcttcagaggacactaccctagggcactttctctttgaggtggagagacccataaagccttgaccacatcactccatatggggaggagaaggatccctgtcaccttctcctctcttcacggggcccttttgcagccctaggcctcatctgtgggaagggagtccctggctcatactgcccccaccacagctccttgccctggccagaactgctgtcgaagaaaatcaggccggaaggccaagaaggcgctaagggggatgggagggcaggttttccaggctggagtcggttccacccactcgcctgtccacaggcttccttgtaagcaagtcagcagcacagctactcacgctgccatctggacttattttatgtcaatctgtttataaataaaaaccaatataggt

SEQ ID NO: 84680 - DNA, 2148 bp, Homo sapiens
gcggaaacatggcggcgggaagggagtgagccgccccgcgcccccgccgcgccctcagatggagaaattagcatacaaagaaactgacttgtcagaagtcagagcaaggtattggtggatccagggataaatcccaaacttcttaacccctagaccggtttttagtccattgactatgcagcctaatgaggaaacctcggactttgctgaacccaccacctgcctcaccaacaaccagcactcctgaaccggataccagcactgtaccccaggatgctgccaccatccccagctcagccatgcaggccccaacagtttgtatctacttgaacaagaatggcagcacaggcccccacttagataagaagaaggtccagcaactccctgaccattttggaccagcccgtgcctctgtggtgttgcagcaggctgtccaggcctgtatcgactgtgcttatcaccagaaaaccgtcttcagcttcctcaagcaaggccatggtggtgaggttatctcagccgtgtttgaccgggaacagcataccctcaacctcccagcagtcaacagcatcacctacgtcctccgcttcctggagaaactctgccacaaccttcgtagtgacaatctgtttggcaaccagccctttacacagactcacttgtcactcactgccatagagtacagccacagccacgacaggtacctaccaggtgaaacctttgtcctggggaatagtctggcccgctccttggaaccacactcagactcaatggactctgcctcaaatcccaccaaccttgtcagcacctcccaaaggcaccggcccttgctttcatcctgtggcctcccaccaagcactgcctcagctgtgcgcaggctatgctccagggggtcggaccgatacctggagagccgcgatgcctctcgactgagtggccgggacccctcctcatggacagtcgaggatgtgatgcagtttgtccgggaagctgatcctcagcttggaccccacgctgacctgtttcgcaaacacgagatcgatggcaaggccctgctgctgctgcgcagtgacatgatgatgaagtacatgggcctgaagctggggcctgcactcaagctctcctaccacattgaccggctgaagcagggcaagttctgaaccaggagaggcagcctagacaaccaagtggcagcaggtgggggcattcttctaggaatgaggggcatcagcccaccccaggcacctcagtggggttccgggccacctcaggactccaagaggctgtgtggagccaccactcctagccacagctgccatgataagtccttccatgaaggactgaggagggagagtgggggtccagggctggtgctgctcttccctcagctctgccggggctctaaggtccctctatttatttctcaaccctggctggcctctcaccaggagtttaggctgaatgccttccacgtgatggaggaaaaggccaactctgtcctggtcttgctgtggcaccccatcgccccacagctcgtaccttctcaccagattcccctgaatccaaactcgtggtgcaaacctctaccttttttacaaaaagatcttattgttaatttattgtttctggcacttgggcaaaccctgtagttaatactcctcccacactagacactgggtttcaggaggagggagactgccctgctttggtcccagagaggccctctgcagataggcgtggcccctcttcagaggacactaccctagggcactttctctttgaggtggagagacccataaagccttgaccacatcactccatatggggaggagaaggatccctgtcaccttctcctctcttcacggggcccttttgcagccctaggcctcatctgtgggaagggagtccctggctcatactgcccccaccacagctccttgccctggccagaactgctgtcgaagaaaatcaggccggaaggccaagaaggcgctaagggggatgggagggcaggttttccaggctggagtcggttccacccactcgcctgtccacaggcttccttgtaagcaagtcagcagcacagctactcacgctgccatctggacttattttatgtcaatctgtttataaataaaaaccaatataggt

SEQ ID NO: 84681 - DNA, 1631 bp, Homo sapiens
agcttggaccccacgctgacttgtttcgcaaacacgagatcgatggcaaggccctgctgctgctgcgcagtgacatgatgatgaagtacatgggcttgaagctggggcctgcactcaagctctcctaccacattgaccggctgaagcagggcaagttctgaaccaggagagtacagccacagccacgacaggtgaaacctttgtcctggggaatagtctggcccgctccttggaaccacactcagactcaatggactctgcctcaaatcccaccaaccttgtcagcacctcccaaaggcaccggcccttgctttcatcctgtggcctcccaccaagcactgcctcagctgtgcgcaggctatgctccagggggtcggaccgatacctggagagccgcgatgcctctcgactgagtggccgggacccctcctcatggacagtcgaggatgtgatgcagtttgtccgggaagctgatcctcagcttggaccccacgctgacctgtttcgcaaacacgagatcgatggcaaggccctgctgctgctgcgcagtgacatgatgatgaagtacatgggcctgaagctggggcctgcactcaagctctcctaccacattgaccggctgaagcagggcaagttctgaaccaggagaggcagcctagacaaccaagtggcagcaggtgggggcattcttctaggaatgaggggcatcagcccaccccaggcacctcagtggggttccgggccacctcaggactccaagaggctgtgtggagccaccactcctagccacagctgccatgataagtccttccatgaaggactgaggagggagagtgggggtccagggctggtgctgctcttccctcagctctgccggggctctaaggtccctctatttatttctcaaccctggctggcctctcaccaggagtttaggctgaatgccttccacgtgatggaggaaaaggccaactctgtcctggtcttgctgtggcaccccatcgccccacagctcgtaccttctcaccagattcccctgaatccaaactcgtggtgcaaacctctaccttttttacaaaaagatcttattgttaatttattgtttctggcacttgggcaaaccctgtagttaatactcctcccacactagacactgggtttcaggaggagggagactgccctgctttggtcccagagaggccctctgcagataggcgtggcccctcttcagaggacactaccctagggcactttctctttgaggtggagagacccataaagccttgaccacatcactccatatggggaggagaaggatccctgtcaccttctcctctcttcacggggcccttttgcagccctaggcctcatctgtgggaagggagtccctggctcatactgcccccaccacagctccttgccctggccagaactgctgtcgaagaaaatcaggccggaaggccaagaaggcgctaagggggatgggagggcaggttttccaggctggagtcggttccacccactcgcctgtccacaggcttccttgtaagcaagtcagcagcacagctactcacgctgccatctggacttattttatgtcaatctgtttataaataaaaaccaatataggt

SEQ ID NO: 84682 - DNA, 504 bp, Homo sapiens
gcggaaacatggcggcgggaagggagtgagccgccccgcgcccccgccgcgccctcagatggagaaattagcatacaaagaaactgacttgtcagaagtcagagcaaggtattggtggatccagggataaatcccaaacttcttaacccctagaccggtttttagtccattgactatgcagcctaatggtaagtatctttttaccctatcgtggaggtaagagggattaagagacctagcaaggactggctttaaggaattcctcacgaataattagactactcgttatccttttctttatagccatgatgtcatttttgtcattggcatgaattttccagattgggagaggaggtctgaagttttgctttttaaatacttaaaaatatttctcggtgctcatgcctgtaattccaacactttgggaggctgagacaggagaattgcttgaacccgggaggcggaggttgctgtaagccgagatctcaccattgcactccagcc

SEQ ID NO: 84683 - DNA, 482 bp, Homo sapiens
acttgtcactcactgccatagagtacagccacagccacgacaggtacctaccaggtaggagctgggatggggcctgggctgagagtgggggacagggctagcagcagcacctgcaggggcccagggtcagccttcagaactactggcctggcacctactatctagaggtctgcttttctgtcccttacctttgccatatctgagacttctcagcctcctctcatctttactttttcttcaggattttgttttctgtctctaggatcacccctatttcttctagatccttatccctagataaaaggtggttcgcaattccccttctgagtttcagactgcatgtggagccaccaagaagtcacagaacgtctcccagtgtgaacctggcagcaaaggcctaacacacatctcccttgccagcaggaaggtttagtctcaggctacagattgagaaatttgctccctggtgattggccatctat

SEQ ID NO: 84684 - DNA, 401 bp, Homo sapiens
tgctgcttgctccactcaaacaggtatctgggagccagcactctggcagtccttctaagctctaactctggttttactgtttttcaggtgaaacctttgtcctggggaatagtctggcccgctccttggaaccacactcagactcaatggactctgcctcaaatcccaccaaccttgtcagcacctcccaaaggcaccggcccttgctttcatcctgtggcctcccaccaagcactgcctcagctgtgcgcaggctatgctccaggggtaagcttaccagagtcctggccctccttccctccctcactctttccttcacttccttcctgagctctgggaggccagagaggacctagctctgttgccctctgcctggtggtgggactagggactggacttac

SEQ ID NO: 84685 - DNA, 258 bp, Homo sapiens
cccaccacctgcctcaccaacaaccagcactcctgaaccggataccagcactgtaccccaggatgctgccaccatccccagctcagccatgcaggccccaacaggtaagagcagatgacaggactacctgcgcacaagccccagacctagtgtttgcactttcttttgtcttacaccagtaattagcacctttccacttgtaaacctaggtaaaatatttttaaaaaattttatctttggcatttgaaataatgtcag

SEQ ID NO: 84686 - DNA, 593 bp, Homo sapiens
aaattagcatacaaagaaactgacttgtcagaagtcagagcaaggtattggtggatccagggataaatcccaaacttcttaacccctagaccggtttttagtccattgactatgcagcctaatggtaagtatctttttaccctatcgtggaggtaagagggattaagagacctagcaaggactggctttaaggaattcctcacgaataattagactactcgttatccttttctttatagccatgatgtcatttttgtcattggcatgaattttccagattgggagaggaggtctgaagttttgctttttaaatacttaaaaatatttctcggtgctcatgcctgtaattccaacactctgggaagccaaggtgggcggatcacctgaagtcaggagttcgagaccaacatggagaaaccccatttctactaaaaatacaaaactggtgggcatggtggcgcatgcctgtaatcccagctacttgggaggctgagacaggagaattgcttgaacccgggaggcggaggttgctgtaagccgagatctcaccattgcactccagcctgggcaacaagagcaaaactccatctcaa

SEQ ID NO: 84687 - DNA, 3251 bp, Homo sapiens
gcggaaacatggcggcgggaagggagtgagccgccccgcgcccccgccgcgccctcagatggagaaattagcatacaaagaaactgacttgtcagaagtcagagcaaggtattggtggatccagggataaatcccaaacttcttaacccctagaccggtttttagtccattgactatgcagcctaatgtgatagactggagtgatgttagaaaacacaaatatggtcacctatcagagtctgcatcccaatatcaagaagctgctgacatcctggatctagggttgtaaagaagattacatgagctaatggatgtgaaaacatcttaaaaactctcaaatacttttcaactttggaggattattatgattttcattctgttcagcggctatactcagactttactctaaaagtcaaatcttctgacattctttgaagtgaagcattctatgaatgtgagctgaagaaatgaatgaaatgaaataatgcagtcctacacacctccaagcaacgagttcaagatcagtatgaaattggaagcacaggaccccaggaacaccacatccacctgtattgccacagtagttggactgacaggtgcccgccttcgcctgcgccttgatgggagcgacaacaaaaatgacttctggcggctggttgactcagctgaaatccagcctattgggaactgtgaaaagaatgggggtatgctacagccacctcttggatttcggctgaatgcgtcttcttggcccatgttccttttgaagacgctaaatggagcagagatggctcccatcaggattttccacaaggagccaccatcgccttcccacaacttcttcaaaatgggaatgaagctagaagctgtggacaggaagaaccctcatttcatttgcccagccactattggggaggttcggggctcagaggtgcttgtcacttttgatgggtggcgaggggcctttgactactggtgccgcttcgactcccgagacatcttccctgtgggctggtgttccttgactggagacaacctgcagcctcctggcaccaaagttgtgattccaaagaatccctatcctgcctccgatgtgaatactgagaagcccagcatccacagcagcaccaaaactgtcttggaacatcaaccagggcagagggggcgtaaaccaggaaagaagcggggccggacacccaagaccctaatttcccatcccatctctgccccatccaagacagctgaacctttgaaattcccaaagaagagaggtcccaaacctggcagcaagaggaaacctcggactttgctgaacccaccacctgcctcaccaacaaccagcactcctgaaccggataccagcactgtaccccaggatgctgccaccatccccagctcagccatgcaggccccaacagtttgtatctacttgaacaagaatggcagcacaggcccccacttagataagaagaaggtccagcaactccctgaccattttggaccagcccgtgcctctgtggtgttgcagcaggctgtccaggcctgtatcgactgtgcttatcaccagaaaaccgtcttcagcttcctcaagcaaggccatggtggtgaggttatctcagccgtgtttgaccgggaacagcataccctcaacctcccagcagtcaacagcatcacctacgtcctccgcttcctggagaaactctgccacaaccttcgtagtgacaatctgtttggcaaccagccctttacacagactcacttgtcactcactgccatagagtacagccacagccacgacaggtacctaccaggtgaaacctttgtcctggggaatagtctggcccgctccttggaaccacactcagactcaatggactctgcctcaaatcccaccaaccttgtcagcacctcccaaaggcaccggcccttgctttcatcctgtggcctcccaccaagcactgcctcagctgtgcgcaggctatgctccagggggtcggaccgatacctggagagccgcgatgcctctcgactgagtggccgggacccctcctcatggacagtcgaggatgtgatgcagtttgtccgggaagctgatcctcagcttggaccccacgctgacctgtttcgcaaacacgagatcgatggcaaggccctgctgctgctgcgcagtgacatgatgatgaagtacatgggcctgaagctggggcctgcactcaagctctcctaccacattgaccggctgaagcagggcaagttctgaaccaggagaggcagcctagacaaccaagtggcagcaggtgggggcattcttctaggaatgaggggcatcagcccaccccaggcacctcagtggggttccgggccacctcaggactccaagaggctgtgtggagccaccactcctagccacagctgccatgataagtccttccatgaaggactgaggagggagagtgggggtccagggctggtgctgctcttccctcagctctgccggggctctaaggtccctctatttatttctcaaccctggctggcctctcaccaggagtttaggctgaatgccttccacgtgatggaggaaaaggccaactctgtcctggtcttgctgtggcaccccatcgccccacagctcgtaccttctcaccagattcccctgaatccaaactcgtggtgcaaacctctaccttttttacaaaaagatcttattgttaatttattgtttctggcacttgggcaaaccctgtagttaatactcctcccacactagacactgggtttcaggaggagggagactgccctgctttggtcccagagaggccctctgcagataggcgtggcccctcttcagaggacactaccctagggcactttctctttgaggtggagagacccataaagccttgaccacatcactccatatggggaggagaaggatccctgtcaccttctcctctcttcacggggcccttttgcagccctaggcctcatctgtgggaagggagtccctggctcatactgcccccaccacagctccttgccctggccagaactgctgtcgaagaaaatcaggccggaaggccaagaaggcgctaagggggatgggagggcaggttttccaggctggagtcggttccacccactcgcctgtccacaggcttccttgtaagcaagtcagcagcacagctactcacgctgccatctggacttattttatgtcaatctgtttataaataaaaaccaatataggt

SEQ ID NO: 84688 - DNA, 3322 bp, Homo sapiens
gcggaaacatggcggcgggaagggagtgagccgccccgcgcccccgccgcgccctcagatggagaaattagcatacaaagaaactgacttgtcagaagtcagagcaaggtattggtggatccagggataaatcccaaacttcttaacccctagaccggtttttagtccattgactatgcagcctaatgtgatagactggagtgatgttagaaaacacaaatatggtcacctatcagagtctgcatcccaatatcaagaagctgctgacatcctggatctagggttgtaaagaagattacatgagctaatggatgtgaaaacatcttaaaaactctcaaatacttttcaactttggaggattattatgattttcattctgttcagcggctatactcagactttactctaaaagtcaaatcttctgacattctttgaagtgaagcattctatgaatgtgagctgaagaaatgaatgaaatgaaataatgcaggtcattttacctgggacaaatacctaaaagaaacatgttcagtcccagcgcctgtccattgcttcaagcagtcctacacacctccaagcaacgagttcaagatcagtatgaaattggaagcacaggaccccaggaacaccacatccacctgtattgccacagtagttggactgacaggtgcccgccttcgcctgcgccttgatgggagcgacaacaaaaatgacttctggcggctggttgactcagctgaaatccagcctattgggaactgtgaaaagaatgggggtatgctacagccacctcttggatttcggctgaatgcgtcttcttggcccatgttccttttgaagacgctaaatggagcagagatggctcccatcaggattttccacaaggagccaccatcgccttcccacaacttcttcaaaatgggaatgaagctagaagctgtggacaggaagaaccctcatttcatttgcccagccactattggggaggttcggggctcagaggtgcttgtcacttttgatgggtggcgaggggcctttgactactggtgccgcttcgactcccgagacatcttccctgtgggctggtgttccttgactggagacaacctgcagcctcctggcaccaaagttgtgattccaaagaatccctatcctgcctccgatgtgaatactgagaagcccagcatccacagcagcaccaaaactgtcttggaacatcaaccagggcagagggggcgtaaaccaggaaagaagcggggccggacacccaagaccctaatttcccatcccatctctgccccatccaagacagctgaacctttgaaattcccaaagaagagaggtcccaaacctggcagcaagaggaaacctcggactttgctgaacccaccacctgcctcaccaacaaccagcactcctgaaccggataccagcactgtaccccaggatgctgccaccatccccagctcagccatgcaggccccaacagtttgtatctacttgaacaagaatggcagcacaggcccccacttagataagaagaaggtccagcaactccctgaccattttggaccagcccgtgcctctgtggtgttgcagcaggctgtccaggcctgtatcgactgtgcttatcaccagaaaaccgtcttcagcttcctcaagcaaggccatggtggtgaggttatctcagccgtgtttgaccgggaacagcataccctcaacctcccagcagtcaacagcatcacctacgtcctccgcttcctggagaaactctgccacaaccttcgtagtgacaatctgtttggcaaccagccctttacacagactcacttgtcactcactgccatagagtacagccacagccacgacaggtacctaccaggtgaaacctttgtcctggggaatagtctggcccgctccttggaaccacactcagactcaatggactctgcctcaaatcccaccaaccttgtcagcacctcccaaaggcaccggcccttgctttcatcctgtggcctcccaccaagcactgcctcagctgtgcgcaggctatgctccagggggtcggaccgatacctggagagccgcgatgcctctcgactgagtggccgggacccctcctcatggacagtcgaggatgtgatgcagtttgtccgggaagctgatcctcagcttggaccccacgctgacctgtttcgcaaacacgagatcgatggcaaggccctgctgctgctgcgcagtgacatgatgatgaagtacatgggcctgaagctggggcctgcactcaagctctcctaccacattgaccggctgaagcagggcaagttctgaaccaggagaggcagcctagacaaccaagtggcagcaggtgggggcattcttctaggaatgaggggcatcagcccaccccaggcacctcagtggggttccgggccacctcaggactccaagaggctgtgtggagccaccactcctagccacagctgccatgataagtccttccatgaaggactgaggagggagagtgggggtccagggctggtgctgctcttccctcagctctgccggggctctaaggtccctctatttatttctcaaccctggctggcctctcaccaggagtttaggctgaatgccttccacgtgatggaggaaaaggccaactctgtcctggtcttgctgtggcaccccatcgccccacagctcgtaccttctcaccagattcccctgaatccaaactcgtggtgcaaacctctaccttttttacaaaaagatcttattgttaatttattgtttctggcacttgggcaaaccctgtagttaatactcctcccacactagacactgggtttcaggaggagggagactgccctgctttggtcccagagaggccctctgcagataggcgtggcccctcttcagaggacactaccctagggcactttctctttgaggtggagagacccataaagccttgaccacatcactccatatggggaggagaaggatccctgtcaccttctcctctcttcacggggcccttttgcagccctaggcctcatctgtgggaagggagtccctggctcatactgcccccaccacagctccttgccctggccagaactgctgtcgaagaaaatcaggccggaaggccaagaaggcgctaagggggatgggagggcaggttttccaggctggagtcggttccacccactcgcctgtccacaggcttccttgtaagcaagtcagcagcacagctactcacgctgccatctggacttattttatgtcaatctgtttataaataaaaaccaatataggt

SEQ ID NO: 84689 - DNA, 3158 bp, Homo sapiens
gggggcatatttcagcccttttggtgttacagcaactcttttagccacgccgttcagcagatcccgagttcttgtcctgcaaccaggaagaatgaggtacgcagacaagtggagggtgagcaagatgaagaggtgctgtattgagcaatggaacagctcagagaagactcacagtgccagggcgtcccagtgagtgttcagcccctagcaggaaggatagctcctctctgcagtgatagactggagtgatgttagaaaacacaaatatggtcacctatcagagtctgcatcccaatatcaagaagctgctgacatcctggatctaggtcattttacctgggacaaatacctaaaagaaacatgttcagtcccagcgcctgtccattgcttcaagcagtcctacacacctccaagcaacgagttcaagatcagtatgaaattggaagcacaggaccccaggaacaccacatccacctgtattgccacagtagttggactgacaggtgcccgccttcgcctgcgccttgatgggagcgacaacaaaaatgacttctggcggctggttgactcagctgaaatccagcctattgggaactgtgaaaagaatgggggtatgctacagccacctcttggatttcggctgaatgcgtcttcttggcccatgttccttttgaagacgctaaatggagcagagatggctcccatcaggattttccacaaggagccaccatcgccttcccacaacttcttcaaaatgggaatgaagctagaagctgtggacaggaagaaccctcatttcatttgcccagccactattggggaggttcggggctcagaggtgcttgtcacttttgatgggtggcgaggggcctttgactactggtgccgcttcgactcccgagacatcttccctgtgggctggtgttccttgactggagacaacctgcagcctcctggcaccaaagttgtgattccaaagaatccctatcctgcctccgatgtgaatactgagaagcccagcatccacagcagcaccaaaactgtcttggaacatcaaccagggcagagggggcgtaaaccaggaaagaagcggggccggacacccaagaccctaatttcccatcccatctctgccccatccaagacagctgaacctttgaaattcccaaagaagagaggtcccaaacctggcagcaagaggaaacctcggactttgctgaacccaccacctgcctcaccaacaaccagcactcctgaaccggataccagcactgtaccccaggatgctgccaccatccccagctcagccatgcaggccccaacagtttgtatctacttgaacaagaatggcagcacaggcccccacttagataagaagaaggtccagcaactccctgaccattttggaccagcccgtgcctctgtggtgttgcagcaggctgtccaggcctgtatcgactgtgcttatcaccagaaaaccgtcttcagcttcctcaagcaaggccatggtggtgaggttatctcagccgtgtttgaccgggaacagcataccctcaacctcccagcagtcaacagcatcacctacgtcctccgcttcctggagaaactctgccacaaccttcgtagtgacaatctgtttggcaaccagccctttacacagactcacttgtcactcactgccatagagtacagccacagccacgacaggtacctaccaggtgaaacctttgtcctggggaatagtctggcccgctccttggaaccacactcagactcaatggactctgcctcaaatcccaccaaccttgtcagcacctcccaaaggcaccggcccttgctttcatcctgtggcctcccaccaagcactgcctcagctgtgcgcaggctatgctccagggggtcggaccgatacctggagagccgcgatgcctctcgactgagtggccgggacccctcctcatggacagtcgaggatgtgatgcagtttgtccgggaagctgatcctcagcttggaccccacgctgacctgtttcgcaaacacgagatcgatggcaaggccctgctgctgctgcgcagtgacatgatgatgaagtacatgggcctgaagctggggcctgcactcaagctctcctaccacattgaccggctgaagcagggcaagttctgaaccaggagaggcagcctagacaaccaagtggcagcaggtgggggcattcttctaggaatgaggggcatcagcccaccccaggcacctcagtggggttccgggccacctcaggactccaagaggctgtgtggagccaccactcctagccacagctgccatgataagtccttccatgaaggactgaggagggagagtgggggtccagggctggtgctgctcttccctcagctctgccggggctctaaggtccctctatttatttctcaaccctggctggcctctcaccaggagtttaggctgaatgccttccacgtgatggaggaaaaggccaactctgtcctggtcttgctgtggcaccccatcgccccacagctcgtaccttctcaccagattcccctgaatccaaactcgtggtgcaaacctctaccttttttacaaaaagatcttattgttaatttattgtttctggcacttgggcaaaccctgtagttaatactcctcccacactagacactgggtttcaggaggagggagactgccctgctttggtcccagagaggccctctgcagataggcgtggcccctcttcagaggacactaccctagggcactttctctttgaggtggagagacccataaagccttgaccacatcactccatatggggaggagaaggatccctgtcaccttctcctctcttcacggggcccttttgcagccctaggcctcatctgtgggaagggagtccctggctcatactgcccccaccacagctccttgccctggccagaactgctgtcgaagaaaatcaggccggaaggccaagaaggcgctaagggggatgggagggcaggttttccaggctggagtcggttccacccactcgcctgtccacaggcttccttgtaagcaagtcagcagcacagctactcacgctgccatctggacttattttatgtcaatctgtttataaataaaaaccaatataggt

SEQ ID NO: 84690 - DNA, 3714 bp, Homo sapiens
gcggaaacatggcggcgggaagggagtgagccgccccgcgcccccgccgcgccctcagatggagaaattagcatacaaagaaactgacttgtcagaagtcagagcaaggtattggtggatccagggataaatcccaaacttcttaacccctagaccggtttttagtccattgactatgcagcctaatgtgatagactggagtgatgttagaaaacacaaatatggtcacctatcagagtctgcatcccaatatcaagaagctgctgacatcctggatctagggttgtaaagaagattacatgagctaatggatgtgaaaacatcttaaaaactctcaaatacttttcaactttggaggattattatgattttcattctgttcagcggctatactcagactttactctaaaagtcaaatcttctgacattctttgaagtgaagcattctatgaatgtgagctgaagaaatgaatgaaatgaaataatgcagcatctagtgctttttgcatggcccaaaggggctctgtgctgctccactacagaggaaacttcaagaaatgctggtttgctacagtgttttagcttgtgagattctctgggaccttccctgctccatcatggggtcacctctaggtcattttacctgggacaaatacctaaaagaaacatgttcagtcccagcgcctgtccattgcttcaagcagtcctacacacctccaagcaacgagttcaagatcagtatgaaattggaagcacaggaccccaggaacaccacatccacctgtattgccacagtagttggactgacaggtgcccgccttcgcctgcgccttgatgggagcgacaacaaaaatgacttctggcggctggttgactcagctgaaatccagcctattgggaactgtgaaaagaatgggggtatgctacagccacctcttggatttcggctgaatgcgtcttcttggcccatgttccttttgaagacgctaaatggagcagagatggctcccatcaggattttccacaaggagccaccatcgccttcccacaacttcttcaaaatgggaatgaagctagaagctgtggacaggaagaaccctcatttcatttgcccagccactattggggaggttcggggctcagaggtgcttgtcacttttgatgggtggcgaggggcctttgactactggtgccgcttcgactcccgagacatcttccctgtgggctggtgttccttgactggagacaacctgcagcctcctggcaccaaagttgtgattccaaagaatccctatcctgcctccgatgtgaatactgagaagcccagcatccacagcagcaccaaaactgtcttggaacatcaaccagggcagagggggcgtaaaccaggaaagaagcggggccggacacccaagaccctaatttcccatcccatctctgccccatccaagacagctgaacctttgaaattcccaaagaagagaggtcccaaacctggcagcaagaggaaacctcggactttgctgaacccaccacctgcctcaccaacaaccagcactcctgaaccggataccagcactgtaccccaggatgctgccaccatccccagctcagccatgcaggccccaacagtttgtatctacttgaacaagaatggcagcacaggcccccacttagataagaagaaggtccagcaactccctgaccattttggaccagcccgtgcctctgtggtgttgcagcaggctgtccaggcctgtatcgactgtgcttatcaccagaaaaccgtcttcagcttcctcaagcaaggccatggtggtgaggttatctcagccgtgtttgaccgggaacagcataccctcaacctcccagcagtcaacagcatcacctacgtcctccgcttcctggagaaactctgccacaaccttcgtagtgacaatctgtttggcaaccagccctttacacagactcacttgtcactcactgccatagagtacagccacagccacgacaggtacctaccaggtggaccttcgtgggaccacagcttaaacttcaaggtgtcaggaagacctccaaggctctcctcatccaaaagagatgcacctgatactgtccatcttaatatcctgtttctttcctttgttataatagttgctaatatttttagctacctgtattttgtcatctgcctcactatagtaaatgttccatgaggatagagacaatatctttttcaccattctcagtatccatcatcctaactgtcatatggtgaaacctttgtcctggggaatagtctggcccgctccttggaaccacactcagactcaatggactctgcctcaaatcccaccaaccttgtcagcacctcccaaaggcaccggcccttgctttcatcctgtggcctcccaccaagcactgcctcagctgtgcgcaggctatgctccagggggtcggaccgatacctggagagccgcgatgcctctcgactgagtggccgggacccctcctcatggacagtcgaggatgtgatgcagtttgtccgggaagctgatcctcagcttggaccccacgctgacctgtttcgcaaacacgagatcgatggcaaggccctgctgctgctgcgcagtgacatgatgatgaagtacatgggcctgaagctggggcctgcactcaagctctcctaccacattgaccggctgaagcagggcaagttctgaaccaggagaggcagcctagacaaccaagtggcagcaggtgggggcattcttctaggaatgaggggcatcagcccaccccaggcacctcagtggggttccgggccacctcaggactccaagaggctgtgtggagccaccactcctagccacagctgccatgataagtccttccatgaaggactgaggagggagagtgggggtccagggctggtgctgctcttccctcagctctgccggggctctaaggtccctctatttatttctcaaccctggctggcctctcaccaggagtttaggctgaatgccttccacgtgatggaggaaaaggccaactctgtcctggtcttgctgtggcaccccatcgccccacagctcgtaccttctcaccagattcccctgaatccaaactcgtggtgcaaacctctaccttttttacaaaaagatcttattgttaatttattgtttctggcacttgggcaaaccctgtagttaatactcctcccacactagacactgggtttcaggaggagggagactgccctgctttggtcccagagaggccctctgcagataggcgtggcccctcttcagaggacactaccctagggcactttctctttgaggtggagagacccataaagccttgaccacatcactccatatggggaggagaaggatccctgtcaccttctcctctcttcacggggcccttttgcagccctaggcctcatctgtgggaagggagtccctggctcatactgcccccaccacagctccttgccctggccagaactgctgtcgaagaaaatcaggccggaaggccaagaaggcgctaagggggatgggagggcaggttttccaggctggagtcggttccacccactcgcctgtccacaggcttccttgtaagcaagtcagcagcacagctactcacgctgccatctggacttattttatgtcaatctgtttataaataaaaaccaatataggt

SEQ ID NO: 84691 - DNA, 2341 bp, Homo sapiens
cattggtccgagagaaattagccgtcttaatggatccactaccttttgtctgaactatttctccacctagagaaagcccccaaaggataaatcccaaacttcttaacccctagaccggtttttagtccattgactatgcagcctaatgttgtgattccaaagaatccctatcctgcctccgatgtgaatactgagaagcccagcatccacagcagcaccaaaactgtcttggaacatcaaccagggcagagggggcgtaaaccaggaaagaagcggggccggacacccaagaccctaatttcccatcccatctctgccccatccaagacagctgaacctttgaaattcccaaagaagagaggtcccaaacctggcagcaagaggaaacctcggactttgctgaacccaccacctgcctcaccaacaaccagcactcctgaaccggataccagcactgtaccccaggatgctgccaccatccccagctcagccatgcaggccccaacagtttgtatctacttgaacaagaatggcagcacaggcccccacttagataagaagaaggtccagcaactccctgaccattttggaccagcccgtgcctctgtggtgttgcagcaggctgtccaggcctgtatcgactgtgcttatcaccagaaaaccgtcttcagcttcctcaagcaaggccatggtggtgaggttatctcagccgtgtttgaccgggaacagcataccctcaacctcccagcagtcaacagcatcacctacgtcctccgcttcctggagaaactctgccacaaccttcgtagtgacaatctgtttggcaaccagccctttacacagactcacttgtcactcactgccatagagtacagccacagccacgacaggtacctaccaggtgaaacctttgtcctggggaatagtctggcccgctccttggaaccacactcagactcaatggactctgcctcaaatcccaccaaccttgtcagcacctcccaaaggcaccggcccttgctttcatcctgtggcctcccaccaagcactgcctcagctgtgcgcaggctatgctccagggggtcggaccgatacctggagagccgcgatgcctctcgactgagtggccgggacccctcctcatggacagtcgaggatgtgatgcagtttgtccgggaagctgatcctcagcttggaccccacgctgacctgtttcgcaaacacgagatcgatggcaaggccctgctgctgctgcgcagtgacatgatgatgaagtacatgggcctgaagctggggcctgcactcaagctctcctaccacattgaccggctgaagcagggcaagttctgaaccaggagaggcagcctagacaaccaagtggcagcaggtgggggcattcttctaggaatgaggggcatcagcccaccccaggcacctcagtggggttccgggccacctcaggactccaagaggctgtgtggagccaccactcctagccacagctgccatgataagtccttccatgaaggactgaggagggagagtgggggtccagggctggtgctgctcttccctcagctctgccggggctctaaggtccctctatttatttctcaaccctggctggcctctcaccaggagtttaggctgaatgccttccacgtgatggaggaaaaggccaactctgtcctggtcttgctgtggcaccccatcgccccacagctcgtaccttctcaccagattcccctgaatccaaactcgtggtgcaaacctctaccttttttacaaaaagatcttattgttaatttattgtttctggcacttgggcaaaccctgtagttaatactcctcccacactagacactgggtttcaggaggagggagactgccctgctttggtcccagagaggccctctgcagataggcgtggcccctcttcagaggacactaccctagggcactttctctttgaggtggagagacccataaagccttgaccacatcactccatatggggaggagaaggatccctgtcaccttctcctctcttcacggggcccttttgcagccctaggcctcatctgtgggaagggagtccctggctcatactgcccccaccacagctccttgccctggccagaactgctgtcgaagaaaatcaggccggaaggccaagaaggcgctaagggggatgggagggcaggttttccaggctggagtcggttccacccactcgcctgtccacaggcttccttgtaagcaagtcagcagcacagctactcacgctgccatctggacttattttatgtcaatctgtttataaataaaaaccaatataggt

SEQ ID NO: 84692 - DNA, 1474 bp, Homo sapiens
ctgcgccatgagagccaagtggaggaagaagcgaatgcgcaggctgaagcgcaaaagaagaaagatgaggcagaggtccaagtaaaccgctagcttgtggcctcccaccaagcactgcctcagctgtgcgcaggctatgctccaggggagtgttaaaaggatcaaatgaaagaagggatatggaatcattttggaaactaaatcgttccccaggggtcggaccgatacctggagagccgcgatgcctctcgactgagtggccgggacccctcctcatggacagtcgaggatgtgatgcagtttgtccgggaagctgatcctcagcttggaccccacgctgacctgtttcgcaaacacgagatcgatggcaaggccctgctgctgctgcgcagtgacatgatgatgaagtacatgggcctgaagctggggcctgcactcaagctctcctaccacattgaccggctgaagcagggcaagttctgaaccaggagaggcagcctagacaaccaagtggcagcaggtgggggcattcttctaggaatgaggggcatcagcccaccccaggcacctcagtggggttccgggccacctcaggactccaagaggctgtgtggagccaccactcctagccacagctgccatgataagtccttccatgaaggactgaggagggagagtgggggtccagggctggtgctgctcttccctcagctctgccggggctctaaggtccctctatttatttctcaaccctggctggcctctcaccaggagtttaggctgaatgccttccacgtgatggaggaaaaggccaactctgtcctggtcttgctgtggcaccccatcgccccacagctcgtaccttctcaccagattcccctgaatccaaactcgtggtgcaaacctctaccttttttacaaaaagatcttattgttaatttattgtttctggcacttgggcaaaccctgtagttaatactcctcccacactagacactgggtttcaggaggagggagactgccctgctttggtcccagagaggccctctgcagataggcgtggcccctcttcagaggacactaccctagggcactttctctttgaggtggagagacccataaagccttgaccacatcactccatatggggaggagaaggatccctgtcaccttctcctctcttcacggggcccttttgcagccctaggcctcatctgtgggaagggagtccctggctcatactgcccccaccacagctccttgccctggccagaactgctgtcgaagaaaatcaggccggaaggccaagaaggcgctaagggggatgggagggcaggttttccaggctggagtcggttccacccactcgcctgtccacaggcttccttgtaagcaagtcagcagcacagctactcacgctgccatctggacttattttatgtcaatctgtttataaataaaaaccaatataggt

SEQ ID NO: 84693 - DNA, 1386 bp, Homo sapiens
aaccctcctttaggaataagcttgcggccgcgggcagcagagccggccgctcgttctccagccgtcttcaggacagccgcagcctggacgggctgagcgaggcgtgcggtggcgccgggtcctcagggagtgccgagtccggcgcgggcggcggacgccgcgccaccatctccagtcccctggagctcgaaggcacagtgagccgccacggcgaccttacccactttgtcgccaacaacctgcaactcaagatccgtctgagcggcgcgcctccacccccgccttctgcccctgcgcggccctgcccagcgcctgcacccacacccacaccggccattccccccatcgaccccgaggtgctgcgggatctggagcggttgagtcgggagctgggaggccgggtggaccgtctgcttcgcggtctgggtggcgcggtgcaggagctgacggcgctgagcgtgggttgcatccagacctaccgcgatgctgtggactccttaggtgaagccgtggacatgagcatcaagggcatgtacaccctgctggcgcgctgcgaggagctggagcgggctctgcagccggttcaggggctggcgcgccaagtccgggatatccgacgtactctggaggtgttggaggccctgtgcaagtgaccaggaggacaggagaggccggtcctggccagggcagggcccagcaggaccctaaggactcttcagggagtcctggtgggaagtgcccactgaggggaggcctgtgtgttggaggctcttccagatgcgttcagctggcccgtgcccactcgctgggccttaggctggtgtatgtggggaagttctaacggctctcctggtgggaagggatgttgctctgcttgtattcagttggccatctgtagctaccctgttcttcccaactctcctccctagctagagcaccagccctgggaacacggggctttaggtctgcttgaaggtgaggacgtgactcccacatgtaatcaggagaaagggacagaggaagccccagcccccactgtggctatcctgactccagtggccacatctcaggtgccaggggctgtgggagcttgtgccgtccttggccaaacaccccgcaggcaaagatgcacccctgctgatggagagccttctgcttctgccctctggccctctaccataccacttccccagccagaaccggcgtgcagctaggaggaatgggttgcacggcggagggggtgaggtgggaggcgtctcactgctctcagggttcaggtagaatgttgctggttttgaagctcacctgttgtggagtgttctaatcagttttggctttctgagtttttgtggaattaaagtgctgctgctgcgaaggctgaggctg

SEQ ID NO: 84694 - DNA, 1601 bp, Homo sapiens
ccccacctggagtatggagtcgtctcgggggcggcccgggcccgagacggaccttctggctgtagcggaacatcaggccctagtctttggcggcgggccgggccgaacgtcctctgagccgcccgcaggcctccgggtgtccggggaggaagagaccgagaacgttgggggcgcgaaccgccaccccaggacgtccccgaagacgtcaagctgcggcgtcgtccaccggccggaacgggaggctctggagaacgagcccggccctcaagggacgctgtctggggccgggagccgcaggggggcgccgggtgcagagcacgaaccttccctgtcctcccggcacaagaacccggcgccgcccgagggcaagccctcctccgggagggactgccgtcgagggggaccaggcggcgggatggatgttgagcagcaggaggaggaagacaacgacgaggaggcggccgcgggcagcagagccggccgctcgttctccagccgtcttcaggacagccgcagcctggacgggctgagcgaggcgtgcggtggcgccgggtcctcagggagtgccgagtccggcgcgggcggcggacgccgcgccaccatctccagtcccctggagctcgaaggcacagtgagccgccacggcgaccttacccactttgtcgccaacaacctgcaactcaagatccgtctgagcggcgcgcctccacccccgccttctgcccctgcgcggccctgcccagcgcctgcacccacacccacaccggccattccccccatcgaccccgaggtgctgcgggatctggagcggttgagtcgggagctgggaggccgggtggaccgtctgcttcgcggtctgggtggcgcggtgcaggagctgacggcgctgagcgtgggttgcatccagacctaccgcgatgctgtggatcttcagggagtcctggtgggaagtgcccactgaggggaggcctgtgtgttggaggctcttccagatgcgttcagctggcccgtgcccactcgctgggccttaggctggtgtatgtggggaagttctaacggctctcctggtgggaagggatgttgctctgcttgtattcagttggccatctgtagctaccctgttcttcccaactctcctccctagctagagcaccagccctgggaacacggggctttaggtctgcttgaaggtgaggacgtgactcccacatgtaatcaggagaaagggacagaggaagccccagcccccactgtggctatcctgactccagtggccacatctcaggtgccaggggctgtgggagcttgtgccgtccttggccaaacaccccgcaggcaaagatgcacccctgctgatggagagccttctgcttctgccctctggccctctaccataccacttccccagccagaaccggcgtgcagctaggaggaatgggttgcacggcggagggggtgaggtgggaggcgtctcactgctctcagggttcaggtagaatgttgctggttttgaagctcacctgttgtggagtgttctaatcagttttggctttctgagtttttgtggaattaaagtgctgctgctgcgaaggctgaggctg

SEQ ID NO: 84695 - DNA, 1820 bp, Homo sapiens
ccccacctggagtatggagtcgtctcgggggcggcccgggcccgagacggaccttctggctgtagcggaacatcaggccctagtctttggcggcgggccgggccgaacgtcctctgagccgcccgcaggcctccgggtgtccggggaggaagagaccgagaacgttgggggcgcgaaccgccaccccaggacgtccccgaagacgtcaagctgcggcgtcgtccaccggccggaacgggaggctctggagaacgagcccggccctcaagggacgctgtctggggccgggagccgcaggggggcgccgggtgcagagcacgaaccttccctgtcctcccggcacaagaacccggcgccgcccgagggcaagccctcctccgggagggactgccgtcgagggggaccaggcggcgggatggatgttgagcagcaggaggaggaagacaacgacgaggaggcggccgcgggcagcagagccggccgctcgttctccagccgtcttcaggacagccgcagcctggacgggctgagcgaggcgtgcggtggcgccgggtcctcagggagtgccgagtccggcgcgggcggcggacgccgcgccaccatctccagtcccctggagctcgaaggcacagtgagccgccacggcgaccttacccactttgtcgccaacaacctgcaactcaagatccgtctgagcggcgcgcctccacccccgccttctgcccctgcgcggccctgcccagcgcctgcacccacacccacaccggccattccccccatcgaccccgaggtgctgcgggatctggagcggttgagtcgggagctgggaggccgggtggaccgtctgcttcgcggtctgggtggcgcggtgcaggagctgacggcgctgagcgtgggttgcatccagacctaccgcgatgctgtggactccttaggtgaagccgtggacatgagcatcaagggcatgtacaccctgctggcgcgctgcgaggagctggagcgggctctgcagccggttcaggggctggcgcgccaagtccgggatatccgacgtactctggaggtgttggaggccctgtgcaagtgaccaggaggacaggagaggccggtcctggccagggcagggcccagcaggaccctaaggactcttcagggagtcctggtgggaagtgcccactgaggggaggcctgtgtgttggaggctcttccagatgcgttcagctggcccgtgcccactcgctgggccttaggctggtgtatgtggggaagttctaacggctctcctggtgggaagggatgttgctctgcttgtattcagttggccatctgtagctaccctgttcttcccaactctcctccctagctagagcaccagccctgggaacacggggctttaggtctgcttgaaggtgaggacgtgactcccacatgtaatcaggagaaagggacagaggaagccccagcccccactgtggctatcctgactccagtggccacatctcaggtgccaggggctgtgggagcttgtgccgtccttggccaaacaccccgcaggcaaagatgcacccctgctgatggagagccttctgcttctgccctctggccctctaccataccacttccccagccagaaccggcgtgcagctaggaggaatgggttgcacggcggagggggtgaggtgggaggcgtctcactgctctcagggttcaggtagaatgttgctggttttgaagctcacctgttgtggagtgttctaatcagttttggctttctgagtttttgtggaattaaagtgctgctgctgcgaaggctgaggctg

SEQ ID NO: 84696 - DNA, 358 bp, Homo sapiens
aataatctttatttttgtttacagaaaactgaattttgcttataatagaagacttgtttatattactgattgataatttaatggattttgttgaaaatttaagcaaattagaatcccaaagctcttcagtattaaagtattagtatctttttttctaacaagggaaccatagaaaacataaattatattcttcttcttctgataccttttgtatgttacagtttaaaaaactgaaaccacagccaattagcaacacattatgtctaatttaccaaaaggtaagcttcttaaattcccaagagaattaatgcaccctctctccaccactctttgaatctaatagattaagaaatgacct

SEQ ID NO: 84697 - DNA, 660 bp, Homo sapiens
ctagtatactaactactgttatgcttaactctctcattatatatacaaccttatgactttaggggcatttcattctgttcttaggcagctaagaattccccactataaggttttaggactgacttttataaaatacttttggtaatagttacctcttgggatgatctgtaatcttaaaataccacctaaggtatttctggttcattgaatatgattaagcaataactaaagtatgtaaataaatcacttttagcatgtatgtaataataaacatcttcattctaataatagcacctattttctgggattagcatttatactatttgaaatgtctaaagtaggtagatataaccagagattatttgaagaaaatgaatatgtgtaatcactgaaaatcacatttctctgaatccttgcctacctgacagttttttaggagaacagaactgttgctcaaagacttgtctagagagaatgactgactctccagatcagttactcgtataatctgaatatcaccatcttcatgcccactcttcataagctgcttttgagaaagagacagatagctgtatacagtgcatcaaagcaataaatcctagtgtcaagacttttactcaatcacatatcactatagacatgtagagactaaatcatata

SEQ ID NO: 84698 - DNA, 182 bp, Homo sapiens
tgctgggattataggcatgagccagtgtgcctggcctgaagtgttcttctctgtttgctgaaagtatgttcatattgtgttttggtgagttgttaactgggatacagagacgtgtaggacaggccaacctcactggtggaaaggcattgaagactagaatgaaaccagccccatgaagaacg

SEQ ID NO: 84699 - DNA, 516 bp, Homo sapiens
gcctggcgagccgccttacctagctggccaggaattccaggagtcaggcttcctgatctaaatctgtcctggtcccgtcttggctgggtgccaccagcagcaacggcacactccagcttaaatatcagtggggataattctaggccgtttgtctgcctggttcttccaggatagaggcagtgatttcagtaatctcttagggctgggcacggtggctcgcgcctataatcccagcactttgggaggccgaggcgggtggatcacctgaggtcaggagatggagaccatcctggctaacatggtgaaaccccgtctctactaataatacaaaaacaaaattagccgggcgtgggggcaggcgcctgtaatcccagctactctggaggctgagacaggataatggtgtgaatccgggaggcggagcttgcagtgagccgagattacaccactaccctccagcctgggcgacagactccagcctgagcgacagagtgagactccgtctcaaaaaaaaag

SEQ ID NO: 84700 - DNA, 509 bp, Homo sapiens
gcctggcgagccgccttacctagctggccaggaattccaggagtcaggcttcctgatctaaatctgtcctggtcccgtcttggctgggtgccaccagcagcaacggcacactccagcttaaatatcagtggggataattctaggccgtttgtctgcctggttcttccaggatagaggcagtgatttcagtaatctcttagggctgggcacggtggctcgcgcctataatcccagcactttgggaggccgaggcgggtggatcacctgaggtcaggagatggagaccatcctggctaacatggtgaaaccccgtctctactaataatacatataccgggattgaaagcagacgtccatagatctctccctcacaagcgttcccagactgcctccagctgttgctctcccctcccagtctcaactcactgggatgaggttaggtcatgagacaccaaaaccttaaaattaaacaaaaggccaaacaagccttagcttttcttaaagactga

SEQ ID NO: 84701 - DNA, 438 bp, Homo sapiens
tttgaagcagggtcttgctgtgtcactcaggctggagtgcagtggtgcgatcagagctcactgcagcctcgaactcccaggctcaagtcatcctcctacctcagcttccttagtacctgggattacaggcacatgtcaccatgcccatctaatttttaaataaattttttctggagatggggtgctcgctatgttgcccaggctgatctcaaactctaggcctcaagtcctcctgccccgacctcccaaagtgctgagattacaggcatgagccactgtgctcagccccaacaattatttttgacagataatagggatgtctccttgctctctgtgtctggccaagtagccccaggtgacactcgttttttttgtttgtttgtttttgagacggagtcatgctctgttgcccagcctggagtccaatgccgtcgtctc

SEQ ID NO: 84702 - DNA, 478 bp, Homo sapiens
cccgagacctgcacactgtaatccttccccaatcctccctggctcagatacctctccagattccttccccatccaggggtccctgggtgggtgggtcagcagccaggctctatcgattgggaatcagtgccaccttctctggagccctgggtgctgatgccctcagctgcaaatctaggttggcaggggtcccattttccttggcattcaccagcaataaagctccaaggtgctccactcctgaccaccactccccactctggtgctgagtgagaggggctgtcctcagaggaccctgggacctgcctcaggccccctacccacctctgccatgcctaggaatcccacccctgtgtgaatgggactccctttcctccatgtgacacccacaggggtccatgacccatctaggagactttatagcagttgggtgggaggggaatgctcttaatttatcaataaaatattttcagaggag

SEQ ID NO: 84703 - DNA, 317 bp, Homo sapiens
ttattttttagtaatcaagaaaggctggaaaactactgaaaaactgatcaagctggacttgtgcatttatgtttgttttaagacactgcattaaagaaagatttgaaaagtatacacaaaaatcagatttagtaactaaaggttgtacaaaattgtaaaactggttgtacaatcatgatgttagtaatggtaatttttttaaattaatttacccttaagagtatgttagatttgattacctgataatgattatttaaatattcctatctgcttataaaatggctgctataataataataatgcagatgatgttatat

SEQ ID NO: 84704 - DNA, 147 bp, Homo sapiens
tccacctcccaaagtgctgggattacaggcatgagccactgcgcccggccgtccctttgttacttaacaaatgggagcacactgctttttaagcacactgcactttgtttttgtttttttgtttttttgtttttttttttgagacgg

SEQ ID NO: 84705 - DNA, 464 bp, Homo sapiens
ctttatataaaatggaatcatgcagtgctgtgatagaatcataaccactaaagatatccacatcctaacccccagaatctctgaatatgttaccttgcccaacataagggactttgcagatgtgatttagttaaagacattgagacagggagattatgctgtattattcagtgtgcccagtttaagcagaagagtcctttataagagggaggtggaaaaggtaagagtgatgggatgtgaaaaagactccaccttctgttgctgactttgaagattgacaaagaggccatgagccaaggactatggggtggcctctagaaggtgcaaaagacaaggaaacagatactcccctggaacctccagaaggaacacagcttctaccaatgctttgactttagccagtgatccttgtcagacttctacagaattataaaataataaatttgtgttgtttcaagcccatt

SEQ ID NO: 84706 - DNA, 459 bp, Homo sapiens
tgtgcagtgatcaccacaatctaattttagaatattttcatcaccctgtgtctatttacagccactccacatcccgtgcccgcaggcaaacacttatctatttagtttctatagattgattttattactctttttaatagcaacctgtggtccattttggaaaaatacaaacatgtatttaattgtgctttatccaagcacatttagcttttgctgatgttttattttgctgcctgcctactttaaaaaaaattggaaaagattgaaattttgtctttgagccatacttgttaagagtgataagggagttttagctgaagttgtttgtagattttccagtcattacctgtggaactaggagaagaattttggggcctggataattatttatatttgaatagaaactgcctgaggttgttcttgattagatgaaagccccagcatttattgtgtatttta

SEQ ID NO: 84707 - DNA, 1291 bp, Homo sapiens
aagagaaaactcctccaaaagcagctctcactatcagaaaacccaactacagttgtgaacgccttcattttctgcctgaggtctcagtccgtcggcccagactgaagtgcagtggcacaatcatagctcgctgcagcctcgaccttccaggcttaaacgattctcccacctcagcctctcgagttgctgggaccacaggtcactgtgcatggcatcatcctggccccctctagagctccaatcctccaaccagagccagctcttccctcaaaatgctacggcctgtgacaatgctccagaagcctgggacctgctgcacagagtgctgccgacatttatcatctccatctgtttcttcggcctcctagggaacctttttgtcctgttggtcttcctcctgccccggcggcaactgaacgtggcagaaatctacctggccaacctggcagcctctgatctggtgtttgtcttgggcttgcccttctgggcagagaatatctggaaccagtttaactggcctttcggagccctcctctgccgtgtcatcaacggggtcatcaaggccaatttgttcatcagcatcttcctggtggtggccatcagccaggaccgctaccgcgtgctggtgcaccctatggccagccggaggcagcagcggcggaggcaggcccgggtcacctgcgtgctcatctgggttgtggggggcctcttgagcatccccacattcctgctgcgatccatccaagccgtcccagatctgaacatcaccgcctgcatcctgctcctcccccatgaggcctggcactttgcaaggattgtggagttaaatattctgggtttcctcctaccactggctgcgatcgtcttcttcaactaccacatcctggcctccctgcgaacgcgggaggaggtcagcaggacaaggtgcgggggccgcaaggatagcaagaccacagcgctgatcctcacgctcgtggttgccttcctggtctgctgggccccttaccacttctttgccttcctggaattcttattccaggtgcaagcagtccgaggctgcttttgggaggacttcattgacctgggcctgcaattggccaacttctttgccttcactaacagctccctgaatccagtaatttatgtctttgtgggccggctcttcaggaccaaggtctgggaactttataaacaatgcacccctaaaagtcttgctccaatatcttcatcccataggaaagaaatcttccaacttttctggcggaattaaaacagcattgaaccaagaagc

SEQ ID NO: 84708 - DNA, 214 bp, Homo sapiens
cttgagccgaagagttcaagaccagcctgggtaacatagtgagacactgtctctacatacaaaaattagcttagcatggtgacacgcagcggtagtcccagcttctctggaggctgaggtggcagagttgcttaagcctaggaggttgaggctgcagtgaactgtgatcataccacagtaaccagcctgggtgacagagcaagaccctgtctca

SEQ ID NO: 84709 - DNA, 433 bp, Homo sapiens
aggtggcctcagtcttcccacatggaaatgctttggattcatctggaagttagagtcttctgaagaccactgtctccttccagccctcggtgggagtgctgggtcttaggtggacacttgtaccctcggtggggtctttgcacccttcccttgggacacacgtagatatttattttaacatctgctgaaaaaggaagtggtatctgagtccagaacagaaaaccaagcacacctgcccctggatgggaaaggcagggtcagggcccactgagacccatgcagagtttccaggtgtgcactggaagtgaggtcacatgagcagcgtgggaagaagactctgtcaagactctcagaagaacctggagtaattgtgcctgaagctcagcgtgaagtctgaaatatgcaacagaagaaatatatctctatctctcta

SEQ ID NO: 84710 - DNA, 3523 bp, Homo sapiens
cccgcctccctaggcgtggaggagggggggcggctcagccccgcgcccgtgcgcgcgctcgcggccgggttgcagggctgggcgcgcgccccgcgtcccgggcaggaagatggtggcgagcgcgcgagtgcagaagctggtgcggcgctacaagctggcgattgccacggcgctggccatcctgctgctgcagggcctgaaaggaaggcagaggaagccacggccactggaccctggcgaaggttccaaggacacagacagttcagcagggcgacggggcagcacaggcagaaggcatgggcgctggcggggccgtgctgagagcccaggagtgcccgtggccaaggtggtacgggcagtaaccagccggcagagagccagccggcgggtcccacctgccccacctccggaagccccaggccgccagaacctgagtggggcagcagctggggaggcgctggtaggggcagctggcttcccaccacacggagatacagggagcgtggagggcgccccccagcccacggacaatggcttcacccccaagtgcgagatcgtgggcaaggacgcactgtctgcactggcccgggccagcaccaagcagtgccagcaggagatcgccaatgtggtgtgcctgcaccaggctgggagcctcatgcccaaggctgtgccccggcactgtcagctgactgggaagatgagccccggcatccagtgggatgagagccaagcccagcagcccatggatggccccccggtgcgaatcgcctacatgctggtggttcacggccgcgccatccgccagctgaagcgtctcctcaaggccgtttatcacgagcagcacttcttttacatccatgtggacaagcgttccgactacctgcaccgggaggtggtggagctggcccagggctatgataacgtgcgggtgacgccctggcgcatggttaccatctggggcggggccagcctcctgacgatgtacctgcggagcatgcgggacctgctagaggtgcctggctgggcctgggacttcttcatcaacctcagtgccactgactatccaaccaggaccaatgaggagctggtggcattcctatccaagaaccgggacaagaatttcctcaagtcacatggccgggacaactccaggttcatcaagaaacagggcctggaccggctcttccatgagtgcgactcacacatgtggcgcctgggcgagcggcagatcccagcaggcattgtggtggatggcggttctgactggttcgtgctgacacgcagctttgtggagtatgtggtgtacacagatgacccgcttgtggcccagctgcgccagttctacacatacacactgctcccagccgagtccttcttccacacggtgctggagaacagcctggcctgtgagaccctcgtggacaacaacctgcgggtcaccaactggaaccgcaagctgggctgcaagtgccagtacaagcacattgtggactggtgtggctgctcccccaacgacttcaagccacaggacttcctccggctgcagcaagtctccagacccaccttcttcgcccggaagttcgagtcgactgtgaaccaggaggtgctggaaatcctggacttccacctgtacggcagctacccccccggcacgccagccctcaaggcctactgggagaacacctacgacgcggctgatggccccagtgggctcagtgatgtcatgctcactgcttacacagccttcgcccgcctcagcctgcaccatgccgccactgctgcacccccaatgggcaccccactctgcaggtttgagcccaggggcttgccgtccagcgtgcacctgtatttctatgacgaccatttccagggctacctggtgacgcaggcggtgcagccctcagcccaggggccggcagagacgcttgagatgtggctgatgccccaagggtcgctgaagctgttggggcgcagtgaccaggccagccggctccagagtctggaggttggcactgattgggaccccaaagagcgtcttttccggaactttggggggttactggggccgctggacgagcctgtggccgtgcagcgctgggcccggggccccaacctcacagccacagtggtctggatcgacccaacctatgtggtggccacatcttatgacatcacagtagatacggagactgaggtcacgcaatacaagcccccactgagccggcccctgcggccagggccctggactgttcgactccttcagttctgggaaccgctgggtgagacccgcttccttgtgctgcccttgaccttcaaccgcaaactacctctcaggaaagatgatgccagctggctgcacgcagggccaccccacaacgagtacatggagcagagtttccagggcctgagtagcatcctgaacctgcctcagccggagctcgcggaggaggctgcccagcggcacacacagctcacaggccctgcgctcgaggcctggacagacagggaactgagcagcttctggtccgtggctggactgtgtgccataggcccctctccctgcccctccctggagccctgcagactgaccagctggagctctctgtcccccgaccccaaatcagagctggggcctgtcaaagcagacgggcgactcaggtagcagggccccagccagtacccgtggaggacccgggaaattgcaccttacagacagtggaggggtgtcccctcccacaggcaagaaccagaggcccaggctgcacacccatttcagccatcaagaacccacacagacggcagggaaggtggacacagtatgaactactgctgatgtctctgttggggatcagagggctggcgggaacgcgagaagggcaccagcagcattccacacccagctcttcctcaccttcctgtctagtttgaatttcttttttttctttcttttttttttttttttaatttaaaaaggaaaatgggtggttgggagagaaactagaacagaagatgtgcaatagggctcagagcagccccaggaagtgggccatgtctgtggggagcagtggcttgctgagcccacctgctattgttctgcacgaggctgggcctgcctcactctccagggcctcatgccccattctgggcctgtggtgctcgtggctgaggctccacagggctgcaagtgccctgccaggctctaaggcccgaagaacaggtgatatcgggggcgctgcagagctgggctctagcaggacagttcttttgtagccaggggaccctagaagtggggtggggcggctccagggctttccagcataccctgcccctggatgggaaaggcagggtcagggcccactgagacccatgcagagtttccaggtgtgcactggaagtgaggtcacatgagcagcgtgggaagaagactctgtcaagactctcagaagaacctggagtaattgtgcctgaagctcagcgtgaagtctgaaatatgcaacagaagaaatatatctctatctctcta

SEQ ID NO: 84711 - DNA, 3724 bp, Homo sapiens
cccgcctccctaggcgtggaggagggggggcggctcagccccgcgcccgtgcgcgcgctcgcggccgggttgcagggctgggcgcgcgccccgcgtcccgggcaggaagatggtggcgagcgcgcgagtgcagaagctggtgcggcgctacaagctggcgattgccacggcgctggccatcctgctgctgcagggcctggtagtgtggagcttcagcggcctggaggaggacgaggcgggcgagaaaggaaggcagaggaagccacggccactggaccctggcgaaggttccaaggacacagacagttcagcagggcgacggggcagcacaggcagaaggcatgggcgctggcggggccgtgctgagagcccaggagtgcccgtggccaaggtggtacgggcagtaaccagccggcagagagccagccggcgggtcccacctgccccacctccggaagccccaggccgccagaacctgagtggggcagcagctggggaggcgctggtaggggcagctggcttcccaccacacggagatacagggagcgtggagggcgccccccagcccacggacaatggcttcacccccaagtgcgagatcgtgggcaaggacgcactgtctgcactggcccgggccagcaccaagcagtgccagcaggagatcgccaatgtggtgtgcctgcaccaggctgggagcctcatgcccaaggctgtgccccggcactgtcagctgactgggaagatgagccccggcatccagtgggatgagagccaagcccagcagcccatggatggccccccggtgcgaatcgcctacatgctggtggttcacggccgcgccatccgccagctgaagcgtctcctcaaggccgtttatcacgagcagcacttcttttacatccatgtggacaagcgttccgactacctgcaccgggaggtggtggagctggcccagggctatgataacgtgcgggtgacgccctggcgcatggttaccatctggggcggggccagcctcctgacgatgtacctgcggagcatgcgggacctgctagaggtgcctggctgggcctgggacttcttcatcaacctcagtgccactgactatccaaccaggaccaatgaggagctggtggcattcctatccaagaaccgggacaagaatttcctcaagtcacatggccgggacaactccaggttcatcaagaaacagggcctggaccggctcttccatgagtgcgactcacacatgtggcgcctgggcgagcggcagatcccagcaggcattgtggtggatggcggttctgactggttcgtgctgacacgcagctttgtggagtatgtggtgtacacagatgacccgcttgtggcccagctgcgccagttctacacatacacactgctcccagccgagtccttcttccacacggtgctggagaacagcctggcctgtgagaccctcgtggacaacaacctgcgggtcaccaactggaaccgcaagctgggctgcaagtgccagtacaagcacattgtggactggtgtggctgctcccccaacgacttcaagccacaggacttcctccggctgcagcaagtctccagacccaccttcttcgcccggaagttcgagtcgactgtgaaccaggaggtgctggaaatcctggacttccacctgtacggcagctacccccccggcacgccagccctcaaggcctactgggagaacacctacgacgcggctgatggccccagtgggctcagtgatgtcatgctcactgcttacacagccttcgcccgcctcagcctgcaccatgccgccactgctgcacccccaatgggcaccccactctgcaggtttgagcccaggggcttgccgtccagcgtgcacctgtatttctatgacgaccatttccagggctacctggtgacgcaggcggtgcagccctcagcccaggggccggcagagacgcttgagatgtggctgatgccccaagggtcgctgaagctgttggggcgcagtgaccaggccagccggctccagagtctggaggttggcactgattgggaccccaaagagcgtcttttccggaactttggggggttactggggccgctggacgagcctgtggccgtgcagcgctgggcccggggccccaacctcacagccacagtggtctggatcgacccaacctatgtggtggccacatcttatgacatcacagtagatacggagactgaggtcacgcaatacaagcccccactgagccggcccctgcggccagggccctggactgttcgactccttcagttctgggaaccgctgggtgagacccgcttccttgtgctgcccttgaccttcaaccgcaaactacctctcaggaaagatgatgccagctggctgcacgcagggccaccccacaacgagtacatggagcagagtttccagggcctgagtagcatcctgaacctgcctcagccggagctcgcggaggaggctgcccagcggcacacacagctcacaggccctgcgctcgaggcctggacagacagggaactgagcagcttctggtccgtggctggactgtgtgccataggcccctctccctgcccctccctggagccctgcagactgaccagctggagctctctgtcccccgaccccaaatcagagctggggcctgtcaaagcagacgggcgactcaggtagcagggccccagccagtacccgtggaggacccgggaaattgcaccttacagacagtggaggggtgtcccctcccacaggcaagaaccagaggcccaggctgcacacccatttcagccatcaagaacccacacagacggcagggaaggtggacacagtatgaactactgctgatgtctctgttggggatcagagggctggcgggaacgcgagaagggcaccagcagcattccacacccagctcttcctcaccttcctgtctagtttgaatttcttttttttctttcttttttttttttttttaatttaaaaaggaaaatgggtggttgggagagaaactagaacagaagatgtgcaatagggctcagagcagccccaggaagtgggccatgtctgtggggagcagtggcttgctgagcccacctgctattgttctgcacgaggctgggcctgcctcactctccagggcctcatgccccattctgggcctgtggtgctcgtggctgaggctccacagggctgcaagtgccctgccaggctctaaggcccgaagaacaggtgatatcgggggcgctgcagagctgggctctagcaggacagttcttttgtagccaggggaccctagaagtggggtggggcggctccagggctttccagcataccctgcccctggatgggaaaggcagggtcagggcccactgagacccatgcagagtttccaggtgtgcactggaagtgaggtcacatgagcagcgtgggaagaagactctgtcaagactctcagaagaacctggagtaattgtgcctgaagctcagcgtgaagtctgaaatatgcaacagaagaaatatatctctatctctctactctgggctctgtgtttttcctcctgggtgtcaggaagccatcaccattcattgggccttctccagaagtcttagctggtactttggtagccttgagaaggtaaagatctcattcctccagattaagaacagtttagaatccacccagagggactc

SEQ ID NO: 84712 - DNA, 2622 bp, Homo sapiens
cccgcctccctaggcgtggaggagggggggcggctcagccccgcgcccgtgcgcgcgctcgcggccgggttgcagggctgggcgcgcgccccgcgtcccgggcaggaagatggtggcgagcgcgcgagtgcagaagctggtgcggcgctacaagctggcgattgccacggcgctggccatcctgctgctgcagggcctggtagtgtggagcttcagcggcctggaggaggacgaggcgggcgagaaaggaaggcagaggaagccacggccactggaccctggcgaaggttccaaggacacagacagttcagcagggcgacggggcagcacaggcagaaggcatgggcgctggcggggccgtgctgagagcccaggagtgcccgtggccaaggtggtacgggcagtaaccagccggcagagagccagccggcgggtcccacctgccccacctccggaagccccaggccgccagaacctgagtggggcagcagctggggaggcgctggtaggggcagctggcttcccaccacacggagatacagggagcgtggagggcgccccccagcccacggacaatggcttcacccccaagtgcgagatcgtgggcaaggacgcactgtctgcactggcccgggccagcaccaagcagtgccagcaggagatcgccaatgtggtgtgcctgcaccaggctgggagcctcatgcccaaggctgtgccccggcactgtcagctgactgggaagatgagccccggcatccagtgggatgagagccaagcccagcagcccatggatggccccccggtgcgaatcgcctacatgctggtggttcacggccgcgccatccgccagctgaagcgtctcctcaaggccgtttatcacgagcagcacttcttttacatccatgtggacaagcgttccgactacctgcaccgggaggtggtggagctggcccagggctatgataacgtgcgggtgacgccctggcgcatggttaccatctggggcggggccagcctcctgacgatgtacctgcggagcatgcgggacctgctagaggtgcctggctgggcctgggacttcttcatcaacctcagtgccactgactatccaaccaggaccaatgaggagctggtggcattcctatccaagaaccgggacaagaatttcctcaagtcacatggccgggacaactccaggttcatcaagaaacagggcctggaccggctcttccatgagtgcgactcacacatgtggcgcctgggcgagcggcagatcccagcaggcattgtggtggatggcggttctgactggttcgtgctgacacgcagctttgtggagtatgtggtgtacacagatgacccgcttgtggcccagctgcgccagttctacacatacacactgctcccagccgagtccttcttccacacggtgctggagaacagcctggcctgtgagaccctcgtggacaacaacctgcgggtcaccaactggaaccgcaagctgggctgcaagtgccagtacaagcacattgtggactggtgtggctgctcccccaacgacttcaagccacaggacttcctccggctgcagcaagtctccagacccaccttcttcgcccggaagttcgagtcgactgtgaaccaggaggtgctggaaatcctggacttccacctgtacggcagctacccccccggcacgccagccctcaaggcctactgggagaacacctacgacgcggctgatggccccagtgggctcagtgatgtcatgctcactgcttacacagccttcgcccgcctcagcctgcaccatgccgccactgctgcacccccaatgggcaccccactctgcaggtttgagcccaggggcttgccgtccagcgtgcacctgtatttctatgacgaccatttccagggctacctggtgacgcaggcggtgcagccctcagcccaggggccggcagagacgcttgagatgtggctgatgccccaagggtcgctgaagctgttggggcgcagtgaccaggccagccggctccagagtctggaggttggcactgattgggaccccaaagagcgtcttttccggaactttggggggttactggggccgctggacgagcctgtggccgtgcagcgctgggcccggggccccaacctcacagccacagtggtctggatcgacccaacctatgtggtggccacatcttatgacatcacagtagatacggagactgaggtcacgcaatacaagcccccactgagccggcccctgcggccagggccctggactgttcgactccttcagttctgggaaccgctgggtgagacccgcttccttgtgctgcccttgaccttcaaccgcaaactacctctcaggaaaggtaagcgtgcagttctcaaatgaggcccagaagccagacagaataggactcgccagagaggtgacctcaagaagccaaccatcagagctgactcccatccctagagtcagggaagcatggaagggctggggccttcatcttctttcctgtagcatgcagggtcctgcactgcagtgtggtggaaaagggagctttacagtcatgcacacttggtttggaacataactctcacaagttc

SEQ ID NO: 84713 - DNA, 1760 bp, Homo sapiens
cccgcctccctaggcgtggaggagggggggcggctcagccccgcgcccgtgcgcgcgctcgcggccgggttgcagggctgggcgcgcgccccgcgtcccgggcaggaagatggtggcgagcgcgcgagtgcagaagctggtgcggcgctacaagctggcgattgccacggcgctggccatcctgctgctgcagggcctggtagtgtggagcttcagcggcctggaggaggacgaggcgggcgagaaaggaaggcagaggaagccacggccactggaccctggcgaaggttccaaggacacagacagttcagcagggcgacggggcagcacaggcagaaggcatgggcgctggcggggccgtgctgagagcccaggagtgcccgtggccaaggtggtacgggcagtaaccagccggcagagagccagccggcgggtcccacctgccccacctccggaagccccaggccgccagaacctgagtggggcagcagctggggaggcgctggtaggggcagctggcttcccaccacacggagatacagggagcgtggagggcgccccccagcccacggacaatggcttcacccccaagtgcgagatcgtgggcaaggacgcactgtctgcactggcccgggccagcaccaagcagtgccagcaggagatcgccaatgtggtgtgcctgcaccaggctgggagcctcatgcccaaggctgtgccccggcactgtcagctgactgggaagatgagccccggcatccagtgggatgagagccaagcccagcagcccatggatggccccccggtgcgaatcgcctacatgctggtggttcacggccgcgccatccgccagctgaagcgtctcctcaaggccgtttatcacgagcagcacttcttttacatccatgtggacaagcgttccgactacctgcaccgggaggtggtggagctggcccagggctatgataacgtgcgggtgacgccctggcgcatggttaccatctggggcggggccagcctcctgacgatgtacctgcggagcatgcgggacctgctagaggtgcctggctgggcctgggacttcttcatcaacctcagtgccactgactatccaaccaggaccaatgaggagctggtggcattcctatccaagaaccgggacaagaatttcctcaagtcacatggccgggacaactccaggttcatcaagaaacagggcctggaccggctcttccatgagtgcgactcacacatgtggcgcctgggcgagcggcagatcccagcaggcattgtggtggatggcggttctgactggttcgtgctgacacgcagctttgtggagtatgtggtgtacacagatgacccgcttgtggcccagctgcgccagttctacacatacacactgctcccagccgagtccttcttccacacggtgctggagaacagcctggcctgtgagaccctcgtggacaacaacctgcgggtcaccaactggaaccgcaagctgggctgcaagtgccagtacaagcacattgtggactggtgtggctgctcccccaacgacttcaagccacaggacttcctccggctgcagccactgagacccatgcagagtttccaggtgtgcactggaagtgaggtcacatgagcagcgtgggaagaagactctgtcaagactctcagaagaacctggagtaattgtgcctgaagctcagcgtgaagtctgaaatatgcaacagaagaaatatatctctatctctcta

SEQ ID NO: 84714 - DNA, 567 bp, Homo sapiens
cagagacgcttgagatgtggctgatgccccaagggtcgctgaagctgttggggcgcagtgaccaggccagccggctccagagtctggaggtgggacaggtcccccacttgctttctcccaacccccacccagacttggggtagtgggaagagagggacagacaccaagggaggggtaaggttatttttcccagtcatggcagccatggtgatgcccccatgcagacatcctgtgtcaccccccagcctgtgcacactgaggagcacctcctggttggggtatgcagaggacatgcagggagcagggagggaattatcagttccactacaacacaagcccaatcttccagactacagagatttcgcctagaggggcagggacattcgagttgggccatgaaactacacttctgagtggctcctcatagtctttttttttttttttttgagacagtctcactctgtcgcagtggcacaatctcggctcactgcaacctctgcctcccaggttcaagcgattctcctacctcagcctcccgcgtagctgggactacaggcgcgcgccacc

SEQ ID NO: 84715 - DNA, 3568 bp, Homo sapiens
cccgcctccctaggcgtggaggagggggggcggctcagccccgcgcccgtgcgcgcgctcgcggccgggttgcagggctgggcgcgcgccccgcgtcccgggcaggaagatggtggcgagcgcgcgagtgcagaagctggtgcggcgctacaagctggcgattgccacggcgctggccatcctgctgctgcagggcctggtagtgtggagcttcagcggcctggaggaggacgaggcgggcgagaaaggaaggcagaggaagccacggccactggaccctggcgaaggttccaaggacacagacagttcagcagggcgacggggcagcacaggcagaaggcatgggcgctggcggggccgtgctgagagcccaggagtgcccgtggccaaggtggtacgggcagtaaccagccggcagagagccagccggcgggtcccacctgccccacctccggaagccccaggccgccagaacctgagtggggcagcagctggggaggcgctggtaggggcagctggcttcccaccacacggagatacagggagcgtggagggcgccccccagcccacggacaatggcttcacccccaagtgcgagatcgtgggcaaggacgcactgtctgcactggcccgggccagcaccaagcagtgccagcaggagatcgccaatgtggtgtgcctgcaccaggctgggagcctcatgcccaaggctgtgccccggcactgtcagctgactgggaagatgagccccggcatccagtgggatgagagccaagcccagcagcccatggatggccccccggtgcgaatcgcctacatgctggtggttcacggccgcgccatccgccagctgaagcgtctcctcaaggccgtttatcacgagcagcacttcttttacatccatgtggacaagcgttccgactacctgcaccgggaggtggtggagctggcccagggctatgataacgtgcgggtgacgccctggcgcatggttaccatctggggcggggccagcctcctgacgatgtacctgcggagcatgcgggacctgctagaggtgcctggctgggcctgggacttcttcatcaacctcagtgccactgactatccaaccaggaccaatgaggagctggtggcattcctatccaagaaccgggacaagaatttcctcaagtcacatggccgggacaactccaggttcatcaagaaacagggcctggaccggctcttccatgagtgcgactcacacatgtggcgcctgggcgagcggcagatcccagcaggcattgtggtggatggcggttctgactggttcgtgctgacacgcagctttgtggagtatgtggtgtacacagatgacccgcttgtggcccagctgcgccagttctacacatacacactgctcccagccgagtccttcttccacacggtgctggagaacagcctggcctgtgagaccctcgtggacaacaacctgcgggtcaccaactggaaccgcaagctgggctgcaagtgccagtacaagcacattgtggactggtgtggctgctcccccaacgacttcaagccacaggacttcctccggctgcagcaagtctccagacccaccttcttcgcccggaagttcgagtcgactgtgaaccaggaggtgctggaaatcctggacttccacctgtacggcagctacccccccggcacgccagccctcaaggcctactgggagaacacctacgacgcggctgatggccccagtgggctcagtgatgtcatgctcactgcttacacagccttcgcccgcctcagcctgcaccatgccgccactgctgcacccccaatgggcaccccactctgcaggtttgagcccaggggcttgccgtccagcgtgcacctgtatttctatgacgaccatttccagggctacctggtgacgcaggcggtgcagccctcagcccaggggccggcagagacgcttgagatgtggctgatgccccaagggtcgctgaagctgttggggcgcagtgaccaggccagccggctccagagtctggaggttggcactgattgggaccccaaagagcgtcttttccggaactttggggggttactggggccgctggacgagcctgtggccgtgcagcgctgggcccggggccccaacctcacagccacagtggtctggatcgacccaacctatgtggtggccacatcttatgacatcacagtagatacggagactgaggtcacgcaatacaagcccccactgagccggcccctgcggccagggccctggactgttcgactccttcagttctgggaaccgctgggtgagacccgcttccttgtgctgcccttgaccttcaaccgcaaactacctctcaggaaagatgatgccagctggctgcacgcagggccaccccacaacgagtacatggagcagagtttccagggcctgagtagcatcctgaacctgcctcagccggagctcgcggaggaggctgcccagcggcacacacagctcacaggccctgcgctcgaggcctggacagacagggaactgagcagcttctggtccgtggctggactgtgtgccataggcccctctccctgcccctccctggagccctgcagactgaccagctggagctctctgtcccccgaccccaaatcagagctggggcctgtcaaagcagacgggcgactcaggtagcagggccccagccagtacccgtggaggacccgggaaattgcaccttacagacagtggaggggtgtcccctcccacaggcaagaaccagaggcccaggctgcacacccatttcagccatcaagaacccacacagacggcagggaaggtggacacagtatgaactactgctgatgtctctgttggggatcagagggctggcgggaacgcgagaagggcaccagcagcattccacacccagctcttcctcaccttcctgtctagtttgaatttcttttttttctttcttttttttttttttttaatttaaaaaggaaaatgggtggttgggagagaaactagaacagaagatgtgcaatagggctcagagcagccccaggaagtgggccatgtctgtggggagcagtggcttgctgagcccacctgctattgttctgcacgaggctgggcctgcctcactctccagggcctcatgccccattctgggcctgtggtgctcgtggctgaggctccacagggctgcaagtgccctgccaggctctaaggcccgaagaacaggtgatatcgggggcgctgcagagctgggctctagcaggacagttcttttgtagccaggggaccctagaagtggggtggggcggctccagggctttccagcataccctgcccctggatgggaaaggcagggtcagggcccactgagacccatgcagagtttccaggtgtgcactggaagtgaggtcacatgagcagcgtgggaagaagactctgtcaagactctcagaagaacctggagtaattgtgcctgaagctcagcgtgaagtctgaaatatgcaacagaagaaatatatctctatctctcta

SEQ ID NO: 84716 - DNA, 1431 bp, Homo sapiens
aaagtgccttgaacccactgctttactgcatcctaaagttgggaatctaaggcttactgccttgattttataaaactcagttttataggcacagaaagtcccttggattagcccaaggtcattcagcaagctgtgactcagaagtagggctgtgacaggaactggggtacccagacccaactcctgggtctggcctccacggagtctgttgcagggggtgtgcttactgcctgctctgcacccacagatgatgccagctggctgcacgcagggccaccccacaacgagtacatggagcagagtttccagggcctgagtagcatcctgaacctgcctcagccggagctcgcggaggaggctgcccagcggcacacacagctcacaggccctgcgctcgaggcctggacagacagggaactgagcagcttctggtccgtggctggactgtgtgccataggcccctctccctgcccctccctggagccctgcagactgaccagctggagctctctgtcccccgaccccaaatcagagctggggcctgtcaaagcagacgggcgactcaggtagcagggccccagccagtacccgtggaggacccgggaaattgcaccttacagacagtggaggggtgtcccctcccacaggcaagaaccagaggcccaggctgcacacccatttcagccatcaagaacccacacagacggcagggaaggtggacacagtatgaactactgctgatgtctctgttggggatcagagggctggcgggaacgcgagaagggcaccagcagcattccacacccagctcttcctcaccttcctgtctagtttgaatttcttttttttctttcttttttttttttttttaatttaaaaaggaaaatgggtggttgggagagaaactagaacagaagatgtgcaatagggctcagagcagccccaggaagtgggccatgtctgtggggagcagtggcttgctgagcccacctgctattgttctgcacgaggctgggcctgcctcactctccagggcctcatgccccattctgggcctgtggtgctcgtggctgaggctccacagggctgcaagtgccctgccaggctctaaggcccgaagaacaggtgatatcgggggcgctgcagagctgggctctagcaggacagttcttttgtagccaggggaccctagaagtggggtggggcggctccagggctttccagcataccctgcccctggatgggaaaggcagggtcagggcccactgagacccatgcagagtttccaggtgtgcactggaagtgaggtcacatgagcagcgtgggaagaagactctgtcaagactctcagaagaacctggagtaattgtgcctgaagctcagcgtgaagtctgaaatatgcaacagaagaaatatatctctatctctcta

SEQ ID NO: 84717 - DNA, 2874 bp, Homo sapiens
cccgcctccctaggcgtggaggagggggggcggctcagccccgcgcccgtgcgcgcgctcgcggccgggttgcagggctgggcgcgcgccccgcgtcccgggcaggaagatggtggcgagcgcgcgagtgcagaagctggtgcggcgctacaagctggcgattgccacggcgctggccatcctgctgctgcagggcctggtagtgtggagcttcagcggcctggaggaggacgaggcgggcgagaaaggaaggcagaggaagccacggccactggaccctggcgaaggttccaaggacacagacagttcagcagggcgacggggcagcacaggcagaaggcatgggcgctggcggggccgtgctgagagcccaggagtgcccgtggccaaggtggtacgggcagtaaccagccggcagagagccagccggcgggtcccacctgccccacctccggaagccccaggccgccagaacctgagtggggcagcagctggggaggcgctggtaggggcagctggcttcccaccacacggagatacagggagcgtggagggcgccccccagcccacggacaatggcttcacccccaagtgcgagatcgtgggcaaggacgcactgtctgcactggcccgggccagcaccaagcagtgccagcaggagatcgccaatgtggtgtgcctgcaccaggctgggagcctcatgcccaaggctgtgccccggcactgtcagctgactgggaagatgagccccggcatccagtgggatgagagccaagcccagcagcccatggatggccccccggtgcgaatcgcctacatgctggtggttcacggccgcgccatccgccagctgaagcgtctcctcaaggccgtttatcacgagcagcacttcttttacatccatgtggacaagcgttccgactacctgcaccgggaggtggtggagctggcccagggctatgataacgtgcgggtgacgccctggcgcatggttaccatctggggcggggccagcctcctgacgatgtacctgcggagcatgcgggacctgctagaggtgcctggctgggcctgggacttcttcatcaacctcagtgccactgactatccaaccaggaccaatgaggagctggtggcattcctatccaagaaccgggacaagaatttcctcaagtcacatggccgggacaactccaggttcatcaagaaacagggcctggaccggctcttccatgagtgcgactcacacatgtggcgcctgggcgagcggcagatcccagcaggcattgtggtggatggcggttctgactggttcgtgctgacacgcagctttgtggagtatgtggtgtacacagatgacccgcttgtggcccagctgcgccagttctacacatacacactgctcccagccgagtccttcttccacacggtgctggagaacagcctggcctgtgagaccctcgtggacaacaacctgcgggtcaccaactggaaccgcaagctgggctgcaagtgccagtacaagcacattgtggactggtgtggctgctcccccaacgacttcaagccacaggacttcctccggctgcagcaagtctccagacccaccttcttcgcccggaagttcgagtcgactgtgaaccaggaggtgctggaaatcctggacttccacctgtacggcagctacccccccggcacgccagccctcaaggcctactgggagaacacctacgacgcggctgatggccccagtgggctcagtgatgtcatgctcactgcttacacagccttcgcccgcctcagcctgcaccatgccgccactgctgcacccccaatgggcaccccactctgcaggtttgagcccaggggcttgccgtccagcgtgcacctgtatttctatgacgaccatttccagggctacctggtgacgcaggcggtgcagccctcagcccaggggccggcagagacgcttgagatgtggctgatgccccaagggtcgctgaagctgttggggcgcagtgaccaggccagccggctccagagtctggaggttggcactgattgggaccccaaagagcgtcttttccggaactttggggggttactggggccgctggacgagcctgtggccgtgcagcgctgggcccggggccccaacctcacagccacagtggtctggatcgacccaacctatgtggtggccacatcttatgacatcacagtagatacggagactgaggtcacgcaatacaagcccccactgagccggcccctgcggccagggccctggactgttcgactccttcagttctgggaaccgctgggtgagacccgcttccttgtgctgcccttgaccttcaaccgcaaactacctctcaggaaagatgatgccagctggctgcacgcagggccaccccacaacgagtacatggaagctgggctctagcaggacagttcttttgtagccaggggaccctagaagtggggtggggcggctccagggctttccagcataccctgcccctggatgggaaaggcagggtcagggcccactgagacccatgcagagtttccaggtgtgcactggaagtgaggtcacatgagcagcgtgggaagaagactctgtcaagactctcagaagaacctggagtaattgtgcctgaagctcagcgtgaagtctgaaatatgcaacagaagaaatatatctctatctctctactctgggctctgtgtttttcctcctgggtgtcaggaagccatcaccattcattgggccttctccagaagtcttagctggtactttggtagccttgagaaggtaaagatctcattcctccagattaagaacagtttagaatccacccagagggactc

SEQ ID NO: 84718 - DNA, 464 bp, Homo sapiens
aaatacaataaggctattaaaaaccacgctagcattgaatataaggaaatgtttgtcatttagcaagtaaaaaaatcaggttataaaacatgataaataataccttttcttgactaataaatacatacacacacacacatactagaaaagcataccagatattaagtagttatctttgcatcctaggaataactgtttaattatattttttctttgtgtttttctgtattttatttttaaaagtaaacatacattactcttttgatcagaaaaaagtattgcattttttaaaaggaatattttataatggtctaaaaattcttgctcatagttttaaagtaggaataagttttaaattggattcttcccatccaactcttcacggttagcagctacgatattattctcctttgtagggaagtattaatacatcattctggattcccaggatgaccttaactgat

SEQ ID NO: 84719 - DNA, 309 bp, Homo sapiens
acttagccacctgggctccatcttgaaggactggcttagccacccaggatccatctcgaaggacgtttttaggttcacatttgttcacagtatagagatggcaaggaacttgctgaagctcccagctaggaagtaggagagtatagcttttgaatccatgcactttggctccagcacttgcgtactgaagtacaagatggatgataagaggcaagggtccatttgtgagctggagtcacaaattcaagttcaagaacaagagcataactgctcagcatgagacaaggagaggaactctgttattgaaat

SEQ ID NO: 84720 - DNA, 299 bp, Homo sapiens
ttgctgagagagatgatgtttcatgggtgatgtctctggaagagattggataggacccaagcacagagcaagaaattggctttaggcaagtcagatttgtcttatactagttaggagtaaagagaaatggatgatacagatgcagctatgttcgtaggagggaagtggagggaatttctgtgtgatggctttagtaatgtaggcagcaaggtcaactactgacagtgagaggagaaattcggggaggctggtcacagtttgaagtaataggtcatgggaggcagatgtttgtgggtgga

SEQ ID NO: 84721 - DNA, 604 bp, Homo sapiens
ttaatgtataatttctctttatcaacgttgattagtaaaaattattcagtgctccagaagtgaacagttttaccccatggtgtattctttttatgtattaaagatagaactatgatgaattacagttttacttttcaaaagcttaaaattataattagcagtaatacatgaattatatttgttactgtgagttgtcagtagttggtttattaatcatggagccaacttagttcttattatgtggcgtgtaaagatttagggcagatctgcccagtagaacttcctatgttgatggaactcctctatacctttgctgttccatatagaagcaactaggcacgtgtggcgcctgaaatgtgactggtgaaactgaggaactacatttttatttttatttaattgtaattaaatttaaatagccgtaagtgactaagggcactgtattataaagcacagatttgaatcaactcatagcaactctttgcctccttggtgccctttagagcctggccagtaatggagagaattacccctgctggcattttctgtcagaaaagtgtggttctgcataaattatcatttgaataatgcttataggtttcac

SEQ ID NO: 84722 - DNA, 387 bp, Homo sapiens
tgcacacatgaaactaatttagaaccatctagaacagtttataatcagtgaaatatttatataatgaagtgcaaaaattttggaagcagatataacatgctctgggtagtcagaaaagggagctattgataatgtccagagtcaattagaaggcttcactcaaggctgcagtgccgtggcgtgatctcagctcactgcaacctctgcctcctgggttcaagcaattctcctgcctcagcctccggaggagctgagattacaggtgggtgccaccaaaactggctaatttttgtatttttagtagagacagggtttcaccatgttggccaggctggtctcaaactcctgaccttggcctcccaaagtgctgggattacaggcatgagc

SEQ ID NO: 84723 - DNA, 546 bp, Homo sapiens
gcaagagacacagaagcagcttcccctccatgaccccccaggtcaggcagtgtcctctctatgaaacaggaggaagaacacccctcacagagccgtggtgaggctcaggggctgagtgggcattaactctgcccccgtgcctagagttcagactgtgggctcccttgctctgaagctttctacatgactgcaaattgaccccagactgtgaggctcccttctgtccccttagatctggttagaacccccatcaagaggcataatctccttacttttcagatgcagaaaatgaaacccaaggaagggtaactggaacctagggccccagcctgatgcagtctctagggctcctgatacctcttgaatctaaagaaggaaagagctggctaccatcagggaggatactggggaccaaagagaaaacactgaggggctcttgtacatgtctggggtgacagagcccagaacagagcctctccacccatacccattatttctgcagcagaggcaggtttaggctggagaagttccagagcaaggcagtca

SEQ ID NO: 84724 - DNA, 754 bp, Homo sapiens
tgcttgagcccaggaggttgaggctgcactgtgtcgtgttcatgccactgaactccagcctgggtgacaaagtaagaccctgtctcaaaaaatggaaaaggaaaaggaaaaggaaagaaaaaaagtgatagctggctaagaatttcttaaacataaatagagatcaagtcaaagatccaagaagctcagcgaaacctaaacaaaataaataccaaaaaagcaaaacaaaacaacaaaacccaccacactcaggcacatcattttcaaactgctgaaaaccaaagcaaatattggtggcagacagagaaaaatgacatatagtatgcaaaggaacagaggcaagttcagccaatgtctcattagaaaccatgcaagccacactcgagtaacctctttaagggctggggggtggggaactgccaacccagaattctatgtccctggaagtaagtatctttgaaaaattaagacaaaacaactttttcaaacaaacaaaagctgagagaattcattatcagcagccttgtgctaccaaaaaaagagttattggaaagtctttagatacaatataataataccacaaagacagaaatttggatacaaaggaataaagatctctggatatgtttaagatgaaggttaaactattcttatgtttaatcaaactaaaaaaaaatacttaaagcaaaaataatagccaatatactgtagagttttagcatatataaaattaaaacgcagaaacaagatacaa

SEQ ID NO: 84725 - DNA, 453 bp, Homo sapiens
tgaatttgggggacacacaaacattcagtctataacaacaaagatgacacggtagagcagtggagaaaggatggtcttttcaataaatatgtttatggaaaaaatgtatgttgattctctacttcacatcattcataacaaattgtagatggattgttgatctaaatgtgataggtaaaacaatagagcttcctagagaatgccctaggggaatttatgatcttgaatacaccaatatttcttaaactacatacataaagtactaaccataatggaaaaagttaattacatataatacaattaagaatgtttgctgattttaaaaaatctttcaggttgcttggtggatacaatatgtgttgttccagtgatggatacactgaaggccttgaattcgccatagtgcaatatatcaatatagttaaattatactcatatcccatgaatttatac

SEQ ID NO: 84726 - DNA, 411 bp, Homo sapiens
gggtgtctatcctggctctctgggaagtgtctgtatgtgccccggctctcccatcagaccctaagttccctgtgacccaggaaagagtcttgctcctaccagaaaccgttctctgtgaaacagagaggccagatgcagtgactcatgcctgtaatcccaacattttgggaagccaaggtgggcagatcactggaggtcaggagttcgagaccagcctggccaacatagtgaaagcccatctctactaaaaatacaaacattacccgggtgtggtggcgggcacctgtaaactcagctactggagcggctgaggcaggagaatcattttgaacccaggaggcagaggctgcattgagctgagatcgaaccactacactccaacctgggtgacagagcgagactccgtctcac

SEQ ID NO: 84727 - DNA, 451 bp, Homo sapiens
ggtatgtaagtcgcaaaatttccactggataaaaagatgtctgactaaaaatactaacaacaaaaacaacaacaacaaaacaccataaacttatctaaatgagccctctcaggaatttgcgcttcttgacatgacggagtagcctacaagagacccacttgcctgctgagaaccactagaaatacacaataaaagcaatttgcttgaaagcaaaggagagctgccaaagatgtcaaaacttaaactacatcaaaaagagaggctcattgaggggagcctaaccttccgcctgtcactccagtcaccctcgccgggatttgctaattcttagtgttgaaggagaatctgagaagtcagaaagaaggtcgctgctgagaggaagagaattccttggagttttcagcaatctcatagggctgaggaggcagaaaatggagctgagcacagcccc

SEQ ID NO: 84728 - DNA, 438 bp, Homo sapiens
tcctgagtagctgggattacagacacatgccaccacacctggctaatttttgtatttttagtagccaacatggttaaagtggatttcagaagcaggaaaaaatagggagcttattgtctggctgatcgttacagaagtacccagttctgtcattccactcttgctactcagacctttaactacccatgtttatttcaccaagctaaagaagtatactacaggttgatgatccccactccgaaaatctgaaatgcttcaaaatctaaaactttttgagcactgacatggcactcaaaggaaatgctcattggagcattttgtatttcggattagggatgctcaatgagtacgtatataaggttgttccaaaagtatttcagatttccaaatgctgaaaaaatcccaaatccaaaacacctctggtcccaagcatttcag

SEQ ID NO: 84729 - DNA, 414 bp, Homo sapiens
tcacgctgggagctgtagactggagctcttcctatttggccatcttggaacctttttcccagacattctttttaaaatgatagaaagaagtaaaccagtaactatgcatatgagatgaatactggataatgataagagctttacagaaaattaaaattgggtcatttaaaaatattgatgcctgattttatgttactctatatcaggcgcagttttaagtgctcatttaatcttttgaactgctacatgtactatattaaggcaatctcccatttacagatgaggaagtaggggcacagagaaggatgccacctttctaaaatcacatagctattaagtagaaaaggcagaattcaatctcaagcaattttcttccaaggccaatgtttattattaaagtaacataggcttttc

SEQ ID NO: 84730 - DNA, 253 bp, Homo sapiens
tgagatcacaccattgcactccggcctgggtgccagactgagactctgtctcaaaaaaagaaaaaaaaaagaaaccaaaaatgttttagattatgtgccaagatgtttttaataacagctttgaggtataatccacataccatacaatgtacttaaattgtatattataattcagtgatttttagaatattcagagttgtgcaatcatcactgcaatcaattttagaacatttttatcacccctttaaaatcc

SEQ ID NO: 84731 - DNA, 384 bp, Homo sapiens
caggagaatatcggtattttcagaactgccaaatctaagactttgggttcatttttgacctgaccagaatgtattttctggattcagacaggtagtagacaccctcaaacagccataaattctaaaatctttgccattgtcatgagataataaaaaagaggcaggaggagtcaacaggtgtcagtggatcttgtttctggctcccatgtctttgacagtaagactggtgacccagcagtggttatatgcactgactcaggagacagagggcctgggttctaatcctggctctgcctcttaatgacagtgtgactatacactattttggtctcatgtgcctacttgtaaactaaggatgatatattcttaggctcatggagctgt

SEQ ID NO: 84732 - DNA, 2820 bp, Homo sapiens
  misc_feature (214)..(214): n is a, c, g, or t
  misc_feature (222)..(222): n is a, c, g, or t
  misc_feature (234)..(234): n is a, c, g, or t
  misc_feature (241)..(241): n is a, c, g, or t
  misc_feature (245)..(246): n is a, c, g, or t
  misc_feature (254)..(254): n is a, c, g, or t
  misc_feature (262)..(262): n is a, c, g, or t
  misc_feature (274)..(274): n is a, c, g, or t
  misc_feature (281)..(281): n is a, c, g, or t
  misc_feature (284)..(284): n is a, c, g, or t
  misc_feature (289)..(289): n is a, c, g, or t
  misc_feature (303)..(303): n is a, c, g, or t
  misc_feature (315)..(315): n is a, c, g, or t
aggaggagggaagtaggacttcaacatggcggctgcggcactggcggtggctacggtgacggcctggcccggagcgggcagagttggaggtggtggcgttcgctctccctaggggctgtcgggagctcagcggggaccgagcctgggaggccggccggtgccagcacctttcggcttctgagacggcggcagcagcggcattcaggtactcttnttgcccangctggagtgcantggcttnatcnnggctcacngcaacctntgcctcctgggntcaagcnatnctccngcctcagcctcccnagtagctgggantacagtctaaatggcttctaagaagttgggtgcagattttcatgggactttcagttaccttgatgatgtcccatttaagacaggagacaaattcaaaacaccagctaaagttggtctacctattggcttctccttgcctgattgtttgcaggttgtcagagaagtacagtatgacttctctttggaaaagaaaaccattgagtgggctgaagagattaagaaaatcgaagaagccgagcgggaagcagagtgcaaaattgcggaagcagaagctaaagtgaattctaagagtggcccagagggcgatagcaaaatgagcttctccaagactcacagtacagccacaatgccacctcctattaaccccatcctcgccagcttgcagcacaacagcatcctcacaccaactcgggtcagcagtagtgccacgaaacagaaagttctcagcccacctcacataaaggcggatttcaatcttgctgactttgagtgtgaagaagacccatttgataatctggagttaaaaactattgatgagaaggaagagctgagaaatattctggtaggaaccactggacccattatggctcagttattggacaataacttgcccaggggaggctctgggtctgtgttacaggatgaggaggtcctggcatccttggaacgggcaaccctagatttcaagcctcttcataaacccaatggctttataaccttaccacagttgggcaactgtgaaaagatgtcactgtcttccaaagtgtccctcccccctatacctgcagtaagcaatatcaaatccctgtctttccccaaacttgactctgatgacagcaatcagaagacagccaagctggcgagcactttccatagcacatcctgcctccgcaatggcacgttccagaattccctaaagccttccacccaaagcagtgccagtgagctcaatgggcatcacactcttgggctttcagctttgaacttggacagtggcacagagatgccagccctgacatcctcccagatgccttccctctctgttttgtctgtgtgcacagaggaatcatcacctccaaatactggtcccacggtcacccctcctaatttctcagtgtcacaagtgcccaacatgcccagctgtccccaggcctattctgaactgcagatgctgtcccccagcgagcggcagtgtgtggagacggtggtcaacatgggctactcgtacgagtgtgtcctcagagccatgaagaagaaaggagagaatattgagcagattctcgactatctctttgcacatggacagctttgtgagaagggcttcgaccctcttttagtggaagaggctctggaaatgcaccagtgttcagaagaaaagatgatggagtttcttcagttaatgagcaaatttaaggagatgggctttgagctgaaagacattaaggaagttttgctattacacaacaatgaccaggacaatgctttggaagacctcatggctcgggcaggagccagctgagaccaggccctgcctaggccctgccgcagaaccaccatccctgggaggccctgcagagcccacctgtggggaaagagaaggggcagcttccggattttcttttgggggttagaaggtcaggtgtggagactgctcgccagtctctgtgagcctaggccctgagctggggaggtggggaagattcgggcatgtgagtgcccccagaactgtcctggctccttccgtattaaacgcatttgcattttgagaagtgtccttcccacttcagccctccggagagactaccctagtctttctggggtgtttatgtcctcagctgaagcctggcctagttgctgagaggggctggggagatggggcgggagggccagactcagtgctgctgtggagctaggtgcttcccccttcccctgagactggttgactgaactccagtcaagttgagttcaagtgaaagattcttccagggttttattttttcccctcctaacaaagtctcatagtgttaacactggttctgcaatatctctgaggtgcaaagaatgcacttttccctatggggcccagagtttgccttttctgccaggcagtcaccacgcttccctaccccagcctgtttcttttggcttggtttggaccacagtcctctgctacccagggttttagagcccctgctctaggaaacagtttaagaaatcattggccccttcccagcacattgaatgggtaagcagacaggccatgatttagttggccagcactaactccacctctgttctccttgaacagcttcccctccagcccactgctttaggatgacacaatgaataacacctagtcatagaaatcagtctctctggtttgttttgtattatgttgtacatcattaaagatctaaatacaaaggatatacagtcttgaatctaaaataatttgctaactattttgattcttcagagagaactactaataaaaatctaaaaggt

SEQ ID NO: 84733 - DNA, 2201 bp, Homo sapiens
aggaggagggaagtaggacttcaacatggcggctgcggcactggcggtggctacggtgacggcctggcccggagcgggcagagttggaggtggtggcgttcgctctccctaggggctgtcgggagctcagcggggaccgagcctgggaggccggccggtgccagcacctttcggcttctgagacggcggcagcagcggcattcaggttctaaatggcttctaagaagttgggtgcagattttcatgggactttcagttaccttgatgatgtcccatttaagacaggagacaaattcaaaacaccagctaaagttggtctacctattggcttctccttgcctgattgtttgcaggttgtcagagaagtacagtatgacttctctttggaaaagaaaacccaatggctttataaccttaccacagttgggcaactgtgaaaagatgtcactgtcttccaaagtgtccctcccccctatacctgcagtaagcaatatcaaatccctgtctttccccaaacttgactctgatgacagcaatcagaagacagccaagctggcgagcactttccatagcacatcctgcctccgcaatggcacgttccagaattccctaaagccttccacccaaagcagtgccagtgagctcaatgggcatcacactcttgggctttcagctttgaacttggacagtggcacagagatgccagccctgacatcctcccagatgccttccctctctgttttgtctgtgtgcacagaggaatcatcacctccaaatactggtcccacggtcacccctcctaatttctcagtgtcacaagtgcccaacatgcccagctgtccccaggcctattctgaactgcagatgctgtcccccagcgagcggcagtgtgtggagacggtggtcaacatgggctactcgtacgagtgtgtcctcagagccatgaagaagaaaggagagaatattgagcagattctcgactatctctttgcacatggacagctttgtgagaagggcttcgaccctcttttagtggaagaggctctggaaatgcaccagtgttcagaagaaaagatgatggagtttcttcagttaatgagcaaatttaaggagatgggctttgagctgaaagacattaaggaagttttgctattacacaacaatgaccaggacaatgctttggaagacctcatggctcgggcaggagccagctgagaccaggccctgcctaggccctgccgcagaaccaccatccctgggaggccctgcagagcccacctgtggggaaagagaaggggcagcttccggattttcttttgggggttagaaggtcaggtgtggagactgctcgccagtctctgtgagcctaggccctgagctggggaggtggggaagattcgggcatgtgagtgcccccagaactgtcctggctccttccgtattaaacgcatttgcattttgagaagtgtccttcccacttcagccctccggagagactaccctagtctttctggggtgtttatgtcctcagctgaagcctggcctagttgctgagaggggctggggagatggggcgggagggccagactcagtgctgctgtggagctaggtgcttcccccttcccctgagactggttgactgaactccagtcaagttgagttcaagtgaaagattcttccagggttttattttttcccctcctaacaaagtctcatagtgttaacactggttctgcaatatctctgaggtgcaaagaatgcacttttccctatggggcccagagtttgccttttctgccaggcagtcaccacgcttccctaccccagcctgtttcttttggcttggtttggaccacagtcctctgctacccagggttttagagcccctgctctaggaaacagtttaagaaatcattggccccttcccagcacattgaatgggtaagcagacaggccatgatttagttggccagcactaactccacctctgttctccttgaacagcttcccctccagcccactgctttaggatgacacaatgaataacacctagtcatagaaatcagtctctctggtttgttttgtattatgttgtacatcattaaagatctaaatacaaaggatatacagtcttgaatctaaaataatttgctaactattttgattcttcagagagaactactaataaaaatctaaaaggt

SEQ ID NO: 84734 - DNA, 2707 bp, Homo sapiens
aggaggagggaagtaggacttcaacatggcggctgcggcactggcggtggctacggtgacggcctggcccggagcgggcagagttggaggtggtggcgttcgctctccctaggggctgtcgggagctcagcggggaccgagcctgggaggccggccggtgccagcacctttcggcttctgagacggcggcagcagcggcattcaggttctaaatggcttctaagaagttgggtgcagattttcatgggactttcagttaccttgatgatgtcccatttaagacaggagacaaattcaaaacaccagctaaagttggtctacctattggcttctccttgcctgattgtttgcaggttgtcagagaagtacagtatgacttctctttggaaaagaaaaccattgagtgggctgaagagattaagaaaatcgaagaagccgagcgggaagcagagtgcaaaattgcggaagcagaagctaaagtgaattctaagagtggcccagagggcgatagcaaaatgagcttctccaagactcacagtacagccacaatgccacctcctattaaccccatcctcgccagcttgcagcacaacagcatcctcacaccaactcgggtcagcagtagtgccacgaaacagaaagttctcagcccacctcacataaaggcggatttcaatcttgctgactttgagtgtgaagaagacccatttgataatctggagttaaaaactattgatgagaaggaagagctgagaaatattctggtaggaaccactggacccattatggctcagttattggacaataacttgcccaggggaggctctgggtctgtgttacaggatgaggaggtcctggcatccttggaacgggcaaccctagatttcaagcctcttcataaacccaatggctttataaccttaccacagttgggcaactgtgaaaagatgtcactgtcttccaaagtgtccctcccccctatacctgcagtaagcaatatcaaatccctgtctttccccaaacttgactctgatgacagcaatcagaagacagccaagctggcgagcactttccatagcacatcctgcctccgcaatggcacgttccagaattccctaaagccttccacccaaagcagtgccagtgagctcaatgggcatcacactcttgggctttcagctttgaacttggacagtggcacagagatgccagccctgacatcctcccagatgccttccctctctgttttgtctgtgtgcacagaggaatcatcacctccaaatactggtcccacggtcacccctcctaatttctcagtgtcacaagtgcccaacatgcccagctgtccccaggcctattctgaactgcagatgctgtcccccagcgagcggcagtgtgtggagacggtggtcaacatgggctactcgtacgagtgtgtcctcagagccatgaagaagaaaggagagaatattgagcagattctcgactatctctttgcacatggacagctttgtgagaagggcttcgaccctcttttagtggaagaggctctggaaatgcaccagtgttcagaagaaaagatgatggagtttcttcagttaatgagcaaatttaaggagatgggctttgagctgaaagacattaaggaagttttgctattacacaacaatgaccaggacaatgctttggaagacctcatggctcgggcaggagccagctgagaccaggccctgcctaggccctgccgcagaaccaccatccctgggaggccctgcagagcccacctgtggggaaagagaaggggcagcttccggattttcttttgggggttagaaggtcaggtgtggagactgctcgccagtctctgtgagcctaggccctgagctggggaggtggggaagattcgggcatgtgagtgcccccagaactgtcctggctccttccgtattaaacgcatttgcattttgagaagtgtccttcccacttcagccctccggagagactaccctagtctttctggggtgtttatgtcctcagctgaagcctggcctagttgctgagaggggctggggagatggggcgggagggccagactcagtgctgctgtggagctaggtgcttcccccttcccctgagactggttgactgaactccagtcaagttgagttcaagtgaaagattcttccagggttttattttttcccctcctaacaaagtctcatagtgttaacactggttctgcaatatctctgaggtgcaaagaatgcacttttccctatggggcccagagtttgccttttctgccaggcagtcaccacgcttccctaccccagcctgtttcttttggcttggtttggaccacagtcctctgctacccagggttttagagcccctgctctaggaaacagtttaagaaatcattggccccttcccagcacattgaatgggtaagcagacaggccatgatttagttggccagcactaactccacctctgttctccttgaacagcttcccctccagcccactgctttaggatgacacaatgaataacacctagtcatagaaatcagtctctctggtttgttttgtattatgttgtacatcattaaagatctaaatacaaaggatatacagtcttgaatctaaaataatttgctaactattttgattcttcagagagaactactaataaaaatctaaaaggt

SEQ ID NO: 84735 - DNA, 2921 bp, Homo sapiens
  misc_feature (214)..(214): n is a, c, g, or t
  misc_feature (222)..(222): n is a, c, g, or t
  misc_feature (234)..(234): n is a, c, g, or t
  misc_feature (241)..(241): n is a, c, g, or t
  misc_feature (245)..(246): n is a, c, g, or t
  misc_feature (254)..(254): n is a, c, g, or t
  misc_feature (262)..(262): n is a, c, g, or t
  misc_feature (274)..(274): n is a, c, g, or t
  misc_feature (281)..(281): n is a, c, g, or t
  misc_feature (284)..(284): n is a, c, g, or t
  misc_feature (289)..(289): n is a, c, g, or t
  misc_feature (303)..(303): n is a, c, g, or t
  misc_feature (315)..(315): n is a, c, g, or t
aggaggagggaagtaggacttcaacatggcggctgcggcactggcggtggctacggtgacggcctggcccggagcgggcagagttggaggtggtggcgttcgctctccctaggggctgtcgggagctcagcggggaccgagcctgggaggccggccggtgccagcacctttcggcttctgagacggcggcagcagcggcattcaggtactcttnttgcccangctggagtgcantggcttnatcnnggctcacngcaacctntgcctcctgggntcaagcnatnctccngcctcagcctcccnagtagctgggantacagagactgggtttcaccatgttgcccaggctggtctggaactccgtgggcttaagagatccgatccttctgcctcggccttgcaaagtactgagattacaggttctaaatggcttctaagaagttgggtgcagattttcatgggactttcagttaccttgatgatgtcccatttaagacaggagacaaattcaaaacaccagctaaagttggtctacctattggcttctccttgcctgattgtttgcaggttgtcagagaagtacagtatgacttctctttggaaaagaaaaccattgagtgggctgaagagattaagaaaatcgaagaagccgagcgggaagcagagtgcaaaattgcggaagcagaagctaaagtgaattctaagagtggcccagagggcgatagcaaaatgagcttctccaagactcacagtacagccacaatgccacctcctattaaccccatcctcgccagcttgcagcacaacagcatcctcacaccaactcgggtcagcagtagtgccacgaaacagaaagttctcagcccacctcacataaaggcggatttcaatcttgctgactttgagtgtgaagaagacccatttgataatctggagttaaaaactattgatgagaaggaagagctgagaaatattctggtaggaaccactggacccattatggctcagttattggacaataacttgcccaggggaggctctgggtctgtgttacaggatgaggaggtcctggcatccttggaacgggcaaccctagatttcaagcctcttcataaacccaatggctttataaccttaccacagttgggcaactgtgaaaagatgtcactgtcttccaaagtgtccctcccccctatacctgcagtaagcaatatcaaatccctgtctttccccaaacttgactctgatgacagcaatcagaagacagccaagctggcgagcactttccatagcacatcctgcctccgcaatggcacgttccagaattccctaaagccttccacccaaagcagtgccagtgagctcaatgggcatcacactcttgggctttcagctttgaacttggacagtggcacagagatgccagccctgacatcctcccagatgccttccctctctgttttgtctgtgtgcacagaggaatcatcacctccaaatactggtcccacggtcacccctcctaatttctcagtgtcacaagtgcccaacatgcccagctgtccccaggcctattctgaactgcagatgctgtcccccagcgagcggcagtgtgtggagacggtggtcaacatgggctactcgtacgagtgtgtcctcagagccatgaagaagaaaggagagaatattgagcagattctcgactatctctttgcacatggacagctttgtgagaagggcttcgaccctcttttagtggaagaggctctggaaatgcaccagtgttcagaagaaaagatgatggagtttcttcagttaatgagcaaatttaaggagatgggctttgagctgaaagacattaaggaagttttgctattacacaacaatgaccaggacaatgctttggaagacctcatggctcgggcaggagccagctgagaccaggccctgcctaggccctgccgcagaaccaccatccctgggaggccctgcagagcccacctgtggggaaagagaaggggcagcttccggattttcttttgggggttagaaggtcaggtgtggagactgctcgccagtctctgtgagcctaggccctgagctggggaggtggggaagattcgggcatgtgagtgcccccagaactgtcctggctccttccgtattaaacgcatttgcattttgagaagtgtccttcccacttcagccctccggagagactaccctagtctttctggggtgtttatgtcctcagctgaagcctggcctagttgctgagaggggctggggagatggggcgggagggccagactcagtgctgctgtggagctaggtgcttcccccttcccctgagactggttgactgaactccagtcaagttgagttcaagtgaaagattcttccagggttttattttttcccctcctaacaaagtctcatagtgttaacactggttctgcaatatctctgaggtgcaaagaatgcacttttccctatggggcccagagtttgccttttctgccaggcagtcaccacgcttccctaccccagcctgtttcttttggcttggtttggaccacagtcctctgctacccagggttttagagcccctgctctaggaaacagtttaagaaatcattggccccttcccagcacattgaatgggtaagcagacaggccatgatttagttggccagcactaactccacctctgttctccttgaacagcttcccctccagcccactgctttaggatgacacaatgaataacacctagtcatagaaatcagtctctctggtttgttttgtattatgttgtacatcattaaagatctaaatacaaaggatatacagtcttgaatctaaaataatttgctaactattttgattcttcagagagaactactaataaaaatctaaaaggt

SEQ ID NO: 84736 - DNA, 941 bp, Homo sapiens
  misc_feature (427)..(427): n is a, c, g, or t
agcgtgggaggaggccaactctcggggcgctccctagccctgggtgggtggagcgggggaagcggagtacgttggacccggctccgccctaccccacggggccgcctggagaggtgctgggagctgggtggagcttagaggaattaaactttggccctgcgcctcgtccagcctaggttccacccttttctgggaacgtgagtatcaaccaagatcttcacttcaggtcagctccaaggaggctatccttgcccatcttcctaaaatagagctctcaaaacctggctgttttccttcagagcactggcctccaattgctccggtagattgcaaatgacctgctttctttctgttcccgggcgtttggacccctgtcttggaccgctgtcggatagtaaatcccaagtaaggtacctgccgtcggcantttgagctttcttcttggacacctaatacccagagtcctccaggctccggtagattgcaaatgacctgctttctttctgttcccgggcggcatccggacccgtcgggagaagtaaatcccaacgtaaggtacctgccgtaggcagatttcgacgctttcttcttggacacctaatacccacagtcctccaggctccggtagattgcaaatgacctgcttttctttctgttcccgggtggcatcgacccgtcggagagtacatcccaagtaaggtacctgccgttggccagattcgaagctgcattcttggacacctaatagcccgaaagtcctccaggtaagatcccaaaggcaaaggtacctagcggttgaggcgcagttggcagctgttcgtccttggacacactaaggaaccgacgagtcttccagggtaaattcccaagcgagggcacgtgcgcggcagcaaatttgcagcctagcttcattgaacacttattacccgaaggcctctcag

SEQ ID NO: 84737 - DNA, 411 bp, Homo sapiens
agcgtgggaggaggccaactctcggggcgctccctagccctgggtgggtggagcgggggaagcggagtacgttggacccggctccgccctaccccacggggccgcctggagaggtgctgggagctgggtggagcttagaggaattaaactttggccctgcgcctcgtccagcctaggttccacccttttctgggaacgtgagtatcaaccaaggctggagtgcagtggcaccatctcggctcactgcaacctctggctcccaggttcaagcgattctcctgcctcagccccctgagtagctgggattacaggcacgcgccaccactcccagtttacaccccgccactcctgagcaccgcacaccggcttcctcccagtccctcatctgagaactcatgaagccacttggaa

SEQ ID NO: 84738 - DNA, 410 bp, Homo sapiens
cttagggtaactatcccgttgtgtgaagtatgtgggggaaatacttttgttcttggggcccaatctgttccaggtggccatgaacctgcttgtgagcctgtggtgaggaagatgagaacgagaaggggacagctcttgggactggacattagtgctttcaggtcgatctgtgatgcttaccccggtttttgttctgttttcgtttttgggacagggtcttactctgtgacccacgctggagtgcaatggcaccatcacgacttactgaagcctccacttcccgggctcaagtgattctcacacctcagcctcctgagtagctgagaccacaggtgtgcaccaccacaccccactaaattttctgttttttttgtcgataatagagaaccacgggatcgctctagatacac

SEQ ID NO: 84739 - DNA, 295 bp, Homo sapiens
ctcacgcctgtaatcccagcactttgggaggccgaggcaggtggatcacttgaggtcagtagtttgagaccagcctggccaacatggtgaaacctcgtctctactaaaaatacaaaaattagccgagcctgttggcggttgcctgtagttcaagcgattctcctgcctcagccccctgagtagctgggattacaggcacgcgccaccactcccaggtatgttttagatttatgtatgtatgaatgtactagatcccacatatatttcttcctgtggttataagtcaagtgttttg

SEQ ID NO: 84740 - DNA, 985 bp, Homo sapiens
agcgtgggaggaggccaactctcggggcgctccctagccctgggtgggtggagcgggggaagcggagtacgttggacccggctccgccctaccccacggggccgcctggagaggtgctgggagctgggtggagcttagaggaattaaactttggccctgcgcctcgtccagcctaggttccacccttttctgggaacgtgagtatcaaccaagcaaggtaggagaacgtcgcatttagggagggtcaggccctctggcctggggtagatctcgggactgcccgagggcctctgacaacttttcagcatctgccccagggctgccccagctggagtttttgggacgcttttgtgggggcaccgctgagtccggatagtgggacccaagtcgtcctgctcggcccctggggaataatcgtgtggggcgcaaggtctgtgggaagggacttggagaggagggaagatgtcacgggagtctgcacagggtttccatgtgttccaattttgtcccataattgaaagcttgtggcattctgtggcggacggctacggagctagctcttccctttactatttcgcacttggtcttggaaaagtatgttgtcgctttaagatgaagttgaaattttatccctggtgctagagggtcacacaaagggagtttcccacctgccccacctgttttttgaaggactttacacccaattactaagtattaaaacaaaacaggtcctgcatggtagctcatgcctgtaatcccagaactttgggaggcaactactgaaaccctgtctctacacacacacacacacacacaaattaaaaattaattgggtgcggtggtgcctgcctgtaatcccaggtaggtggggacttacggtgacaacaacattatcggctatttttgtaactatttgtagagacgggtttttggcatgttgccaggtggtctacagtcctaaatcagtgactactgcttggctcaa

SEQ ID NO: 84741 - DNA, 702 bp, Homo sapiens
agcgtgggaggaggccaactctcggggcgctccctagccctgggtgggtggagcgggggaagcggagtacgttggacccggctccgccctaccccacggggccgcctggagaggtgctgggagctgggtggagcttagaggaattaaactttggccctgcgcctcgtccagcctaggttccacccttttctgggaacgtgagtatcaaccaagcaaggtaggagaacgtcgcatttagggagggtcaggccctctggcctggggtagatctcgggactgcccgagggcctctgacaacttttcagcatctgccccagggctgccccagctggagtttttgggacgcttttgtgggggcaccgctgagtccggatagtgggacccaagtcgtcctgctcggcccctggggaataatcgtgtggggcgcaaggtctgtgggaagggacttggagaggagggaagatgtcacgggagtctgcacagggtttccatgtgttccaattttgtcccataattgaaagcttgtggcattctgtggcggacggctacggagctagctcttccctttactatttcgcacttggtcttggaaaagtatgttgtcgctttaagatgaagttgaaattttatccctggtgctagagggtcacacaaagggagtttcccacctgcgacctatgagggacctctagaacaccacac

SEQ ID NO: 84742 - DNA, 1112 bp, Homo sapiens
  misc_feature (598)..(598): n is a, c, g, or t
agcgtgggaggaggccaactctcggggcgctccctagccctgggtgggtggagcgggggaagcggagtacgttggacccggctccgccctaccccacggggccgcctggagaggtgctgggagctgggtggagcttagaggaattaaactttggccctgcgcctcgtccagcctaggttccacccttttctgggaacgtgagtatcaaccaaggctggagtgcagtggcaccatctcggctcactgcaacctctggctcccaggttcaagcgattctcctgcctcagccccctgagtagctgggattacaggcacgcgccaccactcccagcaggaaactgctcaacagtcacatcttgaaagtaacttgaggcaactgcaggagggctgcatggcgggaaagaaattgctgaaaacaggctgggtgagctggctcgtacctgtgatcccaacactttgggaagtgaagttgggcggatcacttgaggctccggtagattgcaaatgacctgctttctttctgttcccgggcgtttggacccctgtcttggaccgctgtcggatagtaaatcccaagtaaggtacctgccgtcggcantttgagctttcttcttggacacctaatacccagagtcctccaggctccggtagattgcaaatgacctgctttctttctgttcccgggcggcatccggacccgtcgggagaagtaaatcccaacgtaaggtacctgccgtaggcagatttcgacgctttcttcttggacacctaatacccacagtcctccaggctccggtagattgcaaatgacctgcttttctttctgttcccgggtggcatcgacccgtcggagagtacatcccaagtaaggtacctgccgttggccagattcgaagctgcattcttggacacctaatagcccgaaagtcctccaggtaagatcccaaaggcaaaggtacctagcggttgaggcgcagttggcagctgttcgtccttggacacactaaggaaccgacgagtcttccagggtaaattcccaagcgagggcacgtgcgcggcagcaaatttgcagcctagcttcattgaacacttattacccgaaggcctctcag

SEQ ID NO: 84743 - DNA, 743 bp, Homo sapiens
agcgtgggaggaggccaactctcggggcgctccctagccctgggtgggtggagcgggggaagcggagtacgttggacccggctccgccctaccccacggggccgcctggagaggtgctgggagctgggtggagcttagaggaattaaactttggccctgcgcctcgtccagcctaggttccacccttttctgggaacgtgagtatcaaccaagaatgaatctcgctgtgttgtccaggctggagtgcagtggcaccatctcggctcactgcaacctctggctcccaggttcaagcgattctcctgcctcagccccctgagtagctgggattacaggcacgcgccaccactcccagcaggaaactgctcaacagtcacatcttgaaagtaacttgaggcaactgcaggagggctgcatggcgggaaagaaattgctgaaaacaggctgggtgagctggctcgtacctgtgatcccaacactttgggaagtgaagttgggcggatcacttgagggtcttactctgtgacccacgctggagtgcaatggcaccatcacgacttactgaagcctccacttcccgggctcaagtgattctcacacctcagcctcctgagtagctgagaccacagagacggggttttgccattgttgcccaggctggtctccagctcctaaactcaagtgactacctgcttgggctccaaagtgctgggattacaggcgtgagacacgggcccgggccg

SEQ ID NO: 84744 - DNA, 858 bp, Homo sapiens
gaaggttaaaagttacaaaataatttgcaagtgaaaatattttgctataactttaaaattttatttaagtaaataatatgtaactaaaaagtaaagcatcaaacaaggaaatatttgtgtctaatacttaggaaaataataaatgtcaatatttacagatgctgtgattatgtaacccactcctaatcactcctaatcagtcgtaatagagatattaaaagtgatcatataatatgaataaaattaagataaaagtataaacttaggtcaaccttctacataactccaataccaaaatagaaaatattttaggaataatattgaatcctcaatagtagcaacaagtaaaagatataaaatatataatcttttttttacaaagtatggttgcaaataagtagtatgaatatgaagaccactaaaacacttcattgagagagtttaggtttgaataaatgagttacaatgctatgtttttggatggcccatctcagaattgcaaatctgtcaggtttttcagaagtatttatagatttgatgcagtcccagtcaaaacaccttctcattaaaaaaaaattgataggtataatcttggcaaaagttttctaaatcaacaagcatcataaaggttacagtgaatcagacattctgctacattgccactggcatggtgaatcagtacttcccttgtgaaggaaaatttgtcagggaagagtactcacaagcctttagattgtgcagcccatatgtccctgaaatcatacttctgagaagaaattccaaggatatcatagcgagtcatgaattgcaatacttaccatggagtttttcatacacctggaaatacacagatgacca

SEQ ID NO: 84745 - DNA, 772 bp, Homo sapiens
gccgtgagcaccagctccgcctatcccctctgcagggcagaagggacagtgctgcgggaggcggaggtgctgtggctctgggaaggctgaaaagggacggctgcaaaggagaagagcttcgagtcctttccatcaggagaaaaacccggtcagctgtggaggagcactgcacaggagtcagaaagtggagtctgggcgtgaccttgcacctgaccagcctggggctctaggtccgccacatctggactaatctcctgtgtcctgagctcccaggaccccagaggcaagcatggaggggccacgctggcagaacccacagtggcttaggacgagctcctgcacagcggcctgtttcccaattgcatcgtgtatctctttgcctctcttggctcagccatggccccagccccaggccatccaaggggcagcctggtgaggtttcttcaactttgctaatgacttgacctacagtcttaagtcaagaaggtgtcgctctcctttgtgatggctggacgcacaggagctgtggtcaggatggggctagaggagctgaaatcccagggcaacaagggtatttaaaaacacatcgcaggagaaacagctaaagagtcttggaaccaggaatcataagctgtttgatgggatgaactatcttgggagtgatgaggtccccatcactgaaagtattcaagcagagagagtcatggaattaggagacggaagagcatcagacactgaatgaagtctgcactacatgagatgaagaaccctt

SEQ ID NO: 84746 - DNA, 382 bp, Homo sapiens
gagcattattggtccaagagtcattattttgaattatttcataacaaaattcataaaatatacttgatttatccttgatccactctcccaaaagaaaaacaatacaatagggaatacagcaaaaaaaaaaaaaaaaacccaaaaggctgaaagtatattttataaagcagtaacctacgtaaaactatcctgtctctttaaagctttatagcacttgagccagatccaaaatagaagaaaacttgagaaagagagtgagagaaaattaagtttttgtcttcatgaatgttcatgtttcaaacctaaagtgctatcaagaaaatctttgtttttttctgaagagatggtatcttactctgtcacccaggctggaggcagtaac

SEQ ID NO: 84747 - DNA, 156 bp, Homo sapiens
aagttgctgggtccctttttttgccgggtagtcttccattcactgtatggatgtaccaaagattacttactcatttaccagtgggagaagttttcagtgtttccagtttgggggtattacaaacaaagctttatgaaacaccgctatacaagtttt

SEQ ID NO: 84748 - DNA, 456 bp, Homo sapiens
actctttttaaaatcagcttgaattttaagttctggggtacatgtccagggtgtgcaggtttgttacataggtaaatgtgtgccattgtggtttgctgcacagatcaacccatcatccaggtattaagcccagcacccattagctgttcttcctgatgctgcccctcctcttgccccccactccagacaggccactgtgtaggttgtcccccacatgtccatatgttctcattgttcaactcccatttataagagagaacatgtgatgtttggtatatgctcatattcagtctgatattttttcttttaattatctcttataaccatatataatctaattattgattttttaggtgcaattatatcatttttttcttggcttctcctatttctcctacatggtatgtttctttcactgtctactccattttttatcatcatacatttttccttagc

SEQ ID NO: 84749 - DNA, 345 bp, Homo sapiens
tttgttccaaatccttagaatttccagagcagtaagagtgtcttttgtatgctaacaagatgactcctggctggggcctctagattgcctcaggataagggctgacagcccaaaaaaccacaaggcaggaggctagaacttctttggggattggggtaggatgtctcttaatattttgcccagactgggtttgaacttgcaatcctcttgcctcagcctcccaaatagctgggaatacagggctgggagtactgttgggcaccaccatgcccagcaagggctggaactttcagctccatccagctcaccccacccccaaccctccagggagaggagaggggctaa

SEQ ID NO: 84750 - DNA, 652 bp, Homo sapiens
ttcagttgtatgaagtacatttatattgttatgcgaccatcatcaccatccatctctagaacttttttcgtcttgcaaaactgaaactctatatccactaaacaatcaatccccattcccctagcccctgagaaaaccaccattctaccctgtctgtgattttaactacctcaatcatgcagcatatgcctttttgtgactggcttattgcacttagcataatgtcgtcaaggttcatctatgtagtagcaggatttcattgttaaggcttgataatattccactgtgtgtatacaccacattttgcttatccattcgtcaatggacagtgttgcttccatgtttgagctactgggaataattctgctatgaacatggatgtataaatatgttagagacactggatttggcactaattttttggatatgacactaaaggcaaggcaactaaagaaaaagacaaacgactttataaaaattttaaaaattggtgcatctaaagacattatcctattgataataacattatcctattgataataaacaggcaaccagcagaataggagaaaatatttgcaaattgtatatatgatgaaggattgatatccttgatacagagagaactcctaaaacccaacaacgagaaacctga

SEQ ID NO: 84751 - DNA, 196 bp, Homo sapiens
cagcatgtccggtggaagagccaggtatctctgaagccagatggacctgggttcaatcccagctccaccccttactcacactgtgaccttaggcaagcatcctggcctctgtgcctgccttctcagctgtacaataggatagtgaatcccaccgcaggggagcattgtggagccgaagcgaggcaagctgaaatga

SEQ ID NO: 84752 - DNA, 502 bp, Homo sapiens
tgactctagcaggatcttatccccgggtctgggtagtggacgttggtagtcaggggccctctccatggcggggaccaggctaggccactaactgagctgccataaaccctcggcatccaggagttcccaggccagggctctgaccaggagggcttcctggaggagatgggctgtagaataaagcagaagggaaataaatgcataactgtccattcactcatctaacagacatccccagagggctccctcctggtcagagccctgtgctggacaggactaggcacccagacagagtactgcccccacctgctgccagccctgggggaaagacagacaagtgcccaggtcactgtggctgtgtgctcgagcagtgctgtaatggtggaagggtagacagtgaggggccaactttactgatagcccccactttactgatatcccccacctcctagccaaagaagttggggattgatttatgggagggagcagtttggcatcaagg

SEQ ID NO: 84753 - DNA, 1926 bp, Homo sapiens
  misc_feature (1277)..(1277): n is a, c, g, or t
gaaggatgcatctagtgcaggacccattcatcaagagatgtaagtacattcttcagcttagcttttcaagcatcaagtagtgtttctattctgtatttcagaagatattatggcatagtttaaaggggtgctagcataggacttaggaagactttttttcaaatcattgctttgattttatcttcataattgtaaaaaatcatgttatttttctgttcctgttttctgaaggaaaaaaacatcttcttctaggtttgatataatgtttcagtgagaacagcacacagtgggagtggcccagtgcctggcctttaaacatgcttaataaatgttacatgaatactgtatcctgctttgatcaccactggcattttgtaatggaattagttcttctttttttttttttcttcaacttttattttaagttctggggtacatatgcaggatgtgcaggtttgttacataagtgaacatgtgccgtggtggtttgctgcacaggtcatccatcccatcacctaggtattaagcccagcatccattcgctgttcttcctgatactctccccaatccaccatccccctgcctcctgccacatgccccagtgtgtgttgtttccccccatgtgtccatgtgttctcatcattcagctcccacttattagtgagaacacctggtgtttggttttctgttcatgcattagtttgctgaggataacggcttccagctccatccatgttcctgtaaaggacatgatctcatttgtaatggagttagttctaaatggaccatttatattgttcaacagacactagagaatactattcattttgcatgattctttggtcaaggacatactgtaagctgcgttagtgttctccttggttaatatctgaactgaccatgtcactccaactcttatagaccagaattcatttataaagcagaaagataagccaatatgagagaggttatgaagctgatgtttgatttctggtctcctgcgtggagcgatgggcctattgccaaccagagttggtcgggaaaaaggaaagatgactcctaccagtgtacttacgctttatgatcttgaatattttcagtgtttaaggaatctcttccttctttgatctccactgcatgaagaactctgttgcaggtgttaacaaggaagtttgaaatagaaagccagaacctgccccccaaagatctgacagtagtagaaggagatccattatgaagaaggtataatggcaacaaaagaataatcacaaattacntgtgtgtgtaatatgtgttgtgtggtgtgggtcaaggagatgaggaaggtggttagggaagactttatggaggaagtgagctgtcaacaggaattgaaggtgagaagaaaagttggggggaatccatgttaatgactgtctcagtcatcttaaactaggttatgctgtgatagcaaaaccccagtggttgcaacagcagaggcttattgcttgctgtgctgtgtgtctactgtgggtctgctatagttctgctccttcctgtcttctgtcctatacccaggaagggtggaggaggaaaggcaaacctggcaaaccattcataggctctaagcttatgcttggaaataacaggtgtcacttgtgcccacatttcattggccagtgcagatcacatggccacacctgagtttgcatataaggaggcatccttcttctgtagagactggtaccacaagtcatgtggccaaggctgaggtcatggggcaggcagatgacacatagtcctcttctagggaggggcagtgaatcatctaccaagacagcaatcaagaagggcaataatgatgcattgacaggcagggtttcccacttaaaatgttttaaaactgaaagtctcttgttcaagttggtgtttggattaaaaaaaaaa

SEQ ID NO: 84754 - DNA, 266 bp, Homo sapiens
atgcccaagtgtcccaagtgcaacaaggaggtgtacttcgccgagagggtgacctctctgggcaaggactggcatcggccctgcctgaagtgcgagaaatgtgggaagacgctgacctctgggggccacgctgagcacgaaggcaaaccctactgcaaccacccctgctacgcagccatgtttgggcctaaaggctttgggcggggcggagccgagagccacactttcaagtaaaccaggtggtggagacccatccttggctgctt

SEQ ID NO: 84755 - DNA, 457 bp, Homo sapiens
actgtttttttctttataacatatatctttataggggatagtttttttaaagacataaattttcttttctgaagatggaaacatacatattattaaatcatacttccatggtaaaacactgcctaaacacttgcactttagaaacttcacatcctacaatgtttccatcacttagccagtgtctccatcttattaccttgaattactctaagaaaatgaatgatttactgagaatttttttaatgataatttaatttccttaagcttttataatcaaaatcattgtaaaagcagactgttaccaaaatgagcaactccttcatcttattccaaacatttttatattttgctattcaataaatttaagtctatcttagaccaatccatgatagtaggattggaagaggaggtagaggttgactagattagcattcaggttaatagactatgaatagtg

SEQ ID NO: 84756 - DNA, 267 bp, Homo sapiens
ggagaatttgagctaggtgtcttcaagttacctataaactttgaggttttattaaatatgccgaggtttacaggtggaagaacaaaaagctaattgagtgaaacaaactggttaacttgataatagtttttgccttcctggataaagagaaatgagtattaagtgagaaggctatttaatgaagggctttaaaccacactgtaatttggtagattcagcagctttaaaaattggcataccttctgacatggaaattccctttaaaga

SEQ ID NO: 84757 - DNA, 658 bp, Homo sapiens
ttttgaaagatttaaattataagaaaacgtgtagtacatgttttctaaatgccatttccaatattcgtttctttgtgtaggcccacatttttatctggtatccttttgcttctgcctggaggactcttaagatttcttgcagcatgggttggtgaattcttttagcttttgtattttttcaatgtccttatttcactcacagttatgaaattttatttttgcatagaattctagattaactttttttctctaggtactttaaaaatgttgccatttatgaagcattgtcatttaaaatatcacctttctttcctatgtttgtaaatatggcgtaaagccggtttcttgtgctggttatacaattttcagaatgtgtatttaaatttaaaatattaaattgtactaaaaaactaaaaatattaatcatgaatgtcctagattcatcttaagttccaacagtacacttaaagtgtgcccaacctgagggtcaaacctacttgctgacatggaatttgtgtttgtgagagcctagtgattttccttacatctgaatgtcttcattgcaaaaggaaacgtttttctttgccaaaatactttaaaatattcttacttcaattaagtgcattaaaaacaaatttctcagttgcatccctgaaat

SEQ ID NO: 84758 - DNA, 413 bp, Homo sapiens
atttgaaaattaagagagatgaaagattatgaaaagttttcctcccattctgttccctatcttccctgtttccatgacaacccctaaaggtaactattactagtttcttttgtattttttcagagtttctaaaattttatatgtataagcaagcatattaaatatagattatgtctttgtcatttataaaaaagatatcattcttttcttattatttgtgcccttgcttttttgcataacaaaaataccttcccattccacacatagagagcttcctcattaaaattttataggtatatagtgttacattttatggatttatcctaatttgtttattcaatccctgttgatggacattgtgcttgttttcttccattcactattagagctgtagtgagttaccttaaactgtc

SEQ ID NO: 84759 - DNA, 470 bp, Homo sapiens
ggggagtggagagagaacgcatggaaaaaagtaaattaaataccctgctccttgagaagaaacaattcttgggaaggtgctgtatgatcaaacactgggaatgcttcttggtatcttttaattttttttttaacacagacgcatttggatatttcaaccaacagtttgtaatataaggataaattttatggacgtagatatccaccttctctctccactcccagggagagagaaagaaagacaagaaaagaaaattcaaaattcatgcaaacttcgtgttgcagcctaaaactgtctacagtatatcaaagcaaaggcatgtaaattcatcctctaaatacaataagcaggtgagaagcaaaatcaaaaataaatctcactagataaaaatggaaagcatttaacacacaatcgtacaaggtgaggagtattttttattaaaagctttttagttactttctctctccact

SEQ ID NO: 84760 - DNA, 538 bp, Homo sapiens
tgagttccccttttctgcagtctatttttccatacatccaatttatttaacaaagtggagcctcatctgaagcatttcctcacctgaaaaatggggataaacaaatgaatctctagcgctgtagaaggcaatcatgttatttactcagcccacagcaggccatgaaggaagctcctcatcttcctgatagctgcaaggccgtctctgtgctgggctctatgtggtgccttatatgccctagattcactctccacccttcagctttctccaccctcttctgggccccaggaatctgtcctctgggcagattcctgagacagtgccactgggctcccttgtcctctggtttgctgttgggtttggccaatgggaggccctgataggagattggaaggagaaagaaaggagagacacaccgtttaatttcctgcttcctccctgccagcagcagctgctgctgctctaacaaggcctgaagactcttctcagggagccctctctttgagctacttcttattctgggttccagtaactgcct

SEQ ID NO: 84761 - DNA, 210 bp, Homo sapiens
ctgcaactgaatattcaatgggttaacaggagagggctcctagccaagaatggggtgactccagaaaggcatgtgggaggaggtgacgtctgagctgaagcccaaagaacagtttgtaaatcactgggtttggatgcggaaagagtgtcctgggtgaaggggacagtatgtgcaagactcggaagcaagactgacgtgttccgaaagcaa

SEQ ID NO: 84762 - DNA, 570 bp, Homo sapiens
ttttttatatgaggaggtaagtgggccagctctctgctttttagggagagacgtttattttctaaggctgtactcaaacttgctctttgttctagagaaagatatctttatcttccaaggctgttcgctgtacaaatgtccttgaaagtctaaaataaagtaatatgttcacaaaagacctgaaggtcttttcagagatctttataggcactgaaatagtggggaagatttagttattttgagaatgcaaaagtaaatttattttttttctattaaattttactttcagcacagtggctcacacctataatcccaatactttggaggctgaggcaggaggatcacttgaggccaggagtttgaggccagcctgcgcaacacactgaaaccctgtctctacaaaaaattaaaaaaaaaaaaattagccgggcctgggagcacatatctatagacacagctgctcggggtctgatgtgggaggatcgcttgagcccaggagtttgaggctgcagtgagctatgattgtgccactacactccagcctgggtgacagagcatgaccctgtttct

SEQ ID NO: 84763 - DNA, 1346 bp, Homo sapiens
agtcatttcaagtggggtggggagttaggagtggcagtgtctaggactaattctcacctggaataaggacaggctctgatgggttaaataccttttgatttgcattgtagttgctttaaaccggcttcagctgaatctcttcctgcaggtaatcacgtgcacacacacaccaccttcctgagctctttgtgcctttctctcagaaggttagcttttctgggagggacctttctgttgagctcttggccaccccgacaggttcaccttgcagatgcagaaagcagagtggacgcggcagccttaagcagcggggctgcgtgagctccaagaactttcctgtgggctttcttgggagcctcaagttggagctggagtctccttggtttacaaacccccgtggtgtgagcgtacagagcaggcgggtccactcattgtgctccaaaagtgagtgtgacatgtttggtcagcagcaggcttcaatttggctctacggggattgcagaattggtgtgtaagttatctttaaattggccgattgttgagcataagtataaatttcctctgtttgtttgggaaggacggtccttagtaaggatgtgatggccagccagtggctccagtttcccgtggaggtggatgctggcccttctctcgggccagctgtgcaccaccagcccatccagccatctggactatatccgtcagttcagtcttccactcgctaatctttagctggtacttgtggctggaatgattctcagtgtggtcagaaatcatccatcctgtgggtatgggatagagcggagctgcaggaatctgccctgactggctgctgtctttcaaagacttgctttcatgtgtacgttcttaacaatgaacaccggtgcacagctgggcatggcggcacacttctataggcacagctactctgaaggctaaggcaggaggatcacctgagcccgggagttccagaccagcctgggtaacgtagcaagacccctgtctcaaaaaaaaaaaaacaaaaaacaaaaaaacggaaagaaaacctacacacaaatgaggccctggccttggctagtgatataaatcagaccaccctgatacttacccactgcagagaccacagggagctctgacaggacacccacaagctgctaccagcttcctggacgtaaccctttccacctattctgtcttcacgcagagttcatggtcctatccctctttgcaaatttagctctctctgcaagaagggtacctcttcaagtatgttttccagaaaaatcattcttttccccaccagaccagctctttcaacccagaaaaattaaagttgtaaattcttc

SEQ ID NO: 84764 - DNA, 248 bp, Homo sapiens
tacatgactgcgtacatttgtcaaaactcatacctaacttaaaaggttaattttactgtgtgtatattatacctcaataaacctgacttaataaataaaatccactaatgcccttcaaccatggttaacacatatcaagctatataagtagtcttatggaaacccctgtcaccggaattgagtgccagcttacccaatccatttgggtggtgaaggttggtaattacagtatagcatagctctctcta

SEQ ID NO: 84765 - DNA, 285 bp, Homo sapiens
gggattcactgttagattaatgttccctttctaaaattaaagtgaattcagttttaagaatttcaggtcttccttggctgtgacaaaatcatgctctggtatttttcagtttaggaaagaagagaactttgacctgaactactcttagatttttggcagggcacagatctagtagtaaacaccgtcttacccttgagactctgttctcccagctgtgaacagctattgcaccactcccaagtctaccactctggagagctctgaggaggaacaaggtttatttgt

SEQ ID NO: 84766 - DNA, 599 bp, Homo sapiens
  misc_feature (196)..(196): n is a, c, g, or t
atcaagttgacactcagtattaaccatcacaataagagagaattggctcacacgattataaagcaaagtcccacgataggccatctgcaagctggggaaggagagaagctgatagcatggctcagtccaagtctgaaagcctcaaaaccagggacgctgacagtgcagccctcagtctgaggccaaaggcccaggnagcctctgggaagcaattggtgcaagtcccagagtccaaaggtggaaaaacctggagtctggtgtccaagggcagaaggagaggaagtcaagcattctgcacagcacaggaagaaagagagggagcagactcagcaagcacgctgcttatctccattcgtccacctgctgtgttctagcctcactggcagccaactcgatggtgcccacccacactgagggtgggtcttcctctcccactccactgactccaatgtcagtctctgtcagcaacaccctcacagacacacaggggaacaatgcttcatcagccatccaggtatctctcaatctagttgacacctaatattaaccatcacaaaatgtaagaattctttacattttcaacatttaagtccattatc

SEQ ID NO: 84767 - DNA, 865 bp, Homo sapiens
tgtcttccttgcttttcctagaacacagcaagcatgcttttgcctcagggactttgtacctgctgtcccctctctgactagaaaacagtttccctagatacctgcatagttagccccctgaacttatttcaattctctgctcaaatgtcatgtaaatggtgacatcttccctgaccatcttatataaaataatacttccctttcccctgatattctctatccaccttatcctgtttgatttttctgcactgccccatcaaccattgacatataacatgtctacttgtttatatatgtattgtgtttcaccagcattgaaatgtgactttcacgagggtagggatttttgtctgttttatttaatactgtatccccaagaatgccttgcataaattgggactaacaaatatttattgaattgaataaatgaatacatttgggaaggcgcaaaggagtccttgcccctgaaattcatttcttcagtcagccagcaaactgtatggagtgacatctgtgtgctgagctcagagctctgtgcctgggatagcattttacagagcatggtgggcatggctggccagtgctcctgcttacttcgattttctgccttcccaccattcctgtgcttattatattctttctcagaagactttttccccactgttgagaacagggcagtctgagaagcctccctactaaaactgaggttggcacccctctcctacttcattgtggaatcctggaatggtctttcttaccctttgtccctagcagtttcacatgctttgggtcattgcatttcttcccttctctgccctcccccacttctctccttcaaacaacatcatctctcagcaatatacaa

SEQ ID NO: 84768 - DNA, 441 bp, Homo sapiens
cgcagagcagagggtggaaaggcaaagagtacaagtgagcgagccctttttgtgatggcgttgatctgtttacaaggggactgcctaaacactttccattagcccccacttcccaacactgttgcagtgttgcagttaagtttccaacacatgaatgctgggggacacatttaaattagagcagtgatgatcagaaagttattgttgggaaaggaggttctattttaacttaagtagcttgaaaaagctcttcaaggagttgatacaagaactgagatttgaattagaggaccgagtaaagtgaagaatctgcgggcaaagtcccaggcagagggaagagcaggaaatgattcatcagtagacttgctctcccattctcggcaagggctatttcacattttctccactctctccctcagcacatctccacctggctttctc

SEQ ID NO: 84769 - DNA, 491 bp, Homo sapiens
ggcgagtggagagagaaaggtgagtcaaaaagcagcactactgcctccggagcaaatgaatgggaataaaggttgatgataccaggtcaggggagtggagagagaaggtgggtcatgtgtcaagtagacccctgtgtctttcccaaaaagtattgaggtgttttggataagcttggggacagaaaccatagaaaagagcagggtcctagattctgaaaacacatctgccttcctctgcacagttgtgctggctgttgcaggtctgtgaatttggaagtccctcagtggctattattagttttaatttctgtttgtattgaggacatttccacatgtttattttggtgaactttttgagatttaagattttataaaaaatctagtggtcaggaggggcttaaaaagttcaaatcatatactattatatctagaagagaacttagaaatcacctagttccacattttctttgtaaagataataaacagaagct

SEQ ID NO: 84770 - DNA, 416 bp, Homo sapiens
gtctccccagtaatactgcagccttcttaatgacgagattatagattccatttttcatatccttcacaacacacctagcacaatgttggggtagggttagagtggacctcaggtatctggttcataacagaaattctggatgcattttctgttcatcttaagaccaaaccctcatccctgaaatgtctttgggaactccatggatgcttagacagttttaggctttggggtgacttgagtgtgccctcctggtctctatccctcacctatctctggttcatcctactctagagctaaatcttcaggttaggcccaggctgaactggcctctggaaactgtggtcaatataactttcatccagtgactctcttccatgttgggtctctaggtattatggaaccaaaaagaagaaggt

SEQ ID NO: 84771 - DNA, 223 bp, Homo sapiens
tataaatatataaaaaggcttctacaccaagacaaaatgggatttctcctaggaatttaaggttggtctaacatccaaaaatcaatattaatacaataatataatataatataataatcaacattaatagaataaaggacaaagcccatacaattatctcagtaggttaaaatataacatttgaaaaacattcaataatcattcacgataaaagataaacatt

SEQ ID NO: 84772 - DNA, 274 bp, Homo sapiens
tatttgtcaaaaacagttaagggtaaatatagtagcaataacggggcaaacaatcaacacagtaaaaagcctgggaagaaaagctggtgaaggagatgctttgagagtaagagctttgaaaagctcccacatatcctggtagtcctagaaagccataggcatgtcagtgctgagcagatgttcagaaaagacctgaaaaggctctaagttttcacctctggctcaggctctgcccatgcaggaagtgaaggcaaaggcagagctgttgaaggtg

SEQ ID NO: 84773 - DNA, 219 bp, Homo sapiens
agcaagactttatttcaaaacaaaacaatactatacaagaacctttcagcaggaccaaattgatcaagattaccagaaagtgggctcccttcgtgacagggcaggactgcatcacccaccaccagcaggctgtgcagggcaaggtcctcgcaggggctcaagttgggtatataggcagcttcagtataatatgccttagcaatccacttaaaaaaaaaa

SEQ ID NO: 84774 - DNA, 293 bp, Homo sapiens
agaacacctttcagggtcagacagcactgtgccacaccagtgccaagggaggctggcatccatgggataaggaggtgctatgtagtcattcaaagcaatgccatctctatgtgaagacctggatgaaaatccagaatatagtggttttacagcttataaaatcatatgtgaaaatgcaaaaatataggtgtatgaacagtgtgaaaagttataaccaaaatgttaacaatagttactgttaaattaatctggaattattttagcatatacgagatgacaaaactattttctcc

SEQ ID NO: 84775 - DNA, 381 bp, Homo sapiens
ttttcctagcatgcgccttaaaactctctcagcctttacctattattacccagttccaaagccacttccacatttttagatatttgttatagtagcaacccacttctggtactaatcttagtttgtgctgccataaccaattattttactaggtggcttataaacagcagaaattaatttctcactgtactgaagcctgggaagtctaacatcaagcaaggcatggcagatttggtgtctggtgaggaccagtttcctggttcatagatggccattgttctgctgtgtcttcacatggtcaaaaggcaagagaaccctctcatgcctctcttacaagggcaccatctcattcataagagctctacctccatgacataatca

SEQ ID NO: 84776 - DNA, 867 bp, Homo sapiens
gatgggtggtaacgttcagcaaaagccatgcccaggagacaggcacagtacccatggagacccagggccagctgatgacagtgatgaattccctttagaactggcggactcttgggtgcttggagacactatataaataaggaactctggctgtgtgcatgggagagtatattaacagggcttggcctggctgtgaggtgcagagatgccgtttctctcaggtaaggagccatattggggcaggggtttcctaatccttttttgactcacaaaatacacctaggaaatgttaaataaatagtcatttttgagtagtatatgataaagaagtgattgattttgactaaaaatattcatgttctatttttagaatatgaaagattgtattataaagatcacttgaaataaaattttagataatatatggagacaaatttctgctttttacatttaacttgctgtttaatgtatctcaaattatttatgtaagagatatatgatttgaccaataaatataaaaaaatgttataccataatctggggacctaaagtacttcactttttttgttctgttttgtttttgagacagggtctctctctgttgcccaggctggagtgcagtggcccaatcatggctcactgcagcctcatcctcctgggattaaatgattcttccacctcagtctcccgagtagctgagactacaggcacatgccactatcgctggttttgttgttgttttgttttgttttgttttttgagacagagtctctgttacccaggctggagtgcagtggcacaatctcggttcattgcaaccgcctcctcccgggttcaagcgattctcatgcatccgccttccgaata

SEQ ID NO: 84777 - DNA, 102 bp, Homo sapiens
gtttctcctacaaagctgctggcctgtgggaggttcacctgatccccgtgttagagtcctggtttgctgcatcacggacttcatcaggggctgagtttgctg

SEQ ID NO: 84778 - DNA, 689 bp, Homo sapiens
tcccttattcaatcaaaggtaatgtatattacttccaaagtataggagtattaatttaagctgaccaaaaaaagaggacccagatactcgtttccaaagatgttttgaatccacctattttcaaaaggccaaatttcattttacagctcttgtgaaaccaggcaagcagtgtaaattttaaaatgcagcagtgggatatcttcaaatgtagcagtgagatttttaaaatgtagttgtttcaaaactgatcagtgaccgtctaaaatacgggctccttgaggacatcctgcgcctggttcatcctttttgcactctcaaagtctagcccttcccagatgggacctcagtcccagcccccctacactgccatcccccagatctttagggcagtagggttcattgacaaggttgcaggctacaaacttggcaaagtttatactaacacctcattccatcccacctcccatcttaaaaaggaaaccgttaagtatcttattctagtgacttcaataaaggaactaatttataagacagccaagaacaattaaagtcataaagggccaaacattttattttcatctaagaaccgtttgcaggggtggtccgatcttttggcttccctgggccacactagaactgtcttgggccacacgtaaaatacattaactagctgatgagcttttttttcc

SEQ ID NO: 84779 - DNA, 337 bp, Homo sapiens
gaaaaaatgagaacaagggtttgcaaggtaagtataagaaagagcctgggttctgaccgggtgcagtggcccaaacctgtaatcccagcactttggcaggctgaggcgagtggatcacctgaggtcagaagttcgagaccagcctggccaacatggtgaaaccccatctctactaaaaacacaaaaattagctgggcatggtggtatacgcctgtaatcccagttacttgggaggctgaggcagaagaatcacttgaacccaggaggtagaggttttagtgagctgagatcacatcattgcactccagcccgggtgacaagagcgaaactccgtttc

SEQ ID NO: 84780 - DNA, 2341 bp, Homo sapiens
gaattccgggaacagaaggcgtcggagcgggcgtcggagctgcccgctgtgggagagagaggagacagaaagagcgagcgaggagagggagcccgaggcgaaaaagtaactgtcaaatgcgcggctcctttaaccggagcgctcagtccggctccgagagtcatggcgaccgcagcgtctaaccactacagcctgctcacctccagcgcctccatcgtgcacgccgagccgcccggcgcgcatgcagcagggcgcggggggctaccgcgaagcgcagagcctggtgcagggcgactacggcgctctgcagagcaacggacacccgctcagccacgctcaccagtggatcaccgcgctgtcccacggcggcggcggcgggggcggtggcggcggcggggggggcgggggcggcggcgggggcggcggcgacggctccccgtggtccaccagccccctgggccagccggacatcaagccctcggtggtggtgcagcagggcggccgcggagacgagctgcacgggccaggcgccctgcagcagcagcatcagcagcagcaacagcaacagcagcagcaacagcagcaacagcagcagcagcagcagcaacagcggccgccgcatctggtgcaccacgccgctaaccaccacccgggacccggggcatggcggagcgcggcggctgcagcgcacctcccaccctccatgggagcgtccaacggcggcttgctctactcgcagcccagcttcacggtgaacggcatgctgggcgccggcgggcagccggccgggctgcaccaccacggcctgcgggacgcgcacgacgagccacaccatgccgaccaccacccgcacccgcactcgcacccacaccagcagccgccgcccccgccgcccccgcagggtccgcctggccacccaggcgcgcaccacgacccgcactcggacgaggacacgccgacctcggacgacctggagcagttcgccaagcagttcaagcagcggcggatcaaactgggatttacccaagcggacgtggggctggctctgggcaccctgtatggcaacgtgttctcgcagaccaccatctgcaggtttgaggccctgcagctgagcttcaagaacatgtgcaagctgaagcctttgttgaacaagtggttggaggaggcggactcgtcctcgggcagccccacgagcatagacaagatcgcagcgcaagggcgcaagcggaaaaagcggacctccatcgaggtgagcgtcaagggggctctggagagccatttcctcaaatgccccaagccctcggcccaggagatcacctccctcgcggacagcttacagctggagaaggaggtggtgagagtttggttttgtaacaggagacagaaagagaaaaggatgacccctcccggagggactctgccgggcgccgaggatgtgtacggggggagtagggacactccaccacaccacggggtgcagacgcccgtccagtgaactcgagctgggggaggggcagagcgcggggctccccctccccttcggtccttggccctttcccggccctcttgttccctctctaacttctgattgttcttttatttttaattattatttccccgtcccttaaaaagacaaaaaaaataaggcaaaaggaaagcaactaagacactggactatcctttaaaggtagcaggtgtaatgatgtgttttgacctttgcaggcgagtaaccaggcaatggagtggagtgtctcctggagagagtgaggagagtgtgtgatagctagaaagagagagagacagagagatggcaagcactgagataaatacctggcaaaactaaataaattaccaaaaaggaaaaaaaatccaccaaaccatgataaacacaaaatgcagcttcctgatgcttagagttggcacatgctgctgtgtttatttattgtggattcccatcaggaaagaggaaaaaatacacatgttctttcatataggcaaaatttaaccacataaatttgcactgcaagaaaattgaagtttacgtgaacaaattcatgagcatattttctctttctccccaccgttaatttgggagttgccgttttgggggattttgttttgctttgctttattcatcggagagagttgaagccagctcttggccactctccatttctaatgttcttgtgttgccccttcttcgtactgtttgtgaactttggttaccttcacattccccttacgagggtgtaacatctatttgttcctcttaccaaagcaaaaggattggcttcatacaaaatagacaattctctgatttcaggaaatgtgcatggtctac

SEQ ID NO: 84781 - DNA, 1997 bp, Homo sapiens
cgccgagctagtcagagagtgagcgagagcgagaaggagggagaggaggagaaagagagcgagggcgggcgggaggcggcggcgacggctccccgtggtccaccagccccctgggccagccggacatcaagccctcggtggtggtgcagcagggcggccgcggagacgagctgcacgggccaggcgccctgcagcagcagcatcagcagcagcaacagcaacagcagcagcaacagcagcaacagcagcagcagcagcagcaacagcggccgccgcatctggtgcaccacgccgctaaccaccacccgggacccggggcatggcggagcgcggcggctgcagcgcacctcccaccctccatgggagcgtccaacggcggcttgctctactcgcagcccagcttcacggtgaacggcatgctgggcgccggcgggcagccggccgggctgcaccaccacggcctgcgggacgcgcacgacgagccacaccatgccgaccaccacccgcacccgcactcgcacccacaccagcagccgccgcccccgccgcccccgcagggtccgcctggccacccaggcgcgcaccacgacccgcactcggacgaggacacgccgacctcggacgacctggagcagttcgccaagcagttcaagcagcggcggatcaaactgggatttacccaagcggacgtggggctggctctgggcaccctgtatggcaacgtgttctcgcagaccaccatctgcaggtttgaggccctgcagctgagcttcaagaacatgtgcaagctgaagcctttgttgaacaagtggttggaggaggcggactcgtcctcgggcagccccacgagcatagacaagatcgcagcgcaagggcgcaagcggaaaaagcggacctccatcgaggtgagcgtcaagggggctctggagagccatttcctcaaatgccccaagccctcggcccaggagatcacctccctcgcggacagcttacagctggagaaggaggtggtgagagtttggttttgtaacaggagacagaaagagaaaaggatgacccctcccggagggactctgccgggcgccgaggatgtgtacggggggagtagggacactccaccacaccacggggtgcagacgcccgtccagtgaactcgagctgggggaggggcagagcgcggggctccccctccccttcggtccttggccctttcccggccctcttgttccctctctaacttctgattgttcttttatttttaattattatttccccgtcccttaaaaagacaaaaaaaataaggcaaaaggaaagcaactaagacactggactatcctttaaaggtagcaggtgtaatgatgtgttttgacctttgcaggcgagtaaccaggcaatggagtggagtgtctcctggagagagtgaggagagtgtgtgatagctagaaagagagagagacagagagatggcaagcactgagataaatacctggcaaaactaaataaattaccaaaaaggaaaaaaaatccaccaaaccatgataaacacaaaatgcagcttcctgatgcttagagttggcacatgctgctgtgtttatttattgtggattcccatcaggaaagaggaaaaaatacacatgttctttcatataggcaaaatttaaccacataaatttgcactgcaagaaaattgaagtttacgtgaacaaattcatgagcatattttctctttctccccaccgttaatttgggagttgccgttttgggggattttgttttgctttgctttattcatcggagagagttgaagccagctcttggccactctccatttctaatgttcttgtgttgccccttcttcgtactgtttgtgaactttggttaccttcacattccccttacgagggtgtaacatctatttgttcctcttaccaaagcaaaaggattggcttcatacaaaatagacaattctctgatttcaggaaatgtgcatggtctac

SEQ ID NO: 84782 - DNA, 489 bp, Homo sapiens
gtcgtgtggtcatttgtactcctgagtgctggccaccaggtggctgtgcccctcagtgcgtctctccattcttccttgagggacactgacaggtttctgggttttggtgatgggcagtaaggctgctgtaaggtcgtccaggtctgtgtgtgatgggcggattcgtttccttcaggtaaacccttgggatggggttgctgggctgtgtggcaggtgcacgcttatgttagcattgccctcacacctttctcagtcactaggtgaccgtggaagtgtgtctgttttggggctgtctactgtctttcgagctgtgtgtccttttcctgatgccacactttcctgatgacttgaagtcttgatactgggagtcctccaacttcgttattctttctcaaaaaattgttttggctattctagctcctttgctgttccatgtagactttagaaacaatatgtcagtttctataaaaaattctgggctgggtgcag

SEQ ID NO: 84783 - DNA, 257 bp, Homo sapiens
aactacatgacaatgatttgctttgtaagcattttatctacattgttagctaactctgaatatacgtcattaaggcactcacctgagcacacacaaaaaaaggatcctatctaggattcacttcagtttttcttgggtgaatggcgcatgcctagtaatgtccactggaagattacagttcaggtccagagtaggctaacattcagctcatcaagttaacccccaacattatctagcttagtaccaaatgccaggaa

SEQ ID NO: 84784 - DNA, 427 bp, Homo sapiens
aggtcagtcttgcaaggaaaagtgtttgaggtggcagaagcagatgccaagttcttatcatgagtgactgcaagacagtatcagttaagacagccccatttcgagctgctgaaggcctgacattttaaagtcacagaggcctctggtgagaactgatcttggacgagtgtccttgtttgtgtctttatctgattggatgcaatctttatcttttttatttattaaacaaaacatcttatccttgttggcaaagtgccctctgaaacataaaatgaagtcttattctaagatggagtttgttatatcaagggtactctatacaatagggcatttttttatcgctaccattggtgaagtttaaatatggagtgttaaaatctagtttcctcaagttctctggaaatgcttgcctactcactcctctccg

SEQ ID NO: 84785 - DNA, 594 bp, Homo sapiens
gatgagctggctccctccccagctgtgaaatctctgagtctcagtttgcttctctgcaaaatgaggataataatccccacctcgggactgaggattaacgaggcaatggttttagcagaataatccactgctgctattattatcagcatcttcgtatagcaaaactcatttggaccaatggggagtgcgttaagttggtctgaagtagggcaaaggaacgattatagaatgtttcaaaggaaatgtgttttttattatttccatgtatatagagtactggaactgagtgctaggaggtggagaactgacttgatttaaataaggagagctcatttgacattggcctgtttgatttctcaacatccaactgtgttaataaagagggttttgagctatctatgtgcccagctctgtgactggagaaggaaagtcacataagacacagtccttgccctcacaggacgtgcaacctgtgggcagatgagtcctacacaggaagcgggggcaagaaggaaactgtgaggcactggggagcacggcgctgccacaggtgagaggaaacgcgtagcctctggaccttgagtgccaaggctg

SEQ ID NO: 84786 - DNA, 354 bp, Homo sapiens
ggtcctagagtcagaccacctgaaaggaggcactcagacctaagccctaagagcagtaacaacagcttacattttttgaacacttgctatataccacctgtgtgtttcagtagtaagcgatttactcctcacaaccatcctaatgaagtggggactattatttccccacagatgatgaaactggggcacagtaatgtaacttgctcaaagtcataagttgataggtgatagaggcagtttcaaactacgtactttggctccagagcctatgttctttttgattgtttagttctacatactcacagagcctatatttttggagggttttttttgtttgtttgtttgtttgttttg

SEQ ID NO: 84787 - DNA, 227 bp, Homo sapiens
gatctccttacactgctattccagaggagaagccaccaggtcactcaactcttagtatcatctactggaaactggctaagacagtatttatgtgcttctctcacaataacaggaagataactatatcacacaatggatatggcagttggcttgactgcagtaatcatttaactatgtatatgtatatcaaaacatcatgttgcataccttaaatatgtacaataaaa

SEQ ID NO: 84788 - DNA, 570 bp, Homo sapiens
ttctttttctttttttggagacagagtctcactctgtcgcccaggctggagtgcagtggcacgatctcggctcactgcaaactgcgccgcccaggttcatgccattctcctgcctcagcctcccgagtagctggaactacaggtggccaccaccacacctggctaatttttggtattttagtagagacggggtttcaccgtgttggccaggatggtctcgatctcctgacttcgtgatttgcctgcctcagcctcccaaagtgctgggattacaggcgtgagccactgcgcccggctgattctacatattccaaaaaagtttatttagtgctattatctgggggaccagttatatcagcagaaaagggcgactaagctgtcattatgactcaaatggttcaccaaaaaaagaaaaagggtaatttcctcctcctgaaaagacaacaaagcaactcttttaaaaaaatcatattctaaagcggtttattctaaaaaccatgagtgaggtactattctttttagtgagtacagttaaaaaggaaaacaaaaaaaaaaaactctccagggcat

SEQ ID NO: 84789 - DNA, 705 bp, Homo sapiens
gggctcaccaagggctgccagttcgcagaagtccctcacctttgttccacacctgctgactttctaaactgctgtcctctggactgtgctaggtacacatgacagcaccttggcagccatgtctttcagagccccgttatgcaatgccatggccctagaagcagaaggaaccatcaaagaaccaggctaaaggactttgggaccaacaggcattcaggaatgcacctggccaggagctaaggggccaccagctgacaagagttgccaccagacacgccaggtagaagatgtcagctggcaatggccatgccagcctaagctacctctgtggagtgaacaatgtagcccagaagagccagcacagatccctcccacctatcagccctgtcttcccccatcttgatgcatgtcccaggtaagcattcctgattctgctcacttgggacacagttctctaccctgtttgtgatctcaggacctgacacctgtctgctcaagccaggttccatggaggagcagaacttcatcctgctctgcatttagggcctgcctcggagacagtaggggagctcccaagaactcacaagtttggaaattaatatttctctttgcaagataaaatacagatcagcccaaagtacatcagacctgaggtccaattccaaacagaaagtcggccctgataatccctgggttaaaggccca

SEQ ID NO: 84790 - DNA, 263 bp, Homo sapiens
aacctggatggaatgggatactattattctaagtgatataactcaggaatggaaaaccaaacatcatatgttttcactcataagtgggagccaagctacgagaatgcaaagacataggaatgataacgctggactttggggactcagcggggaaagggtgggaagaggacgagggataaaaagctacatattgggttcagtgtatactgctcaagtgatggatgcagcaaaatctgatgaatcaccactaaagaacttactca

SEQ ID NO: 84791 - DNA, 2206 bp, Homo sapiens
agtcagtctattttgataaaatcaactgaaaaaacatttgcataaagactcaatgtaggggaaagattcttgacacaaatcttacattaaaagtctgttaatatttttattaacttttacaagatcctgttgtttttcatttactataagtcctaagtcaaatatgcctcacaccaagcatctgaaaagttaagtacagtttagtgtcacatttgcttgagcacatttgagtttcagactcatttaccattgtggaatctgcttttggatattagagatgtttgttcaaataccagaagacagaataatactatcttctaggctaaaactaattaattactttcatataatggacaggagaaattcacatcagatagatattttaccagttaatggtgcagcagaatatcaaactattttcttaaaatgaatcagataagaacattgctcataaaaaataacttttttgtttgatcaaaattatttatagttttatatgtataatcctagtttatcctgagatgtatttgcttttgctttttaaacttataatttaaaaaaaaagagagagagtcagaaggttgtttagatggagaccataacaaacttctgtttccctaaactcaaattgttactctagtctattgaaatacctgatccacttgagatctgccagttctgacatttgcaattccaaccttggcctactgagaatcatttggtgaactttttctaaaagttgccatatataaaaagatgtatattattatttcttctaaataatgcattatttcttctaaaaatgtgctgatgccataaaatgtattattgatatttttatcataaagcagttgattttataccttttacatatctcaaagcaagagggagatttgagagactcaaggtaaaaggtatttttagagagtataaattggtggttgactttagacgaatgcttcccaatgcatatatatgcacactacacatatatatgcatatatgtgtgtatacacacacatttttataacgatacctaatttaaattaatgtattcaagaagataaatgactaaaatagaacagaggcatctctgtctcctgagataaaattatcagcttgactaatagaataaagcactataggcatgattttttgcttccttatatatgcataactgatatgagtaaaacctgaaatcaccacactactcttctctctaaaagcttatagtaagtgcttgattatttaagggcatgggcaggatgttatatatattaaattttgagtatatgttaaattttttgatataaaattaagtcactggttgactgtaaaagattgttgttttttctattacaaataacagatctttgttttatatccatctactcctgccttttttccccaaatgcaactggagaaacttgtgtgtatgctagcatctagtcaatattagtcacactctgtggtgctagatgctatcaaattactatattagtagtagtgacatagcaactactataattagaaaaagatgaatggcagattttatgtaggcccaagggcattatatagtctaggttagtgttgtagatcatagataaagcaaaagtcatagattataaagggaatgttgaaattcctttaggatggtgcctttgcaccacttctctataactccaacataaccagttttccctctatagagttggaacagattatagtttagtagctcaccaaataaagtacgtagcttgtatttaccagctatggtatataaaaatatgaatcattaaatgctagtataaagcagttagtcttaaaaaaaaaaaaagatccacaaaagggatgagtgggagataagattgaagcaaaattatagaaagttgtataccaggctgagggctttctgtgtcacttcacaggaagtaggtaaacaccgaaatttagtcagtgtcattattagagttgtgctttcataaaaagaatctctcaagtgtgacaaggctaaattagaaagaagagactggaggtagaggccagttaggagatccttgtaataatccacagttgatggaatgaggatctagagtagccaggctggaggtaacaaagagggacaggagggcaggagtactctactttaaagtagaatgaataggaccaacaaatgacttaaagggatttaaagaaaggagacatt

SEQ ID NO: 84792 - DNA, 770 bp, Homo sapiens
ctttgatgaaatttggagttgttgccagttgaaggaagataaatattgtctggattctttgtggcgaatcatctaagtatggcaaaactgtgcattttctagacattccaaactttaagaataaaaaagaaagtaactcatattttaagtgacaatattatcagcctgaatatcctgatgtgtgggattagagcgataaaccttggaatgcaaagaaatattactaagaattctgtttttatggccacaaaaagtagcagtgtataatttcccctgtgatccattcggctgacatatacaaaaacctgagtatgctctaatggcttggaatccttcccctgctgttaccacaatttaaaagaatgaggactgctctccatttgttgcagcaatcaggaaagcctttgtcacatacccgaacttgggtggaggccggcctggcacacagagtgatcagtaagacgacctgtattaggctttcctccaggtataggggggatgagcagtggctgacactagtggccactgtctacctgaccagccactcaggaaggttctaccttgctttgcagaagtgggccaacccatgagccactggggaatgagagctgtgaaaattgagggttgaagcaaatcaactccctataggcatttaaaaaatagcagacatattatttcactataagccagggtgcccaggaaagttcagttcctttttgaatagcgggtaagtccagcacagaaagttcctctagagggcctagagctta

SEQ ID NO: 84793 - DNA, 441 bp, Homo sapiens
ttagaaagaatacaccacaggccgaaatagtttcatatgataggaaaatctttaaagaaaggaacacagagttattagattatggttggctgtataaatttagctgggcagcgggaggaaggtcataataaatgtatcctgctctctctcatcaattatcagcagcacatcccccaacattctctcctcccaaagactgaaggatgtgcagcaaagcttagatcttgaaggagaaggttcgggaaaaattaatgattttaattagaactttccaatctaagtagaatcattaccttaattagctaaataaggaagtatgaaggatgaaattttgcaaatgaaattttgtaaatgtatggtagcgtagaatacccccattgcttcattttaaaaaaagaaaatataaatgcattttaattaataaatgacttttcatcatgt

SEQ ID NO: 84794 - DNA, 448 bp, Homo sapiens
gaaccaacgtattccttttggtctttttaacaggaatgctggaaatatttgggcctaactgatctttagtcattatcctactggtcaatatgggtaggaattaatttggcccttgaaaatcagacagcggaaaaaatgcacctcatgatcattcagcctctgactttttgggaggaaatcattttcaaagaaatgtcccccaccaaaaaaaatctcttaatgctacactgcaaagggaaaataaaggcatatggaaatctgaatttttgttgtgtttctaaatttgtaatattgaataactttttagatgtgaaattaaagatgactcataagtcctacttctgactttggtagtaataatattcatttatgtactgtaaactattaggttcaaacataagctgtttctccaaagcctacaaaaaattaatgtggaacacctgatatt

SEQ ID NO: 84795 - DNA, 356 bp, Homo sapiens
actattccccactattccttctatatggttgcttactatggggtaggtatcatgtcgtaattatttttgtgtgactgtttcctagcactgtgttccacttaacagattgtcaataaatctctgaaccataactaattcctttcttttatccctaaacatcacatattttcaagaaatgactcttaatttctcctcaagtaaacttttattattgccctcactgcaaattcaaactttgcctaccagatgtcgaataaagcatgacaccaaattgcacaccctattaacatctcagtatgccttcaaattccattacactcaagtcccagtacagtggagcaaaatagctcctgtat

SEQ ID NO: 84796 - DNA, 315 bp, Homo sapiens
  misc_feature (314)..(315): n is a, c, g, or t
tgttcagtaagtagagaaacagttaaataaataagtgaataaataaatccacctaaggaaatattaaaaagtcattgaagacatttttacacagtgtagcattttttaaagtctgttacgcttaaacttttatccagactgctagatattgtctctcaggtgccaacagccatttcaaactcagagtccaagtctgagctttgcgcacttaggcacagttgcaaaacgtaaggtcctagtttttaatttaagagaagtctggtacccaaagctttgcttgtagagaccaagccctacacaaaaggaaattatcnn

SEQ ID NO: 84797 - DNA, 725 bp, Homo sapiens
cttgacacctactacccagaatttggaagtagaattttaaactgaggtcagccccttcactttcatagtttaagaaagttagtgccccaaaggggatcattttctgccagagatcacatggggatggagctgaatctaagacccaggttcccctgattctcactctaattccctaagctgccactgcaaagaaaaaaaaaatcaagttgggatctcattctgggggaaaaatctcataattcctcgttggagctatggaatagctttatattatataattttattcaaactgatatgagccaataaatatagattgtgtgtgtgtgtgttagctgttttaaaacattttaatgtttaaaacatgatttactaatgctgctggggatgtctagaatttgatttactgcatattattgagtgtttatacttgttccttacagaaattcttgccaaagagccattttatctacaggaataataaataagtcaatatgtggatggttgtgcacatttttcccatatgcagtgggacttggtagatgttactttgcacacaaacactcagaaggtaaactggagagatgcacatggatccctgaagtccaaggcttggccagtgtcaaaatcagaccattcatcttgacttaaaccaaaaacacggtcagcaagtctaggtcttaggtgatatttgggctttgggaataatggatctacatgttcccata

SEQ ID NO: 84798 - DNA, 543 bp, Homo sapiens
cggtatgggggtaacagtcaaccttatggggatactgggcaaaagattctggcggtcagcatataagagggtgctggtcattggtaacaatggacctttccccaaatcaggcagtatggagtgatgagtggtaaaatctattcccaggccagaatcttatcaatacataagaaattaaggaagattaggtgccaaaatacccagcacaatactggtatattttaagtaccatacagaagtaaaatcccaggaactatgaacactagaccttagggggttaatcccttcaatcatttcaaacatggacggtagggcctacagggttatggggcctggctcactttatgtctacatctcccacattcataccaatatacgtcgggttggctaaaccatggatttgctgggcttgggtaggagagagtctcactctgtcacccaggctggagtgcagtggcgccatctcagctcactgcaacctccacctcccaggttcaagtgattctccggcctcagcctcccgaatagctgggattacaggcc

SEQ ID NO: 84799 - DNA, 417 bp, Homo sapiens
tgtcaaatgttcctggtaagtcaaatcaggcaggactgcaaaccaacgcctggattaacaatgtgaagatcattggtgcccttgcaaattcagtgtcaggggaacttccttggagttggtttaaaggagaaactatgaacagcaatacagagacaaccatgcaagtagctttcctgtaaaggggagcaataaaaatgaactgtgggctgggtgtgatggctcacgcctgtaatcccagcactttgggaggccaaagcaggtggatcgcctgaggtcaggagtccgagaccagcctggccaacatggcgaaaccccatctctactgaaaatacaaaaattagctgggtgtggtggcgggtgcctgtaatcccagctactcagggggctgaggcaggagaatcgcttgaacccaggagg

SEQ ID NO: 84800 - DNA, 330 bp, Homo sapiens
aatttcataggttgtgtcttctgaaatctgtaccttcttactcataacatttaatgtagcatttctcaacctgaccaatctgcagaaaatatatgtcatatattaattgtgtatacatgaatatatgcatttttctggtaaaaagtcatagtttttcatagatgtcatgtaatcttttaagagattctcaaataggaacatgattccaccccaataatggtgaaaaatgatcaatttagatgaaagggacctcaacaagcctcttgagatatgaaacataaagagaaaatataagccgcaactttttgacatgacagattcataatgata

SEQ ID NO: 84801 - DNA, 1292 bp, Homo sapiens
catacattagcttacagttgggcaaaatcatctaatatgaagcctattttataacaaagtgttgaatatctcacataatttgttgaataccaaactggaagtgaaaaacagaatggtcgtatgggcacttgaagttccgtttctactgaatgcttatcactttcacaccatcataaagttgaaaaatcagggcctatcagggtcagctctggctgtcttttccttgagggtttctatccttagtatgggctcaggaagttcttccccatgccaatattatattggcaccttttaatggtttcagttttctcatttaattaatctccctagaatttgtttttttacttttttggtttttttttttttttttttaagatggagtcttgctctgtgtcccaggctggagtgcccaggcacgatctcggctcactgcaaactccgcctcctgggttcacaccattctcctgcctcagcctcccaagtagctgggactacaggtggctaattttttgtatttttagtagagacggggtttcaccgtgttagccaggatggtctcgatctcctgaccttgtgatccgcccgcctcggcctcccaaagtgctgggattacaggtgtgagccaccgtgcctggcctagaatttgttttgatagatattagattgagatgtaacatttctccccattatttgttgaatccttcattttctcactgatctcagactttatcaaatggaagcctgtgtctttgcactcgagttctttctgggcattctgctccattcctgtctgtccagcatcagtccactctctctcattagtggtgtcatatgagatagtcactgtttggtgaacacattccatcccttattctgcctccttttaaaaaagattctttgctattctcaagcatttaattcttccaagtaatcttctaagtcattggacaaattccttacaaaaacaccatggagatttcagttgaaattgcattaaatttttgtgttaacttacgggaagactaacatctggacaatgttttgcctgcccttgcttatgttgattcagatttttgatgtccagtgagaggcttggttggtgtatcaggctctgcacagggaagctgtccattctgtggagttgttggtaactggctggtcctggggacagagaactggccctcgttcctgactgttaagggaaggatgatggctcttggcttgaaaagatcatctttatcatgttaacacagtttccttctgtttctaagaggtattatcagaaataacac

SEQ ID NO: 84802 - DNA, 814 bp, Homo sapiens
tcggaagaagagtgttatgcctgtcacttttgaaattgagcttggatgatttctcctgattaatttatgtccctttagagaaagcaacgactgttgaggaagaataaacttttttttttttttgctacaattacaaaataagggatgtaatctaacttaagtattcagagcatagagccttgtatgaagtggacatccagtaaaatgtttgattaaatttgtagtgaatgtactgtgaaaagttgatcattggctttgggctttgggctttgagaactagatataggagtttatagctggaagactaagaaatctcctaaaacagtcccgttgatttatagaaaaggaggctggcatttctatttttattttcaggaaattcaaatttagaaaaataaaatgcttaaattaaccttaaaaacaactattttttagattacaaaagtcttgtagaatataaaaaaagatgagtttgtgtgtgtgtcccagcgtgaaagtctgtaattaattctactcccaggaattgatgcagcaaatatttatggagcctctactgtgtgctaggtagtgttctaggcactggggaagtattagcagacgaaacagttgaaatatttcttctcacagcactttattcctaatggaaagggaaataggcagtaaatatatgtgtcaggtggcggtaagtgctatgaagaaagatggaggagaactagagtggattttctattttatgtgggtccagggaagccctctgacagtgatcaggggagtaagagggtgagctgtcaggtactctggggaagcgggtaat

SEQ ID NO: 84803 - DNA, 804 bp, Homo sapiens
ggaggattgcttgagtacaacatgtagaggctgcagtgagctgtgattgtgccactgcaccccagtgtgggtgacagagcaagaccctgtctcaaaataataaaattaacattcattaacaataatgttaatatatatgttaatgtatatgttaatcgtaatgtttatattttaccatgataaaaacattttaaaatcatatatcaactcttgccgttctcctgttgaaaactctccaatgacttcccactccatcatcctgtgggatgggtccaccatgctggaccacaaggctctgcacaatgcggctcccaccagcctctccccttggcccagattgcttcctcctacccctttctctagctgccaggccccccaacccccgcatggagcccttcagcagctctgtgagctccctgcctgttggcagccatcacagcaacgggctctggtgtgccccttgttatccctgtattcaggccattatctgtaatgacagcctggcataattttattttcacaatttgtataattatattctattgagctaaatgatcattataatcattattaaatatttattaagcacttctagctgtgcaaacataataagatgtggcctcagctcttaaaatctttcttcctaattccaacccaaattcatttcaacttaaccaatcttccttcttggagaaggagggaacttcggcgttttgtctgggtttccatgcccgagcttataggagcttcttagcaatgctgtggagcagatgctattgacttcagtttacagataaggaaaca

SEQ ID NO: 84804 - DNA, 273 bp, Homo sapiens
gcatttcagctctccttcctttggagggtgggagggttgttgactatccttaaatgtcaacaggcctttcacattttaagcaaatcagtaacagttaaaaggactacagtgatttcctggagtgggtaatacataaaactcaggccaggcacaatggttcgtgcctgttaatcccagcactttaggaggctgaaatgggaggatgactcgagccccagagtttgaggctgcagggagctatgatcatgccactgcactctagcctgagcaaca

SEQ ID NO: 84805 - DNA, 286 bp, Homo sapiens
gcattttagtgctgatacagatacagtgagttcctgccctttcctctcctttatattgaagggattataaatgaagctctttaaacattctgagatctttaagttgatttctacatgaactccaagtggtgttaatgacattttcagaaaagatgctttacttagctgacaagaaaaagtactctgtaagcctttatttgtatgtgataaaacagagttgataaaataatctactattaacttatcaatgcagtcttacagaatccacctattacaaagtagataa

SEQ ID NO: 84806 - DNA, 779 bp, Homo sapiens
cgcaaagctcccctctacacctgagcgggggacagatgtgcatcaatatttattcggaactcccaggaaacctggatgaagtgtaattatctcagctcaatcagcttggattagcataacatcaagtcacccatcagacggagggtttgatttcggggatcaaagcgacggctgtagccgctgattaatcggggagaaggaagcggcgagaagaaagcggcgccggctctgctagccacagctgcaccgctttgaagcgccggtggtgccaagttaactttgccggccgcccccgccgctcctcggacccgctgcgcccgccgggtccgcgggttttagcgccgctccctgggctgcgagtcgccggctctaaaataaaccgtgccccctgcccacccggggctgtgttgggggactgtttttcctcggtctaggatctgctccgaggtggaggggcgctgcggggcttgcccggcccgggacctgggctggaagctcacgagaaaggacgctcctcggaggtgtgcactgaaggctgcctaaggctggagcggaggagtgaaatgatggagcgcaaggccttccccaagctggtctcagctggcgtttcctgcctcacctgccccatcccctcacaccacacacaaattacttattttcttaactcatcaggctttattggttctgtacctttgtacaatccgttttccccaattggggtgcacttctgtctccttctgttcccaaaccactctgacatccgtaataatcaaccctgg

SEQ ID NO: 84807 - DNA, 405 bp, Homo sapiens
gaaggtaacttggattggaatgattctcaaaaatgtaacagttgaattatggaaaatattaagcactttaattaaggaaacttattgatcaacttcaaactggttttggctttagcataataatttttatgttaaataaataataaattgttattgcatagtcgttatatatattagcttaatgaagatataaactttctcttattcaataataaaatgagaggtcaaaaaccaatccaatacctaagataaatcatttcacactgggaattgcattttcttcatatgtagaaaatgtttgaagaaaagcagtagctatggcataatgaaaacaccattggcctcagagcaaagacagctggcttgagggctgccacatttactttttaaataaagggataaatt

SEQ ID NO: 84808 - DNA, 220 bp, Homo sapiens
gtcaacgcaggatctactccatcatcatcttcactagcacacccagttcgattgaggagccttgacgtgggatattgatgggatattgagagaaaagagaaatggtgaatcaagcactaatctcaaagcttctgcacagaactacttacatgtcacttcctcccatgactattcctaaattcagccaaaaggggacacataatctcttacgggggagggc

SEQ ID NO: 84809 - DNA, 854 bp, Homo sapiens
cagaacccggtgaagatggatgttacaaggctaaagggattttgcagaagtgaggaaggttatggatcccaaggtggggagagcatcctggtttatccagatgggcccaatctaatcacatgagcccgtacaagtggaagactttctcaggctgggcacaggaggagccatgaggcagagggagtgacagtgaggtttgaagtgtgagaagtgctggatgacatgccactgcaggctttggaggtgaaggggggcccatgaggcagggcaagtgggcagcctctgaagctgacagcacacaagaagaggaggacctcagcctagggccacaggaaactggattctgccaacaacctgaccaagttcagaaatgtcttgaatcccagagcctccagaagagaacatagccctgcgttcaccatggtttcaacctgtgagactgagcagagagccagccgagtccttctgtgttggacctctgacctacagaaccatgaaaccaatcattcgtgttgttttaatctgctaaatgtgtggcaatgcagtaccacagcgataaaaccaatccacccaccaccaatggtcttatgattctaatagcttcaattaatcctataaactgacagccggtccctattccccattctgctgaatcccaaagcctcacgactttcttctgttaggcaactctgcttggctgtgttaaaaacacatctaaccctacatgttagaaactctgccagctgacaaaaccagaaaccttgagtcagtctggattctttcctctctgttttattcattgtgtaatctcaactccatcaggtcttggttgaaatgtcagcatctcaaatggg

SEQ ID NO: 84810 - DNA, 383 bp, Homo sapiens
tcctcaccccaccctcaccacattccctctcatgggagcatccttgcatagaattctgtgccttctgcctggaatgcttttccctctttctccaaagcaactcgtgttcttccttcagacctcaaattgcagaagacctcttagggaggaaccgtcctcacttgttccgtactaaggctagatctgttgcttttgccacatttactatttaatgtttgtttaagggatgatttgtctaagaatttgataagggttcagtaaaaacatagtgaacaggacttgggttcaagtcccaggtcttccatttacaagctatataatcttgagcaaattacttgaaaaacttcaactcagagaaattaagtaattagcttattcagtgg

SEQ ID NO: 84811 - DNA, 285 bp, Homo sapiens
gaggattaatagaatagatcaaagcagaatgcagtgtgttcatgtcataggttgacttctccaggaaaccgaccccaagtggaaggtttacatgcaggtggtttattagagagtgatgttgggaagaacacctgtaagggaagaagggagcctgggaagagcagagggagaaggtgaactctgattcacttgcaacagagtcctaggctgagtgcatgggatgctgtagagttgggatggaccttcagagatattccaaatagagaaagaattcactctcttttc

SEQ ID NO: 84812 - DNA, 118 bp, Homo sapiens
aaattaattggaagcttaatattacctctaggaaagagtgtgggaaatgaggaaaggcaaaaggtaatgtgttcatgtttgttctgttccataatccaagaaatagataaacacaggc

SEQ ID NO: 84813 - DNA, 378 bp, Homo sapiens
tttttcttaacctgaaaaatgtgtcttagaagtgcttttattcacacaggtcttactgcattctttcttgaacagctgcattaaatggatgcaccagtttttatttaaccactcagtggacatttacatttgttttcactcttttgccacagtcaataacccgtgcatgcatcattgggttcacgcacaagtaaatctggaggataaataagtggaaatggagttcctgggccaaaggatacatatatttaaaatgggatacaggctgggtgcagtggctcatgcttgtaatcccggtactttgggaagccatggcagcaggagttcgagaccagcctgggcaatatagaaagactccatctctacaaaaaattaaaa

SEQ ID NO: 84814 - DNA, 762 bp, Homo sapiens
gcccactcacacacatagagtagcatgttatggcacttacactaataaagccactgctatcaaagttctggacttgatttccagcagtattagctctgttttaccctcaagcttctgggttagtgggttattgctcaccaaagaagttctggttggaagaagaggtaagatatctccagagccgctgagaagaatgagtaaggtaaaactggtggcattcctgactgaatacccttcactcacaggaggcagtgtggaacagtgggaatgaggagtgctatgggactttgtatatctggtctggaagcctgtttctggtacgtacagctagggatttgtagaagacttcaggactccagatgactctgaaatacttagcaacagtagaagataactacataagaggagcttggaactttggctcaccatggggaagagcaccactgaaggctgactatatctgcactgaacttgatggagcaagaataaattttactctccactaacatctagggggttgtattttacagcaattgccaccatcatcaatatagctgatactgtgagacagaaggtaaagtctgaacaagtttatagcctcagtgcaagtagctgaagaacaaaaccactaactctgtgtgaagaaggatatcaaggttttttaaaaacaataaaaaatgatagtgttgtagacctagttacgcatcatataaaatcctcccatacctaccagcttatgtattcatcctgtctttgatcctg

SEQ ID NO: 84815 - DNA, 175 bp, Homo sapiens
ccgcgccagggggtcaaccaactccgacaccgctcggcgtcagctgggcgccaccaggcgcggacttcggagcgagggcaggtgcgcgggccggaagcctcgggcgctcacctggcacctacctggagctcacctggcgcccgggccccgcgccgccgccccccgcccagcccgc

SEQ ID NO: 84816 - DNA, 386 bp, Homo sapiens
cttacttcatcctcagaataatcctatgaaataaattctcttgttagccagattgagaaagacaaggtatggaaagataaagtaactttctcaaggtcattcagccaggatgctagagtcataatttccatccaattcaccttcaacctagagctcataggcttggctgtagcatgaggatctttgctttagcccaaagcttcttggttttttggttttttgttttgtttttttttttcagtgaaaacccaatgggagaaatacagaggaagatgttagtagttgtttatacttaagtatgaattggtttctgttccagagagtgcatcttattagcaggtaaaggaagagagcagaaagtttgaggggaaatataaggactgtgt

SEQ ID NO: 84817 - DNA, 316 bp, Homo sapiens
gtggcggtacaaggagagcaaagagagagatgagagaatgggtgaatgagagactgtgaggctaaagaacctgaagggaagaagaagaataatgtcatgtggaagaagaccatacaggagtgcattccagagggttctacacacttgctagaggagagctgaaattttagctccaaacctccaaatggctcaatcagaaatggaaataggaccagtcagaagattcagagtgctcaaaagactaaagcaaaccagctgcacaaaagacatatggatgtcctgagcctgaaattctccgtgtgggtactcatctctc

SEQ ID NO: 84818 - DNA, 317 bp, Homo sapiens
taaacaagggatgagtactgtaagcagagagatttcattgagttaagaagataggttggaggtaaggtagctgaaatttgcaaaacagagtactggagaggaaagagttatgccaagaaagggctccagaaatctgcacatgtgtcttactgagttttggcagaatagtaagctgtgtatacatgaagtgaatacaatgaggctgggctatgtacaaatgccgggaaatttgttttgttttgttgttgtttgagacagaatctcactctgtcgcccaggctggagtgcagtggcgtgatctcggctcactgcaacct

SEQ ID NO: 84819 - DNA, 534 bp, Homo sapiens
tttctttttttatttttctttttctttttttttctctgagacagagttttggtcttgtcacccaggctggagcgcaatggtgtgatcttggctcactgcaacctccacctcttgggttcaagcgattctcttgcctcagcctcctgagtagctggaattacaggcacttgcccccatgcccggctaattttttgtaattttagtggagatggggtttcgccatgttggacaggctggtcttgaactccttacctcaggtgatccacccttctcggcctcccaaagtgctgggattacaggtgtgagccaccgtgcccagcctttactttctttaatggtaaaatttgagaatcctaagttttaaattttgataaagtccaatttaccacatttttctctcatatttgtgcttttggtatcccaacaaatctttgccttctcccaagtcatggagattttttcctgttttcctctgaatattttagttttagtgtttatgtgtaaggccatgatccattgtgagttaatttctgt

SEQ ID NO: 84820 - DNA, 388 bp, Homo sapiens
gggccacctctgtggaaaccaaagagttctcaccaagcataaacatattcctgggctgatagaaattaaccactatttaaagtgtgtgagaagtgctgtgataattgagggacaggctggataagttctttatagacagagtggccctggagaggtgacatttgaagtgggacttgaggatgagaatgaggtagctgtgtcagggtctgggtgcctgcgtcccggccgcgagatagcatgtgcacaggccctgaggcaggaaagagcttgctgagttggaggaactcaggagacccctggctaagatgtgggggtggacaggactgggttgttggtagcggcagtggagagaagtgaatgtgtatgaggcagtttggaagcagtaaag

SEQ ID NO: 84821 - DNA, 1416 bp, Homo sapiens
cttcgctctcgctcggctccctctctagctgaccttccctttccctcacgcctccccacgcccggcccctggccccagcaccctgtccgctgccgcctcagagccgggaaaagcagccggagcccccgccgcccctgccgcagcgcgggcggtcagcgcgcagcccggcacccgcagcctgcagcctgcagcccgcagcccgcagcccggagccagatcgcgggctcagaccgaacccgactcgaccgccgcccccagccaggcgccatgctgccgcttctgctgggcctgctgggcccagcggcctgctgggccctgggcccgacccccggcccgggatcctctgagctgcgctcggccttctcggcggcacgcaccacccccctggagggcacgtcggagatggcggtgaccttcgacaaggtgtacgtgaacatcgggggcgacttcgatgtggccaccggccagtttcgctgccgcgtgcccggcgcctacttcttctccttcacggctggcaaggccccgcacaagagcctgtcggtgatgctggtgcgaaaccgcgacgaggtgcaggcgctggccttcgacgagcagcggcggccaggcgcgcggcgcgcagccagccagagcgccatgctgcagctcgactacggcgacacagtgtggctgcggctgcatggcgccccgcagtacgcgctaggcgcgcccggcgccaccttcagcggctacctagtctacgccgacgccgacgctgacgcgcctgcgcgcgggccgcccgcgccccccgagccgcgctcggccttctcggcggcgcgcacgcgcagcttggtgggctcggacgctggccccgggccgcggcaccaaccactcgccttcgacaccgagttcgtcaacattggcggcgacttcgacgcggcggccggcgtgttccgctgccgtctgcccggcgcctacttcttctccttcacgctgggcaagctgccgcgtaagacgctgtcggttaagctgatgaagaaccgcgacgaggtgcaggccatgatttacgacgacggcgcgtcgcggcgccgcgagatgcagagccagagcgtgatgctggccctgcggcgcggcgacgccgtctggctgctcagccacgaccacgacggctacggcgcctacagcaaccacggcaagtacatcaccttctccggcttcctggtgtaccccgacctcgcccccgccgccccgccgggcctcggggcctcggagctactgtgagccccgggccagagaagagcccgggagggccaggggcgtgcatgccaggccgggcccgaggctcgaaagtcccgcgcgagcgccacggcctccgggcgcgcctggactctgccaataaagcggaaagcgggcacgcgcagcgcccggcagcccaggccc

SEQ ID NO: 84822 - DNA, 446 bp, Homo sapiens
tgtaactgtttactgtcagtacctgtgttcgtacatgtaccccatgtgtctgtatgtatgcaggtatgcatctgtgtgagcgtgcctagctctgtgacatgggtaaagccctagcttgagtgctggtgaggaaatgaaggaaatggccacctggccctacctgggagggcctcaggctagagggaacacatagccccaaggtcaggaccctcagtgcctgagatgtggccttgcctgggagccccaggtagggggagtccacccaatcctcagagaatcaactcatgcactcaggaaatgactcaggaacagtgaaaagctccccaagaacaagttgaaagggatcttggtccttaatcatagcaaggatttggtaaccttggttacctgcaatgagtcaggaaaagactccaagggaagggagtgggggaggcattgtcacagga

SEQ ID NO: 84823 - DNA, 1738 bp, Homo sapiens
atcgtgagcaccgcagggtgctgtgtgattctgggcagataagggcaggtgtggtttacaactgctgttatgaactcagaagccctccccgcagcacttcctgggcagggcagcacagggcagctgggagcgcccagggggtgtaaaggaggagggtgaagggacatgggcacactttgcttccggagtctgcattcccgagtcagcttctatctcagcaagggccttggcagtcgctgcttttttctggacatcagttcttgattccttccatctccagccatggctggggccaggactcctttggagttggtgcttgaaggcagggagggctgtgtgaatgcctgaggcccgttcttcctgaacattcttggattctatttcccatgtagtctgggcacccaacagcttgttttctcgaggggctgcctgctttggggatggtgcccatgggtggcacattctccatcaactatgtttaagcatttcatcctgtgtgtgttgccctaaaaataaacatccctgtgggacgttcccttgcagtgtggctggtggctatgttctgagatgagagataaccactctttctgtccctctcttcccaccagggcgggagcagttccacggcctgggctccatgtactgccggggggcggccgccatcatcctcacctatgatgtgaatcaccggcagagcctggtggagctggaggaccggttcctgggcctgacagacacagccagcaaagactgcctcttcgccatcgtggggaacaaagtggacctcactgaggagggggccttggcgggccaggagaaggaagagtgcagtcccaatatggacgctggggaccgtgtctccccaagggcacctaagcaggtgcagctggaggatgcggtggccctttataaaaagatcctcaagtacaagatgctggatgagcaggatgtgccggccgctgagcaaatgtgctttgagaccagcgccaagaccggctacaatgtggacctcctgtttgagaccctctttgacctggtggtgccaatgatcttacagcagagagctgagaggccgtcacacacagtggatatatccagtcataagccacccaagaggaccagatctgggtgttgtgcctgactttcgagggcctcctggactcagactgtgcatgttgggaaggggtctgaccaggcaagctgtgatctgaaaggagcaaggaacagcaaggaattattttccagaatgacacccgcagcagaatgttggagtggaaatgatggctggctatgaagaggaggtcaacgtgtgtggtctcctcagtctctgtcagaggggtggggaggtgggaaacaggaatcctctgcaaagcccaatctgcagagtcgagacccctggtgctctctgccccgctgcctggcactggtcctttgcagccagccaccaacggcccccttgcccttgcagaggcagaagcctgcgtctgcacctgcacctctgaccgtttcagcaccctgggttgttaccacgtcctacaactctgacatttcttgttctcaagcgtttctcttcactgtgagttgtctttggtcctcccacttggtacttgtatcttgatgctttataatcctgactctcgacgtgttcatttatacaaaatcaggaataactttgtttttatactgattgcagcaatgttggctacatgtattattaaagaggatttttggaacaact

SEQ ID NO: 84824 - DNA, 1517 bp, Homo sapiens
cgtgggctccgtgctctgcacccagctccttcccgggcgcgcacacgcgcttcctctcttgagctcccgggcgtccggaggcgaaggtcccggagcgttcacgagaatccgggtcccggcgagtccggggtccgctcctccagctgcgcccagggcgcacgagccggccagcctcggggagagggcgcgggggcgctgggggttcttacgggaagatgaggaagcccgacagcaagatcgtgctcctgggggacatgaacgtggggaagacgtcgctgctgcagcggtatatggagcggcgcttcccggacacggtcagcacggtgggcggcgccttctacctgaagcagtggcgctcctacaacatctccatctgggacaccgcagggcgggagcagttccacggcctgggctccatgtactgccggggggcggccgccatcatcctcacctatgatgtgaatcaccggcagagcctggtggagctggaggaccggttcctgggcctgacagacacagccagcaaagactgcctcttcgccatcgtggggaacaaagtggacctcactgaggagggggccttggcgggccaggagaaggaagagtgcagtcccaatatggacgctggggaccgtgtctccccaagggcacctaagcaggtgcagctggaggatgcggtggccctttataaaaagatcctcaagtacaagatgctggatgagcaggatgtgccggccgctgagcaaatgtgctttgagaccagcgccaagaccggctacaatgtggacctcctgtttgagaccctctttgacctggtggtgccaatgatcttacagcagagagctgagaggccgtcacacacagtggatatatccagtcataagccacccaagaggaccagatctgggtgttgtgcctgactttcgagggcctcctggactcagactgtgcatgttgggaaggggtctgaccaggcaagctgtgatctgaaaggagcaaggaacagcaaggaattattttccagaatgacacccgcagcagaatgttggagtggaaatgatggctggctatgaagaggaggtcaacgtgtgtggtctcctcagtctctgtcagaggggtggggaggtgggaaacaggaatcctctgcaaagcccaatctgcagagtcgagacccctggtgctctctgccccgctgcctggcactggtcctttgcagccagccaccaacggcccccttgcccttgcagaggcagaagcctgcgtctgcacctgcacctctgaccgtttcagcaccctgggttgttaccacgtcctacaactctgacatttcttgttctcaagcgtttctcttcactgtgagttgtctttggtcctcccacttggtacttgtatcttgatgctttataatcctgactctcgacgtgttcatttatacaaaatcaggaataactttgtttttatactgattgcagcaatgttggctacatgtattattaaagaggatttttggaacaact

SEQ ID NO: 84825 - DNA, 934 bp, Homo sapiens
cgtgggctccgtgctctgcacccagctccttcccgggcgcgcacacgcgcttcctctcttgagctcccgggcgtccggaggcgaaggtcccggagcgttcacgagaatccgggtcccggcgagtccggggtccgctcctccagctgcgcccagggcgcacgagccggccagcctcggggagagggcgcgggggcgctgggggttcttacgggaagatgaggaagcccgacagcaagatcgtgctcctgggggacatgaacgtggggaagacgtcgctgctgcagcggtatatggagcggcgcttcccggacacggtcagcacggtgggcggcgccttctacctgaagcagtggcgctcctacaacatctccatctgggacaccgcagggcgggagcagttccacggcctgggctccatgtactgccggggggcggccgccatcatcctcacctatgatgtgaatcaccggcagagcctggtggagctggaggaccggttcctgggccgtcacacacagtggatatatccagtcataagccacccaagaggaccagatctgggtgttgtgcctgactttcgagggcctcctggactcagactgtgcatgttgggaaggggtctgaccaggcaagctgtgatctgaaaggagcaaggaacagcaaggaattattttccagaatgacacctgcacctctgaccgtttcagcaccctgggttgttaccacgtcctacaactctgacatttcttgttctcaagcgtttctcttcactgtgagttgtctttggtcctcccacttggtacttgtatcttgatgctttataatcctgactctcgacgtgttcatttatacaaaatcaggaataactttgtttttatactgattgcagcaatgttggctacatgtattattaaagaggatttttggaacaact

SEQ ID NO: 84826 - DNA, 576 bp, Homo sapiens
ttatttatttatttttttgagacggagtctccctctgtcgccaggctggagtgcagtggcacaatctcggctcactgcaacctccacctcccgaattcaagcaattctcctgcctcagcctcccaagtagctgggaccacaggcgtgcgccaccacacccagctaatgtttgtatttttagtaaagacagggtttcaccatgttggccaggatggtctcgatctcttgaccttgtgatccacctgccttggcctcccaaagtgctgggattacaggtgtgagccactgtgcccggccaagtcaatgagttttaataatgcttatttttccctatcttttgaagttaaaaagttggcttgctaaccagctataacttttagtatgttaaagtgttctggtctcactagcaaatcaaaaaggcccagcaatacgtcattctcccatatattctgcattgtctattaattttttacatgacttggggcacatcggccaggtgcagtggctcatgcctgcaatcccagcactttgggaggctgaggaaggaagattgcttgagcccaggagttggagact

SEQ ID NO: 84827 - DNA, 429 bp, Homo sapiens
aaattattggtgattatgtggcaggatgttttggatgtgtcttctccaggactgatccaaagaataaactttaaaagataaactcgtttctttgaattgctgtgcaaatgatagcatatttactctgaaagttaactgtgcaggaaagaggcagaaagaaattgagacccgtgtacctacatcttgaaagaggctttttgtagcttccctgcttcatctatgtcttatcgtatttagtttcatgaagccaaatgccatgaacctacctttccctctcatgattctgctgttgtataccttctcacacactactttgtcctgagttgcccctttatggtgatggtgaggacacttacctcagaggattatgggactgtgtgttctaattagaacctgaatggtcctgtgttatcagcggacactggatcc

SEQ ID NO: 84828 - DNA, 748 bp, Homo sapiens
gattatgaagatttgttttcttaaataagagttatagttttagcacttaacgtttggtcttttatgagttttaattaatttttgtacatgttgtgagtggaggtccaaattgattcttttatatgtgcttttccagctgtctcccagcacaatttgttgaaaatagaattctttctctactgaatggtcttgagacctttggagaaaatcaattaaccataagtatatgagtttatttctggaccctaaatttgattccattgagctatgtttctatgcttgtatgtattcataagtcagttggtagttcgtgtcttcctaggaatttgtctatttcatttaggttatctaatttgttggtatataattgctcatatgatttctttataaccccatttatttctgtaaagtcaatgtaatgtcctctctttcattactgattttagtaatttgagtcctcttttttctcttggtaagtctaaagttttgattttgttaattttgtttattttttttaaataaccaatttttgtgcttgttcattttctctattgtttttcttttctctatgtcatttatgtacactttacgctttattatttcctttattatgtttgctttgaatttagctttttcttttttctagtttattatatacttaggttattgatttgagatattttttttttttaatgtggatgtttccaatgaaaaattttcatctaaatactgcttttgttgtatccat

SEQ ID NO: 84829 - DNA, 459 bp, Homo sapiens
cgtgatatatgtgtgtatctactgtgtatggaggggagaggagagggagagagagagacaaaggtatggggagagactgtgaagtgacagaacacaaccagctctcctggaaatttaccctttcccaggtgttaggacaatgaaagaaacaaaatttccatttatcaaaagactttctgcattccaagtaatttcctagatgttttgtatcaattatcttattgaatttctattttcggatgtaagtattacaattccctcctagaggtgaagaaactgtggctcaggaagtttgaatgaccagattgggagggtagtgaatgagcccataatatttttcccattgccttggggcttaaactcaattaaataatggcctaattaaatagacatgatatacattatttaaataagtgtatagaccagaaaagcagggaagagacccaaagagtatgatat

SEQ ID NO: 84830 - DNA, 3102 bp, Homo sapiens
ccacctgccaggagcacgtcccgccggcagtcgcaggagccctgggagccgccgccatgggaatgtccaaatcacacagtttctttggttatcccctgagcatcttcttcatcgtggtcaatgagttttgcgaaagattttcctactatggaatgcgagcaatcctgattctgtacttcacaaatttcatcagctgggatgataacctgtccaccgccatctaccatacgtttgtggctctgtgctacctgacgccaattctcggagctcttatcgccgactcgtggctgggaaagttcaagaccattgtgtcgctctccattgtctacacaattggacaagcagtcacctcagtaagctccattaatgacctcacagaccacaaccatgatggcacccccgacagccttcctgtgcacgtggtgctgtccttgatcggcctggccctgatagctctcgggactggaggaatcaaaccctgtgtgtctgcgtttggtggagatcagtttgaagagggccaggagaaacaaagaaacagatttttttccatcttttacttggctattaatgctggaagtttgctttccacaatcatcacacccatgctcagagttcaacaatgtggaattcacagtaaacaagcttgttacccactggcctttggggttcctgctgctctcatggctgtagccctgattgtgtttgtccttggcagtgggatgtacaagaagttcaagccacagggcaacatcatgggtaaagtggccaagtgcatcggttttgccatcaaaaatagatttaggcatcggagtaaggcatttcccaagagggagcactggctggactgggctaaagagaaatacgatgagcggctcatctcccaaattaagatggttacgagggtgatgttcctgtatattccactcccaatgttctgggccttgtttgaccagcagggctccaggtggacactgcaggcaacaactatgtccgggaaaatcggagctcttgaaattcagcccgatcagatgcagaccgtgaacgccatcctgatcgtgatcatggtcccgatcttcgatgctgtgctgtaccctctcattgcaaaatgtggcttcaatttcacctccttgaagaagatggcagttggcatggtcctggcctccatggcctttgtggtggctgccatcgtgcaggtggaaatcgataaaactcttccagtcttccccaaaggaaacgaagtccaaattaaagttttgaatataggaaacaataccatgaatatatctcttcctggagagatggtgacacttggcccaatgtctcaaacaaatgcatttatgacttttgatgtaaacaaactgacaaggataaacatttcttctcctggatcaccagtcactgctgtaactgacgacttcaagcagggccaacgccacacgcttctagtgtgggcccccaatcactaccaggtggtaaaggatggtcttaaccagaagccagaaaaaggggaaaatggaatcagatttgtaaatacttttaacgagctcatcaccatcacaatgagtgggaaagtttatgcaaacatcagcagctacaatgccagcacataccagttttttccttctggcataaaaggcttcacaataagctcaacagagattccgccacaatgtcaacctaatttcaatactttctaccttgaatttggtagtgcttatacctatatagtccaaaggaagaatgacagctgccctgaagtgaaggtgtttgaagatatttcagccaacacagttaacatggctctgcaaatcccgcagtattttcttctcacctgtggcgaagtggtcttctctgtcacgggattggaattctcatattctcaggctccttccaacatgaagtcggtgcttcaggcaggatggctgctgaccgtggctgttggcaacatcattgtgctcatcgtggcaggggcaggccagttcagcaaacagtgggccgagtacattctatttgccgcgttgcttctggtcgtctgtgtaatttttgccatcatggctcggttctatacttacatcaacccagcggagatcgaagctcaatttgatgaggatgaaaagaaaaacagactggaaaagagtaacccatatttcatgtcaggggccaattcacagaaacagatgtgaaggtcaggaggcaagtggaggatggactgggcccgcagatgccctgacctctgcccccaggtagcaggacactccattggatggcccctgatgaggaagacttcagaattgggaactaaaccatgaatgctattttcttttttctttttcttttcttttttttttttttttttttgagacagagttttgctcttgttgtccaggctggagtgcaatggcacgatctcagctcactgcaacctccgcctcccaggttcaagtaattctcctgcctcagcctcccgagtggctgggattagcggcatgcaccaccacgcccagctatttttgtatttttagtagagatggggtttcaccatgttaaccaggatggtctcgatctcttgacctggtgatctgcccacctcggcctgccaaagtgctgggattacaggcttgagctaccgcgcccggccgtgaacgctattttctaagcagccagcagtgaatctaaaactctggaagaagtcttctgtttgaaaggcttatttaagccacacgtacacacactgtcttagagtactgtgagcccaccccacattggtcatcttccctatcacacaaatgatgttattttggactagcttaattttgaaatggtaacaaagtttcctattccatactgttcatttctaatactcttacgaaaactattctaaaggaggcaggagccaaggccaaaagtgaacgtacaggtttgaaatggctgtgataaggaccagctggtattaactgataactttacctttgggtttttgttattttgtttttctagtccctacctgtgtttaaattatggataactcgaaagacagctcaggtgaaggccagtaatgatttttttgaagtttcaatggtgtgaaataaatttctgttctta

SEQ ID NO: 84831 - DNA, 1701 bp, Homo sapiens
  misc_feature (1119)..(1120): n is a, c, g, or t
cagtcaccggtaagttactgaatctgcgttggctgcctttcatgccactggtgctcctttgtggctatggaccagtggggggtgtatttcaatcctgtgcttgtttctttttgtcagagtttctttggttatcccctgagcatcttcttcatcgtggtcaatgagttttgcgaaagattttcctactatggaatgcgagcaatcctgattctgtacttcacaaatttcatcagctgggatgataacctgtccaccgccatctaccatacgtttgtggctctgtgctacctgacgccaattctcggagctcttatcgccgactcgtggctgggaaagttcaagaccattgtgtcgctctccattgtctacacaattggacaagcagtcacctcagtaagctccattaatgacctcacagaccacaaccatgatggcacccccgacagccttcctgtgcacgtggtgctgtccttgatcggcctggccctgatagctctcgggactggaggaatcaaaccctgtgtgtctgcgtttggtggagatcagtttgaagagggccaggagaaacaaagaaacagatttttttccatcttttacttggctattaatgctggaagtttgctttccacaatcatcacacccatgctcagaggtaagagatacctgaaaggaacttctgttggtcttttttagtaaggccaagtccgtgtcttcttcgttttgttctgttcttcccttctgccctgttttctagctgtcagctacatgctgggatgcacgttggaatctggagtaagtgcttccttccctgtgagtttcacctcctttttgtcttatttaaatcccttatcccagtgaccactggagagtctaagccatccttagcatgggcatccatcttcctaaactgttattcatgcaaagtcatgctcgtggtaagaggtaagaggcaagagaggtgccttggaagccaagctggtggccgtagctgccattttagccttcaagctttgctccccagtgatatttctgtgacttagaagagttactgggcaaaattgtattgattttttgtttgttttgttttgtttttagaaggagtcttgctctgtcacccannctggaggcagtggcgtgatcttggctcactgcaacctccacctcctgggttcaagcaattctcctgcctcagcctcctgagtagctgggacaacaggcgcctgccaccatgcccggataatattttttgtatttttagtagagatgggatttcaccatgttagccaggatggtctcgatctcctgccctcgtgatctgcctgccttggcctcccaaagtgctgggattacaggtgtgagccaccacgcctggctaaggcaaagtttttttctttgctttcccatcatctcaagtatttccaaaagaactgctcagataaagagaatgggacagtgtcagtaactatcagaggtttgtgcttgctaatgctccatagagagtttgtgaatttcccatgtggaagggaatatgtggtgttactggtgacaaactaacaagaccatcctgtccacatttgaatcagattagattatgaaataaagatttcaggagaattgcttgaacctggtagacgggggttgcagtgagctgagatcgtgctgctgcactccagcctagcccacagagcaagactctgtctc

SEQ ID NO: 84832 - DNA, 781 bp, Homo sapiens
tgggactagcgaaatctgtctgcactgatcgcagtcgtcctcagtttcaccctctaggaatcggcctgggggtgcacgtgctactctcttcctccaggccggtccccggcgcgtgcgcgcgatccatgtccatgtccgcgcctatcaataaagttgctcacttgttgccggcccgctagcccgaaaggttgcgcgcgcagaccgagaagtctcgcgatagccagccgcggctgcccttgcgcttcccgagctggcggggtccgtggtgcgggatcgagattgcgggctatggcgccgaaggtttttcgtcagtactgggatatccccgatggcaccgattgccaccgcaaagcctacagcaccaccagtattgccagcgtcgctggcctgaccgccgctgcctacagagtcacactcaatcctccgggcaccttccttgaaggagtggctaaggttggacaatacacgttcactgcagctgctgtcggggccgtgtttggcctcaccacctgcatcagcgcccatgtccgcgagaagcccgacgaccccctgaactacttcctcggtggctgcgccggaggcctgactctgggagcacgcacgcacaactacgggattggcgccgccgcctgcgtgtactttggcatagcggcctccctggtcaagatgggccggctggagggctgggaggtgtttgcaaaacccaaggtgtgagccctgtgcctgccgggacctccagcctgcagaatgcgtccagaaataaattctgtgtctgtgtgtg

SEQ ID NO: 84833 - DNA, 573 bp, Homo sapiens
aaggctagtacgaggcccggtgtgtaatcggcaccgagggagctggcggggtccgtggtgcgggatcgagattgcgggctatggcgccgaaggtttttcgtcagtactgggatatccccgatggcaccgattgccaccgcaaagcctacagcaccaccagtattgccagcgtcgctggcctgaccgccgctgcctacagagtcacactcaatcctccgggcaccttccttgaaggagtggctaaggttggacaatacacgttcactgcagctgctgtcggggccgtgtttggcctcaccacctgcatcagcgcccatgtccgcgagaagcccgacgaccccctgaactacttcctcggtggctgcgccggaggcctgactctgggagcacgcacgcacaactacgggattggcgccgccgcctgcgtgtactttggcatagcggcctccctggtcaagatgggccggctggagggctgggaggtgtttgcaaaacccaaggtgtgagccctgtgcctgccgggacctccagcctgcagaatgcgtccagaaataaattctgtgtctgtgtgtg

SEQ ID NO: 84834 - DNA, 814 bp, Homo sapiens
tgggactagcgaaatctgtctgcactgatcgcagtcgtcctcagtttcaccctctaggaatcggcctgggggtgcacgtgctactctcttcctccaggccggtccccggcgcgtgcgcgcgatccatgtccatgtccgcgcctatcaataaagttgctcacttgttgccggcccgctagcccgaaaggttgcgcgcgcagaccgagaagtctcgcgatagccagccgcggctgcccttgcgcttcccgagctggcggggtccgtggtgcgggatcgagattgcgggctatggcgccgaaggtttttcgtcagtactgggatatccccgatggcaccgattgccaccgcaaagcctacagcaccaccagtattgccagcgtcgctggcctgaccgccgctgcctacagagtcacactcaatcctccgggcaccttccttgaaggagtggctaaggttggacaatacacgttcactgcagctgctgtcggggccgtgtttggcctcaccacctgcatcagcgcccatgtccgcgagaagcccgacgaccccctgaactacttcctcggtggctgcgccggaggcctgactctgggagcacgcacgcacaactacgggattggcgccgccgcctgcgtgtactttggcatagcggcctccctggtcaagatgggccggctggagggctgggaggtgtttgcaaaacccaaggtgtgagccctgtgcctgccgggacctccagcctgcagaatgcgtccagaaataaattctgtgtctgtgtgtgaagtgactcgtggaaatgtccacgggtaccgag

SEQ ID NO: 84835 - DNA, 1146 bp, Homo sapiens
tgggactagcgaaatctgtctgcactgatcgcagtcgtcctcagtttcaccctctaggaatcggcctgggggtgcacgtgctactctcttcctccaggccggtccccggcgcgtgcgcgcgatccatgtccatgtccgcgcctatcaataaagttgctcacttgttgccggcccgctagcccgaaaggttgcgcgcgcagaccgagaagtctcgcgatagccagccgcggctgcccttgcgcttcccgagctggcggggtccgtggtgcgggatcgagattgcgggctatggcgccgaaggtttttcgtcagtactgggatatccccgatggcaccgattgccaccgcaaagcctacagcaccaccagtattgccagcgtcgctggcctgaccgccgctgcctacagagtcacactcaatcctccgggcaccttccttgaaggagtggctaaggttggacaatacacgttcactgcagctgctgtcggggccgtgtttggcctcaccacctgcatcagcgcccatgtccgcgagaagcccgacgaccccctgaactacttcctcggtggctgcgccggaggcctgactctgggagcacgcacgcacaactacgggattggcgccgccgcctgcgtgtactttggcatagcggcctccctggtcaagatgggccggctggagggctgggaggtgtttgcaaaacccaaggtgtgagccctgtgcctgccgggacctccagcctgcagaatgcgtccagaaataaattctgtgtctgtgtgtgaaaaaaaaaaaaaaaaaaaaaaaaaaaaaaaaaaaaaaaaaaaaaaaaaaaaaaaaaaaaaaaaaaaaaaaaaaaaaaaaaaaccgtcgcggcgcggccgccccaaggaggggggcgccacacatataagtgcgcgcgggggacgactgctccccgcagaagttattatcaccgcgcgccgcgacgaagagaagagatgacacgccgcggcggtgtgtttataatagaggggcggccgcccaccaaagaatagtgccgctgcggctcacccggggtagaatagaaccacgtcggtgtcactcgcggggcagacgatgatactttgtgtctcccccgcggggggcgaactgttggttcccccccag

SEQ ID NO: 84836 - DNA, 1275 bp, Homo sapiens
tgggactagcgaaatctgtctgcactgatcgcagtcgtcctcagtttcaccctctaggaatcggcctgggggtgcacgtgctactctcttcctccaggccggtccccggcgcgtgcgcgcgatccatgtccatgtccgcgcctatcaataaagttgctcacttgttgccggcccgctagcccgaaaggttgcgcgcgcagaccgagaagtctcgcgatagccagccgcggctgcccttgcgcttcccgagctggcggggtccgtggtgcgggatcgagattgcgggctatggcgccgaaggtttttcgtcagtactgggatatccccgatggcaccgattgccaccgcaaagcctacagcaccaccagtattgccagcgtcgctggcctgaccgccgctgcctacagagtcacactcaatcctccgggcaccttccttgaaggagtggctaaggttggacaatacacgttcactgcagctgctgtcggggccgtgtttggcctcaccacctgcatcagcgcccatgtccgcgagaagcccgacgaccccctgaactacttcctcggtggctgcgccggaggcctgactctgggagcacgcacgcacaactacgggattggcgccgccgcctgcgtgtactttggcatagcggcctccctggtcaagatgggccggctggagggctgggaggtgtttgcaaaacccaaggtgtgagccctgtgcctgccgggacctccagcctgcagaatgcgtccagaaataaattctgtgtctgtgtgtgaacacaaacacaacacaaacacaacaacgaacacaaacacccacacacacaagaaaaataaaacccacccacacacgcgcacacagcacgacaggcagggaggcgaccgcaacatcagacgcaacgcgcacacaaggcagaacagcacgagagcggaggacgcgagagaacggaggcacacgcgcgaaggccgcggacaaaaaagagaggacaagagaggagcgcagcacagaggggaagacacatgacaagaggagccagagcagagaaaggaagtggagaaacgaagagaacaagacagaacagacagacgcgagagaggagacagcgcggagaagtaggaagaccgaccgcacgccggacgccgagcagacagaagcagaacagacaggcagctatcgcagagagggaaacacgacaaacaggtgagatgaagcagaacagaaacgaggtagaatgaccaccagcagagaggacaacgagggaagtaaacc

SEQ ID NO: 84837 - DNA, 1064 bp, Homo sapiens
gccctcccatgggcccgggctcagcgtcagtgcccgcctgtgcccctggcctacccccagcccgccaaggctcgggccctcagggccagcgggaggagtgaacgagccctcttgcagctcagccgctctggcctggcatgttgggagtgatgaatggcaggttccaggcaggcagagagggagggtgcgagggcagggcgtacgccgtcactgctgtctctgcgtcaagaccttggggaggccttgtccctccccagctcccactggaactggtcagaggttgcaggtgggttgaggtcttgactgtagcccagctcaggctggaactgctccctgtccccaagccagcctccctgtctctcttcaaagagtgtgagtccctttaggtcctggtgtgtggggacacacctccttcctcctctggcccggaggcttcggagcaggagagcctggagaagtgggggcactgtcggggctcctcggtacacagaccacgggacagatgcgtggcctggccctggcatccatgggcaaaggagagactgagacacaccgatgtgtcaccatggcccggtgcccagccttgccccagccccagctgggggcagcacggtgtcctcgcagggggaagtcagtgtggggcgggatgaggacccacagcctgggttcctgctgggaagcaacctggactccggcctccctctgtgcatcagtttccacatctccagagtctagggccctcttcctgagtgacttaatccctgaagagagtgtcctgtcaggggtctcagtctggctcccagggtgggcaccggccagggcgtggagcgtcttggtccggccgagccccacccgggcctgacatcacctccccactcccacagcgcacaactacgggattggcgccgccgcctgcgtgtactttggcatagcggcctccctggtcaagatgggccggctggagggctgggaggtgtttgcaaaacccaaggtgtgagccctgtgcctgccgggacctccagcctgcagaatgcgtccagaaataaattctgtgtctgtgtgtg

SEQ ID NO: 84838 - DNA, 1123 bp, Homo sapiens
  misc_feature (607)..(607): n is a, c, g, or t
tgggactagcgaaatctgtctgcactgatcgcagtcgtcctcagtttcaccctctaggaatcggcctgggggtgcacgtgctactctcttcctccaggccggtccccggcgcgtgcgcgcgatccatgtccatgtccgcgcctatcaataaagttgctcacttgttgccggcccgctagcccgaaaggttgcgcgcgcagaccgagaagtctcgcgatagccagccgcggctgcccttgcgcttcccgagctggcggggtccgtggtgcgggatcgagattgcgggctatggcgccgaaggtttttcgtcagtactgggatatccccgatggcaccgattgccaccgcaaagcctacagcaccaccagtattgccagcgtcgctggcctgaccgccgctgcctacagagtcacactcaatcctccgggcaccttccttgaaggagtggctaaggttggacaatacacgttcactgcagctgctgtcggggccgtgtttggcctcaccacctgcatcagcgcccatgtccgcgagaagcccgacgaccccctgaactacttcctcggtggctgcgccggaggcctgactctgggagcacgcagtgagntggcccctccccacccccaccctcctcccagcctggcagaatgacccctgacctctgctcatcctccaccctctctgttccatcccggacaagaagtaaagcagccttcttgaacaccagccatttcagtcatagcgacagctgctgctgctgcttaagcacctactgtggccctccctgacctgccctgtcccctccccaccctcccctcctcactctgctccagcctggaccacagagcaaaactctgtctcaaacaatagtaatacacattacattagctggcgaacaaaaacaaagacaagcatcacagaaacctcgacgggcatcactagttgcggggcggcaccaacagctcatggaacggcccctgtccatccgagcgtccgagcccgctcgtgagaagcggcaacacgcggcccccaaaagaagcgctaatggcacacccgggcccccatacacagagagaacaacgtggacgggggagaccgtcgcgcacagtcggcggcgcaacaa

SEQ ID NO: 84839 - DNA, 545 bp, Homo sapiens
  misc_feature (512)..(512): n is a, c, g, or t
cggacgcgtgggtcgacggacgcgtgggtcgacccacgcgtccggggatatccccgatggcaccgattgccaccgcaaagcctacagcaccaccagtattgccagcgtcgctggcctgaccgccgctgcctacagagtcacactcaatcctccgggcaccttccttgaaggagtggctaaggttggacaatacacgttcactgcagctgctgtcggggccgtgtttggcctcaccacctgcatcagcgcccatgtccgcgagaagcccgacgaccccctgaactacttcctcggtggctgcgccggaggcctgactctgggagcacgcacgcacaactacgggattggcgccgccgcctgcgtgtactttggcatagcggcctccctggtcaagatgggccggctggagggctgggaggtgtttgcaaaacccaaggtgtgagccctgtgcctgccgggacctccagcctgcagaatgcgtccagaaataaattctgtgtctgtgtgtggtngttgaaaacacaatcgaaaaaaactttaacacc

SEQ ID NO: 84840 - DNA, 388 bp, Homo sapiens
ctccatccagacactggcagtgagcgcccaagaggctcctgctgtgcccgtctcgaggcccttgctcttcccgtctaccccgcagctgctgtcggggccgtgtttggcctcaccacctgcatcagcgcccatgtccgcgagaagcccgacgaccccctgaactacttcctcggtggctgcgccggaggcctgactctgggagcacgcacgcacaactacgggattggcgccgccgcctgcgtgtactttggcatagcggcctccctggtcaagatgggccggctggagggctgggaggtgtttgcaaaacccaaggtgtgagccctgtgcctgccgggacctccagcctgcagaatgcgtccagaaataaattctgtgtctgtgtgtg

SEQ ID NO: 84841 - DNA, 301 bp, Homo sapiens
gctgatgcaggtggtgaggccaaacacggccccgacagcagctgcagtgaacgtgtattgtccaaccttagccactacttcctcggtggctgcgccggaggcctgactctgggagcacgcacgcacaactacgggattggcgccgccgcctgcgtgtactttggcatagcggcctccctggtcaagatgggccggctggagggctgggaggtgtttgcaaaacccaaggtgtgagccctgtgcctgccgggacctccagcctgcagaatgcgtccagaaataaattctgtgtctgtgtgtg

SEQ ID NO: 84842 - DNA, 884 bp, Homo sapiens
tgggactagcgaaatctgtctgcactgatcgcagtcgtcctcagtttcaccctctaggaatcggcctgggggtgcacgtgctactctcttcctccaggccggtccccggcgcgtgcgcgcgatccatgtccatgtccgcgcctatcaataaagttgctcacttgttgccggcccgctagcccgaaaggttgcgcgcgcagaccgagaagtctcgcgatagccagccgcggctgcccttgcgcttcccgagctggcggggtccgtggtgcgggatcgagattgcgggctatggcgccgaaggtttttcgtcagtactgggatatccccgatggcaccgattgccaccgcaaagcctacagcaccaccagtattgccagcgtcgctggcctgaccgccgctgcctacagagtcacactcaatcctccgggcaccttccttgaaggagtggctaaggttggacaatacacgttcactgcagctgctgtcggggccgtgtttggcctcaccacctgcatcagcgcccatgtccgcgagaagcccgacgaccccctgaactacttcctcggtggctgcgccggaggcctgactctgggagcacgcacgcacaactacgggattggcgccgccgcctgcgtgtactttggcatagcggcctccctggtcaagatgggccggctggagggctgggaggtgtttgcaaaacccaaggtgtgagccctgtgcctgccgggacctccagcctgcagaatgcgtccagaaataaattctgtgtctgtgtgtgcaccacacccaccacccccaggggggggccgggtacccaatttggcctataatgaggccgcattacctcactggccccgttttcacaggccagctggggcccg

SEQ ID NO: 84843 - DNA, 830 bp, Homo sapiens
tgggactagcgaaatctgtctgcactgatcgcagtcgtcctcagtttcaccctctaggaatcggcctgggggtgcacgtgctactctcttcctccaggccggtccccggcgcgtgcgcgcgatccatgtccatgtccgcgcctatcaataaagttgctcacttgttgccggcccgctagcccgaaaggttgcgcgcgcagaccgagaagtctcgcgatagccagccgcggctgcccttgcgcttcccgagctggcggggtccgtggtgcgggatcgagattgcgggctatggcgccgaaggtttttcgtcagtactgggatatccccgatggcaccgattgccaccgcaaagcctacagcaccaccagtattgccagcgtcgctggcctgaccgccgctgcctacagagtcacactcaatcctccgggcaccttccttgaaggagtggctaaggttggacaatacacgttcactgcagctgctgtcggggccgtgtttggcctcaccacctgcatcagcgcccatgtccgcgagaagcccgacgaccccctgaactacttcctcggtggctgcgccggaggcctgactctgggagcacgcacgcacaactacgggattggcgccgccgcctgcgtgtactttggcatagcggcctccctggtcaagatgggccggctggagggctgggaggtgtttgcaaaacccaaggtgtgagccctgtgcctgccgggacctccagcctgcagaatgcgtccagaaataaattctgtgtctgtgtgtgaaaatacacctccacatcaggactaaaagctgtgcaaaaacgcgggcgg

SEQ ID NO: 84844 - DNA, 901 bp, Homo sapiens
tgggactagcgaaatctgtctgcactgatcgcagtcgtcctcagtttcaccctctaggaatcggcctgggggtgcacgtgctactctcttcctccaggccggtccccggcgcgtgcgcgcgatccatgtccatgtccgcgcctatcaataaagttgctcacttgttgccggcccgctagcccgaaaggttgcgcgcgcagaccgagaagtctcgcgatagccagccgcggctgcccttgcgcttcccgagctggcggggtccgtggtgcgggatcgagattgcgggctatggcgccgaaggtttttcgtcagtactgggatatccccgatggcaccgattgccaccgcaaagcctacagcaccaccagtattgccagcgtcgctggtagggactgaaggttggagaagcatattaactgctccagggtcatttgaagctgggctgcaagtccaggtcggctgacctgctcctaggggtctctgaagcaaggaatgttcccatcaggcctgaccgccgctgcctacagagtcacactcaatcctccgggcaccttccttgaaggagtggctaaggttggacaatacacgttcactgcagctgctgtcggggccgtgtttggcctcaccacctgcatcagcgcccatgtccgcgagaagcccgacgaccccctgaactacttcctcggtggctgcgccggaggcctgactctgggagcacgcacgcacaactacgggattggcgccgccgcctgcgtgtactttggcatagcggcctccctggtcaagatgggccggctggagggctgggaggtgtttgcaaaacccaaggtgtgagccctgtgcctgccgggacctccagcctgcagaatgcgtccagaaataaattctgtgtctgtgtgtg

SEQ ID NO: 84845 - DNA, 642 bp, Homo sapiens
tgggactagcgaaatctgtctgcactgatcgcagtcgtcctcagtttcaccctctaggaatcggcctgggggtgcacgtgctactctcttcctccaggccggtccccggcgcgtgcgcgcgatccatgtccatgtccgcgcctatcaataaagttgctcacttgttgccggcccgctagcccgaaaggttgcgcgcgcagaccgagaagtctcgcgatagccagccgcggctgcccttgcgcttcccgagctggcggggtccgtggtgcgggatcgagattgcgggctatggcgccgaaggtttttcgtcagtactgggatatccccgatggcaccgattgccaccgcaaagcctacagcaccaccagtattgccagcgtcgctggcctgaccgccgctgcctacagagtcacactcaatcctccgggcaccttccttgaaggagtggctaaggttggacaatacacgttcactgcagcgcccatgtccgcgagaagcccgacgaccccctgaactacttcctcggtggctgcgccggaggcctgactctgggagcacgcagtgagtggccccactcaccgagcacgaaaagacaacaaaggagagcagaatgagcaaagaaaacgcagaaaagaaaagaca

SEQ ID NO: 84846 - DNA, 115 bp, Homo sapiens
aggtgtttgcaaaacccaaggtgtgagccctgtgcctgccgggacctccagcctgcagaatgcgtccagaaataaattctgtgtctgtgtgtgtgtgtcagtgtccggagggctt

SEQ ID NO: 84847 - DNA, 421 bp, Homo sapiens
acagcctccctcctctgtctcgcaggcctgaccgccgctgcctacagagtcacactcaatcctccgggcaccttccttgaaggagtggctaaggttggacaatacacgttcactgcagctgctgtcggggccgtgtttggcctcaccacctgcatcagcgcccatgtccgcgagaagcccgacgaccccctgaactacttcctcggtggctgcgccggaggcctgactctgggagcacgcacgcacaactacgggattggcgccgccgcctgcgtgtactttggcatagcggcctccctggtcaagatgggccggctggagggctgggaggtgtttgcaaaacccaaggtgtgagccctgtgcctgccgggacctccagcctgcagaatgcgtccagaaataaattctgtgtctgtgtgtg

SEQ ID NO: 84848 - DNA, 1126 bp, Homo sapiens
ccaggccgtgccatccccggggaggtacagaaaaaagtaacaaaaataatttttggcttcaagcacccaacaatggaaatgctgaaacccatgtcctttaagtccttttcttctcctagcagagggccctctgcctacatggggcaccgtggtggccatttaatgtactcctgcttggtacccacctctgctctgccccctggtggccacagacaccattgctgctgcctcagcacagtttgaccttgttgctgccaagagccacctctcctctcatcactgtccccactctcctgccatgcctcaggtggctgctggcagaagagcagtgggctttgtttcttcagaacatcacagcaaccactgtcttatcagctcacaccctcaggatcttactgccccttttcccaaaaatctccactccggcaaccctggccctgcatcattgaaggacatttaagtgatataacatattgttgcctcaaaaaagttttttccctcttcaacagctgggacaactggataaccacatgcaagagaatgatgtttggccactaaccacaccatacatacaaattaactcaaaatgaatcaaagacttaaatgtaagagctaaaacttagaacaaacaggagaaaatcttcacaaccatggatttggcaatggattcttagataagatgccaaaagcacaagcaacacatggaaaaaaagagatacattagacttcatcaaaattaaaaactcttttgtgcatctaaggacactatcaagaaaataaaaagaaaaactacagaatgggagaaaacatttacaaaccatatacgaaaggatctaatatccagaatatttaagaagtctatgactccccaacaaaaagacaacccaatttaaaaatggccaaaggactcgaattgatatttttccaagaagatacgcaaatgaccaacacacacttgaaaagatgcccagagctggacatggtggtatgttcctgtggtcccagttactcaggagctgaggcaggaggatcacttgagcctaggagttcaagcctggagtaaactatgatctcaccactacattccagcctgagcaacacacggagacctggtctcaaaaaaaaa

SEQ ID NO: 84849 - DNA, 875 bp, Homo sapiens
cttgccgaggactttgtccaccaagtgatgaaagcatgcaaatgcctccgaatcaaagatgaggaaaacaaaagctcagaaactatcttggagtcagcaagtaagaaggagcttagaaaggcttaacattttccatgcttctgcctggcttcagagcccatgcactctgccttaccacggcaggtgaaagatggccccaaattcttaggtacatctcctgccaaaagacccctcctatgggttctgtgactacttcaatgaaaagaatagggcagaagagatgatgagaacttaacatctggcagtgtccatttcctgtcttttgaaactttctgttaaaggcctgagccacgtatgaagtgtgaatcttcacaccatgcaagagaagccacatgttattgctctggtcaacaatcccagctgacccaaccagatagtgtatcaggcatatgagtaaagcattcttagattcttcagtccagcccttcaccagcagaacaccattcagcaacccttgtcggcatcatgtgggacagaagaaccacccagctgagccttatccaaattcctgaccacaaaatcataagagagaatgacttctttcatatcgctgaatggagcaacatgtttggccaagttcctgtcccagggaggagaaccttcagcttgcaacaagtcctggccgttggagaaaccatgagactagaccttgtgtaaagcagctgattctgccatgggggaaatgcccttttgtttactgagcttctcccacccatgccttgctccactttcctctagaagcctgagatattgggaataagagtctcagcctccaagagatggagaacatatcaagagagtctggatttctgggg

SEQ ID NO: 84850 - DNA, 404 bp, Homo sapiens
gtccgacttgcttccaccatgcgtcacctccctcgggcctggacctggcctgcacatgcccttcctaatctgtctccatctctcctcgctctccccttccattccccccaccccctcccacccactggaccctctggactggcatcagcaaagacctgttaaccagccccactttcttgctctaactgaaaccaggctccccgctgaggacaccactcctaatccaacacgcccctcctaagcccttcaccctcaggctccagggctgctggtgcttgcctccaagctcgctccttcctaccgcaaacctcccaggcctttagaagccaatctcctgcttttacccctccacgcagcaggacgttggcaccctactctcctcactcctggcaaggtgagacccg

SEQ ID NO: 84851 - DNA, 352 bp, Homo sapiens
cctgatgcagtggctcacacctgtaatcccagcagtttgggaggccgaggctggtggatcccttgagctcaggagttcgaaaccagcctggccaacatggtgaaacccccgtcttattagatgggagcacagagtggagatagggagaccagtgaattctccctatctccactctggaaaaaaggaagtcatcttgcctgtgacagttgtccaggcaagagatgctgggggcttggaccacaacagactatggactggaggagaggtgaagttttcaagagacatttaggaagtaacaccaccaatagtttagagagaaagaagaaggcagacgtgacagattttagacctg

SEQ ID NO: 84852 - DNA, 433 bp, Homo sapiens
gttattttttaaagtcgttttagtgattctgggtctttgcattttagaattagcctggcaatttccacaagaaagccttttgggattgttattggtattcttttgccgtgaagatctgtttggaaagaattgatcaagtcttctgatgcatgaatgtagtatctctccatttattttagatctgtaatttctttcagctgagttttgtagttttcagttgacatgtctttcccatcttttgtcagattattccgtttcatatttcttgacgttattgtaaatggtatcattacataaatgtaattttttaaaatttaaattcacaattgtttgttgccagcatatagaaatacggttgatttttaaaaaattgtttaattgtggtaaaatacacatagcaaagaagttaccatcttaaccattcttaagtgta

SEQ ID NO: 84853 - DNA, 881 bp, Homo sapiens
acaccagaaactgccccaagtgagaagcatgttttgaagggcagggcaggggaagcagacttttcttcaaaaatgtcaatgtcataaaaaatacgagctgtgtaaatatcccagaaaagtttagaaagacttggtacctaaagccaatacccaatcctagactggattctgttctagaaaggaattactaaaaagaacattagatcaactaacaaaactagaatatggagggcagattagacataaatactaaatcaatgttaaatttactcaagttaacaatatactttggttatgtaacaaaatatatccctattaggaaatatacactgtaatacttaagggtaaagggtggtgatgtatacaacttagtcttaaatggttcggaaaaaaataaatactgtgtatgtatagaaagagcatgcaaatgatgatgcaaatagcataaagtgttaacagtaggtaatctggaaaaaggatatatgagtggccctttgtattattatccttgcaattttttataagtttgaaattatttccaaacaaaatagtttaaaaagacaggagctagcttgaaggggattctactgggcaaattttggacaatttcaacaccaaaatgaatcatgactggaatggactataatacattgacttcagaataagaaacaatcagtccagctgatgcttaaaaaaaaatcagtttctaagagaagaaaagctcttctttccaaaagccaaataacaattacagaaagtgaaagaaatagaaaatcaccatttatatccaatataataactaaagtaagactcagccctgtgtactaaaaccactgagtgaaaggtaaggaatgagatattcacatagtattagatttctc

SEQ ID NO: 84854 - DNA, 862 bp, Homo sapiens
aattaaaaacaatttaatactcaacagtgggggaagggaatgttaagtaaatcaaggtaaatctacctgatgaaacatcattatgatcaccgtgaatgctacatagcaacagcagaaaattcaaggacacaatgttaacatcaggttctagtgaccctgagtgcaataatgtgaaaagcatccctgtatatgaatagtgtctgaatagggaattagtaaaaataattcctgtcattgtatttgggttggaggtttctttaagaatttgtttctccgctatccaaactgtgtgtggttatcttgtctttttcatttttttttttaagacaggatatcactgtcacccaggctggattgcagcggtgtcaccatggctcactgcagcctcaacctcctgggctcaggtcatcctctcacctcagcctcccaagtagctgggactacagcatgcaccaccatgcccggctaattttttgtatttctgttagagacaggttttgccatattgcccaggctggtcttgaactcctgggctcaagcaatctgcccatcttggtctcccaaagtgctgggattataggagtaaaccaccgtgcctggccttttctttcttcagagttacccaactgcttcattttttagaaatacagaaatgttgggaaaagacagaataatccaatatttaatattctgctcccagtatgcattaaataaataaaacaaaattcaaaaatggagggaacacaagtaattttcttttttgggtagagcagacactttggtcataaagagatctgtagtacccaagtctctcacacaaagttaactgcaactttcccaacaattccacttttgaaatcac

SEQ ID NO: 84855 - DNA, 449 bp, Homo sapiens
gatgctgtgtctcctgcatagagcggtatctactatcagtatttctgcatgtatcttatacatcatgatcatgttagattctaaggacctttgtctccttcatagtggattaaaagcatgatgtcattcactatttgtagttaattgaataaaaatatgtgtcaggattaactaaaggcattcctaaggaaatgtcaagcctagatgccaagtctgatctgtaatcttgtccaccatcttttcaataataaattcaaccataacaaatctccctttcattttaacaaactatgcagataccaagtttaggggtaggttttctggttacttttattttttctagagttggtcttttggcttagtcttgtacttttctaggggatttgttattctgctgggcagaattaagaaaaaactgaaatttatcaaaaataaatgtctttgataag

SEQ ID NO: 84856 - DNA, 264 bp, Homo sapiens
gagccatacagaaggtgctgggaaaactgctagagcctgaaccccacctacacctcccagaagggtctgggggaccccagagtgtgaagggcctggttttcccccagggcccaggtctgaccccaagttgggaggaccagaaaatgcaaaaggctggaatatgcaataaacagccccagacttggtgggagtccagaggtctaggtttcatcactcaccatgaggccctgggccattcacttccccaccacacctgcatcctcc

SEQ ID NO: 84857 - DNA, 1893 bp, Homo sapiens
  misc_feature (2)..(2): n is a, c, g, or t
  misc_feature (4)..(4): n is a, c, g, or t
ananagagagagatagagaaagagaaagacagaggtgtttcccttagctatggaaactctataagagagatccagcttgcctcctcttgagcagtcagcaacagggtcccgtccttgacacctcagcctctacaggactgagaagaagtaaaaccgtttgctggggctggcctgactcaccagctgccatgcagcagcccttcaattacccatatccccagatctactgggtggacagcagtgccagctctccctgggcccctccaggcacagttcttccctgtccaacctctgtgcccagaaggcctggtcaaaggaggccaccaccaccaccgccaccgccaccactaccacctccgccgccgccgccaccactgcctccactaccgctgccacccctgaagaagagagggaaccacagcacaggcctgtgtctccttgtgatgtttttcatggttctggttgccttggtaggattgggcctggggatgtttcagctcttccacctacagaaggagctggcagaactccgagagtctaccagccagatgcacacagcatcatctttggagaagcaaataggccaccccagtccaccccctgaaaaaaaggagctgaggaaagtggcccatttaacaggcaagtccaactcaaggtccatgcctctggaatgggaagacacctatggaattgtcctgctttctggagtgaagtataagaagggtggccttgtgatcaatgaaactgggctgtactttgtatattccaaagtatacttccggggtcaatcttgcaacaacctgcccctgagccacaaggtctacatgaggaactctaagtatccccaggatctggtgatgatggaggggaagatgatgagctactgcactactgggcagatgtgggcccgcagcagctacctgggggcagtgttcaatcttaccagtgctgatcatttatatgtcaacgtatctgagctctctctggtcaattttgaggaatctcagacgtttttcggcttatataagctctaagagaagcactttgggattctttccattatgattctttgttacaggcaccgagaatgttgtattcagtgagggtcttcttacatgcatttgaggtcaagtaagaagacatgaaccaagtggaccttgagaccacagggttcaaaatgtctgtagctcctcaactcacctaatgtttatgagccagacaaatggaggaatatgacggaagaacatagaactctgggctgccatgtgaagagggagaagcatgaaaaagcagctaccaggtgttctacactcatcttagtgcctgagagtatttaggcagattgaaaaggacaccttttaactcacctctcaaggtgggccttgctacctcaagggggactgtctttcagatacatggttgtgacctgaggatttaagggatggaaaaggaagactagaggcttgcataataagctaaagaggctgaaagaggccaatgccccactggcagcatcttcacttctaaatgcatatcctgagccatcggtgaaactaacagataagcaagagagatgttttggggactcatttcattcctaacacagcatgtgtatttccagtgcaattgtaggggtgtgtgtgtgtgtgtgtgtgtgtgtgtgtgtatgactaaagagagaatgtagatattgtgaagtacatattaggaaaatatgggttgcatttggtcaagattttgaatgcttcctgacaatcaactctaatagtgcttaaaaatcattgattgtcagctactaatgatgttttcctataatataataaatatttatgtagatgtgcatttttgtgaaatgaaaacatgtaataaaaagtatatgttaggatacaaata

SEQ ID NO: 84858 - DNA, 1847 bp, Homo sapiens
  misc_feature (2)..(2): n is a, c, g, or t
  misc_feature (4)..(4): n is a, c, g, or t
ananagagagagatagagaaagagaaagacagaggtgtttcccttagctatggaaactctataagagagatccagcttgcctcctcttgagcagtcagcaacagggtcccgtccttgacacctcagcctctacaggactgagaagaagtaaaaccgtttgctggggctggcctgactcaccagctgccatgcagcagcccttcaattacccatatccccagatctactgggtggacagcagtgccagctctccctgggcccctccaggcacagttcttccctgtccaacctctgtgcccagaaggcctggtcaaaggaggccaccaccaccaccgccaccgccaccactaccacctccgccgccgccgccaccactgcctccactaccgctgccacccctgaagaagagagggaaccacagcacaggcctgtgtctccttgtgatgtttttcatggttctggttgccttggtaggattgggcctggggatgtttcagctcttccacctacagaaggagctggcagaactccgagaggccaccccagtccaccccctgaaaaaaaggagctgaggaaagtggcccatttaacaggcaagtccaactcaaggtccatgcctctggaatgggaagacacctatggaattgtcctgctttctggagtgaagtataagaagggtggccttgtgatcaatgaaactgggctgtactttgtatattccaaagtatacttccggggtcaatcttgcaacaacctgcccctgagccacaaggtctacatgaggaactctaagtatccccaggatctggtgatgatggaggggaagatgatgagctactgcactactgggcagatgtgggcccgcagcagctacctgggggcagtgttcaatcttaccagtgctgatcatttatatgtcaacgtatctgagctctctctggtcaattttgaggaatctcagacgtttttcggcttatataagctctaagagaagcactttgggattctttccattatgattctttgttacaggcaccgagaatgttgtattcagtgagggtcttcttacatgcatttgaggtcaagtaagaagacatgaaccaagtggaccttgagaccacagggttcaaaatgtctgtagctcctcaactcacctaatgtttatgagccagacaaatggaggaatatgacggaagaacatagaactctgggctgccatgtgaagagggagaagcatgaaaaagcagctaccaggtgttctacactcatcttagtgcctgagagtatttaggcagattgaaaaggacaccttttaactcacctctcaaggtgggccttgctacctcaagggggactgtctttcagatacatggttgtgacctgaggatttaagggatggaaaaggaagactagaggcttgcataataagctaaagaggctgaaagaggccaatgccccactggcagcatcttcacttctaaatgcatatcctgagccatcggtgaaactaacagataagcaagagagatgttttggggactcatttcattcctaacacagcatgtgtatttccagtgcaattgtaggggtgtgtgtgtgtgtgtgtgtgtgtgtgtgtgtatgactaaagagagaatgtagatattgtgaagtacatattaggaaaatatgggttgcatttggtcaagattttgaatgcttcctgacaatcaactctaatagtgcttaaaaatcattgattgtcagctactaatgatgttttcctataatataataaatatttatgtagatgtgcatttttgtgaaatgaaaacatgtaataaaaagtatatgttaggatacaaata

SEQ ID NO: 84859 - DNA, 1423 bp, Homo sapiens
gttgcattaaacttagttcttgtctctcctttccactcttattcttaaatctgaagctcatcgactaagtgaaatatttaaagaatatgataggccagcaagaagaagtattatgtagtaccatagttagtaaattcgtaaaaccttggaagccattatttggtcccacttgcaatttagtgtttttgaagtgtgtagcttcattcagatagctctttaaataattaaaatataaaagcaaacaacccaaactacctgactataaacaggaaaagttaaccctcaaagagagttcttgtgaattctctttatgctggcaaatagctctaggattaaaggcacattagggtttccttcagtttgtttattctaagcttttactgtgctttttactgaacaagtttctgatgtataaaacttgcatctgatttctttggaaatattttcacaaaagttattttaatcagtatttttacattgcctttccagtgtccagaagtgtttctaaacttagaaagtgacctatagttttttaaaattatgttttcctagaacgtgccaaattttgatttactctaacaatcagtacttttcttcagatgctttgttctgtttagaacaaaaatgcactatagtttttaaagaatcatgcatctttgggttggcccaggatcaaatttgatattgaataatttattccagggcagctttcataaacatacttcatagatgttgttttgaaatgtttctaaatatctaaaatcatttcaacagcagaaatgatttttattttaacaaaagattatgatagcccttgtagtgtttaaaagtggtcatatttattactgactttgagtcaggtgttaaaatagcagtgccacagctcgtctcttgccttagtgtgctgctgtgagagtcacagtggaaactgcagggaggaggtgtgttcctaagaaccaaaatccagcacagcatcctgtgaagccacgtgtaatgatggtcccataaggaaagtatgtgaatatggctcttgtaaaggattaactattgtaattttagcttatgctctgtattctgttttctatggaattatttaagcccttttagtgacctttgtcctggcccatttaaaaactaaaatgtagtatatattgtataaaatggaaatatcattattgcttcattaggggaaactgtacataggcattgaaagaagggtaaaagcaagcagttttatcaggcagttgtaaaacaccaaaaatatagattcgtctttgacgtgtaacacactaaatgtattttgtacagcatctggtttaaaaggtgccttaagagtttaccattacttgctttgttctatatacagattatgtccaatgtatcattttgaagtaaataaccttattttagtataaaaaaaaac

SEQ ID NO: 84860 - DNA, 1432 bp, Homo sapiens
gttgcattaaacttagttcttgtctctcctttccactcttattcttaaatctgaagctcatcgactaagtgaaatatttaaagaatatgataggccagcaagaagaagtattatgtagtaccatagttagtaaattcgtaaaaccttggaagccattatttggtcccacttgcaatttagtgtttttgaagtgtgtagcttcattcagatagctctttaaataattaaaatataaaagcaaacaacccaaactacctgactataaacaggaaaagttaaccctcaaagagagttcttgtgaattctctttatgctggcaaatagctctaggattaaaggcacattagggtttccttcagtttgtttattctaagcttttactgtgctttttactgaacaagtttctgatgtataaaacttgcatctgatttctttggaaatattttcacaaaagttattttaatcagtatttttacattgcctttccagtgtccagaagtgtttctaaacttagaaagtgacctatagttttttaaaattatgttttcctagaacgtgccaaattttgatttactctaacaatcagtacttttcttcagatgctttgttctgtttagaacaaaaatgcactatagtttttaaagaatcatgcatctttgggttggcccaggatcaaatttgatattgaataatttattccagggcagctttcataaacatacttcatagatgttgttttgaaatgtttctaaatatctaaaatcatttcaacagcagaaatgatttttattttaacaaaagattatgatagcccttgtagtgtttaaaagtggtcatatttattactgactttgagtcaggtgttaaaatagcagtgccacagctcgtctcttgccttagtgtgctgctgtgagagtcacagtggaaactgcagggaggaggtgtgttcctaagaaccaaaatccagcacagcatcctgtgaagccacgtgtaatgatggtcccataaggaaagtatgtgaatatggcaccccccccccccccccaacaacaactaaaacaccacccatatgaattctgtattctgttttctatggaattatttaagcccttttagtgacctttgtcctggcccatttaaaaactaaaatgtagtatatattgtataaaatggaaatatcattattgcttcattaggggaaactgtacataggcattgaaagaagggtaaaagcaagcagttttatcaggcagttgtaaaacaccaaaaatatagattcgtctttgacgtgtaacacactaaatgtattttgtacagcatctggtttaaaaggtgccttaagagtttaccattacttgctttgttctatatacagattatgtccaatgtatcattttgaagtaaataaccttattttagtataaaaaaaaac

SEQ ID NO: 84861 - DNA, 221 bp, Homo sapiens
aaacagtgtagtgatatatattcccatttataaagtttaagactaattttagttgactgtaaatattattttcttagatttttggtgtatggctttcaggataacacaaggtgaaatgctgattgaaatgttaagaatgtggagttgatcacaacttgagttttaacatttgtttttattttgtgcattagatttgctttttcttgcatttcttatttctg

SEQ ID NO: 84862 - DNA, 522 bp, Homo sapiens
catagtaagaaccttagaaaaaaaagctgaacattgtgtatgcatttgactctagggcaaatatatttttttgagggggaaaaggccttaacttctacttgtgtatgcacatttacatgtgttttctcaatcatctgaggcactatccctacttgacaggtgaccaaggtggggctgaagagactgacatatccaagtggtagaggggctgggattggacctcccagccacaaagctgcactgcttttcagaaaaaggtttcataacccaagcactgggctgcaagacttggaagggcagacacctggctatactcatctgggagtcctgctgctcaataccaagcctgactcagagcagcgttatgtccagcatgtttatccagtgtatggaaaaggctgttgtatccatccttgctttctatacgtttgcactatttcaaaattaaaatattagcatgaagatccaaccactgcagcccaacatcagtgctctcagcactttgcccctcaaattgggccc

SEQ ID NO: 84863 - DNA, 502 bp, Homo sapiens
ggtggtgtttgtaggtgtgtgtatatgcgtgtgtgtgcatatatgggggggacatgtctgtaaacgagtacctgtgtgtataaacataggtacctgtgtgcggcgtgaatgtgtgcctgagtctgtgtgagtgtgcatgagcatgtgtgtgcacacacttctctctgtgtgtgtgtgtgtttggggtaacatggtacacagtgtgagctcatggagaacagtggttcagccaaggatttgggtacccggcccgacagcacccacggctgccaggggagcctccagacccacgccaagggccccaggaagccgagcactcacaggcggggctgcctttgcaccagcacagctcccagctcactactgccagtgacttgttcaagctcaagtctgtcctagaaataaagcctcacgcaggtttcaaagtcgcttgcagtgataaaatgaaactaagttgtttatatttttaatttaaaaatgtcacaattaacatgaactcatt

SEQ ID NO: 84864 - DNA, 304 bp, Homo sapiens
taaaatttgccctatttaagctgaagcctggataaactgctgagccagattattcctgtgattggagtttaattgctgtagaacacttgttgagaacacattttttactttttttctttcagaattattcctcaatcattgttctctaatgaaaacaccgagaagtaaatctggtgcttcttagtgtaaatatgtttttctttttaaaaagtcattttaaaacaaagatgagagaactataaagtaaggggaaatatcattttatttaaaaataattattcaatgatagataatggagatacag

SEQ ID NO: 84865 - DNA, 362 bp, Homo sapiens
gtgaaaccccacctctacaaaaaatgcaaacattagctgggcatggtggcacatccctgtagttccagatactccggaggttgaagtaggaggatgacctcagcccagggagtcaaagctgcaacaagctgtaatcatgccactgcactcccacttgggtgacagagtgagaccctgtctcaaaaaataataataaaaaaaaaaaattagctggacatggtggcatgaacctattggtcccagctactcaaaaggctgaggtgggaggatcacttgagctcaggaggcagaggagattgcagtgagccaagatcacaccgccatactccagcctgggcaacacagtgcctcaaaaaaaaaaa

SEQ ID NO: 84866 - DNA, 236 bp, Homo sapiens
  misc_feature (173)..(173): n is a, c, g, or t
  misc_feature (231)..(231): n is a, c, g, or t
  misc_feature (233)..(233): n is a, c, g, or t
  misc_feature (235)..(236): n is a, c, g, or t
aattaagggtcctattaaccctcgactctgagacaaaggcacgaatcttctgagacgagatgtctgccaaacatctgccagggaaaataaaagtagtaaacatgtcagtggctgcgaggggtctgaaggggccgcgatgatctgaagtgcggccttgatgtgcaccgggcctnccaaggccggttatatggcttacgttttgatctgaggagctcttgctttgcttcctgngncnn

SEQ ID NO: 84867 - DNA, 515 bp, Homo sapiens
gttatttcagcttaagagctgaaagcaggattaaaaaaaaacaaccaacggcatggttattagcattgctccataactgccctttttccgccccactcttttccccattctctctctacctctccttctctcctcatactacatttccacttctttgtctcttctctcttttttcataccttgcctacatcacaggtccacccatgatatcatctgaactgccccataccacagaggcagagtgtggtggctcacgcctgtaatcccagcacactgggagatagaggtgggcggactgcttgagcccaggagttggacaccagcctaggcaacacagtgagaccccagctctacaaaaaatacaaaagttagccaggcatggttccctgcctgtggtcccagctacttgggaggctgagacaggaggaatgcttgagcccaggaggttgagaccacagtaagccaggatcgtgccactgcactccagccctggtgacagagtgagactctgcctc

SEQ ID NO: 84868 - DNA, 506 bp, Homo sapiens
tcatctgtattatttcactgtaataaaccgtaagtgtggcaggtactgagtcctgtgagcccttccagcaaaccactgggcctgagggtggtcttggggggtcccaacataccagcaaaatgtgctgctctcacttaatgagatcacatcaaagcatgagacattactgttttgcagagtttcagggtactttcatcctctactaatgtggacattttattcaggtcttccttattttattatttgatgaaactaatgttttcctttattattcctaaagcaaagactgccaacacctcaaagaaatgctggccttcactgtttcataaagattctttttttaaacatggatacacattagcaatgtaaaagagccgctgcagtcaaaaaatatttttagagactcagctgaacaataagccctgaacttttgtttaaattaagatagctgaaccattaaaatgatttcctgaatccatggaaacgtgtcttgcataagaaggcat

SEQ ID NO: 84869 - DNA, 441 bp, Homo sapiens
aaatacaaaaataacaataagaataatacaaaaaaatttaaaatgtagtataacaactatttacatgtcatttacattaggtattacaagtagtctagaaatgacttcaagtatagggaaggatgtgcataggttatatgcaaacatgatgctccttgtcttatgatggatttacctttcgatattttctgtttacgatgggtttatccagatgtagtcctgtcataaagagcatattgaatgcgtgtatcaccatcctaaagtcaaaaaattgcaagttgaacaatcaaaagttggggactttctgtactacaccattttatgtaagggacttgaacatccacagatttttgtatcctcaggagtcttaggaccaatcccctgtggataccaagggacaactgtatatcctttgaaattttaacttaatagattttctac

SEQ ID NO: 84870 - DNA, 401 bp, Homo sapiens
ctcggctcactgcaacctttggattctaagcaattctcatgcctcagcctcccaagtagctgggactacaggcacgcgccaccatgcccagctaattttgtatttttagtagagatggggttcaccacattggccaggctggtctcgaactcctgacctcaggtgatccacccgtctcggcctcccaaagtgctgggattacaggcgtgagccaccacacctggcctgtccctttcctttgttgattcactgtgcagaagcttgttaacttgatgtaatcccatttgttcattttagctttggttgcctatgttggtgtggtattattcaagaaactttttcctagactagtgtcttggaaagtatttctggtgttttcttgtagtagtttcatagtttaa

SEQ ID NO: 84871 - DNA, 623 bp, Homo sapiens
catgtgtgtccttgtgcattttgggtggacaaactagatgagaacaggtgggtgggggtggaggctaaaggcagaggaagccaaagacagtgcctccagtagcccgtgggaagcttcctcatgcctttgagatattgcaggaggtcccagagctctggcccatggtgatctcagtggtactggattctgtcttaaagatttgggcagttctgggggtgacacaattagggaatatgactcacatcaaactgaccatgaaataccagttgagaaaggaaaagtaagaagagaaagatagttttgcaaatgagtcaaggttacatagatggaaggaagagctagcctggatttaaacagatcttcatggtttcacagtgaacttcaaaattactcttttagtctccagagctccaggacagcctcagagccttcagggtctggtcttgctttccccacagggcaatggtataagaggtggatattcctgtctccgtggagagaagacaggcatagtaaacccttaggaggcactgtctgtgtccatatattatgcaaagcttttggcatacatcagctcacagtgcctcacatgtgctaatatcatccctagtttattgataaag

SEQ ID NO: 84872 - DNA, 149 bp, Homo sapiens
tcccaaagtgctgggattaaaggcgtgagccaccgtgcccagcctgccctgcacttcttttagcaccattagcttctgtcactgggtgtctgtagccgtgctaggtcagccagaactatgtctttatctttccaccctcagggcctaga

SEQ ID NO: 84873 - DNA, 799 bp, Homo sapiens
catactagaattcatagtggagagaaaccttacaagtgtaatgagtgcagcaagaccttccgtctgaggtcataccttgcaagccatcgcagagttcatagtggtgagaaaccttacaagtgtaatgagtgcagcaagaccttcagtcagaggtcataccttcattgccatcgtagacttcatagtggtgagaaaccttacaagtgtaatgagtgtggcaagacttcagtcacaagccatcccttgttcaccatcgtagacttcatactggagagaaatcttacaaatgtacggtttgtgacaaggctttcgtgcgtaattcatacctggcaagacataccagaattcacactgcagagaaaccttacaagtgtaatgaatgtgggaaggcttttaatcaacaatcacaactttcacttcatcatagaattcatgctggggagaaactttacaaatgtgaaacatgtgacaaagttttcagtcgcaaatcacaccttaaaagacataggagaattcatcctggaaagaaaccatacaaatgtaaggtttgtgacaagacttttgggagtgattcacacctgaaacaacatactggacttcacactggagagaaaccttacaagtgtaatgagtgtggcaaagcctttagcaagcagtcaacacttattcaccatcaggcagttcatggtgtagggaaacttgactaatgtaatgattgtcacaaagtcttcagtaacgctacaaccattgcaaatcattggagaatctataatgaataaagatctaacaagtgtaataa

SEQ ID NO: 84874 - DNA, 199 bp, Homo sapiens
tatttaagacctactatatattcaacattattctaattattatggtgaatacagagaaacaaggctatggtttcagccttcaaagtatttgtcactttattcatctgacaagattaaataataattggagtaacaaggaacaatttaagacagtgtgaaaccagatattaatccccaaacgggaggtcaatgcaggtta

SEQ ID NO: 84875 - DNA, 459 bp, Homo sapiens
gtgccgctgcagcgccaggtacgtgaacttgtacggagcctccgtctgcaccattccccagtgctgccgccaaaccagctggatcgtcttcgggacgtcggtgtcgcagtccagccctgcggacaagcgcgcttggggaggggctacggatggggggaaggtgccggcaggcaggggcggggctgctgatgaggggcggggcttgccggtagcggtggggtcgtcctgagggttcagctgcggcggggcgggcccacgcgggctgtgcaggtgcaggtgcggcggggcagggccacaagggatgtccaccctgcccctgccatggcccggctcctcctcagggtcagtctgaaagggaatgaggccaactgctgctgttaacagaggacaaacaagtccatgcaaatgctatgcaaatgatatgcaaacgacacacaaatattatgcaaagagccctgg

SEQ ID NO: 84876 - DNA, 524 bp, Homo sapiens
cagcctgcgcaactacagcaagaccctatctcaaaaaagaaactcagatatgggttctagatatactcattgttactgagatgtaattgcttttaggcccccagaggggacaaagctaaaaaaatttatatttatatatgtggatctgtgatccatttgaagtttattcttatgcatgatgtaagatatgtgtctaattacattttttccaaatggctcagcaattatcctagcatcatttaccaaaaagttcatctttgtctcaatgatttgacatgtcattttattatatactaatttctatatgtacatgggtatatttctgtaccttttgttctattctactggtcagtctatttgtgtgccagtatcacaatgttttagttatagaagcttaatgttttaatgacagtatggctagtcccatctcataggttttcattatcagtattttcctgactaaacttgcatgttgttgtttcatatgaactttagtaccaacttagttccattttaaaaaaagt

SEQ ID NO: 84877 - DNA, 913 bp, Homo sapiens
cctgtggaagctttgttcttttactctttgcaataaatcttgctgctgcttactctttgtgctcacactacttttgtgagctgtaaaagtcatcacaaaagtctgcagcgttattcctgaaaccagagacctcaccgtgaagaacgaacaactccagacgcggtgccttaagagctctaacacttaccgcaaaggtctgcagcttcacttctgagccagggagaccacgaacccaccagaaggaagaaactgaacacatctaaacatcaaaaggaacaaactccaggcgtgccactttaggagttgtaacgctcaccgcgagggttcgtggcttcattcttgaagtcagtgagaccaagaacccaccatttccagacacaacaactaataaaataattttacaatgtttcaacaagagcagactcaagcatttgctagagattccaaataaacagaaagcctgcaaagaaatgctgatacgtggtataagaattcaaaattacattgtaaaagaatattaacatcggaaaaagtttaaaatgaatatgtgaacattttgttaagtataaattataacatttttgttaagcataaacctaatacacataatctttctttgtatatagatatataaatatctaaattgtaaaagggctggaagtatatactaacatgcccagggatgatctgagcggtgttttgttttttgtttttttggcttttcatccctttatgcttttcagggtgtgtatttgtgcgtattgctgagaacagagaaagggaggggttagcaaggaaaatgttgggggaaggatcaagccgcctttgatgggctgaattattataatgatagtgaaaacctttatctagtggctcatctttcttcaaactcacagcccacaaatcagaaatg

SEQ ID NO: 84878 - DNA, 828 bp, Homo sapiens
ggacgcgaggagggagcgcgcgagtgaagccgagctgagccgagccgatccgagccgggaggtgcctgggagaggcaggcagagcccagccggccgcctgcggctcagtaccgaccgtgccgcgtcgccgggctctgcgtacccctgtctctgcccaggctcccgcaaaacttttattctctggggcccccggggtgtgtgaaggaattggaaccttccgccatctccgcgctccccttcggcggcgaccgaggggacctgcgtccctcgtccgccgggctctggagccctgcgcctcacctgctgatcgctctccggagtctcgagggggcacccccggagggaccgcgcgggcgccggcgcccctgaactctcccgctcaccgcggcagacccgcccagcgcaactttaacttgattcttcttgcccaaccggggcaccagcggctgctgctgcggcggctgctgctaccgccgccgccgcggtctcacaaaggggctcagggaagggaggcggcgcgggcggcagggacgggcctccgggccgccgaggcggggagacaataagggaagctgcctctgctcgcgctgcctgctcggagccgcttgctcggctgcctctggctggctccgcgatcctctcccccaccctcgggcactgtccgcctccctcccggcgggctgtccccgcagtgctcccggacccggcgagccttcggggcgcgcgtcgctggtggtggttgaggctctagcgataataaatgatagaggatacaatgactttgctgtctctgctgggtcgcatcatgcgctacttcttgctgagacc

SEQ ID NO: 84879 - DNA, 1779 bp, Homo sapiens
ctggaataggtctggctctgggtccaggaggcttcagggatcagacaatgtcatcaggatctggtctctctctctctttgcctggctttttctcaggcacatatagtgactcaatggccactgcatttctaacctctcatcctcccaggttcaagtccaatgggaaagaaatatcttccttcaacagctgaatatgttactggaagtttggagaatcattactagatggcaaaaacaaaagatgttccttccattttgtgaactgcataagagatcttggggggtgggcgatgaagagaggtatactgtggtctcactagtcaaggacagctaatagctgtaaaacaggtggctttggatacctctaataaattagctgctgaaaaggaataccggaaactacaggaagaagtagatttgctcaaagcactgaaacatgtcaacattgtggcctatttggggacatgcttgcaagagaacactgtgagcattttcatggagtttgttcctggtggctcaatctctagtattataaaccgttttgggccattgcctgagatggtgttctgtaaatatacgaaacaaatacttcaaggtgttgcttatctccatgagaactgtgtggtacatcgcgatatcaaaggaaataatgttatgctcatgccaactggaataataaagctgattgactttggctgtgccaggcgtttggcctgggcaggtttaaatggcacccacagtgacatgcttaagtccatgcatgggactccatattggatggtcccagaagtcatcaatgagtctggctatggacggaaatcagatatctggagcattggttgtactgtgtttgagatggctacagggaagcctccactggcttccatggacaggatggccgccatgttttacatcggagcacaccgagggctgatgcctcctttaccagaccacttctcagaaaatgcagcagactttgtgcgcatgtgcctgaccagggaccagcatgagcgaccttctgctctccagctcctgaagcactccttcttggagagaagtcactgaatatacatcaagactttcttcccagttccactgcagatgctcccttgcttaattgtggggaatgatggctaagggatctttgtttccccactgaaaattcagtctaacccagtttaagcagatcctatggagtcattaactgaaagttgcagttacatattagcctcctcaagtgtcagacattattactcatagtatcagaaaacatgttcttaataacaacaaaaaactatttcagtgtttacagttttgattgtccaggaactacattctctattgttttatatgacatttctttttatttttggcctgtcctgtcaattttaatgttgttagtttaaaataaattgtaaaaagcaattacaaaaaaagaaagagaagaaagaaaaaatgttgtaggcgacacgcaactggggcccccagaaaaagagtttaagagacacacagtagagggagcgcgggcggcccccagaagacgataacagggcaaacagtcgtgggcacacaaaggatgtaccgaaagagagaaccccggggcagcgaaacaagacgactgaggagatattccactattacaaaaaaaagcgccgcgggggggacaacaccgacagggatttcggaaacacacatcccaaggcgagagatatgggggggaacaaacgagggagatattacaacagagagacacgacgaggagacgtatatataaatgcc

SEQ ID NO: 84880 - DNA, 1998 bp, Homo sapiens
ttaggaagggaggtatcaacttagagaaagacaagggtttagaaagagaagggaaagtcaagtgtcacctgaggcattttgtgaataagttatgtcattaatttaataacaaggtattattgatttgcttctaggtatactgtggtctcactagtcaaggacagctaatagctgtaaaacaggtggctttggatacctctaataaattagctgctgaaaaggaataccggaaactacaggaagaagtagatttgctcaaagcactgaaacatgtcaacattgtggcctatttggggacatgcttgcaagagaacactgtgagcattttcatggagtttgttcctggtggctcaatctctagtattataaaccgttttgggccattgcctgagatggtgttctgtaaatatacgaaacaaatacttcaaggtgttgcttatctccatgagaactgtgtggtacatcgcgatatcaaaggaaataatgttatgctcatgccaactggaataataaagctgattgactttggctgtgccaggcgtttggcctgggcaggtttaaatggcacccacagtgacatgcttaagtccatgcatgggactccatattggatggtcccagaagtcatcaatgagtctggctatggacggaaatcagatatctggagcattggttgtactgtgtttgagatggctacagggaagcctccactggcttccatggacaggatggccgccatgttttacatcggagcacaccgagggctgatgcctcctttaccagaccacttctcagaaaatgcagcagactttgtgcgcatgtgcctgaccaggtaagaaactgaaagcaagaggaggaagataaatgcccggagattccaagtggcagacatttcccattcaatttatggtccattaaaagctctgttttggttatgaagtcaagtagacagtgattttgtgccgaaagtaatcataatcagtcatattgggtaattgtgttcattgttgtatcagggtataggaggcaatgcttcaagtagaaagtgcctcaattaaatgtcttatcaagttctgtcaatacttgcccaaatcaatgggtttgcaaaatttgttaaagatctacttatttaccaatgagacatcttcctaggaactggctagggtgaaatgacatcatcttgcatttaaagtgaggggaaacattttgagccaaagaaacaaatgtctaattggagatttcaagcgtcaagtgggggagtatttggtgaatcggaaaagccttagaaaattgcctgttttccccttccttatcttctctcatatctatggaattaaattgtgggtaaaatgttagaactgtaactgtaatgtaatggaaattaactagtgctgtgattttcaaatttttagccaggtactctgctcatagaaatcttaaatcaaagaataaaataaaagcagacagatggctctagttaaagtgtgtatccatggggcggggaagagttaaggagtagggctgtgggtgctggagcccactctaggatactgcacagcagccccaaacccacctacctagcaaggctcaactttaattggaggacaagaaaggcctgagactcaaagtcaatttcctgtctttcaagtaagtttgccttcttatccctagatgaaaaactccagtgtcccatcttttagcaagcacatatggcaacccccaactcccagggggttcattttgcctttctgaataaatcttagaatctacaggtctccctctctgccaatgaatgtgcctctctttcagtctctgtctctctctcccagcacatgtgtatcagcctgtcctggctgatttcaggatgattacatgggccagggcaggaatgccactccaggggtacagtttttggcattgctagatgcagagaacccttaggtttccagcgtggattttgtggacagagccccagtcactgagctgcccaccctctcc

SEQ ID NO: 84881 - DNA, 359 bp, Homo sapiens
gtcaatggtctatccatcctgaaatatatagtatttttgggggcccctgccataatagttcctgtattattttttaggaaagccttccccactcccaagagaaaaagtaagttatttatatatcccacatccttatgggtctttgactttcctattctcttcccactgaattgtctatttcccaatttcagttgttacaatatttatagctttataatttgagctaatatctgccattttaaagctttttttctggcttctgttgcatttttatgtctttatttctttcagctattatacaaatgatacaacctgctatggaaaaaagagaaataacagataagtatacaaagaaaata

SEQ ID NO: 84882 - DNA, 716 bp, Homo sapiens
acaacctaggtaaaatacgtagtgtatcagttcgtgatgataggttcaatggaaaaaataaggccaagcgcggtggctcacgcctactgtatgtagtcttagcactttgggaggctgaggtgggcagatcacttgagcccaggagtacgagtccaacctgggcaacatggcggaaccccatctgtacaaaaaattaaaaaattacccagatgtggcagcatgtacctattgtcccagctgctcaaaggctgaggcaggaggatccttgagcccagggggcagaggctgcagtggccgagatcacaccactgcactccagcctggatgaaagagaaagaccccatctcaaaaaaagaatgagcagggaaatcctcaccaaggtgacaagtgagcaaagatctgaaggtgaggggatccctgggatccctggggaaagagcagtccaggtacaggaaacagcaagtcctgagggagaagcatgtttgaagaccaagaaagaggacatgctgtaagctatctgaagccacagtatacaatcagcgatggccagttttgggttctttttggtgatctgggaaaacccctagtgatgcaagcaaatatgggggatgccaggtaccagtggggttagctgcatcccactcctggctgaaacctattttagagacaggcctgcatcagggaccctgggtaacggaaagtacctttttccttgc

SEQ ID NO: 84883 - DNA, 379 bp, Homo sapiens
ctttgaaacaagcacatgtttgaaaccttaggtttctttttcttaagctttcccaagttggaagcttataacacagacatgaaagtctgatttaagcagttcctataacctttctaatttcagattttaaaactgcttttgcttgaatagaaaatggaaagccaacacatctctctctacccccatccttccctgaataacctagatacttaagcaatccttcccttccctggggctgtgactgtagagtattattttattgactcataattaagaacttctgatgagaaaaccagtcaacagagaaaaatggcttgggggtcccacaagcaaagagaaagcctgtatgtccctattatggcaagtacaacaggcagga

SEQ ID NO: 84884 - DNA, 197 bp, Homo sapiens
gatctgtccactttgctctcacagacgtggcatttgccaggaaggagaacccagcaggaacggaggtctctgccttcacctacagtgaaggcagctggtatgtgaaatactttcactgagcttagtgaaaaattcattttacaccctagttagctcccagaaaggttgaactttcaagacactcaaaatatgaagcc

SEQ ID NO: 84885 - DNA, 332 bp, Homo sapiens
aaaagctggatattaggaaatgtgaatattaattctgaatttgttactgactcaggatgaccttgcatgatgcatccaaccttcttttctctatatcagaaaactaaagaataaatgtaacatcacattcttttctcctttgggacaaacaactatgtacaattgaataaaaatgaaattgcataagtagtggatagaatatgtttgggttggtttgaacttagcacactgtttaataattcaacattttttatacctgtgcaataaatttttaaatgatgtctgaaatgctttgaaatcttcagaaacaggtttataaatggcataaaaaa

SEQ ID NO: 84886 - DNA, 702 bp, Homo sapiens
ggagggggtgtgaaaagccccaggcagcgtcaggggttgtgctcctgctcctgtttgatagagagaggaacacccaccgcacagggctgttgcagggtcagcgatagcaagcaggccacagtgtttggataagacaggcttgtaaaagttgccatgcaagactcctaggaaataagtccgctcagtcctgggaagatgcccctgctgagctgccagttcctgaagggtcaccgggagcagcgcctggcccacctggtcctgagcttcctcaccatgggttatgtctggcaggaaggagaggcgcagcctgcagaggctcttgttcaggccacgaatgctatcttgcagcccaaccaggaggccctgctccaagccctgcagcgactgagactgtctattcaggacatcaccaaaaccttaggacagatgcatggcatgtagaaggctggggagtgtagtatagagttggatagcatcgaagctttcttctaaagttcctggaagagctacactgtggtttgaacgaatgtgtccctccaaaattcatatgttaaaacctaattgtgatggtgaggtattcgaaggacacgggagttgaggcattaccttggacgtggagaccaggccctcaccagacactgaacttgccagcaccttgatcttggacttcccagcctccagaactgtgagaaatacatttct

SEQ ID NO: 84887 - DNA, 481 bp, Homo sapiens
ttacaaatgtaaactgaccttcaaatgggagagaatgtagaatcccaccatgtgccccaaataagagaaagccagaatatgtatgagcagtcctaatgattataacacatgaaaacatctccccaaaatcgctgcctagagaggacaatatactattctcatttcccctaaattgaaaggggaactggttataaatacagaatattttaggatggtgcagccacagtgaaaaatgtaactcgaaggagaggggttggaatagcgatggtggtggtgattctgcacattgagtatttattttcagactgccacgacctttctacctcatgctactataatttgcatatatagttattcatgatcctgtatgctgtgggaggggcaccaagatagcatcctaagcagtgggtttacagaggtagcaactgtgaattccagatgcaaagtttggcatgaagctggggttgggaaatataatcaa

SEQ ID NO: 84888 - DNA, 835 bp, Homo sapiens
cagtgagggcgcagactgtactggcctgtgcggagcaaggcggtgtttctgagaggaatgcgcagctgaagagagaggtgggcagcaggcccggtcacctgccaggtgaccacatggccaggtgccgccaccactcgggttacctggccgatgacgaggccagccactccatgtgcagtgcacgggtgcagctgcccaagaagccactggtcccagaaatgcggccagcctgcaagccgggccgtgtgccacacccaccatccacatgtggcagctcagcactccagggccaacgccgaaacaagaggcaccctcagccctttggccactttctggatttcctaactgagagccaggtcctggacagcctggagacagtggtggagaaggcgactgagcgcatggctgccatgaagacggaggctggggtgccgcttgtggaggtgcaggacccagtggaggtgccaagtggtggacggcgggcacatgcccggcccagcctcagcaccgtacaccggcaccgtgtacggccgaccctctgcactggacaccccaacaactacccatccagctccagctccatgtccaactgccatagcagcctcatggccggctgtctgggctcccacagccgggacagtgacctaggtgcccaaggctcattgccacctgtgagggacaaactcctgctggagaagaacctcaagcggctgctacagctggagagggaagggaaaggcctcagtcagtcctgctcccagagggactccctgctgtgggattcgctgggtagccagaccagctttcagtggacacaggagcagcccttgtcctg

SEQ ID NO: 84889 - DNA, 818 bp, Homo sapiens
ggagaccctcaggttgtctccccaccccacgcagagaggaatgcgcagctgaagagagaggtgggcagcaggcccggtcacctgccaggtgaccacatggccaggtgccgccaccactcgggttacctggccgatgacgaggccagccactccatgtgcagtgcacgggtgcagctgcccaagaagccactggtcccagaaatgcggccagcctgcaagccgggccgtgtgccacacccaccatccacatgtggcagctcagcactccagggccaacgccgaaacaagaggcaccctcagccctttggccactttctggatttcctaactgagagccaggtcctggacagcctggagacagtggtggagaaggcgactgagcgcatggctgccatgaagacggaggctggggtgccgcttgtggaggtgcaggacccagtggaggtgccaagtggtggacggcgggcacatgcccggcccagcctcagcaccgtacaccggcaccgtgtacggccgaccctctgcactggacaccccaacaactacccatccagctccagctccatgtccaactgccatagcagcctcatggccggctgtctgggctcccacagccgggacagtgacctaggtgcccaaggctcattgccacctgtgagggacaaactcctgctggagaagaacctcaagcggctgctacagctggagagggaagggaaaggcctcagtcagtcctgctcccagagggactccctgctgtgggattcgctgggtagccagaccagctttcagtggacacaggagcagcccttgtcctg

SEQ ID NO: 84890 - DNA, 390 bp, Homo sapiens
agttattttttagagatgagattaacatttaaatcagtcaacttctagtaaagcggattatcctccataatgtgggtgggtctcatccaatcagttgaaggccttaatagaaaaagactgacctcctcagaagaaaagggaatcctactagcagatggcctttggacttgaagagcagctcttccctgggtctccagtctgctgacttattctgcagattttggatttgtcaagcctttgcaatcatgtgagccaatttcctaaaataaatctcatcagcaaggtggtagaatagaagttatcgggcctcattctctgttcccctctctcccagaaattcaactaacaactatcatcaggcaagaataccattgtgaataacccagaact

SEQ ID NO: 84891 - DNA, 316 bp, Homo sapiens
gtttaaaatcaattcatctttgcccactgccccaaatctattcttcctacaggtttcatttcaaaatatggtaattccaaagagaaatatttaggccaaaaatctctacccatccttaattgctttttctctcaaacccctcatgtccatttggtcagctaagtttgtcagctttaccttcaaaatgtatgcagaatctaaccagttgtcattactctgacagctattagatccaagtgatgataaatatgtgaatggattattgcaatagctttttttttttttaaagaaagaggtttatttaaaggaattgctc

SEQ ID NO: 84892 - DNA, 391 bp, Homo sapiens
cagaataaacatttactattaggagagtcaaatcatttattttcacatgaaagagattaagtaaagcagaatctttgatggtctgctgtgaattcttcgcggtgattgagaaatttctgaaaaccacttccaaatcaattataatattaagtaaactttggctttaggagtaagagagagaaggtctgcgtccatgttgggaaagaatagatatgcccacaataattagtctattacttgtttgaaaagggtgatttcctcgtcatttcaaagtattaagcaaataaggacatattgagtatgtaattcatggaaaaataagaaacttcttacagtatgattcctaaaggattatgatgcattatcatttggagttgttatgaagcttatc

SEQ ID NO: 84893 - DNA, 915 bp, Homo sapiens
atctcaaaaaaaaaaaaaaaaaaaatgagggcgttactgtgactttacagcaattaaagtgattataagataatactataaacataggtacactagcaaattgaataaccaaatgaaatggcaaatctctagaaacacaaagcctaccaagactgaatcacaaataaagaaaaaatatcggcaaaccagctgggcatggtggctcccagctgtaatcccagcacttttggagtgcactgcattgcactccagcctgggggccaagagcgagtcttctcaaaaaaaaagaaagtaggggtaaacctataactagtaagaacattaaattactaattaaaatcctttcaacaaagaaatacccctgactggatggttttaccagtcaattctaccagacatttaacgaaaattaatgccagtcctttgcaaactctttcaaaaacttgaagaggaggaaatactttctaactcattctatgaggccagcattgccttgatgctagggccagacaaaggcactacatgaaaacaactgaccaatattacttatgaacattggttaaaaaattcttaagaaaacactgccaaactgactgggcacagtggctcatgctggtaatcccagcactttgggaggttaaggcaggtggatcacttgagctcaagttcaagaccagctgggcgtggtggcccacgcctgtaatctcagcactttgggaggccgaggcgggtggatcacgaggtcaggagattgagaccacggtgaaaccccgtctctactaaaaagtataaaaaaattagccgggcacggtggcagacacctgtagtcccagctactcaggaggctgaggcaggagaatggcatgaacccgggaggggcagtttgcagtgagccaagatcgtaccactgcactc

SEQ ID NO: 84894 - DNA, 573 bp, Homo sapiens
ctgggggcagtcttgacccatgggacactggcactgtctggggacatctgtggtggtcacaattcgggggggtgctcctgagatggagtgggtgggggccagggttgctgctgagcacccctcagggcccagggttcagcaccggtcagtagagctgaggccgaggatccctggcctcagattgcatcccctccatgccaccgcccttctcttcagggcgcggtgagggaagggcgtgtgggggtccctctggggagaaggtgttttcaccttcacactcaccctcactcctcctgtcctggaacttgggtgggtttgaccttttgtggatgaggtgagggctgagaggtggattactacctgagacaatcaaaatcaattttctttcttctgaaaaggactcagggtgtttgagaaaagtactggggagaggcagctgccaccggggctccccactcgggatgtgttgggtgttttgcgagaccccccacagggagctcaggtgctgtgggcagttcctgggctttgtcgagggcctcccgaaggcagcactgtggccaccgtgggacacat

SEQ ID NO: 84895 - DNA, 460 bp, Homo sapiens
  misc_feature (419)..(419): n is a, c, g, or t
  misc_feature (456)..(456): n is a, c, g, or t
ttaagttttctgaggctgggcgtggtggctcatgcttataatcccagcactttgggaggatgaattttattttaatcccattaggactccaagtcctggccatgcagcttaatagctatatggccttgggcagggcagttctattagaggtgacttccttgggcatccctttcgtctttttttctgagagatgtaaactcgctgttgtcgccaggctggagtgcagtggtgcaatctcggctcactgcagcctctgcttcccgggttcaaccgattctcctgcctcagcctcctgaatagctaggactacaggtgcgccaccatgtctagctaatttttgtatttttagtagagacggggtttcaccatattgggctgggctggtctcaaactcctgaacctcaggtgatccgcccacnttgggcctcccaaagtgctggggattacaagcgtgancaac

SEQ ID NO: 84896 - DNA, 720 bp, Homo sapiens
atgcagaccttcccagttgctggggcgctggaccctgctatactggacacaagcagcccccaagccctctacacggtcctcttaatagtgctggtcatgatgagcttggtgtttggtaagtttgttcctgtcaattgggaaccccctcaaccacttccattccccaaatacctgcgctgctaccgatgcctcttggagaccaaggagttagggtgccttctgggatctgacatctgcctcaccccagctggcagcagctgcatcactctccacaaaaagaacagcagcggttctgacgtcatggtgagtgactgccgaagtaaggagcagatgagtgattgttcaaatacccgaacttctccggtgtctggcttctggatattctctcaatactgcttcctggatttctgcaatgaccctcaaaacagagggctctatactccttagtgtgactgcagcaaactttggtgtaaaattccaccagtttccagccaccttcctgacttctatctgggcttggccaggacttctagtccctcataccagccctccttgcctccctccagccactggaccccagccttggctcttcctcttggttgacgcccttcagcacacttactgctactctgtacccccagccctactgcccaccaggtttcctctcttgtcccctagtccctggatgtttctcccaaataaatttgtgtgtaaactgtt

SEQ ID NO: 84897 - DNA, 852 bp, Homo sapiens
atgcagaccttcccagttgctggggcgctggaccctgctatactggacacaagcagcccccaagccctctacacggtcctcttaatagtgctggtcatgatgagcttggtgtttggtaagtttgttcctgtcaattgggaaccccctcaaccacttccattccccaaatacctgcgctgctaccgatgcctcttggagaccaaggagttagggtgccttctgggatctgacatctgcctcaccccagctggcagcagctgcatcactctccacaaaaagaacagcagcggttctgacgtcatggtgagtgactgccgaagtaaggagcagatgagtgattgttcaaatacccgaacttctccggtgtctggcttctggatattctctcaatactgcttcctggatttctgcaatgaccctcaaaacagagggctctatactccttagtgtgactgcagcaaactttggtgtaaaattccaccagtttccagccaccttcctgacttctatctgggcttggccaggacttctagtccctcataccagccctccttgcctccctccagccactggaccccagccttggctcttcctcttggttgacgcccttcagcacacttactgctactctgtacccccagccctactgcccaccaggtttcctctcttgtcccctagtccctggatgtttctcccaaataaatttgtgtgtaaactgtttggtatgtctctttcttctggtggaggtgaaggctgagggaggtgcacctgcctaactgccctaccatgggtcaggtaagggacccccagctctgctgagctgtcctcttgtcctgccttggtatgtgattt

SEQ ID NO: 84898 - DNA, 664 bp, Homo sapiens
ttgcttgaacccaggaggcggagattgcagtgagccaagatcactccactgcactccagcctgggcaacagagcaagatggtctcaaaaaaaaaaaaaaaaaaaaagatttagaaatactgtctcatcactgaatttgcaagtacttacatttctttattttttaaaattttctttatttctttagagacaggggtctccctatgttgcctgagctgatcttgaactcctgagctcaagcagtcttcccaagtagctggaatacaggcgcaggccaccatgcctggctgcttcagttttaaagactttgtcagctcaagcatgttaataaaggaaaagaacctttcaaacatatttttatagaataattcttcactgttcttatctggcttatcttctaatactcttttcctgttaaaaactactgaaaaaaaagatggtgcatatgcaatgaatagtcttaaaagcaacaacctattttgttttcttttttacccctcatgaagacacagtaccaattagtttttgtgaatgtgttataagtatgcccaattgtctgaattggtaaatcatataagactgatataatctagattaatttaaattatctgtttgtgcaaacaaaagaaattggattatgtacccattaaaatgatataaccacc

SEQ ID NO: 84899 - DNA, 1361 bp, Homo sapiens
ctacaaaaaatacaaacattagctggggatggcagtgtacacctgtagtcttagctactcgggacgctgaggcaggagagctgcttgagcccgggaggtggagactgcagagaaccgagatcatgctgctgcactccagcctgggtgacagagtgagaccctgtctcaaaaaaaaatttttttaaagagtaaataacacacacacacagcagcgcacacactgtgcacctctaaacacaggactccccctccgcccccgccacatatgactagacctggtggggcatgaagcacacactgcacactgcagctacaaaaggtcccctggcttggtctaagggacagagtgtcacaggttaaagagagagagagagagaagaaagggcccccccccgcaggtttggggcacacgtgctggtgaaccctagcgccactctacccctcattcagctgtcctcagttccaaaagtctccactggcacagcacagcagtctggttccacgtccccgctgtttggcccgggcccggtcatactcaaaggtgggccggctatgctgtcaatactacgtaaagacaaggaggccagaaggtgaagaaccaggcagagcatgatgagtcgtggggccatggcgaggtcaacggtggtcggcagggccacaggcatttcaaaggaggaccatccacagacactaaagtctgggcagcatactgggttgaaaactgtcagaggattcctcttaagtttttgaggtccccaaaagcaggcagtaaagtggggccacagtgtttgaaggcccaaggatcccctctgtgggctgccttcatctgtttcagaggtacctgttacaggttgaattcgtcccatcctaaaaaacgtttatgttagagttctattccccagttagcccctaaccctcagacagtgatcttatttggagatagggtatttatagagacaattaagttaaaattaggtcattagggtgggccctaatccaacatgattggtatccttataaaaatggaaaattggacacagacacacccacagagggcacgccacgtgaagatgaagacagatcagaatgatgcacctccaagccaggggacaccagagactgccagcgagccagcagaggctgggagagaggcctgcgacagattcttcctcacagcccacagaaggaaccagctccactcacaacttgattttgcactccggcctccaagactgtgagacaataaatgtctgttgcgggagacatcaggtttgtatcactttgttacacagccctagcaaactcacacaatactgtcctccccgctttcttcttcctgctattcctgccaagtttctttt

SEQ ID NO: 84900 - DNA, 461 bp, Homo sapiens
tcttgcaggggtctccagatcactgctcatgctagtgtcagggttcgtgtgggtagagaaactctcctgtggttcagataacaatagtctgtggcaaggatgtggacaactgaagctttctcacttaccttttccccacaataccaatccccttgctattggttgatcttggttgagccagctgcttgcttccttccccttctgtgcctcaggtattttttttgagctctatgttggattctagtgttctctcttagatgtcctgtttgaggtatgattgtctattcacagtttttattctttctgaagagggcaggtgtctcatgtctctagttagccatcttgtggcctcttgattttagcccggtgagatccatgtaggacttctatttacagaactattatttttcttaaagtctaccaaattgtacaaacttcaggcatcataaaacttaggtctt

SEQ ID NO: 84901 - DNA, 417 bp, Homo sapiens
gcagggacatggatgaagctggaaaccatcattctcagcaaactaatacaggaacagaaaataaaacactgcatgttctcattcataggtggaaattgaacaatgagaacacttggacacagggcagggaacatcacataccagggcctgttgggaggcggtgctgggggagggagagcattaggagaaatacctaatgtaaatgatgagttgatgggtgcagcaaaccaacatggcacatgtatacctatgtaacaaacctgcaagttgtgcacatgtaccctagaacttaaagtgtatatctatctatatctataactatatctatatctatatccatatctatatctatatctataaacacaaactgtaagttgagtagtgatattctttacaaatataacattagaactgtga

SEQ ID NO: 84902 - DNA, 471 bp, Homo sapiens
gagccggtattttgtatttagtagagacaggttttccatagtggcagactggtcttgactcctgaacgatcctcccacctcggcctcccaaagtgctgggattacacgtgtgagccaccaccacacccagccattatttcttattttgagaaattattttgcctggccctctgtgatcattttgattggtctgattttgactttacctgctaaaaacaaaacaaccccaaaactgttttatctctatcattttctggagtcaccttttaacttagtttatctgttaactttacttcccttttatctttcatttaaaaatacagactaggaaggggcaacacaagggccacagacatggtgataggccaggtcctaaatcagcaggttgggtgctggtgccttctctggtctgttctgctcttcatctcttcttttcatgcctcacagcaagacttatttggtcctttggag

SEQ ID NO: 84903 - DNA, 1409 bp, Homo sapiens
ctctggatgcaagtgtctagacactgtagtttaaagaataatttcctgtagaaaaacctaatctaataggacctactcataatttggcaaaatcatcctcataattccatgctactgaaatgggggtgtaataaagaaaaaatcatttgtttattcatttaacagggtttattaagcaccaatatatgcccagaactttgcagtgcactggaagttcagagataagaaaaccacagtttctgccatcaaaatgctaggaatctagaggtctcaaacatcagaggtcccttcaaactatgtctaccaggaaaataaaatacctgatttcatccctgcaaacaactctatacagacagaaatgcttcctagcttggaaactatagaaaattgaacatgaaaatgagagcaaagattctacatcaaaatggcaatgatccaatcagcccagtcaaggctgagtgggttgaatggggacttcgagtttggattcaatgctttgaacttcatagctccagagaagctgtgcaaaaaggggggattctagggaatctgaggaagattgttggagaaaccagctttcttcttgtctcctaatccctgctaagattgataccagtcaaggagctgagttactttcatttcattatgttgaccagagaagcttatgatacagacttgacacagcacctatttcaagagaaagatgttactctacttatgggaacctgcagatcaaattctcctggggcaagagaagaaatttgttcagcagcctaagaagtcaactgtactttggacagtgctgccaaacacaccccaggattctcccacccctgtgctttcccagaagatgccacatagctggtatttggttttcatgaataaccaaagattcttctttgcttcctgaaccccaggcatccttaggaatttgcttcatgtcctcacttgtccttgaaggcttgtttttcaggatgaacttttaaagtctaagttgtttatattcaaatcaacccaatgctattgttgctgatattaaaccattccaaactgagccaactggcccctaaacaagccagcaggcagcccctcactaatgcccagtttagaacatgttaggaccaggctatctgcatagctttagtggttttagaagccagtaatggcagtgtaaaagaggaatcatacagagatgacctggaagaaaatttgagtttcagcacattcaaaagcatttgactcttctgccgtgttttgattttcaagtgagacaatcaatgtacacacaaagcctctagtacaatgactgatgcatactagggactgttatttatgttatttttttacagtatgcatggacttcattgtctcagtctttggtgttacttatgaactctaaatttacacca

SEQ ID NO: 84904 - DNA, 722 bp, Homo sapiens
ctctggatgcaagtgtctagacactgtagtttaaagaataatttcctgtagaaaaacctaatctaataggacctactcataatttggcaaaatcatcctcataattccatgctactgaaatgggggtgtaataaagaaaaaatcatttgtttattcatttaacagggtttattaagcaccaatatatgcccagaactttgcagtgcactggaagttcagagataagaaaaccacagtttctgccatcaaaatgctaggaatctagaggtctcaaacatcagaggtcccttcaaactatgtctaccaggaaaataaaatacctgatttcatccctgcaaacaactctatacagacagaaatgcttcctagcttggaaactatagaaaattgaacatgaaaatgagagcaaagattctacatcaaaatggcaatgatccaatcagcccagtcaaggctgagtgggttgaatggggacttcgagtttggattcaatgctttgaacttcatagctccagagaagctgtgcaaaaaggggggattctagggaatctgaggaagattgttggagaaaccagctttcttcttgtctcctaatccctgctaagattgataccagtcaaggagctgagttactttcatttcattatgttgacccacgagttgtttacagacacgactttgacactctacatccagagccggatcctatagagtcacctgac

SEQ ID NO: 84905 - DNA, 744 bp, Homo sapiens
ccgggtagaggcaggcccacagcatgtcctccaaggtttactccacaggctccagagctaaggaccaccagccctcgggtccggagtgtctgccactcccagaggccaatgctgaagccatcgacttcctcagctccctccgtgagctcagacagtgtcggggttgggggtgcgggaggggtgcaagtctggagaggagggaagaaagtccagtctctctctctctctctctctctctctctcttccttgattctcctgggactcagaaaaggcctgaggcctgtttgttgacattcttcaagggaaggccccccggggacatggggacatggggcaggagtcttcacctgtccgtgccagtgaggaaggctgtgggatgaggaggcaggtggggactgtggggacactggtggtcatggggtcagaggattggattggggcccaggagcaggggctttatctgttcccacgggcccctcaccccagacaaggaggagctacagatgctgttcttctctgagacgctggccatggtctcagacaccggggagcctcagggagagctgaccattgaggtgcagagagggaaataccaggaaaaactcggcatgctgacatactgcctcttcgtgcatgcctctagccgaggcttcttggacaaaatgctctgcggaaattccctcctgggtagcgttcctactgcctgatgcccgtcactctccccttcctccaaccctcccctc

SEQ ID NO: 84906 - DNA, 439 bp, Homo sapiens
cctgcctcagcttcccaaagtgctgggattacaggcgtgagccaccacgcccagcccctccgtgatattttaatagcctccagctctgtgatattctcgtgatattttaatagcctgtttagcacgtattcacaaccagccaggcactgtgttcagctctttacctataggtcatgactgctattatcccattttacaggtggagaaactgaagcagggacaaagacttccagaaagatagcacgcaacacacctgggaggcatctacgcaattcagcggcaaaagacggccgggcgtggcgagacccgcctgtaactcccagcactttgggacggctgacgaccaggcggactcacttacgcccaggacgttcaacaccagcctgggcaaacatagtgacgaccccatgtctctattataaaatacatagatacggac

SEQ ID NO: 84907 - DNA, 152 bp, Homo sapiens
tcccaaaggactcacgcctgccacagaagctgtgacctgtaagccactcccccagtcctgtttccaaatctgtatcatgagagtaacaaccgtgccacttgccagggcgctgagggttaactgaggctggcccgtggcacgtggagagaatt

SEQ ID NO: 84908 - DNA, 404 bp, Homo sapiens
caaaaacatcaaacaccgcaatctcaatacaatcattatactaaaataattaataatttcttaatttttttcaaatattacaccgtgttaaaattttctcagctgctacagaaatgctttctcacaatttgttttcaaaattagtttgacttctaatgaaaataagactcatatattttaattgtttaataggtctcttaagcctccttcgatctaaggttttctttctttgcaacttatttgttgaaaaatctggtcactttgtcagtagagtttcttgtagtctaaattttgctaattttattcctgtggtgttattaaaagtatttttttctgtcctctgtatattctataaattgataaccagatttaagagcttactcagattaagattgcggtgtttg

SEQ ID NO: 84909 - DNA, 300 bp, Homo sapiens
agtgtcctgcactgaagcatggtacaaagaggtgggctggagagggacggttccaagagcagctggccaccgtctgctgccctggcgtgcccgcccattgtcctcactgtctgccacaccctccctagcaggccatacaaggacatgtcctcccaatgtcctgtcccccggcctcaggctcagtctttcagaattggcctccctaatcccattccgtccaggctctgctaagagacagccagggaagcttgcaggtgaatgtgcgtctatgagcaggcgttgtgcatgcaaacagccctg

SEQ ID NO: 84910 - DNA, 460 bp, Homo sapiens
tgaagccttagagttgcactttagaatctatattgactaggcaggtaaatatatatttattgcatttaactaactaggtaggtagatagatgagcttaaatactagaatatcctttaaaggaaaacctgagacatttttcatatctgaagcatcctacaaaaatatctttgcttttaaaaatggatacgtttctagcatgggcagcaaaacaagactctgccgctacaaaaaaatagaaaaattagctcggtgcagtggctaatgcctgtagtcccagtactttgggaggccaaggcaggaggattgcttgagcccagcctggacaacataaagagacctcatctctacagaaatttaaaaaatttagttggccatagtggtgcacacctgtaggcccggctactcaggaggctgaggtgggaggatcacttgagcctggtaggtcaaggctgcaatgag

SEQ ID NO: 84911 - DNA, 388 bp, Homo sapiens
ccctaccatgtaattgcccagttacatgttcgcctctcccactacacttaggatctacaagagtaggaactatgcctgctttagtcaccatgatatacccaggatgtagcacagtgccagacacacagtaggtcacgaatatatgttaaatgaacaaaaggaagggagtgaagagtgaggaaggaaggaaaagaaccacaacaaagaaggagcctgttcctgagaatggttgaaagatggagtctgaagtggttccctgaaaccctgtaggtttaaagcaagatgcctatgccttttaaagttgggtgcctgtggctttagccatagtagacaaggagctagacaagatcttgttgttccagagcagatgttaaaaactatagtttcc

SEQ ID NO: 84912 - DNA, 337 bp, Homo sapiens
ggcccagggttagccttcagctctgcccccaccctagatcctactatagctggaaggtggcgaccatttgaacgtgggacaagggaccatttctccctagcaagatgaagtcacttacccaagcctttgtgacaagtccgcatcagagccagcccagagctgcatctcttccagccctaagactgatgagatagatagatagatatttgccttcagaacaggaaggctttttgttaatgactttttgttaatgtttcagggagaggagcagaggagctcagtccagtatgattggcatttggtgaaacctagtggtgcaaatgttctgattgggatg

SEQ ID NO: 84913 - DNA, 627 bp, Homo sapiens
gagtatggaggtaaatataatagttcagaaaagaaattatagtgtctaggactataggtagtgatagagagtagagagattcaaaatagatttaggagtaaaatcagccagatatactgattgttttgatgtagaatgagggagtataaggataaatgttctgtatttctagcacatgcagttggtagtgccatttataaggcagagagtttttaatatataaaacactgccttatggtgcaagagcttaatcatttttaatggttgcataataatcagatacacaaatgtattttcagttcccagaaataaaacatctgttaatgtgtagtgaatatgatgttttgaaaattagtggtgaaaggctgggcgcggtggctcatgcctataatcccagcactttgggaggccgaagcgggcagattgcttgagcccaagagcttgagaccagtctgggcaacatggcaaggccttgtctctacaaaaaatataaaaattagctggggcatggtggtgcacgactgtagtcccagctacttgggaggctgggacgtgaccattactggagcctgggaagttaaggctgcagtgagccatgatcatgccactggactccatccagcctgg

SEQ ID NO: 84914 - DNA, 867 bp, Homo sapiens
gccactcagtctgtggtacttcgtcaaggcagccctagcaaaactcttccaccttctaatgacttttagtcatctctggaataaaacccacaggctctaagaagtttctaaggcctaggatgatctgactgactcttgcctctggtgcctcagccttagacacttcctgcctctctctactccagccacactagcctcggtgcagttccacatacatcatcctccttcgtctggagcctctggatgtcctgtttctttggcttggaatcctcctacctgctcatgctacttactcacctcgtcagtagcaccacccttcaagtctcagcttaaacatcgctccttagagaagccatccttgttcccttagactagggaacaagggaatctgtggtaattctgtggtaatcttccacagaattttgtactggtaatttacagcccttatgatcctccagtcacttggtcaacatatctcttctatgcaagattgtatcctccaggtctcaggaaccatttctgctgtatctgtggtatatttggtgtggtatatatgtatttgaatgaagcctcagaatgaacaggctaacagttgccaggatcatgaccattctggcaggaaaatggacagaactgctttggacacggtagtagtaagatttcccctgattatcaaaatccaattaggtagattttgtagctgaagtaatgaagtgattacctctagaataatttgttagtaattcaattcagtttatgaggcaaaggttatatttttattttttcagtcaactttagcaaatgttcagaatttttggaccagatgtatagtaggtctaattcattttgggatacatatgaaacaat

SEQ ID NO: 84915 - DNA, 435 bp, Homo sapiens
accacagataaggggggactactatacatattttcagttttccgtattttccccaaataattttaactcatcaaagtataccattattttatacaaatatttctcctgtatctttcttttatgttaatatacttgacacagccgttagcatacattcccacagtacttagcacttggaggatacagagaaagtaaaaaacacattactgccttgaagaagttaagagtttagttggccaattgaatttttaatgcaaatatccagtataaaatgctgttttaagactgccacaaaataaaatattgttttataaatggaaatgaaaatagattttgccaggtgaagtggtgtgcacctgtagaggcaggaccacttgagcccaagtttgagaccagcctgggcaagagagtgagaccccatcttaaaaaaaaaaa

SEQ ID NO: 84916 - DNA, 381 bp, Homo sapiens
gataattgattcaacatttgggagggggaaaattgagtttatcatcttaacaaaactcagcttcctaacagattgaaaaccgaagtgtaactaattcatgaactcttttaaaacacatatgtacacatgcacgtatgcaaataaatgcctgatctttggagcaagaaatttttgagcttaaaattattaaactgtgtgttctatgtgtgtgtttaataaaaatatagagaaatgaaatacaccattttaatcaaaatctgaagttaaatcacaaatgaaagatttgagacagataaatggctaatatccctactttataaagaactccctgcaactgataggaaaaaaagccattccgttattatatggacaaagggtatg

SEQ ID NO: 84917 - DNA, 396 bp, Homo sapiens
ctttttgtaggattagtgcagatgttaacagagtaaggtctgtcttagtagtattataaaaacagttttgactttgcattttcgtgaagggctcctgggaaaccctccccatccccagtggcctgtggaccacactttgaaaactgctgttatttacactgctttaaaattgccagagatttactaatgtattgccaactatgaattaagctgcagtaaatattgaaaaattacatacttccacttaagaaaaatgcataagaaatatatcttttatgctttatggagaagttatgacttttaagcttggtattatctttaagtcaaattttaataaaatgattatatgcatactggaattactaatcactttagctccgaacttcatggcaaatg

SEQ ID NO: 84918 - DNA, 521 bp, Homo sapiens
acttaccatttcttttgaatttaatatgaattgtctgatgatctcagaaccaagtagttaacaaggactaaggaaggttacacataaactaatgatgacaacaaaagctatcttcagtgatcaagacttgaacattaaaatataccatctgatggtgtaagattaaagaaaaagcaaaccaaaaatgtaccatctgagataaattagaagctcaatccaagtcctgtgaagtttacaaatgaaatcactgaagaactataaactatctttgaggaataatcaaaagtacagtgctacatgaagcctaaagaaaggcagataagatcttgattttcaaaagagaaagatgaattcttaacaaaataatatgtgtcaagccaggtgcagtggctcatgcctgtaatcccagcactttgggaggccaaggcgggaagactgtttgagcccaggagttcaagaccagtctgggcaacatagcaagaccccgtctcaagataaacaaataaataaatttttaaatt

SEQ ID NO: 84919 - DNA, 649 bp, Homo sapiens
ttttttttttttcatttttcatttggccgcatggattcttaatgttagcttaattatagacataaagtggtttggcagtagctagcaattcccactactccttccactcgtcctcctaaagaagggttataaactcaggcaaaaaaaaaaaaaaaaaaaaaaatgccaggcctcaaaaccaaagactctatcttactttgcctcaagtttgcaagttggtaaaaaagctgccggtaggcactcaaaacaaaacaaaacaatactgggtgactgctggactaaagagtacaaggtgacgagatcaagtatcccgctagccacagactagctctgggatggccagagagtgtgaccccagcacctccgctctctgctttcaggtcctaaactgacaccagtaaaaggacgactgggggtaccgcatgaggaagaaaagacttagggcttggcccgcctgctgccactgaccctcgtgtccccaacacagatgccgctaagagctgcggccagggagctcagatgggtccccaaaagaggcataggaaagcgcgacctcactgccgcggcagccgccacgcgcaccggacctgtagaggccgctcgcgcctacgcctcccggggcaacgacgcgcggcaggccgcggccgcc

SEQ ID NO: 84920 - DNA, 357 bp, Homo sapiens
ctcacacatttccatctcttttcagaactcctgacctgtatacatagtccaacttaatatcttcccttggatgttaaatttaagccctagagctcagttcctgatctatgctccagaactggcctccatacatccttatctatccgagttaatggtgctgcagttgatcaggccaaatccaggagacatccttattattttttttctcagatcttatatctaatattttaggaattcctattaatatatacctcaaaatccaaatatcttttgccacctctacagcaactcccctggtttaagccaccagcacctgtctccttgactgtagcaatggtctcttacctattttcataa

SEQ ID NO: 84921 - DNA, 338 bp, Homo sapiens
tggaaggatattaaaaagctaatataatcatacgaaaataatcatagttatgcggggtggagtggaagcaggaaacgtttcactctattccttcaaatatattcaggtatattacacctttatatattttattatatgtatttgaacaatgagtatattaccccttcaaagttacataaatatgaatgcaggaaatctatatggacagatgcataacaattttccatatatagttaaacagaaaaagcaagtttgcagaacagtgtgtacagtatcacttgtctaccacaaaatgtgtgtgtatatgtgtgtatgtgagtgtttatatacatacatat

SEQ ID NO: 84922 - DNA, 152 bp, Homo sapiens
  misc_feature (1)..(1): n is a, c, g, or t
  misc_feature (117)..(117): n is a, c, g, or t
nagggccagagtcccaccccagagagccttggtgaatccgctcaggcccccggactctgtgcattccccaggtggcctggcccatggccagctccctctctgtacacagaagtcagnaagaggctggggcagctgcgggggctcagcttgag

SEQ ID NO: 84923 - DNA, 218 bp, Homo sapiens
agtcgtttcccacccggggacactgttatatagtcggccacagtatttagaccggtccttggggaagctgatgccaggcactaaccagtccctgtctagtctgcaaaggcagcttgaactttcatcctataaaccgctcctcttctccattaacttgcctttatgtaaagatgtttgccttacattattttatttatttttgagacacagtctcactc

SEQ ID NO: 84924 - DNA, 1040 bp, Homo sapiens
gttagctaataaggtttgtcaactcagaaaatattaggtctgctgactgaacatatttcacagacttatacacaaagcatctctgaaagacactgaagccaaatttttcaaaactgtccttgattttgacctacactctgctatctcaggatgtgatcaattcctttcactttcagcatctataactcagggtctaaaagatacaacagagatatatcaacctaatataaatattcagcaaaccaaaaatagaaaattcaaatttagatccttcttgtagttttctagttatcaaaaggaaatcttatactaacataataaaatgcagtatttaatatttctaccaagattctcaagaaacaccaccattctctgtggtctttcaagtgatccatggcataccgtctttcaactttttttttttttttttttttagccccgatcatgggcaagggcagcctttcaactgtttttgaacaaagaagacagtaattactaaatatgcagtgttaacatgtatatccagattctgaaaatgtgccctcaaaaaaaaaaaagatcttcccaaactatcattccacacatttaacctccttccataccaaatctttctcataaggaaaaaaaaaaaaaaaaaaaacgaattttattccctcttccctaatttcttgctatgaaggattggatacttatcacactaaaaaaattatgctgaaatgtaatccttaaggggcattttaatttctcattttttatttcaaaactgccaaacagaaatgcgaatttcagatatttaaagccagcccatagtgaatacagtgctacatcaagaggaaaacggccgggcgcggttgctcacgcctgtaatcccaacactttgggaggccgaggcggggggatctcctgaggttgagagttcgagactagcctggctaacatagtgaaaccccatctctactaaaaatacaaaaattagccaggtgtggtggcacacgcctgtaatcccagctactcaggaagctgaggcaggagaatcgctt

SEQ ID NO: 84925 - DNA, 981 bp, Homo sapiens
gttagctaataaggtttgtcaactcagaaaatattaggtctgctgactgaacatatttcacagacttatacacaaagcatctctgaaagacactgaagccaaatttttcaaaactgtccttgattttgacctacactctgctatctcaggatgtgatcaattcctttcactttcagcatctataactcagggtctaaaagatacaacagagatatatcaacctaatataaatattcagcaaaccaaaaatagaaaattcaaatttagatccttcttgtagttttctagttatcaaaaggaaatcttatactaacataataaaatgcagtatttaatatttctaccaagattctcaagaaacacttttttttttttagccccgatcatgggcaagggcagcctttcaactgtttttgaacaaagaagacagtaattactaaatatgcagtgttaacatgtatatccagattctgaaaatgtgccctcaaaaaaaaaaaagatcttcccaaactatcattccacacatttaacctccttccataccaaatctttctcataaggaaaaaaaaaaaaaaaaaaaacgaattttattccctcttccctaatttcttgctatgaaggattggatacttatcacactaaaaaaattatgctgaaatgtaatccttaaggggcattttaatttctcattttttatttcaaaactgccaaacagaaatgcgaatttcagatatttaaagccagcccatagtgaatacagtgctacatcaagaggaaaacggccgggcgcggttgctcacgcctgtaatcccaacactttgggaggccgaggcggggggatctcctgaggttgagagttcgagactagcctggctaacatagtgaaaccccatctctactaaaaatacaaaaattagccaggtgtggtggcacacgcctgtaatcccagctactcaggaagctgaggcaggagaatcgctt

SEQ ID NO: 84926 - DNA, 378 bp, Homo sapiens
aaaggaaagattggaaagagttgcgggaaggaaagcaaatgtcccttcagacatgtgattgtgccacataggaaggaacagaccctggtttgaatcccagccttactgtgtattgaccctgtgacctttgggagatgagttaatccttgcaccacattttccttggctgcaaagcacctcaatttgcaggttcctttgagggctgagattatatacataaagcatgtgggctagtctcctctggtgtatatatgcagaaagcattgtccccaatcttgaattgttagatattcatttaaggcaaacatttttgttttctttttccttactgaatgagagaagctggtaaggaaacggtgggatgtggccaggtgatag

SEQ ID NO: 84927 - DNA, 371 bp, Homo sapiens
cgctctggtcactggtgccacacttgcatttcttttgttaggaaactgttctgagccatggagctcccttaggcagaggcagcagctggcagacaggacacagccttcctggactgggcctatgaaatgaggcatgtctcattctgcactggcccatgaacccgtgcatctcacccctctcagtgttctgagattcagaattcttcctctgcttgagtgctgggactagcctgtgtctccactgtctggcccctctggttcaggcagtagctacactgggggatctgaagtgctccaaggatactgaggaagtactcaggtgggggtccttgaaaaaaccctcaggctgagcagtggaggctgtgctgtgc

SEQ ID NO: 84928 - DNA, 750 bp, Homo sapiens
ttttgcaaagagatatataacttgtttcaaatgtaagagcactttttaaaatatacttttacaatttattttgaaaagtaatacaatagaacaacctttggaaaatagggtaatgggattttaagtatgtttttctccacttctaatagaactattattagcacttctgagtatttcttctcaggcattctctcttaagatgtttttatataattataatcataaggcacagtctattctaattcctgatttgttttctttcagcacaaagaatgtaccacagtttttctaaccattttcatatctcattggtgaacttttaaggtttttcttatttgtggatgaatatctggtacatatatattcttccttcacttgaataatttctttaagaaagagttctagaagtgggattctaggtgaaagaatttgaattcttttatgactgttgataaaaattgctcaatccctttttttttggagctaaaatcactatttttaatcatggtaagcatgattaaacaaagtacacatggcataaaatgtaccattttaaccattttcaagtgtacagttcagtagcattaagtttgcttcaagtttacattgttttgcaaccatcaccattatccatttccagaacatttatcattttctaaaactgaaacttttacccattaaacaataacttcctgttcttccctctcccacagcccctggcaaccaccaatctactttctgtctctatga

SEQ ID NO: 84929 - DNA, 515 bp, Homo sapiens
ttaattaaaataagtcaaaaaaaatgaacagacatgccagcacgaccaagtatcagaggaaagccttcaatgtgaataatggtgaccaaaatgaccaaaaaaaaaaaaggtagctgggaacaggcagagattatgcaacaattagataaatttccaaaggctctgaaaaaagctatcatttataaccatggtacaactataaaacaattaaccaaggccaggcgcggtggctcatgcctgtaattacagcattttgggatgctgaggcataagaatcacttgaatccgggaggtggaggttgcagtgagccaagattccaacactgtactccagcctgggtgagagccagccttgtctcaaaaacagaaacaaaaacaattaactagttattgtttaaaaaaaagaaacatctgtattttatatgtatacacaaagttcttggagggtaaaaatacgatgcacaaaggaaaagctcaatagacaggctggacaataaagttcaggatatctccca

SEQ ID NO: 84930 - DNA, 1016 bp, Homo sapiens
gggggaggcttctccgaaagccgcgagggcagctcccgtgtgtccgctgtgcaaaccggtccttccgccaaaaacctgctgtctggcttttctcagtgcctccctggatggatgtttgggagagtttacgcgtggccttgtgggatcgctgtggcggactctcagctatcagagggctccatcactccatctgtaagtgatggcagctggtggcgagtcctgagcagggatgtgatcctgactgggccacgtgctggctgccctggtgacagaagcttgacgtcacaccagaccatgtgcctagtgaatgtgcacccaagagcctgagccacttgcccctgctcccaactattcccaggccaacaacctcttgtcaaacagcccggccaactctgcctggcacagggtgcaggctctagacgtggatggagcaggattgcatcctttcagttgtccacactgttggtcaaacagagtaaaagccatggccagcaactgtactaagtggactacatgttgcatctagcctgttcaccggaattccttctgacaaatatttgagccatcccctcctgctgactgtggacagcagagcgagcacgcaaggccacgttgcaggccatcgttgcaatgccacagctctggggctgaggccatggcccctcaaccgaacacgtatagatgacaagggtatgcacccgtgttaagccacggactggtctcaatctccttgagctacgtgaaactggcccggcggaggactccccaacagttgctaggggaattaacacggcagttgatgccatttgggcccccgtcaagacgttctggcattcctttaaccgggcggcaacccacccacgtgtcgccctatggtaacgtcggcttcttgcgccatgggagacatgaatcacacggtaggccccaccagccgggcgtcaaccactccaagtaggtcccggggtctcggagacacatacaccgtttgagagacgcgctctgcagcaagacacttg

SEQ ID NO: 84931 - DNA, 185 bp, Homo sapiens
gtcttttataataaactggtcaacataactacagtgtttgctgagttctgtgagtagctctatcaaattattgaacttgagggaggttatgggagtcccaaatttttaaacagtaaccccagtgtatagatgggcctatggaatttgtgactggcatctgcagtgaggatagtgttgtgggactg

SEQ ID NO: 84932 - DNA, 393 bp, Homo sapiens
cctcagcctcccgagtagctgggactacagacacccaccaccatgcccggctaattttttgtattttttagaagagacggggtttcaccatgttagccaggatggtcttgatctcctgaccttgtgatctgcccgcctcggcctcccacagtgctgggattacaggcgtaagccaccgcgccggacatattgtttgtgtttttctaataatagccatcctgaaaagtatgaggtgatttctcgtttacttttgatttggatttccttgacaattagtaacattgagcatttttccatgcagaagcctgttcacatgcttctgctcaaactattagcttcacatgccacctgggggaaaaagcaagtttctagcaaaggcctctaccactaacc

SEQ ID NO: 84933 - DNA, 1917 bp, Homo sapiens
atataaagaacttctataaatcaatagggaaaagaccaaaaaaagtcatagaaaagcaagccaatgatttgagtaggcaaattagagaagtggaaaccgaaatgtccaataaacaggtgaagagtcaagcttagcagctattagggaaatgcaagttaaaaccaactaccatccaggtgctgtggctcatgccacaaggttggttgagtgtaaattgaaacaatcattttggagagaaatttggcaatctcttgtaatattaaaagctctttgactcctagatatatatcctagagaagttccagcaaatgtgcacaaagacatataaaagatgcttactatttgttaatctggaagtaacacaggggtcattaataggggggtggacaaagaaagtgtatgtcactaatgaactagatctgtatgtaacagtattgtatcagtcaggtgtgccgcaataatgctgcatgacaaaacaccctaaaactgacttataacaacaggcatttaattttggctagtatgtctgcatcagctggcctgtattagtctgttttcacactggtgataaagacacacctgaaactggggggaaaaaaaaagatttaattggtcttacagttccacaaggttgaggaggtctcagaatcatggcaggaggcaaaaggcacttcttacatggcagcggcaagagaaaaatgaagaagcaaaagcagaaatccctgataaatccaacagatctcttgagacgtattcactatcacaagaatagcatgggaaagaccagcccccatgattcaattacctcccctggtccctcccacaacacaggggaattctgggagatacaattcaagttgagatttgggtgggggcacagccaaatcatatcatggggtttggccagtctagcccaggattggctcgacttggctcgggtcattttgtgattagtgtgctcctcacatttcaccttttctgggcccagtaggccatccaggacatgtgcaagccagcgacactatgggcagctctgggagccagtttatataccaactcctgatggtacgtccagcctgctgcccaggaaggaagccagtgctggcacctggaaggcgcctggcgtgtatgggagcaccaagagcatggggagatgcactgcagcaggcagcacagacctacagtctgttatcacagtctcgctctctgtaataagcaggttaataaggtaataaggaggttacattgctgtttgaatttgctttccttgactaagcatctcttcatgctcaaaagtcttttacatgtcttcttctgtgaattcttttgtgtcatttgctcatttatctacttgtatggtttttgccttgaagaaaatgtaaattttaacttagttaaatgtataaagttttatcttcatagcctctggatttctttttttctttcttcccctgagatagaccttccctattacatgataattttaaaaattctccaatttttttctagtacatttatagtttctttccattttgtatttgttttgctgctgggactctggacactgttcattgccctactcatctcttgcgttatgtatttggttagctatgtttatcatattcattttttttttttttttgagtcagtctcgctctgtcgcccaggccagaatgcaggagcacaatctctgctcactgtagcctcaacctcctgggctcaagtatttcccctacctcgccttcctgagtagctgggactacaggctcacacctctacacacactcgactactttttgtatttttagtggagacagggtttcactatgacgcccagcctggtctcgaactcctgggctcaagggatccgcccgccttggcttcccaaaatgctaggattacaggtgtgagaaactg

SEQ ID NO: 84934 - DNA, 1466 bp, Homo sapiens
atataaagaacttctataaatcaatagggaaaagaccaaaaaaagtcatagaaaagcaagccaatgatttgagtaggcaaattagagaagtggaaaccgaaatgtccaataaacaggtgaagagtcaagcttagcagctattagggaaatgcaagttaaaaccaactaccatccaggtgctgtggctcatgccacaaggttggttgagtgtaaattgaaacaatcattttggagagaaatttggcaatctcttgtaatattaaaagctctttgactcctagatatatatcctagagaagttccagcaaatgtgcacaaagacatataaaagatgcttactatttgttaatctggaagtaacacaggggtcattaataggggggtggacaaagaaagtgtatgtcactaatgaactagatctgtatgtaacagtattgtatcagtcaggtgtgccgcaataatgctgcatgacaaaacaccctaaaactgacttataacaacaggcatttaattttggctagtatgtctgcatcagctggcctgtattagtctgttttcacactggtgataaagacacacctgaaactggggggaaaaaaaaagatttaattggtcttacagttccacaaggttgaggaggtctcagaatcatggcaggaggcaaaaggcacttcttacatggcacaccaagagcatggggagatgcactgcagcaggcagcacagacctacagtctgttatcacagtctcgctctctgtaataagcaggttaataaggtaataaggaggttacattgctgtttgaatttgctttccttgactaagcatctcttcatgctcaaaagtcttttacatgtcttcttctgtgaattcttttgtgtcatttgctcatttatctacttgtatggtttttgccttgaagaaaatgtaaattttaacttagttaaatgtataaagttttatcttcatagcctctggatttctttttttctttcttcccctgagatagaccttccctattacatgataattttaaaaattctccaatttttttctagtacatttatagtttctttccattttgtatttgttttgctgctgggactctggacactgttcattgccctactcatctcttgcgttatgtatttggttagctatgtttatcatattcattttttttttttttttgagtcagtctcgctctgtcgcccaggccagaatgcaggagcacaatctctgctcactgtagcctcaacctcctgggctcaagtatttcccctacctcgccttcctgagtagctgggactacaggctcacacctctacacacactcgactactttttgtatttttagtggagacagggtttcactatgacgcccagcctggtctcgaactcctgggctcaagggatccgcccgccttggcttcccaaaatgctaggattacaggtgtgagaaactg

SEQ ID NO: 84935 - DNA, 422 bp, Homo sapiens
accatcagtagttccaaggctcttagttatacttccagattatatcacctcttctcccagaagtaactactatcaagaattttatgttaatcatatcctcgcctttatttatagctttgtgttttttttatagtacagtgtatgcggccatgtgctgcataacactgtttcagtcaagaatgaactgtttctacaatggtgatcccatgagattataatggagttgaaaaattcctgtcacctcgtggcattgtaacctcacagtgcagtacattagtcacatgtttgtggtgattctggtgtaaacaaatgactgtgctcccaaagtatacacaatacaagtatgtaccatacataatagttgataatgataataaacaactatattagtaggtttacatgtttactatagtgtactttta

SEQ ID NO: 84936 - DNA, 439 bp, Homo sapiens
cttgaattctaggcatgtgactgtgctcctagacatagacaacagctaatttgatggtaaaagacatactgaggaaagttatagtttatttttgttccccacagttatcaggaaaaccaaatcaaatttaacactgagaatacagaaagtttcaccacaattctctgatttagctattccttttttggttttctctaaggaagtagaacatatgacagtgaatactgcagctacttttcacttcctcttttatagccatatattactgtaagtatacttgcttaagttccaagtctcttgatttaaacacatgatttgcttgatttcatgaaggatattcaagcctaatagaagtaggagtatctgataatctgccttctgagtttctaggcctcttagagtttactattaatctagaagtagtaatcaggagccttgt

SEQ ID NO: 84937 - DNA, 532 bp, Homo sapiens
gggtttcaccgtgttatccaggatggtctcgatctcctgacctcgtgatctgccagcctcggcctcccaaatcacgctgagattacaggcgtgagccacggcgcccggcctcagcttcttaaaaacaatcgggttagagtgagcttttcacttggcaccacgtcaccagccgcatccggccaccgactcttctcccacaaatgtggacgtgccattgtgcggccgccctggagttggacatcgaggatgctctagatttttcaacattataaacggcaccatgaaggcgacttttcctgtaatactcgagtctttgttcctcatccctgatgatctccttagaatgaatgactaacaggtgtgacagctaagattctgggtgcgtctacccaaaattatcatctggggaggtcagagacggctccaccccctgccacagatggggagaccttccagctttgctcctgtggtcacggctgctcaggagcagaacttaccccggacccaggctcagaaaacaccatcaaatcac

SEQ ID NO: 84938 - DNA, 1755 bp, Homo sapiens
aaacaaggaaaaccggcctgactggggggtgaattcagcagggagtaaatctgatcggcatcaggtctgcggaaaggagctggtgagcacgacaccacccaggcattgcctggctctctccgcggcgggctaagttaaccgcgggtccaggagactaagctgaaactgctgctcagctcccaagatggtgccacccaaattgcatgtgcttttctgcctctgcggctgcctggctgtggtttatccttttgactggcaatacataaatcctgttgcccatatgaaatcatcagcatgggtcaacaaaatacaagtactgatggctgctgcaagctttggccaaactaaaatcccccggggaaatgggccttattccgttggttgtacagacttaatgtttgatcacactaataagggcaccttcttgcgtttatattatccatcccaagataatgatcgccttgacaccctttggatcccaaataaagaatatttttggggtcttagcaaatttcttggaacacactggcttatgggcaacattttgaggttactctttggttcaatgacaactcctgcaaactggaattcccctctgaggcctggtgaaaaatatccacttgttgttttttctcatggtcttggggcattcaggacactttattctgctattggcattgacctggcatctcatgggtttatagttgctgctgtagaacacagagatagatctgcatctgcaacttactatttcaaggaccaatctgctgcagaaataggggacaagtcttggctctaccttagaaccctgaaacaagaggaggagacacatatacgaaatgagcaggtacggcaaagagcaaaagaatgttcccaagctctcagtctgattcttgacattgatcatggaaagccagtgaagaatgcattagatttaaagtttgatatggaacaactgaaggactctattgatagggaaaaaatagcagtaattggacattcttttggtggagcaacggttattcagactcttagtgaagatcagagattcagatgtggtattgccctggatgcatggatgtttccactgggtgatgaagtatattccagaattcctcagcccctcttttttatcaactctgaatatttccaatatcctgctaatatcataaaaatgaaaaaatgctactcacctgataaagaaagaaagatgattacaatcaggggttcagtccaccagaattttgctgacttcacttttgcaactggcaaaataattggacacatgctcaaattaaagggagacatagattcaaatgcagctattgatcttagcaacaaagcttcattagcattcttacaaaagcatttaggacttcataaagattttgatcagtgggactgcttgattgaaggagatgatgagaatcttattccagggaccaacattaacacaaccaatcaacacatcatgttacagaactcttcaggaatagagaaatacaattaggattaaaataggttttttaaaaagtcttgtttcaaaactgtctaaaattatgtgtgtgtgtgtgtgtgtgtgtgtgtgtgtgagagagagagagagagagagagagagagagagagagaattttaatgtattttcccaaaggactcatattttaaaatgtaggctatactgtaatcgtgattgaagcttggactaagaattttttccctttagatgtaaagaaagaatacagtatacaatattca

SEQ ID NO: 84939 - DNA, 580 bp, Homo sapiens
tatcttacttgttaggttgagaaagaaagaaggccagaaactatgggaagtaacttgattccgttggaattcttttgcataataaaatctgatatgtaatggatgacaaatgagataatatttacctgtttttcagcatgggtcaacaaaatacaagtactgatggctgctgcaagctttggccaaactaaaatcccccggggaaatgggccttattccgttggttgtacagacttaatgtttgatcacactaataaggtaatgctttgatttatacaacttatcctgatactctaatattgtctgtcgctatggaccactagaaggtgttcaaatgtgaccttgccctcacctgagaatgactcattttgcaatttgtattgtttcatatgaaggcttttactagtttggccattcctcaattctttgttattgtctgattaatttctctataaaccttatttttcacttccttaatacctgaagccaggctgcttgtattttcctttcactgagatagaatattgtttttctgtttctctttcatgactatcttcaatcaccacagcagcctaaaaag

SEQ ID NO: 84940 - DNA, 1810 bp, Homo sapiens
gacccaggacacagcccgcgcgcagccacccgcccgccgcctgccagagctgctcggcccgcagccagggggacagcggctggtcggaggctcgcagtgctgtcggcgagaagcagtcgggtttggagcgcttgggtcgcgttggtgcgcggtggaacgcgcccagggaccccagttcccgcgagcagctccgcgccgcgcctgagagactaagctgaaactgctgctcagctcccaagatggtgccacccaaattgcatgtgcttttctgcctctgcggctgcctggctgtggtttatccttttgactggcaatacataaatcctgttgcccatatgaaatcatcagcatgggtcaacaaaatacaagtactgatggctgctgcaagctttggccaaactaaaatcccccggggaaatgggccttattccgttggttgtacagacttaatgtttgatcacactaataagggcaccttcttgcgtttatattatccatcccaagataatgatcgccttgacaccctttggatcccaaataaagaatatttttggggtcttagcaaatttcttggaacacactggcttatgggcaacattttgaggttactctttggttcaatgacaactcctgcaaactggaattcccctctgaggcctggtgaaaaatatccacttgttgttttttctcatggtcttggggcattcaggacactttattctgctattggcattgacctggcatctcatgggtttatagttgctgctgtagaacacagagatagatctgcatctgcaacttactatttcaaggaccaatctgctgcagaaataggggacaagtcttggctctaccttagaaccctgaaacaagaggaggagacacatatacgaaatgagcaggtacggcaaagagcaaaagaatgttcccaagctctcagtctgattcttgacattgatcatggaaagccagtgaagaatgcattagatttaaagtttgatatggaacaactgaaggactctattgatagggaaaaaatagcagtaattggacattcttttggtggagcaacggttattcagactcttagtgaagatcagagattcagatgtggtattgccctggatgcatggatgtttccactgggtgatgaagtatattccagaattcctcagcccctcttttttatcaactctgaatatttccaatatcctgctaatatcataaaaatgaaaaaatgctactcacctgataaagaaagaaagatgattacaatcaggggttcagtccaccagaattttgctgacttcacttttgcaactggcaaaataattggacacatgctcaaattaaagggagacatagattcaaatgcagctattgatcttagcaacaaagcttcattagcattcttacaaaagcatttaggacttcataaagattttgatcagtgggactgcttgattgaaggagatgatgagaatcttattccagggaccaacattaacacaaccaatcaacacatcatgttacagaactcttcaggaatagagaaatacaattaggattaaaataggttttttaaaaagtcttgtttcaaaactgtctaaaattatgtgtgtgtgtgtgtgtgtgtgtgtgtgtgtgagagagagagagagagagagagagagagagagagagaattttaatgtattttcccaaaggactcatattttaaaatgtaggctatactgtaatcgtgattgaagcttggactaagaattttttccctttagatgtaaagaaagaatacagtatacaatattca

SEQ ID NO: 84941 - DNA, 372 bp, Homo sapiens
gagttacggtttcttcttctgtttccgtttcctctctctctactcactcctactttctcctgcatcaactttggtcaattaacatagacaagtgattcatctgtagagaggctcctagactccaagcagcccccttccttgttcattgtggctgtaggttttataaggaggtctgtggctccctggcatcaaaatatgaaaaataaaatctgtgcctgttccagcttcaatcctcctccaagccttagcttttcaacaaccctaccctttcaacttcagggatcatggagtcacagagactggacaactcctccaaatctagacaaagactttcttaagcgccctgagcccaggtgcatatcttcccatcag

SEQ ID NO: 84942 - DNA, 632 bp, Homo sapiens
ggaaattaacttggggtttagggtggacgttttttgccttattttgcttcttagtaaatgaaagtgaagcctgaataatgagaatattattaatccatctccatttttctactttaaaggcacagcatagattttggttccagttgttactactttaatgagagtaatgaatattccatgtgagggcagtgtgcatgaaagtgtgctgggaaagttctatggatctttgtgttttgtttcagttttgaggattaaatgcaagtttaatcctttaatgaatatataagtcggttgatgccctttcttgagaaagttatggttaaattgttgtgtcaaatcattgtatttcattctgtctccagtgtgggggtagcatagagaggtggtgggtagggctgggggtgaatatgtgtgtttttcttaagcgacgctagttttggaaaatgtaaggattccaaaggttaatgtggattaaaatgctgtctgccatgaactttagaaattgaaataaatgtggttggtaaaagaagaactgtgttttgattacacggaaatgcttttgtaggccttttctttcaggtgaagtaaacatcttaaaaataagcacaataaatatgtttctaagcacggtg

SEQ ID NO: 84943 - DNA, 495 bp, Homo sapiens
agtgggagcacttagattcggagcatggatagtccggagtccaaggtctctgggtgagcagacagtcggccaaaggccagcctggagtcaaagagaccagacccctgcttagattgccgttctctctccactcccggtagtggagagagaacgtaacccctttgtgaagtacttggtgtacttcaccattttatagatgggagaactgagtctcagactaaggaaactgttacatggctgataaatgactgacctggagttgaattcaggaccacctgattccaatcccttctcccttgagacactgacttccattcttttctggaccaaatcaagatcaaaggacccttttcacatcagcttctgctattggaactgagatttataaattcaatatgactatacaagctctctaggttaatggattaaccaaataagttaaaggcataggctgttaacccacttgcccactctcacacgcattctctctccacc

SEQ ID NO: 84944 - DNA, 420 bp, Homo sapiens
aacagaaaagcggtgatccccctaggtatatccaagcaaagtggtcaggggatagagtttatgtgagcctttaaggcatttggctcagggctggggcttgtttctttctgttttggtaacaacctagataattttatcagtgccaggaaatgttcaagaccccagtgtgggttcaagccttcagggtaaaacatgttgggtcacagagggatcaaaaggactctgtgatctttgggtcaagacacagaaataggggacagacactgggggaccctacagctttgataacttagttaaggtgatatacaccagttttccctattatacgactagcttactctttttcgctttgtaattaataaatatcttattggaacatattttgaaactaaactaaataaatatcctgtttttattcaa

SEQ ID NO: 84945 - DNA, 912 bp, Homo sapiens
gtccgaagttcactcctaggtgatgtacttaatacctgttagtaacattcattcaaacccagagttcttggttctaatttcctgagaacagggccttgccctagggcacagcccctcattgcatcccagcccttgttgggagggcagctacctatggtttgctgatagactaaactgtgccccccaaacaaatttatatgttgaagccctaacacccggtacctcagaatgtgaccttatttggagacggggcctttaaagaggtttcaaattaaattgagactattagggtgggtcctaatccagtctgaccagtgtctttgtaagaaggggagattaggacacagaaacaccaggtgcatgtgctcacaggggaaagaccgtgtgaagagcagtaagaggggagccatctgcaagcagaggaaaccatccctgctgcaccttgatcatggacttcagcctccagaactgtgagaaattatttctgttgtttaagccattcagtcagtggtattctgttatgtcaaaagaatacacattaccctgactgttgattgaaatgcctcttggcaatttggccattgtatttgcaaggaccactctttatgaaattgacacaaagaggggcttaagttagtgggaactctggacttacccagggactaccatgtaatcattacactggagaggttggcaggtctggatcaagcttaagattttttaaaaaattgttatacaggagtggcgtggtggctcacgcctgttaatcccagcactttgagaggccaaggtgggcagatcacttgaagtcaggagttcaagaccagcctggccaacatggtgaaaccccgtctctactaaaaaataaaaataacgagccgggcatgatggcacatacctgtcagctacttg

SEQ ID NO: 84946 - DNA, 850 bp, Homo sapiens
gtgactgggctccctgtgagtgacggtcacacaccctcccggcatcctgagccgtcgctgccgtgtcagtgatggcattgtgggtgagcaggtagtggtgtttgcattcctggccgccccgagtccagcgattgtcacacacatcccagcatcctgggccatcgctgttgtgacagtgatggcggtgtgggagagcaggggctgctgtgtccattcgtggctgccctcccccacctccattcccactaatcccggattagggctgacactccaagcccgctctcgcctggacagctacagcttagtgctccccctcctgcctctgccttgtcctgatatcactctgtcctacccagggaggagaccagttcttggcctgtcgcttagggattgagaagacactggtaataacttaatcatgtccagcattctgtctgaaaagtggaattttctgtccaattgagacaataactcctcccattccaagttttaccccacctttgtattttaagatggaaagaaaccctaaactcttctagccaagccccttctccagaaggggagactgaggcccgtgaactggaggaatttgccaaggtctgcgcattggtggctgcagcctgttccctggtgggatgcagtatcaacttggagacctaaatgtttcctttaaatgagagccagcgagaagagctcagagagtagagttgttaatgtgttatcccaaacagtggggctcgcaccttccaggatccaaggactggtcagcaccggaggagtcctcctgctctctgatgaccactgcagcagcactgactccccgtattgcaggggacctcggattcccacc

SEQ ID NO: 84947 - DNA, 2256 bp, Homo sapiens
cacggcaggcggggggccgggccctggtggtggaaggccaggcggtgagcctgcgctgccgagcggtgggtgaccccgagccggtggtgcactgggtggcacctgatgggcggctgctggggaactccagccggacccgggtccggggggacgggacgctggatgtgaccatcaccaccttgagggacagtggcaccttcacttgtatcgcctccaatgctgctggggaagcgacggcgcccgtggaggtgtgcgtggtacctctgcctctgatggcacccccgccggctgccccgccgcctctcaccgagcccggctcctctgacatcgccacgccgggcagaccaggtgccaacgattctgcggctgagcgtcggctcgtggcagccgagctcacctcgaactccgtgctcatccgctggccagcccagaggcctgtgcccggaatacgcatgtaccaggttcagtacaacagttccgttgatgactccctcgtctacaggatgatcccgtccaccagtcagaccttcctggtgaatgacctggcggcgggccgtgcctacgacttgtgcgtgctggcggtctacgacgacggggccacagcgctgccggcaacgcgagtggtgggctgtgtacagttcaccaccgctggggatccggcgccctgccgcccgctgagggcccatttcttgggcggcaccatgatcatcgccatcgggggcgtcatcgtcgcctcggtcctcgtcttcatcgttctgctcatgatccgctataaggtgtatggcgacggggacagccgccgcgtcaagggctccaggtcgctcccgcgggtcagccacgtgtgctcgcagaccaacggcgcaggcacaggcgcggcacaggccccggccctgccggcccaggaccactacgaggcgctgcgcgaggtggagtcccaggctgcccccgccgtcgccgtcgaggccaaggccatggaggccgagacggcatccgcggagccggaggtggtccttggacgttctctgggcggctcggccacctcgctgtgcctgctgccatccgaggaaacttccggggaggagtctcgggccgcggtgggccctcgaaggagccgatccggcgccctggagccaccaacctcggcgccccctactctagctctagttcctgggggagccgcggcccggccgaggccgcagcagcgctattcgttcgacggggactacggggcactattccagagccacagttacccgcgccgcgcccggcggacaaagcgccaccggtccacgctgcactccagcctgggcaacagagcgagactctgtctcagaaaaaaaaaaagaaatatctgacagtagaggacagattaaataaattatgatctgctatatcatgacataaaatacatttactagtgatactgatccatataattgagaaagcatttatgatgtattaccaaatgaagaaagtagatttaaaaaggtacatgtaatttgggcagaggtactttggagaaattaagaacacaggctctgcagtacaactttcagggtgtgattctgaactctgacagttactaacctcgcagtgtctttttcctcactggtgaaactggaatataaataccatgagatatggctatctcaattatcaagtaagataatctacataaaacatagtaatacataacaattactttacataagttagctgtttttattaaagatcactgacattacatatcccttaatccatttttagaaaagaaacatgaggctgctgttttcttatgctaaaatatgtgcttctcaatcagctatcaatatcatgaatgctaactaaaaataactttccaagcctgatgttaagcatgaatttatttgaatcagcagaattagcaaaaacgattctaagacacgtaagaaaatgttccctctttaccagcaactagggaaatagagacatgattctgcatcagaaatcaagtttaaagaatctaatctgagaagagataccaaatcaagaatattagcaagagactgaatcatgtgttctatgtgatatgggagattcgtgtaattatttcaaattgttgccatcttagtcatttcatatatttggatttcatataccttggatttgttacttgtacatataatcatggaaatgttacttgtgtatatttggaaggcatcagatatcactgattatcattctctgtcaaagaaacattaaaatcatagaaaatct

SEQ ID NO: 84948 - DNA, 132 bp, Homo sapiens
tcgaattcaagcttctaacgatgtacggggacatggccaacaacgaaggacttttctccctggtggcgaggaagctgagcagacccctgtgatgcctgtgacctcaattaaagcaattcctttgacctgtcc

SEQ ID NO: 84949 - DNA, 1753 bp, Homo sapiens
caggatggtctcgatctcctgacctcgtgatctgcccgccttagcctcccaaagtgctgggattacaggcatgagcctccgcccccggccttaaataattcttaaaggaagtaaagttaactttgaaagaactatcaggatttggattgactgaaaggagtggggaagcttagggaggaggtgcttgccagacactgggtcatggcagtggtcggtgaagctgcagttgcctagggcagggatggagagagagtctgggcatgaggagagggtctcgggatgtttggctggactagattttacagaaagccttatccaggcttttaaaattactctttccagacttcatctgagactccttcttcagccaacattccttagccctgaatacatttcctatcctcatctttcccttcttttttttcctttcttttacatgtttaaatttaaaccattcttcgtgaccccttttcttgggagattcatggcaagaacgagaagaatgatggtgcttgttaggggatgtcctgtctctctgaactttggggtcctatgcattaaataattttcctgacgagctcaagtgctccctctggtctacaatccctggcggctggccttcatcccttgggcaagcattgcatacagctcatggccctccctctaccataccctccacccccgttcgcctaagctcccttctccgggaatttcatcatttcctagaacagccagaacatttgtggtctatttctctgttagtgtttaaccaaccatctgttctaaaagaagggctgaactgatggaaggaatgctgttagcctgagactcaggaagacaacttctgcagggtcactccctggcttctggaggaaagagaaggagggcagtgctccagtggtacagaagtgagacataatggaatcaggcttcacctccaaggacacctatctaagccattttaaccctcgggattacctagaaaaatattacaagtttggttctaggcactctgcagaaagccagattcttaagcaccttctgaaaaatcttttcaagatattctgcctagacggtgtgaagggagacctgctgattgacatcggctctggccccactatctatcagctcctctctgcttgtgaatcctttaaggagatcgtcgtcactgactactcagaccagaacctgcaggagctggagaagtggctgaagaaagagccagaggcctttgactggtccccagtggtgacctatgtgtgtgatcttgaagggaacagagtcaagggtccagagaaggaggagaagttgagacaggcggtcaagcaggtgctgaagtgtgatgtgactcagagccagccactgggggccgtccccttacccccggctgactgcgtgctcagcacactgtgtctggatgccgcctgcccagacctccccacctactgcagggcgctcaggaacctcggcagcctactgaagccagggggcttcctggtgatcatggatgcgctcaagagcagctactacatgattggtgagcagaagttctccagcctccccctgggccgggaggcagtagaggctgctgtgaaagaggctggctacacaatcgaatggtttgaggtgatctcgcaaagttattcttccaccatggccaacaacgaaggacttttctccctggtggcgaggaagctgagcagacccctgtgatgcctgtgacctcaattaaagcaattcctttgacctgtcc

SEQ ID NO: 84950 - DNA, 1699 bp, Homo sapiens
caggatggtctcgatctcctgacctcgtgatctgcccgccttagcctcccaaagtgctgggattacaggcatgagcctccgcccccggccttaaataattcttaaaggaagtaaagttaactttgaaagaactatcaggatttggattgactgaaaggagtggggaagcttagggaggaggtgcttgccagacactgggtcatggcagtggtcggtgaagctgcagttgcctagggcagggatggagagagagtctgggcatgaggagagggtctcgggatgtttggctggactagattttacagaaagccttatccaggcttttaaaattactctttccagacttcatctgagactccttcttcagccaacattccttagccctgaatacatttcctatcctcatctttcccttcttttttttcctttcttttacatgtttaaatttaaaccattcttcgtgaccccttttcttgggagattcatggcaagaacgagaagaatgatggtgcttgttaggggatgtcctgtctctctgaactttggggtcctatgcattaaataattttcctgacgagctcaagtgctccctctggtctacaatccctggcggctggccttcatcccttgggcaagcattgcatacagctcatggccctccctctaccataccctccacccccgttcgcctaagctcccttctccgggaatttcatcatttcctagaacagccagaacatttgtggtctatttctctgttagtgtttaaccaaccatctgttctaaaagaagggctgaactgatggaaggaatgctgttagcctgagactcaggaagacaacttctgcagggtcactccctggcttctggaggaaagagaaggagggcagtgctccagtggtacagaagtgagacataatggaatcaggcttcacctccaaggacacctatctaagccattttaaccctcgggattacctagaaaaatattacaagtttggttctaggcactctgcagaaagccagattcttaagcaccttctgaaaatcggctctggccccactatctatcagctcctctctgcttgtgaatcctttaaggagatcgtcgtcactgactactcagaccagaacctgcaggagctggagaagtggctgaagaaagagccagaggcctttgactggtccccagtggtgacctatgtgtgtgatcttgaagggaacagagtcaagggtccagagaaggaggagaagttgagacaggcggtcaagcaggtgctgaagtgtgatgtgactcagagccagccactgggggccgtccccttacccccggctgactgcgtgctcagcacactgtgtctggatgccgcctgcccagacctccccacctactgcagggcgctcaggaacctcggcagcctactgaagccagggggcttcctggtgatcatggatgcgctcaagagcagctactacatgattggtgagcagaagttctccagcctccccctgggccgggaggcagtagaggctgctgtgaaagaggctggctacacaatcgaatggtttgaggtgatctcgcaaagttattcttccaccatggccaacaacgaaggacttttctccctggtggcgaggaagctgagcagacccctgtgatgcctgtgacctcaattaaagcaattcctttgacctgtcc

SEQ ID NO: 84951 - DNA, 2775 bp, Homo sapiens
caggatggtctcgatctcctgacctcgtgatctgcccgccttagcctcccaaagtgctgggattacaggcatgagcctccgcccccggccttaaataattcttaaaggaagtaaagttaactttgaaagaactatcaggatttggattgactgaaaggagtggggaagcttagggaggaggtgcttgccagacactgggtcatggcagtggtcggtgaagctgcagttgcctagggcagggatggagagagagtctgggcatgaggagagggtctcgggatgtttggctggactagattttacagaaagccttatccaggcttttaaaattactctttccagacttcatctgagactccttcttcagccaacattccttagccctgaatacatttcctatcctcatctttcccttcttttttttcctttcttttacatgtttaaatttaaaccattcttcgtgaccccttttcttgggagattcatggcaagaacgagaagaatgatggtgcttgttaggggatgtcctgtctctctgaactttggggtcctatgcattaaataattttcctgacgagctcaagtgctccctctggtctacaatccctggcggctggccttcatcccttgggcaagcattgcatacagctcatggccctccctctaccataccctccacccccgttcgcctaagctcccttctccgggaatttcatcatttcctagaacagccagaacatttgtggtctatttctctgttagtgtttaaccaaccatctgttctaaaagaagggctgaactgatggaaggaatgctgttagcctgagactcaggaagacaacttctgcagggtcactccctggcttctggaggaaagagaaggagggcagtgctccagtggtacagaagtgagacataatggaatcaggcttcacctccaaggacacctatctaagccattttaaccctcgggattacctagaaaaatattacaagtttggttctaggcactctgcagaaagccagattcttaagcaccttctgaaaaatcttttcaagatattctgcctagacggtgtgaagggagacctgctgattgacatcggctctggccccactatctatcagctcctctctgcttgtgaatcctttaaggagatcgtcgtcactgactactcagaccagaacctgcaggagctggagaagtggctgaagaaagagccagaggcctttgactggtccccagtggtgacctatgtgtgtgatcttgaagggaacagagtcaagggtccagagaaggaggagaagttgagacaggcggtcaagcaggtgctgaagtgtgatgtgactcagagccagccactgggggccgtccccttacccccggctgactgcgtgctcagcacactgtgtctggatgccgcctgcccagacctccccacctactgcagggcgctcaggaacctcggcagcctactgaagccagggggcttcctggtgatcatggatgcgctcaagagcagctactacatgattggtgagcagaagttctccagcctccccctgggccgggaggcagtagaggctgctgtgaaagaggctggctacacaatcgaatggtttgaggtgatctcgcaaagttattcttccaccatggccaacaacgaaggacttttctccctggtggcgaggaagctgagcagacccctgtgatgcctgtgacctcaattaaagcaattcctttgacctgtccagttgactttagtccttgtttctaactgccaagtcatgtgctgagtagaggctcagtggttggggcccaatggttcatctaggacgggactagagaggtcagtctacaagcaatccattgaccacttacttggtgctgcacacaaatgttggtgctatgggacccaaagatgagcaattagtattccagtcttcattgcctgtgcttacaaaagaagacctcacttccctaaacatctagttatggcggctcaagcccgtacctgcctacagagaagtgtctgcagttactcactattagtttcctaagggggcactgctggctccttctctcccaggaatgggcttctcctattctttaactcttgccttctccctggagaggctaccaaaccctggcctctgccgctgttcaggctgccatgtgggtatagctgtttgctagactccactctggcctcaggggccagagaacagctgtccagcatttctgttcatcccagcaatccaaaaaaaaatttttttaagctacaaagatcactccattttcaaattcagactctgccacttattagctgtttctcattaggcaagttatataaccttgcagtgcctcactttcctcatctataaaatgagattaaaatagtctttttattaagagaattaaagtgaattgtggccaggcactgtggctcatgcctgtaatcccagcgctttgggaggctgaggcagacagattgcttgagctcagaagttcgagactggcctggggaacatgcaaaaaccctgtctgtattaaaaatacaaaaaaattagctaggtgtggcggcatatgcctgtggtcccagctactcaggaggctgaagtgggaggatggcttgagcccgggaggcggaggttgcaatgaactgagatcgcaccactgtgttccagacagagtgcgatgctgtctcgaaaaaagtaaaataataaataaataataaataaaataaaataaagtgaattgttacatgtaaagga

SEQ ID NO: 84952 - DNA, 2020 bp, Homo sapiens
caggatggtctcgatctcctgacctcgtgatctgcccgccttagcctcccaaagtgctgggattacaggcatgagcctccgcccccggccttaaataattcttaaaggaagtaaagttaactttgaaagaactatcaggatttggattgactgaaaggagtggggaagcttagggaggaggtgcttgccagacactgggtcatggcagtggtcggtgaagctgcagttgcctagggcagggatggagagagagtctgggcatgaggagagggtctcgggatgtttggctggactagattttacagaaagccttatccaggcttttaaaattactctttccagacttcatctgagactccttcttcagccaacattccttagccctgaatacatttcctatcctcatctttcccttcttttttttcctttcttttacatgtttaaatttaaaccattcttcgtgaccccttttcttgggagattcatggcaagaacgagaagaatgatggtgcttgttaggggatgtcctgtctctctgaactttggggtcctatgcattaaataattttcctgacgagctcaagtgctccctctggtctacaatccctggcggctggccttcatcccttgggcaagcattgcatacagctcatggccctccctctaccataccctccacccccgttcgcctaagctcccttctccgggaatttcatcatttcctagaacagccagaacatttgtggtctatttctctgttagtgtttaaccaaccatctgttctaaaagaagggctgaactgatggaaggaatgctgttagcctgagactcaggaagacaacttctgcagggtcactccctggcttctggaggaaagagaaggagggcagtgctccagtggtacagaagtgagacataatggaatcaggcttcacctccaaggacacctatctaagccattttaaccctcgggattacctagaaaaatattacaagtttggttctaggcactctgcagaaagccagattcttaagcaccttctgaaaaatcttttcaagatattctgcctagacggtgtgaagggagacctgctgattgacatcggctctggccccactatctatcagctcctctctgcttgtgaatcctttaaggagatcgtcgtcactgactactcagaccagaacctgcaggagctggagaagtggctgaagaaagagccagaggcctttgactggtccccagtggtgacctatgtgtgtgatcttgaagggaacagagtcaagggtccagagaaggaggagaagttgagacaggcggtcaagcaggtgctgaagtgtgatgtgactcagagccagccactgggggccgtccccttacccccggctgactgcgtgctcagcacactgtgtctggatgccgcctgcccagacctccccacctactgcagggcgctcaggaacctcggcagcctactgaagccagggggcttcctggtgatcatggatgcgctcaagagcagctactacatgattggtgagcagaagttctccagcctccccctgggccgggaggcagtagaggctgctgtgaaagaggctggctacacaatcgaatggtttgaggtgatctcgcaaagttattcttccaccatggccaacaacgaaggacttttctccctggtggcgaggaagctgagcagacccctgtgatgcctgtgacctcaattaaagcaattcctttgacctgtccaaaaaaaaaagagaagaataacaaaaaaaattatgggagcggctgggccactgagaagcttaacacaccattggagtgaggcgcagtgaaccagaaggattaataaataagagacaaagagcggacaccaagagacaccggacacggaaaaggagagagaaaaccgaacagaacaaaagcgcgggaaacacacagagtactagaaaaccaaaaaggagattgggaaaacaggagacataaacagagactcaacagagcgaaacagac

SEQ ID NO: 84953 - DNA, 1700 bp, Homo sapiens
caggatggtctcgatctcctgacctcgtgatctgcccgccttagcctcccaaagtgctgggattacaggcatgagcctccgcccccggccttaaataattcttaaaggaagtaaagttaactttgaaagaactatcaggatttggattgactgaaaggagtggggaagcttagggaggaggtgcttgccagacactgggtcatggcagtggtcggtgaagctgcagttgcctagggcagggatggagagagagtctgggcatgaggagagggtctcgggatgtttggctggactagattttacagaaagccttatccaggcttttaaaattactctttccagacttcatctgagactccttcttcagccaacattccttagccctgaatacatttcctatcctcatctttcccttcttttttttcctttcttttacatgtttaaatttaaaccattcttcgtgaccccttttcttgggagattcatggcaagaacgagaagaatgatggtgcttgttaggggatgtcctgtctctctgaactttggggtcctatgcattaaataattttcctgacgagctcaagtgctccctctggtctacaatccctggcggctggccttcatcccttgggcaagcattgcatacagctcatggccctccctctaccataccctccacccccgttcgcctaagctcccttctccgggaatttcatcatttcctagaacagccagaacatttgtggtctatttctctgttagtgtttaaccaaccatctgttctaaaagaagggctgaactgatggaaggaatgctgttagcctgagactcaggaagacaacttctgcagggtcactccctggcttctggaggaaagagaaggagggcagtgctccagtggtacagaagtgagacataatggaatcaggcttcacctccaaggacacctatctaagccattttaaccctcgggattacctagaaaaatattacaagtttggttctaggcactctgcagaaagccagattcttaagcaccttctgaaaaatcttttcaagatattctgcctagacggtgtgaagggagacctgctgattgacatcggctctggccccactatctatcagctcctctctgcttgtgaatcctttaaggagatcgtcgtcactgactactcagaccagaacctgcaggagctggagaagtggctgaagaaagagccagaggcctttgactggtccccagtggtgacctatgtgtgtgatcttgaagggaacagagtcaagggtccagagaaggaggagaagttgagacaggcggtcaagcaggtgctgaagtgtgatgtgactcagagccagccactgggggccgtccccttacccccggctgactgcgtgctcagcacactgtgtctggatgccgcctgcccagacctccccacctactgcagggcgctcaggaacctcggcagcctactgaagccagggggcttcctggtgatcatggatgcgctcaagagcagctactacatgattggtgagcagaagttctccagcctccccctgggccgggaggcagtagaggctgctgtgaaagaggctggctacacaatcgaatgttttctccctggtggcgaggaagctgagcagacccctgtgatgcctgtgacctcaattaaagcaattcctttgacctgtcc

SEQ ID NO: 84954 - DNA, 1735 bp, Homo sapiens
caggatggtctcgatctcctgacctcgtgatctgcccgccttagcctcccaaagtgctgggattacaggcatgagcctccgcccccggccttaaataattcttaaaggaagtaaagttaactttgaaagaactatcaggatttggattgactgaaaggagtggggaagcttagggaggaggtgcttgccagacactgggtcatggcagtggtcggtgaagctgcagttgcctagggcagggatggagagagagtctgggcatgaggagagggtctcgggatgtttggctggactagattttacagaaagccttatccaggcttttaaaattactctttccagacttcatctgagactccttcttcagccaacattccttagccctgaatacatttcctatcctcatctttcccttcttttttttcctttcttttacatgtttaaatttaaaccattcttcgtgaccccttttcttgggagattcatggcaagaacgagaagaatgatggtgcttgttaggggatgtcctgtctctctgaactttggggtcctatgcattaaataattttcctgacgagctcaagtgctccctctggtctacaatccctggcggctggccttcatcccttgggcaagcattgcatacagctcatggccctccctctaccataccctccacccccgttcgcctaagctcccttctccgggaatttcatcatttcctagaacagccagaacatttgtggtctatttctctgttagtgtttaaccaaccatctgttctaaaagaagggctgaactgatggaaggaatgctgttagcctgagactcaggaagacaacttctgcagggtcactccctggcttctggaggaaagagaaggagggcagtgctccagtggtacagaagtgagacataatggaatcaggcttcacctccaaggacacctatctaagccattttaaccctcgggattacctagaaaaatattacaagtttggttctaggcactctgcagaaagccagattcttaagcaccttctgaaaatcggctctggccccactatctatcagctcctctctgcttgtgaatcctttaaggagatcgtcgtcactgactactcagaccagaacctgcaggagctggagaagtggctgaagaaagagccagaggcctttgactggtccccagtggtgacctatgtgtgtgatcttgaagggaacaggtagagaaactggtgtctacttcttggcttttgaagagtcaagggtccagagaaggaggagaagttgagacaggcggtcaagcaggtgctgaagtgtgatgtgactcagagccagccactgggggccgtccccttacccccggctgactgcgtgctcagcacactgtgtctggatgccgcctgcccagacctccccacctactgcagggcgctcaggaacctcggcagcctactgaagccagggggcttcctggtgatcatggatgcgctcaagagcagctactacatgattggtgagcagaagttctccagcctccccctgggccgggaggcagtagaggctgctgtgaaagaggctggctacacaatcgaatggtttgaggtgatctcgcaaagttattcttccaccatggccaacaacgaaggacttttctccctggtggcgaggaagctgagcagacccctgtgatgcctgtgacctcaattaaagcaattcctttgacctgtcc

SEQ ID NO: 84955 - DNA, 791 bp, Homo sapiens
catttaatcgccgttttctgttcttggacatcaaagctggggcttaggcgctgtgctggggtcgcggcggcgcgggcgctgggggagaggagtgtggtcttcagcatagagtgagcttctagtgacacgagctggagggaaagaggaagtgcatcatgacggctcgtccaatggacaaggaacgtgtgaacagaggaaacctgtgccctttccctgggcatagctagaaagtgtcaagactccagactcatctctattctcaatgtggtgctggagcagaagcaatgctttgatggttgtttcacagcccagagtatcagtcaagggtccagagaaggaggagaagttgagacaggcggtcaagcaggtgctgaagtgtgatgtgactcagagccagccactgggggccgtccccttacccccggctgactgcgtgctcagcacactgtgtctggatgccgcctgcccagacctccccacctactgcagggcgctcaggaacctcggcagcctactgaagccagggggcttcctggtgatcatggatgcgctcaagagcagctactacatgattggtgagcagaagttctccagcctccccctgggccgggaggcagtagaggctgctgtgaaagaggctggctacacaatcgaatggtttgaggtgatctcgcaaagttattcttccaccatggccaacaacgaaggacttttctccctggtggcgaggaagctgagcagacccctgtgatgcctgtgacctcaattaaagcaattcctttgacctgtcc

SEQ ID NO: 84956 - DNA, 661 bp, Homo sapiens
tgatatcccctcttctattttctgaaagagtttgagtattattagtataatttccttcttaaatgattgatagcatttaccagcgaagccaggtgaatctgaaatttttgtgcgagagaagactttattaaaaacagtatttctttaatggttacttggattttccgtttgttcttttgtctgttttgagtcaagggtccagagaaggaggagaagttgagacaggcggtcaagcaggtgctgaagtgtgatgtgactcagagccagccactgggggccgtccccttacccccggctgactgcgtgctcagcacactgtgtctggatgccgcctgcccagacctccccacctactgcagggcgctcaggaacctcggcagcctactgaagccagggggcttcctggtgatcatggatgcgctcaagagcagctactacatgattggtgagcagaagttctccagcctccccctgggccgggaggcagtagaggctgctgtgaaagaggctggctacacaatcgaatggtttgaggtgatctcgcaaagttattcttccaccatggccaacaacgaaggacttttctccctggtggcgaggaagctgagcagacccctgtgatgcctgtgacctcaattaaagcaattcctttgacctgtcc

SEQ ID NO: 84957 - DNA, 1612 bp, Homo sapiens
caggatggtctcgatctcctgacctcgtgatctgcccgccttagcctcccaaagtgctgggattacaggcatgagcctccgcccccggccttaaataattcttaaaggaagtaaagttaactttgaaagaactatcaggatttggattgactgaaaggagtggggaagcttagggaggaggtgcttgccagacactgggtcatggcagtggtcggtgaagctgcagttgcctagggcagggatggagagagagtctgggcatgaggagagggtctcgggatgtttggctggactagattttacagaaagccttatccaggcttttaaaattactctttccagacttcatctgagactccttcttcagccaacattccttagccctgaatacatttcctatcctcatctttcccttcttttttttcctttcttttacatgtttaaatttaaaccattcttcgtgaccccttttcttgggagattcatggcaagaacgagaagaatgatggtgcttgttaggggatgtcctgtctctctgaactttggggtcctatgcattaaataattttcctgacgagctcaagtgctccctctggtctacaatccctggcggctggccttcatcccttgggcaagcattgcatacagctcatggccctccctctaccataccctccacccccgttcgcctaagctcccttctccgggaatttcatcatttcctagaacagccagaacatttgtggtctatttctctgttagtgtttaaccaaccatctgttctaaaagaagggctgaactgatggaaggaatgctgttagcctgagactcaggaagacaacttctgcagggtcactccctggcttctggaggaaagagaaggagggcagtgctccagtggtacagaagtgagacataatggaatcaggcttcacctccaaggacacctatctaagccattttaaccctcgggattacctagaaaaatattacaagtttggttctaggcactctgcagaaagccagattcttaagcaccttctgaaaaatcttttcaagatattctgcctagacggtgtgaagggagacctgctgattgacatcggctctggccccactatctatcagctcctctctgcttgtgaatcctttaaggagatcgtcgtcactgactactcagaccagaacctgcaggagctggagaagtggctgaagaaagagccagaggccgtccccttacccccggctgactgcgtgctcagcacactgtgtctggatgccgcctgcccagacctccccacctactgcagggcgctcaggaacctcggcagcctactgaagccagggggcttcctggtgatcatggatgcgctcaagagcagctactacatgattggtgagcagaagttctccagcctccccctgggccgggaggcagtagaggctgctgtgaaagaggctggctacacaatcgaatggtttgaggtgatctcgcaaagttattcttccaccatggccaacaacgaaggacttttctccctggtggcgaggaagctgagcagacccctgtgatgcctgtgacctcaattaaagcaattcctttgacctgtcc

SEQ ID NO: 84958 - DNA, 2533 bp, Homo sapiens
caggatggtctcgatctcctgacctcgtgatctgcccgccttagcctcccaaagtgctgggattacaggcatgagcctccgcccccggccttaaataattcttaaaggaagtaaagttaactttgaaagaactatcaggatttggattgactgaaaggagtggggaagcttagggaggaggtgcttgccagacactgggtcatggcagtggtcggtgaagctgcagttgcctagggcagggatggagagagagtctgggcatgaggagagggtctcgggatgtttggctggactagattttacagaaagccttatccaggcttttaaaattactctttccagacttcatctgagactccttcttcagccaacattccttagccctgaatacatttcctatcctcatctttcccttcttttttttcctttcttttacatgtttaaatttaaaccattcttcgtgaccccttttcttgggagattcatggcaagaacgagaagaatgatggtgcttgttaggggatgtcctgtctctctgaactttggggtcctatgcattaaataattttcctgacgagctcaagtgctccctctggtctacaatccctggcggctggccttcatcccttgggcaagcattgcatacagctcatggccctccctctaccataccctccacccccgttcgcctaagctcccttctccgggaatttcatcatttcctagaacagccagaacatttgtggtctatttctctgttagtgtttaaccaaccatctgttctaaaagaagggctgaactgatggaaggaatgctgttagcctgagactcaggaagacaacttctgcagggtcactccctggcttctggaggaaagagaaggagggcagtgctccagtggtacagaagtgagacataatggaatcaggcttcacctccaaggacacctatctaagccattttaaccctcgggattacctagaaaaatattacaagtttggttctaggcactctgcagaaagccagattcttaagcaccttctgaaaaatcttttcaagatattctgcctagacggtgtgaagggagacctgctgattgacatcggctctggccccactatctatcagctcctctctgcttgtgaatcctttaaggagatcgtcgtcactgactactcagaccagaacctgcaggagctggagaagtggctgaagaaagagccagaggcctttgactggtccccagtggtgacctatgatcatggatgcgctcaagagcagctactacatgattggtgagcagaagttctccagcctccccctgggccgggaggcagtagaggctgctgtgaaagaggctggctacacaatcgaatggtttgaggtgatctcgcaaagttattcttccaccatggccaacaacgaaggacttttctccctggtggcgaggaagctgagcagacccctgtgatgcctgtgacctcaattaaagcaattcctttgacctgtccagttgactttagtccttgtttctaactgccaagtcatgtgctgagtagaggctcagtggttggggcccaatggttcatctaggacgggactagagaggtcagtctacaagcaatccattgaccacttacttggtgctgcacacaaatgttggtgctatgggacccaaagatgagcaattagtattccagtcttcattgcctgtgcttacaaaagaagacctcacttccctaaacatctagttatggcggctcaagcccgtacctgcctacagagaagtgtctgcagttactcactattagtttcctaagggggcactgctggctccttctctcccaggaatgggcttctcctattctttaactcttgccttctccctggagaggctaccaaaccctggcctctgccgctgttcaggctgccatgtgggtatagctgtttgctagactccactctggcctcaggggccagagaacagctgtccagcatttctgttcatcccagcaatccaaaaaaaaatttttttaagctacaaagatcactccattttcaaattcagactctgccacttattagctgtttctcattaggcaagttatataaccttgcagtgcctcactttcctcatctataaaatgagattaaaatagtctttttattaagagaattaaagtgaattgtggccaggcactgtggctcatgcctgtaatcccagcgctttgggaggctgaggcagacagattgcttgagctcagaagttcgagactggcctggggaacatgcaaaaaccctgtctgtattaaaaatacaaaaaaattagctaggtgtggcggcatatgcctgtggtcccagctactcaggaggctgaagtgggaggatggcttgagcccgggaggcggaggttgcaatgaactgagatcgcaccactgtgttccagacagagtgcgatgctgtctcgaaaaaagtaaaataataaataaataataaataaaataaaataaagtgaattgttacatgtaaagga

SEQ ID NO: 84959 - DNA, 1143 bp, Homo sapiens
catttaatcgccgttttctgttcttggacatcaaagctggggcttaggcgctgtgctggggtcgcggcggcgcgggcgctgggggagaggagtgtggtcttcagcatagagtgagcttctagtgacacgagctggagggaaagaggaagtgcatcatgacggctcgtccaatggacaagaagggctgaactgatggaaggaatgctgttagcctgagactcaggaagacaacttctgcagggtcactccctggcttctggaggaaagagaaggagggcagtgctccagtggtacagaagtgagacataatggaatcaggcttcacctccaaggacacctatctaagccattttaaccctcgggattacctagaaaaatattacaagtttggttctaggcactctgcagaaagccagattcttaagcaccttctgaaaaatcttttcaagatattctgcctagacggtgtgaagggagacctgctgattgacatcggctctggccccactatctatcagctcctctctgcttgtgaatcctttaaggagatcgtcgtcactgactactcagaccagaacctgcaggagctggagaagtggctgaagaaagagccagaggcctttgactggtccccagtggtgacctatgtgtgtgatcttgaagggaacagagtcaagggtccagagaaggaggagaagttgagacaggcggtcaagcaggtgctgaagtgtgatgtgactcagagccagccactgggggccgtccccttacccccggctgactgcgtgctcagcacactgtgtctggatgccgcctgcccagacctccccacctactgcagggcgctcaggaacctcggcagcctactgaagccagggggcttcctggtgatcatggatgcgctcaagagcagctactacatgattggtgagcagaagttctccagcctccccctgggccgggaggcagtagaggctgctgtgaaagaggctggctacacaatcgaatggtttgaggtgatctcgcaaagttattcttccaccatggccaacaacgaaggacttttctccctggtggcgaggaagctgagcagacccctgtgatgcctgtgacctcaattaaagcaattcctttgacctgtcc

SEQ ID NO: 84960 - DNA, 971 bp, Homo sapiens
ctctctctctctctctctctccggaaggaatgctgttagcctgagactcaggaagacaacttctgcagggtcactccctggcttctggaggaaagagaaggagggcagtgctccagtggtacagaagtgagacataatggaatcaggcttcacctccaaggacacctatctaagccattttaaccctcgggattacctagaaaaatattacaagtttggttctaggcactctgcagaaagccagattcttaagcaccttctgaaaaatcttttcaagatattctgcctagacggtgtgaagggagacctgctgattgacatcggctctggccccactatctatcagctcctctctgcttgtgaatcctttaaggagatcgtcgtcactgactactcagaccagaacctgcaggagctggagaagtggctgaagaaagagccagaggcctttgactggtccccagtggtgacctatgtgtgtgatcttgaagggaacagagtcaagggtccagagaaggaggagaagttgagacaggcggtcaagcaggtgctgaagtgtgatgtgactcagagccagccactgggggccgtccccttacccccggctgactgcgtgctcagcacactgtgtctggatgccgcctgcccagacctccccacctactgcagggcgctcaggaacctcggcagcctactgaagccagggggcttcctggtgatcatggatgcgctcaagagcagctactacatgattggtgagcagaagttctccagcctccccctgggccgggaggcagtagaggctgctgtgaaagaggctggctacacaatcgaatggtttgaggtgatctcgcaaagttattcttccaccatggccaacaacgaaggacttttctccctggtggcgaggaagctgagcagacccctgtgatgcctgtgacctcaattaaagcaattcctttgacctgtcc

SEQ ID NO: 84961 - DNA, 2199 bp, Homo sapiens
caggatggtctcgatctcctgacctcgtgatctgcccgccttagcctcccaaagtgctgggattacaggcatgagcctccgcccccggccttaaataattcttaaaggaagtaaagttaactttgaaagaactatcaggatttggattgactgaaaggagtggggaagcttagggaggaggtgcttgccagacactgggtcatggcagtggtcggtgaagctgcagttgcctagggcagggatggagagagagtctgggcatgaggagagggtctcgggatgtttggctggactagattttacagaaagccttatccaggcttttaaaattactctttccagacttcatctgagactccttcttcagccaacattccttagccctgaatacatttcctatcctcatctttcccttcttttttttcctttcttttacatgtttaaatttaaaccattcttcgtgaccccttttcttgggagattcatggcaagaacgagaagaatgatggtgcttgttaggggatgtcctgtctctctgaactttggggtcctatgcattaaataattttcctgacgagctcaagtgctccctctggtctacaatccctggcggctggccttcatcccttgggcaagcattgcatacagctcatggccctccctctaccataccctccacccccgttcgcctaagctcccttctccgggaatttcatcatttcctagaacagccagaacatttgtggtctatttctctgttagtgtttaaccaaccatctgttctaaaagaagggctgaactgatggaaggaatgctgttagcctgagactcaggaagacaacttctgcagggtcactccctggcttctggaggaaagagaaggagggcagtgctccagtggtacagaagtgagacataatggaatcaggcttcacctccaaggacacctatctaagccattttaaccctcgggattacctagaaaaatattacaagtttggttctaggcactctgcagaaagccagattcttaagcaccttctgaaaaatcttttcaagatattctgcctagacggtgtgaagggagacctgctgattgacatcggctctggccccactatctatcagctcctctctgcttgtgaatcctttaaggagatcgtcgtcactgactactcagaccagaacctgcaggagctggagaagtggctgaagaaagagccagaggcctttgactggtccccagtggtgacctatgtgtgtgatcttgaagggaacagagtcaagggtccagagaaggaggagaagttgagacaggcggtcaagcaggtgctgaagtgtgatgtgactcagagccagccactgggggccgtccccttacccccggctgactgcgtgctcagcacactgtgtctggatgccgcctgcccagacctccccacctactgcagggcgctcaggaacctcggcagcctactgaagccagggggcttcctggtgatcatggatgcgctcaagagcagctactacatgattggtgagcagaagttctccagcctccccctgggccgggaggcagtagaggctgctgtgaaagaggctggctacacaatcgaatggtttgaggtgatctcgcaaagttattcttccaccatggccaacaacgaaggacttttctccctggtggcgaggaagctgagcagacccctgtgatgcctgtgacctcaattaaagcaattcctttgacctgtccaaaaaaaaaaaaaaaaaaaacaaaaaaaaaaaaaacaaaaaaaaaacgggggaggcacaataagaggggggggagggaaaaaaggagggagaagacggagagcagaggggaagaaagggagataagagaacagaattatataagagacacaaggggaaaaaattgggggagattaaaaataataggagagaaaaaaaattaaaaaaaacatgaggaaaaagagaataaaggaaattgagcagcagagagcgaacgacgcaaggacaaagaaaccgcgacagccggaaatagcgagtagcgaataggggacaagcatagagggggacgggcaagaacacgagaaagcgaagcaaacaagaagagagaacgaagggcaaagcaaaagaacagaggaaaaacgaggacgaaagaaacacagaaaagaaaaaaaagcaaagaaaagagac

SEQ ID NO: 84962 - DNA, 655 bp, Homo sapiens
cactctagaggatctgcgataacgagcgcgctcctctctgcttgtgaatcctttaaggagatcgtcgtcactgactactcagaccagaacctgcaggagctggagaagtggctgaagaaagagccagaggcctttgactggtccccagtggtgacctatgtgtgtgatcttgaagggaacagagtcaagggtccagagaaggaggagaagttgagacaggcggtcaagcaggtgctgaagtgtgatgtgactcagagccagccactgggggccgtccccttacccccggctgactgcgtgctcagcacactgtgtctggatgccgcctgcccagacctccccacctactgcagggcgctcaggaacctcggcagcctactgaagccagggggcttcctggtgatcatggatgcgctcaagagcagctactacatgattggtgagcagaagttctccagcctccccctgggccgggaggcagtagaggctgctgtgaaagaggctggctacacaatcgaatggtttgaggtgatctcgcaaagttattcttccaccatggccaacaacgaaggacttttctccctggtggcgaggaagctgagcagacccctgtgatgcctgtgacctcaattaaagcaattcctttgacctgtcc

SEQ ID NO: 84963 - DNA, 1789 bp, Homo sapiens
caggatggtctcgatctcctgacctcgtgatctgcccgccttagcctcccaaagtgctgggattacaggcatgagcctccgcccccggccttaaataattcttaaaggaagtaaagttaactttgaaagaactatcaggatttggattgactgaaaggagtggggaagcttagggaggaggtgcttgccagacactgggtcatggcagtggtcggtgaagctgcagttgcctagggcagggatggagagagagtctgggcatgaggagagggtctcgggatgtttggctggactagattttacagaaagccttatccaggcttttaaaattactctttccagacttcatctgagactccttcttcagccaacattccttagccctgaatacatttcctatcctcatctttcccttcttttttttcctttcttttacatgtttaaatttaaaccattcttcgtgaccccttttcttgggagattcatggcaagaacgagaagaatgatggtgcttgttaggggatgtcctgtctctctgaactttggggtcctatgcattaaataattttcctgacgagctcaagtgctccctctggtctacaatccctggcggctggccttcatcccttgggcaagcattgcatacagctcatggccctccctctaccataccctccacccccgttcgcctaagctcccttctccgggaatttcatcatttcctagaacagccagaacatttgtggtctatttctctgttagtgtttaaccaaccatctgttctaaaagaagggctgaactgatggaaggaatgctgttagcctgagactcaggaagacaacttctgcagggtcactccctggcttctggaggaaagagaaggagggcagtgctccagtggtacagaagtgagacataatggaatcaggcttcacctccaaggacacctatctaagccattttaaccctcgggattacctagaaaaatattacaagtttggttctaggcactctgcagaaagccagattcttaagcaccttctgaaaaatcttttcaagatattctgcctagacggtgtgaagggagacctgctgattgacatcggctctggccccactatctatcagctcctctctgcttgtgaatcctttaaggagatcgtcgtcactgactactcagaccagaacctgcaggagctggagaagtggctgaagaaagagccagaggcctttgactggtccccagtggtgacctatgtgtgtgatcttgaagggaacaggtagagaaactggtgtctacttcttggcttttgaagagtcaagggtccagagaaggaggagaagttgagacaggcggtcaagcaggtgctgaagtgtgatgtgactcagagccagccactgggggccgtccccttacccccggctgactgcgtgctcagcacactgtgtctggatgccgcctgcccagacctccccacctactgcagggcgctcaggaacctcggcagcctactgaagccagggggcttcctggtgatcatggatgcgctcaagagcagctactacatgattggtgagcagaagttctccagcctccccctgggccgggaggcagtagaggctgctgtgaaagaggctggctacacaatcgaatggtttgaggtgatctcgcaaagttattcttccaccatggccaacaacgaaggacttttctccctggtggcgaggaagctgagcagacccctgtgatgcctgtgacctcaattaaagcaattcctttgacctgtcc

SEQ ID NO: 84964 - DNA, 1709 bp, Homo sapiens
caggatggtctcgatctcctgacctcgtgatctgcccgccttagcctcccaaagtgctgggattacaggcatgagcctccgcccccggccttaaataattcttaaaggaagtaaagttaactttgaaagaactatcaggatttggattgactgaaaggagtggggaagcttagggaggaggtgcttgccagacactgggtcatggcagtggtcggtgaagctgcagttgcctagggcagggatggagagagagtctgggcatgaggagagggtctcgggatgtttggctggactagattttacagaaagccttatccaggcttttaaaattactctttccagacttcatctgagactccttcttcagccaacattccttagccctgaatacatttcctatcctcatctttcccttcttttttttcctttcttttacatgtttaaatttaaaccattcttcgtgaccccttttcttgggagattcatggcaagaacgagaagaatgatggtgcttgttaggggatgtcctgtctctctgaactttggggtcctatgcattaaataattttcctgacgagctcaagtgctccctctggtctacaatccctggcggctggccttcatcccttgggcaagcattgcatacagctcatggccctccctctaccataccctccacccccgttcgcctaagctcccttctccgggaatttcatcatttcctagaacagccagaacatttgtggtctatttctctgttagtgtttaaccaaccatctgttctaaaagaagggctgaactgatggaaggaatgctgttagcctgagactcaggaagacaacttctgcagggtcactccctggcttctggaggaaagagaaggagggcagtgctccagtggtacagaagtgagacataatggaatcaggcttcacctccaaggacacctatctaagccattttaaccctcgggattacctagaaaaatattacaagtttggttctaggcactctgcagaaagccagattcttaagcaccttctgaaaaatcttttcaagatattctgcctagacggtgtgaagggagacctgctgattgacatcggctctggccccactatctatcagctcctctctgcttgtgaatcctttaaggagatcgtcgtcactgactactcagaccagaacctgcaggagctggagaagtggctgaagaaagagccagaggcctttgactggtccccagtggtgacctatgtgtgtgatcttgaagggaacagagtcaagggtccagagaaggaggagaagttgagacaggcggtcaagcaggtgctgaagtgtgatgtgatgcgtgctcagcacactgtgtctggatgccgcctgcccagacctccccacctactgcagggcgctcaggaacctcggcagcctactgaagccagggggcttcctggtgatcatggatgcgctcaagagcagctactacatgattggtgagcagaagttctccagcctccccctgggccgggaggcagtagaggctgctgtgaaagaggctggctacacaatcgaatggtttgaggtgatctcgcaaagttattcttccaccatggccaacaacgaaggacttttctccctggtggcgaggaagctgagcagacccctgtgatgcctgtgacctcaattaaagcaattcctttgacctgtcc

SEQ ID NO: 84965 - DNA, 1356 bp, Homo sapiens
caggatggtctcgatctcctgacctcgtgatctgcccgccttagcctcccaaagtgctgggattacaggcatgagcctccgcccccggccttaaataattcttaaaggaagtaaagttaactttgaaagaactatcaggatttggattgactgaaaggagtggggaagcttagggaggaggtgcttgccagacactgggtcatggcagtggtcggtgaagctgcagttgcctagggcagggatggagagagagtctgggcatgaggagagggtctcgggatgtttggctggactagattttacagaaagccttatccaggcttttaaaattactctttccagacttcatctgagactccttcttcagccaacattccttagccctgaatacatttcctatcctcatctttcccttcttttttttcctttcttttacatgtttaaatttaaaccattcttcgtgaccccttttcttgggagattcatggcaagaacgagaagaatgatggtgcttgttaggggatgtcctgtctctctgaactttggggtcctatgcattaaataattttcctgacgagctcaagtgctccctctggtctacaatccctggcggctggccttcatcccttgggcaagcattgcatacagctcatggccctccctctaccataccctccacccccgttcgcctaagctcccttctccgggaatttcatcatttcctagaacagccagaacatttgtggtctatttctctgttagtgtttaaccaaccatctgttctaaaagaagggctgaactgatggaaggaatgctgttagcctgagactcaggaagacaacttctgcagggtcactccctggcttctggaggaaagagaaggagggcagtgctccagtggtacagaagtgagacataatggaatcaggcttcacctccaaggacacctatctaagccattttaaccctcgggattacctagaaaaatattacaagtttggttctaggcactctgcagaaagccagattcttaagcaccttctgaaaaatcttttcaagatattctgcctagacggtgtgaagggagacctgctgattgacatcggctctggccccactatctatcagctcctctctgcttgtgaatcctttaaggagatcgtcgtcactgactactcagaccagaacctgcaggagctggagaagtggctgaagaaagagccagaggcctttgactggtccccagtggtgacctatgtgtgtgatcttgaagggaacaggtagagaaactggtgtctacttcttggcttttgaaggtacctgagtgatggttggcaaaagcaacagacagatagg

SEQ ID NO: 84966 - DNA, 4728 bp, Homo sapiens
atggccccctcggcctgggccatttgctggctgctagggggcctcctgctccatgggggtagctctggccccagccccggccccagtgtgccccgcctgcggctctcctaccgagacctcctgtctgccaaccgctctgccatctttctgggcccccagggctccctgaacctccaggccatgtacctagatgagtaccgagaccgcctctttctgggtggcctggacgccctctactctctgcggctggaccaggcatggccagatccccgggaggtcctgtggccaccgcagccaggacagagggaggagtgtgttcgaaagggaagagatcctttgacagagtgcgccaacttcgtgcgggtgctacagcctcacaaccggacccacctgctagcctgtggcactggggccttccagcccacctgtgccctcatcacagttggccaccgtggggagcatgtgctccacctggagcctggcagtgtggaaagtggccgggggcggtgccctcacgagcccagccgtccctttgccagcaccttcatagacggggagctgtacacgggtctcactgctgacttcctggggcgagaggccatgatcttccgaagtggaggtcctcggccagctctgcgttccgactctgaccagagtctcttgcacgacccccggtttgtgatggccgcccggatccctgagaactctgaccaggacaatgacaaggtgtacttcttcttctcggagacggtcccctcgcccgatggtggctcgaaccatgtcactgtcagccgcgtgggccgcgtctgcgtgaatgatgctgggggccagcgggtgctggtgaacaaatggagcactttcctcaaggccaggctggtctgctcggtgcccggccctggtggtgccgagacccactttgaccagctagaggatgtgttcctgctgtggcccaaggccgggaagagcctcgaggtgtacgcgctgttcagcaccgtcagtgccgtgttccagggcttcgccgtctgtgtgtaccacatggcagacatctgggaggttttcaacgggccctttgcccaccgagatgggcctcagcaccagtgggggccctatgggggcaaggtgcccttccctcgccctggcgtgtgccccagcaagatgaccgcacagccaggacggccttttggcagcaccaaggactacccagatgaggtgctgcagtttgcccgagcccaccccctcatgttctggcctgtgcggcctcgacatggccgccctgtccttgtcaagacccacctggcccagcagctacaccagatcgtggtggaccgcgtggaggcagaggatgggacctacgatgtcattttcctggggactgactcagggtctgtgctcaaagtcatcgctctccaggcagggggctcagctgaacctgaggaagtggttctggaggagctccaggtgtttaaggtgccaacacctatcaccgaaatggagatctctgtcaaaaggcaaatgctatacgtgggctctcggctgggtgtggcccagctgcggctgcaccaatgtgagacttacggcactgcctgtgcagagtgctgcctggcccgggacccatactgtgcctgggatggtgcctcctgtacccactaccgccccagccttggcaagcgccggttccgccggcaggacatccggcacggcaaccctgccctgcagtgcctgggccagagccaggaagaagaggcagtgggacttgtggcagccaccatggtctacggcacggagcacaatagcaccttcctggagtgcctgcccaagtctccccaggctgctgtgcgctggctcttgcagaggccaggggatgaggggcctgaccaggtgaagacggacgagcgagtcttgcacacggagcgggggctgctgttccgcaggcttagccgtttcgatgcgggcacctacacctgcaccactctggagcatggcttctcccagactgtggtccgcctggctctggtggtgattgtggcctcacagctggacaacctgttccctccggagccaaagccagaggagcccccagcccggggaggcctggcttccaccccacccaaggcctggtacaaggacatcctgcagctcattggcttcgccaacctgccccgggtggatgagtactgtgagcgcgtgtggtgcaggggcaccacggaatgctcaggctgcttccggagccggagccggggcaagcaggccaggggcaagagctgggcagggctggagctaggcaagaagatgaagagccgggtgcatgccgagcacaatcggacgccccgggaggtggaggccacgtagaagggggcagaggaggggtggtcaggatgggctggggggcccactagcagcccccagcatctcccacccacccagctagggcagaggggtcaggatgtctgtttgcctcttagagacaggtgtctctgcccccacaccgctactggggtctaatggaggggctgggttcttgaagcctgttccctgcccttctctgtgctcttagacccagctggagccagcaccctctggctgctggcagccccaagggatctgccatttgttctcagagatggcctggcttccgcaacacatttccgggtgtgcccagaggcaagagggttgggtggttctttcccagcctacagaacaatggccattctgagtgaccctcagagtgggtgtgtgggtgcgtctagggggtatcccggtagggggcctgcagggagccagagggtggaaatggcctctaagctagcaccccgtaagaagagcctacctgaccgacttggggagggaacacagaggtgttgggaaggtggagcaacaatgcacctcccctcctgtcgcgccgtgatatcttggtggctccctgccactgcccaccgcctcttctccatctgagaatcacggagaggtgtagataatctagaggcatagactgctagagcccccagggatctggggtggtcagggctcaggcttcactttgtaaaccaggtgggggcatctcacagcctgacttcccttccccaggccagggttgctgggatgcctgcccctcctgagaggaccccctccccattgtcaggctctccatgtccacgagcggggaggggtgggttctggggcattgttgtcccttgtgtctgtggactagagatagggtgggggagctggggaagggtgcaggcgggaagagtgggctgtctttcccagggtgatgcaagcatgccgcagccctggaggctgggaatgtggaggctctgtgagccctgcagccctcagaatcagggccagggatgcagaagattgagaggatatggagatggatagagggcaggagacccttaggatagattgtgggacccaggcaggaacaggtgtccacaagaactcaggatggcatcagttagctcagaagccacctggaagacccagtgtttccatctctggaatctctgttttatgctaaatggatttaggaagactgtttttcttttaagggggaaacaaggtagagaaaaggacgaagaagtgtaagtcccgctgattctcgggggtaaggctcggatggcaaggacgcgttctgcctgggcatgtaggggaggtgtttttgccatcaccagtttctcaggctggggagcacagaggggaggaggaggactaaatgaaaagttgttcccagcctgcacatgaacacattcatgacacacaaaactggctggaaggagataagagcactgggtttgagattccctccattaaaacaaccaagacaaagaaaggaggggaaaaaaagataaaaagcaagccagggttccctgccctattgaaactcaaacccagactgccttgggttttatctttcccttacccctggcacctccagagaactgggacctgaaatagtccctccgttctcccctttgaccatgtaataaatgaaccagaagcactgagattaacctatcaacgccctgagaagccttccagcctgcggtgctgtctgctgggaggtcagctggtcaaggcagaggaggagaggaggaaaggatgggggctgaagagcagaagggaggggagacagaggggattaaagaggggaggagagagtgcagagctccaggaaagggtatcagagctgcagccagctctgccctctaccctagggaggccagaaagacacaaacagccctccgggcctttacgctggactctggcttggcaggctccaggcagggtcctctgggaagttactctagaaaacgaagggaggaggagcacaagatcctcagcaacgaacacctgcacttagaaaaagtggacagcttctgccaaccacaccctacccatggtactgtatgctattaactcctggaaacgccccgtaaatgcgagttgtttttgtatttgtgtgttgagatgggccttgtggtttctctgtactcagagcacatttcttgtaattactattgttatttttattgtcatgactgcccctgagctctggtgagaaaagctgaatttacaaggaaagggatgaagttaatatttgcatcacataattatatcattactgtgtatctgtgtattgtactaaatggactgatgctgcgcacatgagctgaaaatgaagagccctcccatccattccatgagaaagaaggtcaccctgag

SEQ ID NO: 84967 - DNA, 342 bp, Homo sapiens
gccaggtgggaggctctgagcctcccgtcccacctgtccccaggagccatggtccgaaagccttccagcaccatgtggatggaaacattttccagatacctcctgtctgccaaccgctctgccatctttctgggcccccagggctccctgaacctccaggccatgtacctagatgagtaccgagaccgcctctttctgggtggcctggacgccctctactctctgcggctggaccaggcatggccagatccccgggaggtcctgtggccaccgcagccaggacagagggaggagtgtgttcgaaagggaagagatcctttggtgagtgctgtcgggagggat

SEQ ID NO: 84968 - DNA, 543 bp, Homo sapiens
  misc_feature (24)..(25): n is a, c, g, or t
ttcatcgtgtcgcccccgcggtanntggatatgtcgaaccacgccgtcgcgcaaacagccctccgggcctttacgctggactctggcttggcaggctccaggcagggtcctctgggaagttactctagaaaacgaagggaggaggagcacaagatcctcagcaacgaacacctgcacttagaaaaagtggacagcttctgccaaccacaccctacccatggtactgtatgctattaactcctggaaacgccccgtaaatgcgagttgtttttgtatttgtgtgttgagatgggccttgtggtttctctgtactcagagcacatttcttgtaattactattgttatttttattgtcatgactgcccctgagctctggtgagaaaagctgaatttacaaggaaagggatgaagttaatatttgcatcacataattatatcattactgtgtatctgtgtattgtactaaatggactgatgctgcgcacatgagctgaaaatgaagagccctcccatccattccatgagaaagaaggtcaccctgag

SEQ ID NO: 84969 - DNA, 3195 bp, Homo sapiens
gaaagaaatctggtgcctgggggtccctgtgttcacccctagagtttgttttaaaatttttaattgaagcatgtgaagtgtacgtgcagaaaagtgggaacatgatagtgtatggcttggtggattttcacaaactgaacatacctgtgtaatcagcatctagacccagacccagagcatcacaaatatcccccatcctgggcttttcccagaggagatgggggcttctgaagatggacttacctgggacctgccccccatgagccaggacggtccccccacagtcagcctgtgcaaaggccccgtggccaggggtggaggagaatatgtgggtgtggacaggatgggagactgtggcctgaacaggagattttattatatctggagaccctgagagaccctgagacctggggcaccatggctggccaggtcagaagcatcctgactgcagaggtccgtgcagccacaccctcttccctgccagcaagttgtctgcggctcatcggaggcccctccgcctggagccttctatggacgtgatatgcctgtatctgtttttaattttcattcttcacttaggggaagtgaaatcgctcagagatgagatcctttaattgaaaacgaagtgtaacggaatctagtgtctttctaatgtggtaaaattctccatcaacatcacagtcagctggcagctgaacttcagaatctcacttacagcaggcgacacgggggtacaccgatgggtcacactgggtctgggggctccctggagctcctcctgcgtgtggtctggttaggagttgagttgtttgctccagggttattctcctcctcgagtcacagtcacacgaatacctgccttctctggctttcctgctatacacatattcacatggcgctcaagaagttaggctcatggcaacgtgtgtctttctctggacaactggcccagtttacagtgaaatggagaatttcaggtctccacgtctgcccaggaaagaacttcagctgactccacggggatctggaaatccacgaccaatcccgatcggctcttattagctccccgctccacaagacacctgtgctttggaaatccaccaccaatcccgatcggctcttattagctccccgctccacaagacacctgtgatctggaaatctaccaccaatcccgatcggctcttattagctccccgctccacaagacacctgtgacatcctccagggccacaggagcacgtgctgaccagttttcccttccagttcctgcacaaaaagtgtccagagggctgtttgcaaacactagtgcactttgtagcttttcaccctctgtcccagggaatctaggagagatgaggcccgtcagagtcaagagatgtcatccccccagggtctccaaggcatttccacactattggtggcacctggaggacatgcaccaaggcttgccagagccaacaggaagtgagcccagagcatggcacatgagcatcacccgctgatggtggcctgctgtgcctggtgccaacaggggcatcccggcccgtacccctccagacaggaagcatgggtttgcccacagacctgtcgggtgctcctgtgagtggcctccagatgtctttgtgcataggcacaagtgggccagggctggagggaggtgggaaacctcatcatccggtgggccctgccaatcttaacccagaacccttaggtattcctggcagtagccatgacattggagcaccttcctctccagccagaggctgacctgagggccactgtcctcagatgacaccacccaggagcaccctaggtgaggggtgagggcccccttatgtgaacctcttgcctcttcctttctcccatcagagtggttggatggagccattggcctccttttcttcagcgggcccttcaacctctctgcaccatgttgtctggctgaggagctactagaaaagctgagtggagtctcctttccaacaggatgatgcatttgctcaattctcagggctggaatgagccggctggtcccccagaaagctggagtggggtacagagttcagttttcctctctgtttacagctccttgacagtcccacgcccatctggagtgggagctgggagtcagtgttggagaagaaacaacaaaagccaattagaaccactatttttaaaaagtgcttactgtgcacagatactcttcaagcactggacgtggattctctctctagccctcagcacccctgcggtaggagtgccgcctctacccacttgtgatggggtacagaggcacttgctcttctgcatggtgttcaataggctgggagttttatttatctcttcaaactttgtacaagagctcatggcttgtcttgggctttcgtcattaaaccaaaggaaatggaagccattcccctgttgctctccttagtcttggtcatcagaacctcacttggtaccatatagatcaaaagctttgtaaccacaggaaaaaataaactcttccatcccttaaagaatagaatagtttgtccctctcatgggaattgggctgtatgtatattgttcttcctccttagaatttagagatacaagagttctacttagaacttttcatggacacaatttccacaacctttcagatgctgatgtagagctattgggaaagaacttccaaactcaggaagtttgcagagagcagacagctagagataactcgggacccagagttggtcgacagatgttagatgtatcctagcttttagctataaaccactcaaagattcagcccccagatcccacagtcagaactgaatctgcgttgttgggaagccagcagtggccttgggaaggaagccatggctgtggttcagagagggtgggctggcaagccacttccggggaaaactccttccgccccaggtttcttcttctcttaaggagagattgttctcaccaacccgctgccttcatgctgccttcaaagctagatcatgtttgccttgcttagagaattactgcaaatcagccccagtgcttggcgatgcatttacagatttctaggccctcagggttttgtagagtgtgagccctggtgggcagggttggggggtctgtcttctgctggatgctgcttgtaatccatttggtgtacagaatcaacaataaataatatacatgtaaaaaagg

SEQ ID NO: 84970 - DNA, 2921 bp, Homo sapiens
gaaagaaatctggtgcctgggggtccctgtgttcacccctagagtttgttttaaaatttttaattgaagcatgtgaagtgtacgtgcagaaaagtgggaacatgatagtgtatggcttggtggattttcacaaactgaacatacctgtgtaatcagcatctagacccagacccagagcatcacaaatatcccccatcctgggcttttcccagaggagatgggggcttctgaagatggacttacctgggacctgccccccatgagccaggacggtccccccacagtcagcctgtgcaaaggccccgtggccaggggtggaggagaatatgtgggtgtggacaggatgggagactgtggcctgaacaggagattttattatatctggagaccctgagagaccctgagacctggggcaccatggctggccaggtcagaagcatcctgactgcagaggtccgtgcagccacaccctcttccctgccagcaagttgtctgcggctcatcggaggcccctccgcctggagccttctatggacgtgatatgcctgtatctgtttttaattttcattcttcacttaggggaagtgaaatcgctcagagatgagatcctttaattgaaaacgaagtgtaacggaatctagtgtctttctaatgtggtaaaattctccatcaacatcacagtcagctggcagctgaacttcagaatctcacttacagcaggcgacacgggggtacaccgatgggtcacactgggtctgggggctccctggagctcctcctgcgtgtggtctggttaggagttgagttgtttgctccagggttattctcctcctcgagtcacagtcacacgaatacctgccttctctggctttcctgctatacacatattcacatggcgctcaagaagttaggctcatggcaacgtgtgtctttctctggacaactggcccagtttacagtgaaatggagaatttcaggtctccacgtctgcccaggaaagaacttcagctgactccacggggatctggaaatccacgaccaatcccgatcggctcttattagctccccgctccacaagacacctgtgctttggaaatccaccaccaatcccgatcggctcttattagctccccgctccacaagacacctgtgatctggaaatctaccaccaatcccgatcggctcttattagctccccgctccacaagacacctgtgacatcctccagggccacaggagcacgtgctgaccagttttcccttccagttcctgcacaaaaagtgtccagagggctgtttgcaaacactagtgcactttgtagcttttcaccctctgtcccagggaatctaggagagatgaggcccgtcagagtcaagagatgtcatccccccagggtctccaaggcatttccacactattggtggcacctggaggacatgcaccaaggcttgccagagccaacaggaagtgagcccagagcatggcacatgagcatcacccgctgatggtggcctgctgtgcctggtgccaacaggggcatcccggcccgtacccctccagacaggaagcatgggtttgcccacagacctgtcgggtgctcctgtgagtggcctccagatgtctttgtgcataggcacaagtgggccagggctggagggaggtgggaaacctcatcatccggtgggccctgccaatcttaacccagaacccttaggtattcctggcagtagccatgacattggagcaccttcctctccagccagaggctgacctgagggccactgtcctcagatgacaccacccaggagcaccctaggtgaggggtgagggcccccttatgtgaacctcttgcctcttcctttctcccatcagagtggttggatggagccattggcctccttttcttcagcgggcccttcaacctctctgcaccatgttgtctggctgaggagctactagaaaagctgagtggagtctcctttccaacaggatgatgcatttgctcaattctcagggctggaatgagccggctggtcccccagaaagctggagtggggtacagagttcagttttcctctctgtttacagctccttgacagtcccacgcccatctggagtgggagctgggagtcagtgttggagaagaaacaacaaaagccaattagaaccactatttttaaaaagtgcttactgtgcacagatactcttcaagcactggacgtggattctctctctagccctcagcacccctgcggtaggagtgccgcctctacccacttgtgatggggtacagaggcacttgctcttctgcatggtgttcaataggctgggagttttatttatctcttcaaactttgtacaagagctcatggcttgtcttgggctttcgtcattaaaccaaaggaaatggaagccattcccctgttgctctccttagtcttggtcatcagaacctcacttggtaccatatagatcaaaagctttgtaaccacaggaaaaaataaactcttccatcccttaaagaatagaatagtttgtccctctcatgggaattgggctgtatgtatattgttcttcctccttagaatttagagatacaagagttctacttagaacttttcatggacacaatttccacaacctttcagatgctgatcttctcaggtgttattctcattttaaagaacaagttaaacaaaatactgtgtgatcaagtaaacgcaagccagtctttctgttgccattattccacagctgatgggacgcagatcagtcttgctcccatcaggattgttttaaattctaaactataagtttgttcagaggggcttttgcaatgatagcagaaaactgtacaaatgtacagttagttatagaggttcttgttgaaatgaacttaccatctgatgggagaagacgcg

SEQ ID NO: 84971 - DNA, 2310 bp, Homo sapiens
attctataaggtcccaaatactctttttcaacccatgaacagtaagaatttgtgaattctgataatgaaaaaagttttcctccaggtatgtttgtttcacattcagtcctaaagccttgagctatgtgtacttccctcacacaggaacaccagctgtcctgtctgtgctctgcctgcgcccaaaactcaatattttctctcagcacagaagtcaaaaatgagatatgccccttataaaaccccttcgattcctgagaaaacataataaagccatatgttgcttccttgttggggctcctccacaatgctcccaacacctgtgacccctaggaagacagggagcaaggtggatctggccaggagtcacaggatatacacccattctggagctttcctctgttgttctagaagatgttatttggattagttggggctgggagcaggggatatatgattttgtggaaaaggtatcagataatcaaatcaggtctgcctctgctatagccagtgtgctgctgcattaaaagggaacaaaaggaaggtgcaacgtaagagcagacacaacctgagatgcccttgagatttaggagaacaggagggcgccctttctgttgtgacctgactcttaaaagaaatcttctaaaagaattctttaatttggtaatgagttgaagtccagggtaatggaagctctagggcagagaacaaaagaattgcaaaatgtattcagcaccaaacaatgctaaaccaagaaacatccaatcacaaaactaggaagtttggcaagaagtggttagagaaatctctgggcttttccatgggcagggtcgacagactctcttttcagtgatttctggctctgagaaacctctttactcactagaaaagaactttatttaaatggccaattttgttcctcagaaaaagaaattaaaaaaaaagaaaaataggatactgaagacagaaccatgtgacttggtgacaaacaaaaggaggggtgcactagaatttcaataggctccctaattccatagaaaaagcaaagcaacccaatgcctcctgagcctgcagtgcatgaagagagtgcttgagctgacccagccaccaggccttctggggctagacataacttcccactggaacagcagcagcctctttcccctctttgtgttttcatgaagaaaacggctgttctcttaggtagccaggaaatagattacatggggcaaactttcaaaagcaatctctaccctggtgctcaggctacatacagaggcagaaaaggggcacggaagagcccttgctcttgagagagagtattttcatattcccaagggctttccgtgtagagttgctatttctgatatcacttaaacctttacaagaaaaaaggctgtggtgactcagtgttcctataaattcagaatgtggaaactactaatccaaagcatcatttctagcactgagtatcaagacgatcagcctgaccaaaatattgcaaagagttttctaagtctctgaagatttttttctccttgaacactgagtctatagcagtcagcaatgtaccttagccgatccctgggaatggttatggaacagtagggcttgtttccatcctttttagagtgaagagatagaaaattagggctacctagtgtgggttctttttcagaactatgtattttctcctcactgcatgatgggtaaaaatgccctgggttgaaacaagaaacattatctttccacaccactgactaaaacacctgccagtggtttctttaggctccaccttttgctccgtaaactgtagactttcagactgaaatctaatcttaagtgacctcaattaaggtattttcacaaaaggctacttatagtgtagcattattgccttaaatcagaaagccctgggaagaggataaaagatatagaaatgagaaggctctgaagttataggcatttcttgctgtttaatagttacattatcacaaaaacaagccctattcatgattgaggactatggaaatagtgacttcttgaggaggcaccaaactttcctagaactgggtactctcagatagtggctgctatttcctattctatttcagtgacgtaggttggggctgaatgtaaaatagacatcatattactaaatagaatcctataaaatgcaatcacaggtgcccgggagtactagttttaaacatttccttaacaaggagaacaatccagaaaaagctttctttctctatacaggtatatctctaaactttttttcctcagttttagagaacatctgttttatct

SEQ ID NO: 84972 - DNA, 2213 bp, Homo sapiens
attctataaggtcccaaatactctttttcaacccatgaacagtaagaatttgtgaattctgataatgaaaaaagttttcctccaggtatgtttgtttcacattcagtcctaaagccttgagctatgtgtacttccctcacacaggaacaccagctgtcctgtctgtgctctgcctgcgcccaaaactcaatattttctctcagcacagaagtcaaaaatgagatatgccccttataaaaccccttcgattcctgagaaaacataataaagccatatgttgcttccttgttggggctcctccacaatgctcccaacacctgtgacccctaggaagacagggagcaaggtggatctggccaggagtcacaggatatacacccattctggagctttcctctgttgttctagaagatgttatttggattagttggggctgggagcaggggatatatgattttgtggaaaaggtatcagataatcaaatcaggtctgcctctgctatagccagtgtgctgctgcattaaaagggaacaaaaggaaggtgcaacgtaagagcagacacaacctgagatgcccttgagatttaggagaacaggagggcgccctttctgttgtgacctgactcttaaaagaaatcttctaaaagaattctttaatttggtaatgagttgaagtccagggtaatggaagctctagggcagagaacaaaagaattgcaaaatgtattcagcaccaaacaatgctaaaccaagaaacatccaatcacaaaactaggaagtttggcaagaagtggttagagaaatctctgggcttttccatgggcagggtcgacagactctcttttcagtgatttctggctctgagaaacctctttactcactagaaaagaactttatttaaatggccaattttgttcctcagaaaaagaaattaaaaaaaaagaaaaataggatactgaagacagaaccatgtgacttggtgacaaacaaaaggaggggtgcactagaatttcaataggctccctaattccatagaaaaagcaaagcaacccaatgcctcctgagcctgcagtgcatgaagagagtgcttgagctgacccagccaccaggccttctggggctagacataacttcccactggaacagcagcagcctctttcccctctttgtgttttcatgaagaaaacggctgttctcttaggtagccaggaaatagattacatggggcaaactttcaaaagcaatctctaccctggtgctcaggctacatacagaggcagaaaaggggcacggaagagcccttgctcttgagagagagtattttcatattcccaagggctttccgtgtagagttgctatttctgatatcacttaaacctttacaagaaaaaaggctgtggtgactcagtgttcctataaattcagaatgtggaaactactaatccaaagcatcatttctagcactgagtatcaagacgatcagcctgaccaaaatattgcaaagagttttctaagtctctgaagatttttttctccttgaacactgagtctatagcagtcagcaatgtaccttagccgatccctgggaatggttatggaacagtagggcttgtttccatcctttttagagtgaagagatagaaaattagggctacctagtgtgggttctttttcagaactatgtattttctcctcactgcatgatgggtaaaaatgccctgggttgaaacaagaaacattatctttccacaccactgactaaaacacctgccagtggtttctttaggctccaccttttgctccgtaaactgtagactttcagactgaaatctaatcttaagtgacctcaattaaggtattttcacaaaaggctacttatagtgtagcattattgccttaaatcagaaagccctgggaagaggataaaagatatagaaatgagaaggctctgaagttataggcatttcttgctgtttaatagttacattatcacaaaaacaagccctattcatgattgaggactatggaaatagtgacttcttgaggaggcaccaaactttcctagaactgggtactctcagatagtggctgctatttcctattctatttcagtgacgtaggttggggctgaatgtaaaatagacatcatattactaaatagaatcctataaaatgcaatcacagtacccagatccggggataaggatcctgcta

SEQ ID NO: 84973 - DNA, 969 bp, Homo sapiens
aaaaaatcttcagagacttagaaaactcttgcaatatttggtcaggctgatcgtcttgatactcagtgttcctataaattcagaatgtggaaactactaatccaaagcatcatttctagcactgagtatcaagacgatcagcctgaccaaaatattgcaaagagttttctaagtctctgaagatttttttctccttgaacactgagtctatagcagtcagcaatgtaccttagccgatccctgggaatggttatggaacagtagggcttgtttccatcctttttagagtgaagagatagaaaattagggctacctagtgtgggttctttttcagaactatgtattttctcctcactgcatgatgggtaaaaatgccctgggttgaaacaagaaacattatctttccacaccactgactaaaacacctgccagtggtttctttaggctccaccttttgctccgtaaactgtagactttcagactgaaatctaatcttaagtgacctcaattaaggtattttcacaaaaggctacttatagtgtagcattattgccttaaatcagaaagccctgggaagaggataaaagatatagaaatgagaaggctctgaagttataggcatttcttgctgtttaatagttacattatcacaaaaacaagccctattcatgattgaggactatggaaatagtgacttcttgaggaggcaccaaactttcctagaactgggtactctcagatagtggctgctatttcctattctatttcagtgacgtaggttggggctgaatgtaaaatagacatcatattactaaatagaatcctataaaatgcaatcacaggtgcccgggagtactagttttaaacatttccttaacaaggagaacaatccagaaaaagctttctttctctatacaggtatatctctaaactttttttcctcagttttagagaacatctgttttatct

SEQ ID NO: 84974 - DNA, 332 bp, Homo sapiens
ttaattgcaatcaattaattgcaaattgaaaagtggggcagcaaggtaacctgacaagagctctggaaaagttggtgactgctttctagctgggtgcccttgtgcaagttacttaacatctctgagctacagttccctcttctataaaagggatcgtctctataccacatgattggcctgtataataaatatggtagcctagctcagtaccttccttcctcagcaaatacagagggtcccctagatgaccagcgtttcgatcatttccaatcatttctggttttttttttttttttttttttttgagacagagtctcgctctatcacccagc

SEQ ID NO: 84975 - DNA, 423 bp, Homo sapiens
gaaggcttagaaaggggtcacaggctggagagcttcatggactgcatcccaccatgaaggaaatggaaacttggcttttccattctcaggttacaagggaagaaactttcatgatggtgttgataaagaatattctgactgaataagttggggccaatttggggttgggtctcagggaaatgaagaggctgtaagagcccaaatctttcccttcacgtggcccccagagtctttaaactctcctacttcttcaaggcccaagccccttccttcaactcatcttggatcacacgtgaacaaagtaacaaacatttattaagaatttgtattcacagcctggcacagtggctcacgcctgtaatcccagcacttcggggaggccgaggctggtggatcacctgaggtcaggagttcgagatcagc

SEQ ID NO: 84976 - DNA, 468 bp, Homo sapiens
ggaagatgaaaggttataaaagaccaacagttttgaccacatagaacaaaatttctgtaaggcaaaggacacttataaatacacttaccaagcttaataggggattttaatttatttactgtcatttcataacttatatgcttggtcctatttgtatttatttttgagacagggtcttgctctgttgcccagactgagtgcagtggcacaatcatggcttactgcagcctcgaccttctgggctgaggcaatcctcccatctcagtcccttaagtagctggaatcacaggcatgggcctggctaatttatttattttttgtagagataaggtcccactaccacccacctcagcctctcaaagtgctgggattacaggcctgagccacagtgcctggccttgacttcatttcatattgaacttttctctgttttttctattacaccatatggattacgtcttcgttgct

SEQ ID NO: 84977 - DNA, 423 bp, Homo sapiens
acacaccttgctctgcagagtgatctgtcttggcttttatccaaaaggaagatgaaatgcaatgtcttcgtatcatactgatactctagaaattaacttggattcatctttagcataacaaattgaatcataccaaaagcatctgccttaggtttttatttaaatgttaagcacagtaaaaccaaccattttaatggctcaagaaacaagaaagacacaaaatccaataatttaagcaacgaagggttacgatgctggttaagtagtttcctctatataaaagacaattctccacgtgtagaacagaaatcgtaacacattcctgctagaaaacaacttctgcagaggtgaaatggttatctagaagaatcgtttgaaacatacgtatgcataccttttcataaagtctttttatttaacaaa

SEQ ID NO: 84978 - DNA, 447 bp, Homo sapiens
gagaacttaccatatgcatagcactgtgcaaagaaacttatgcatatcatctgcatatctattcctacacacatcgtttatatctatgaccctttaaggcagggaaaattatgactcccattttacagataaggaagcttaacttaagaaagactaagtaatgcacagaaggtcacccagctgtgctctttcccactatctgatccgacttttctgcagacaaaaaaagacttggagggaagcccacggagagtggtggtttattctggcaggattaggaaggaccttaattctcctttttgtgggtcttattccaaattgtgtacaggactctagctactctcgtgtgtgtgtgtgtgtgtgtgtgtgtgtgtgtgttttctgattaccaaagtcatgttgcttattaaaaactcattatttttcagattaaaaactataatactg

SEQ ID NO: 84979 - DNA, 451 bp, Homo sapiens
ccttaaatttgaccagacgtggtggctcatccctgtaatcccaaaactttgggaggccaaggtgggcagtttgcttgagcctgggaggttgaggctgcaaaaccgagatggcaccctgcactacagcctgggccacagagcaagaccctgtctcaaacaaacaaactttatgattttgaggaaacctaggataattatctttaagacttgggagtagaggatgattaaaaagtgtaaactatgagaggtaaaagattgataaataaaagttcacattaggaacgtctgctcatcaaagacactataaagagagtgaaaagacaagatatgagatggaaaaagtattttttctttttcttttctttttgtttttttttgagacagggtcttgctctgtcactcaggctggagtgcagtgttgcagtcatagctcatctctacctcctggtct

SEQ ID NO: 84980 - DNA, 117 bp, Homo sapiens
agttgatccacccgcctcagtctcccaaagtgctgagatcaccacccccagccctattttttaaaagcctaatataccttataattaggtttcagtgaatgtttaagaaaaaattag

SEQ ID NO: 84981 - DNA, 333 bp, Homo sapiens
ctgggtcaaaatccccgcacatctattgtttcggagccaaagcaccaccaccagcaacccctgcgcacaacccggggctctccagcaccgctgttctgaatgccaagtgcccagcacggggtctggcacagtttccttaataaaatgtcctcttctcgtctccaggatgaaactcaggatccggaaggcagccttacaccctctccagacaggctccgttaggggatgaaagagcgggattacggtcccgaagctcagctgcacttggaagcactcggagtccccaaaccctgggcgacttccccatcggcgctccctggagaggactcctac

SEQ ID NO: 84982 - DNA, 105 bp, Homo sapiens
aaaatacaaataaattcaatcagtcttgatccttccttaatttccgaggaggaaataacaaaacttaggagaggaaatacgtaataaacacaatcaaaatgatca

SEQ ID NO: 84983 - DNA, 791 bp, Homo sapiens
aacagctcagcaggaccaggaattccccaagccccagccacccgaggcccaggctcaggggctccaagtcttagacacaacacaagggccctggggttgccatccagccccactttcctgggatgcatgtggctcgagaaattctagatggccctattttatttttcccctcaaaaacatttgtctagatcataaattccccattcctggaggcctcagacatggtatcaatgccaattggtctcaggtattttgggagctgtgtcacctgctagcttcggaaggcattcaagtttgttgtttccagctctggcttatctatcagggtcccaggccagtgtttaccaatgcagctcaccccatgcactctggccgagattctgatgcattcggggcagaggggcatccaagactctagttttctgagcacaggtcgggttttgagccagcaggtttgaactccttaaatcatctcttcagactgggcatttgtttccttgctggctttgtagaaagggcttggaggcatggacggcctggtagcctgcctgtctgcagaggccaggcagagcttatggctggactccccgctctgtggcatcacaggcaggaatgaaaagtgttcgtggtgcatcgcatgcgaccgaggggaaagctgctttcgcgacagagaccgcagactcagtcttcaatgtcatgtgacccagggctactccattcatctcaagcgactcaaaactgccacatctgtggctttcccctggacctagaggggccaggtcagttaaggc

SEQ ID NO: 84984 - DNA, 400 bp, Homo sapiens
aatatattcccccctcgtttttttgtttagtaatcctgtatgtaactaatctttttatctgtgttgctactccctctgctgcacagaagtcatctttattttgctgaaactctgactcctgtttcagtccatcaccctctgatggatgccctcttctccctgcttgtgttgcagcacaccagttcaggatacactctgtctaaatgccctccttatgcctctctggttctgactcttcatgttggaccatcctctcactttatactgtcatatcccacaccaggccactgctttgtggtcatgtcctccttaccctttttctggctctgactctgcctgctggtctgctcccttgtgtggatgtcctctttacccacctcaggctttgtcattccacatc

SEQ ID NO: 84985 - DNA, 407 bp, Homo sapiens
ctgacctgttcccttgttctagctctgggatagcccagtgcaaacttactactgcaacccggttgtcctctccatggcctgcagctgttcacccaaggagtgcctgagcatccctttcttggaggaactacaaagagactcgctcaaggacttcctgtcagcagcagaaatgctgagtcatcagtattctgttacagttcattgaaagcagtgctgacagtggtgcggccagatggacaatagtgagagctccagggccccagctcagtgctgcacacaatgggtgacaccaaagaaaagcttttattaaaataatacagtctataatgaagaaattaaattttacaaaacttcaacccactctccagatgattaaatgaattattaggaatatttcttttccaaaa

SEQ ID NO: 84986 - DNA, 1914 bp, Homo sapiens
  misc_feature (110)..(110): n is a, c, g, or t
  misc_feature (205)..(205): n is a, c, g, or t
  misc_feature (1246)..(1247): n is a, c, g, or t
  misc_feature (1252)..(1252): n is a, c, g, or t
  misc_feature (1264)..(1264): n is a, c, g, or t
  misc_feature (1270)..(1270): n is a, c, g, or t
  misc_feature (1328)..(1328): n is a, c, g, or t
  misc_feature (1354)..(1354): n is a, c, g, or t
  misc_feature (1369)..(1369): n is a, c, g, or t
  misc_feature (1706)..(1706): n is a, c, g, or t
gatgccctgcaatgcctcaggactctccagaatgttttcaccagcaaaaaggccctcagcagatgcagcctctcgaccttgaactttctagcctccaaaatggactatcngtactgaaacccagcaagctgaaatcagcaaaacaagatggtcttgctaacttgaggaagctgtagcagctggaagctccagagaggagggggcncagagtctgcacatcaatggggagacgtcattctggctgcattatgaatggatggtttggaggaagaatgtggatagctaaacaagaaggagaatagaaagaaactactcttaagactattgcaatatccaggtgcaatgtgctttgtttctgactgcagactataatgtttattcctattgggggcagagcaagatttcagtttcttttctcagcaacaagaaaatactctgtctgaaatcaagcaacttctgggaagaccaagagtgatggaaactagagttacaaagcaaaaaccctacatcctgaatgcccagcccggtcaatgaaatttttctgtctcatttatcagctaacttggtcctcttcccctgggaacaaaactgagaagggttaagagataatgtggaaacaaactccccagcacttgcctaagagggcagctgtgtacccagaccttctttcctctatgtcattgtactagaaagagagagttccatactctttaatctgaatagttggcactcacttaaaaaagaatgcagcctgattcctctctgcccctctagctatttccagaaagttgttcatgggatgaattggtaagtaaagaattcagacactggttctgattaagggatcttataaatgatttataacctttgggaacatcaaagacagcactcataagccaggcaagctaaggggtgctcaggagtaaaatgcacctccccatctcacaaatccattgttttgatgaaaggataagaggcagttggcctgggaaggtgaaaaggcaggaaaagagtgggaagtcagctcctaggataataaccacatccacaggcattgtctcctttcacatatttacagcttttctttcttatctttccacacctctatattcagttatgtatgacctactagcaatttacagctgctttaaatgcatacatttcaggtagggtgtggtgacttatgcctgtaatcccagcgcttcgggaggctgaggtgggtggatcacttgaggtcaggagttcnngatcngcctggccaacntggcanaaccccatctctactaaaaatacaaaaattagccagtcttggtggtgcacagctgtantcccagctactcggggggctgaggcnggagaatggcttgancccaggaggcagaggttgcagtgaggtgagatcacaccactgtactccagtctgggcaacagaaagagactccatctcaaacaaacaaacaaacaaataaataaataaatgcatacattgtatcagaaattatctcccatattgatgagtcttccatgggcatctaatttaaatatttttttctgaaaagcaaaaggtgctctattatgttgctggtgagagtgcaaaatggtatagcctctaaagagattaatgtaacaataactgttagaaccatatatgcaatcaccctttgacctagcaacctcacttctaggaattcatcttgaagacatanctctctatatgtaggcaaaatggaagctattcaatgttacattgttagtaatagcaagttactgtctatttttgtatctttcaaatacatgtctatttatgtgaaaggataaactgtggtttatccacaaaatgaatttttatgaagttgaaaaaagaatgagtgacatgtccatgaactgtcaggagtgatttccagaacgtatttt

SEQ ID NO: 84987 - DNA, 1816 bp, Homo sapiens
  misc_feature (1148)..(1149): n is a, c, g, or t
  misc_feature (1154)..(1154): n is a, c, g, or t
  misc_feature (1166)..(1166): n is a, c, g, or t
  misc_feature (1172)..(1172): n is a, c, g, or t
  misc_feature (1230)..(1230): n is a, c, g, or t
  misc_feature (1256)..(1256): n is a, c, g, or t
  misc_feature (1271)..(1271): n is a, c, g, or t
  misc_feature (1608)..(1608): n is a, c, g, or t
gatgccctgcaatgcctcaggactctccagaatgttttcaccagcaaaaaggccctcagcagatgcagcctctcgaccttgaactttctagcctccaaaatgagacgtcattctggctgcattatgaatggatggtttggaggaagaatgtggatagctaaacaagaaggagaatagaaagaaactactcttaagactattgcaatatccagtgttatctcaggaccaaggaattaatggtgcaatgtgctttgtttctgactgcagactataatgtttattcctattgggggcagagcaagatttcagtttcttttctcagcaacaagaaaatactctgtctgaaatcaagcaacttctgggaagaccaagagtgatggaaactagagttacaaagcaaaaaccctacatcctgaatgcccagcccggtcaatgaaatttttctgtctcatttatcagctaacttggtcctcttcccctgggaacaaaactgagaagggttaagagataatgtggaaacaaactccccagcacttgcctaagagggcagctgtgtacccagaccttctttcctctatgtcattgtactagaaagagagagttccatactctttaatctgaatagttggcactcacttaaaaaagaatgcagcctgattcctctctgcccctctagctatttccagaaagttgttcatgggatgaattggtaagtaaagaattcagacactggttctgattaagggatcttataaatgatttataacctttgggaacatcaaagacagcactcataagccaggcaagctaaggggtgctcaggagtaaaatgcacctccccatctcacaaatccattgttttgatgaaaggataagaggcagttggcctgggaaggtgaaaaggcaggaaaagagtgggaagtcagctcctaggataataaccacatccacaggcattgtctcctttcacatatttacagcttttctttcttatctttccacacctctatattcagttatgtatgacctactagcaatttacagctgctttaaatgcatacatttcaggtagggtgtggtgacttatgcctgtaatcccagcgcttcgggaggctgaggtgggtggatcacttgaggtcaggagttcnngatcngcctggccaacntggcanaaccccatctctactaaaaatacaaaaattagccagtcttggtggtgcacagctgtantcccagctactcggggggctgaggcnggagaatggcttgancccaggaggcagaggttgcagtgaggtgagatcacaccactgtactccagtctgggcaacagaaagagactccatctcaaacaaacaaacaaacaaataaataaataaatgcatacattgtatcagaaattatctcccatattgatgagtcttccatgggcatctaatttaaatatttttttctgaaaagcaaaaggtgctctattatgttgctggtgagagtgcaaaatggtatagcctctaaagagattaatgtaacaataactgttagaaccatatatgcaatcaccctttgacctagcaacctcacttctaggaattcatcttgaagacatanctctctatatgtaggcaaaatggaagctattcaatgttacattgttagtaatagcaagttactgtctatttttgtatctttcaaatacatgtctatttatgtgaaaggataaactgtggtttatccacaaaatgaatttttatgaagttgaaaaaagaatgagtgacatgtccatgaactgtcaggagtgatttccagaacgtatttt

SEQ ID NO: 84988 - DNA, 408 bp, Homo sapiens
tcttctgataacaatttaaattgcatctaaaatgtcatctatttacagttatttttgaatacttcatttgcccaattaatgaacaagcatttatttattcatttgtttatttattttgagatagggtctcaagcggttgcccagactagactgcagtgagccaagatggcgccactgcactccagcctgggcaacaaagcgagactctgtctcaaaattagataaataaataaataaataaatgaagatgcctaaccctagctggcccgtcccttggctattaggtgccgcatgacccttgtaagtacctacacccaggcccctggcctcgttggcctcatctggcacagtttctccccctcctcttctccagatggcctgcacgtgcgctgtctatgtgcgcacctg

SEQ ID NO: 84989 - DNA, 236 bp, Homo sapiens
gccacctgcctcccgcactgaggctgccagtgctcagctctgtccctccctgcccgacagtggaagtgatagagggcaccctgcagtgcccggaatctggacgtatgttccccatcagccgcgggatccccaacatgctgctgagtgaagaggaaactgagagttgattgtgccaggcgccagtttttcttgttatgattgtgtgtatttttgttgacatataccgtttccgaatt

SEQ ID NO: 84990 - DNA, 216 bp, Homo sapiens
catgcaccacctgctgctggaggtggaagtgatagagggcaccctgcagtgcccggaatctggacgtatgttccccatcagccgcgggatccccaacatgctgctgagtgaagaggaaactgagagttgattgtgccgcgcagggggttttccagactcaagcacttgtgtaatcgacggtcatgtacaacgcctgtgaccgcatgtcatggctcg

SEQ ID NO: 84991 - DNA, 706 bp, Homo sapiens
gcaagacagaggcaggactgagaagacgagaggtgggcttcgttcctgagaatatccaggagtccaagagatctaaattggaagatggccttccaatttaggtcagtttccaattaagaaggccaggtttttatgaagcaatatttgtcaagaattcaactatcaacttgctggtcctctacttcccgaaactctccagcctacatttcttcctcttcttcggtttctaaactcaaactgactttggaatgaaagggagcagctgctgaggtaggaaggtcggaggtggccctccaaaagcctcttttctggaagctccgctgccaagggctcgactggagtcccaggacatattcagaggccgccagacccctgcatggaggcccctcccttgcagctcctggttaccatgattgaatgatgtcctgcagctccgagcctcagccacctatgttgtcaaggtttcctctgtgaaagcatccaaaaactctgccagcaccttcttctttccttttttgttttcctaccagggccaggccaggctctgctggccatttccgattaagctcctcagaaggcatagagccactcacactcagaattatttaaaataacactagactgcaaatgccctaaatatccatcagaaataaatggatgcataacattgggtgaaagaagccatacacaaaggtgtatactatat

SEQ ID NO: 84992 - DNA, 240 bp, Homo sapiens
tccaggcaatatccatttgagcaatagcattgttatgaaagcacagtgtttgtgcaaatagatctgattcaaaatcccaaccttcttagtcatgttctcttaagttaaataatgatttaccttatttataaaatggtatagtattgccttgctcaaagggaatgaaaattaaatgaaataataaagctctcacactacctaggagacctttccttttatttcatatgttgtcaaaattag

SEQ ID NO: 84993 - DNA, 270 bp, Homo sapiens
aagcctcggtgacagagtgagactttctctcaaaaaattaaaaacaaaaccaaaaaccatacttatgtcatgggctgtacaaaaatgggcaccaggctgaatttggccaagaagcatagtttgctactccatttagaatacgacagaatgggccaggtgtggtggctcacacctgtaatcccagcactttgggggccgaggtgggcggatcacttgaggtcaggagttcgagagcagcatggccaacatggtgaaactccatctctactt

SEQ ID NO: 84994 - DNA, 220 bp, Homo sapiens
tagagacaggatttcaccatgttagccaggctggtcttgaactcttgacctgaagtgatccacccaccttggcctcccaaaatgctgggattacaggtgtgagccaccgggctgagccccatctctagtacttttatcatcccaaactgaaacatcatacctattaaacaaaaattccccaccttccaaccccaagaccatggtaaccactcttctactt

SEQ ID NO: 84995 - DNA, 533 bp, Homo sapiens
  misc_feature (3)..(4): n is a, c, g, or t
  misc_feature (6)..(6): n is a, c, g, or t
  misc_feature (15)..(15): n is a, c, g, or t
  misc_feature (129)..(129): n is a, c, g, or t
tcnntntttgccagnaatgttggaagtggacatttcattggcctggcagggtcaggtgctgctacgggcatttctgtatcagcttatgaacttaatggcttgttttctgtgctgatgttggcctggatnttcctacccatctacattgctgtcaggtcaccacgatgccagaatacctacggaagcgcttcggtggcatcagaatccccatcatcctggctgtactctacctatttatctacatcttcaccaagatctcggtagacatgtatgcaggtgccatcttcatccagcagtctttgcacctggatctgtacctggccatagttgggctactggccatcactgctgtatacacggttgctggtggcctggctgctgtgatctacacggatgccctgcagacgctgatcatgcttataggagcgctcaccttgatgtgctacagtttcgccgcggttggtgggatggaaggactgaaggagaagtacttcttggccctggctagcaaccggagtgagaacagcagctgc

SEQ ID NO: 84996 - DNA, 844 bp, Homo sapiens
  misc_feature (440)..(440): n is a, c, g, or t
gcctttcacagagacacgtgcatgctgtaaaaatgagtctcggagacctgtgttaactcttgtggtcgtctttgaacccagatctgcctgctgtcatggtcttgttttaatcactgctgaggaggggagggggcacaactggatgaagtgatgacatgatgtttaggagacacagaactaggaagcatcgcaaaggccttctttttccactctcctcttccttccagaatccattccccatgttaaaaaaggaaatttgaaggccagcacaggtgaaccactcagcgagtaagagactacaccagaggtggagttcaggccaggctgcctcagggcgcagagggaaatccaaatgggtaccttgttgtgagctgggggccaagtcctgactgtgttttcttgagcagggcttgttttctgtgctgatgttggcctggatnttcctacccatctacattgctgtcaggtcaccacgatgccagaatacctacggaagcgcttcggtggcatcagaatccccatcatcctggctgtactctacctatttatctacatcttcaccaagatctcggtagacatgtatgcaggtgccatcttcatccagcagtctttgcacctggatctgtacctggccatagttgggctactggccatcactgctgtatacacggttgctggtggcctggctgctgtgatctacacggatgccctgcagacgctgatcatgcttataggagcgctcaccttgatgtgctacagtttcgccgcggttggtgggatggaaggactgaaggagaagtacttcttggccctggctagcaaccggagtgagaacagcagctgc

SEQ ID NO: 84997 - DNA, 402 bp, Homo sapiens
aaagggccaggctgctgcacttgggacaccttgagacacagcttcctgcatcctagctgcttcagctgaaacagccatggggtcaagtggctccagtaaggcttgtgctgcataagccttacatcccctggcttatgtctagagggcatgagcagtaagccttggggtccgtgtagtgttaattttgcaggcttgcagaatgctagagccatggaggtgtgtgttactccactgagatttcaacgtatgtatgaaaaaccctataggcccaggcagagacttgttgcaggggcagagccactgcagagaccctctgctagggcaaggccaagcaaaaatttgggttaggtctactgcagagtctccactaaggcaatgcctagtggagcttcaggattaggg

SEQ ID NO: 84998 - DNA, 962 bp, Homo sapiens
ataagagctacaggagcatcttttgttatatgtttccccccctagttcctgaaatagctctagagaaatacaggtgaataacatcctttgttattcatatcaagcccctatcaaccataccccagtttctatttatgaagtggcttttgggaagtccctaaagacaggagtggggaaaggctggttgtcagggggatgggttgaaactttcatcttccccccttgacctccagggagggatgagtggctgaaaattgtgtaaaatcaacaatggccagtgatttaatcaaccatgcctatgtaatgaagccacccgataagccttaactggaactttttggagagcctccaggctggtgaagacattgaggtgctcagaaggtggtattccagagagagcacagaatctctgttccccttcccacattcattttgctatgcatctctcccatctggctgttcttgagaggtatccgtttataataaactggtaacctagtaagtaaactgttaccctgagttctgtgagccattctagcaaattatcaaacctaaagagttcatggatacgtgcaatttacagatgcacagtcagaagcacagatgacaatctgggcttgccattggcatttgaagtgtgttgggaggcagtcttacaggaatgagcccttatcctgtggggtctatgctaataacagacagttgtcagcattgcttggtgtcgaaaacccacattgttggtgtcagaagtattgtcagtaggatagggaaaacagtttgttttctttttttagtggtctttggtcatctttaagagcagggcttctcaaagtgtggtccttgaaccagcatcacctgtaccacgtaagaacttatgagaaatgttcattcttgggccccaacaaagaattaaaaattctgagggtgtgaacggggtctgagtttcagcacaacttcccgac

SEQ ID NO: 84999 - DNA, 462 bp, Homo sapiens
caacaacactgatgaatctagaggacattattaggttaagtgaattaagtcaggtgcaaaaagaaatatactgcaggatgtcacttacatgtggaatctaaaaaagttgaacccatagaaaaagcgaatagaatggtggttaccaggaggcagtgggatggggaatgaggaaagattggctaaagggtacaaagtttcagctggacaggaggaaggaattctgaagatcttctgtatagtgtggtgaccatagttaataataatacactgttatactcaaaaacggctaagagagtagattttaaatgttctcaccagaaaaaaaaatgataactatatgtggttatagatatgtcaaacagcttgatttaataattctacaatgtatacatatatcaaaacatcaccctgtaccccataagtatatacaataaattttaaaaataagaataatcattcatg

SEQ ID NO: 85000 - DNA, 3390 bp, Homo sapiens
  misc_feature (1800)..(1800): n is a, c, g, or t
  misc_feature (2062)..(2062): n is a, c, g, or t
  misc_feature (2158)..(2158): n is a, c, g, or t
  misc_feature (2610)..(2610): n is a, c, g, or t
  misc_feature (2889)..(2889): n is a, c, g, or t
ttttttatcccacttctttcatcctaaatgttgataaagataataaatacaggcagcttataatagctatttgaacgtattatcaaataaggtattttcctgttaactacacttctgtatagtttttaagcagaatttcaatcaagaagacactatttttctatatctctttagattactttttgatttttttaaacactgtttatacaagtttttatcaaacttccaacagataatgggtactgcctctcataaatcttccaaagggacaatggaaactgggcccagttgaataaagccatattcatttgttttggaacgcagagttctctgcatgtagattgcatttagcattctgtctagtgtatccatctgtagttttgcttttttcagaataaaaccttgacagtaattttgaacctgttactttatttctttttgcatgtattgctttaaaaaggccgaagtatagtattctcttcccctttttaagttttatgaaatcaatgttaaattgatattagtgccacttaatatttgacacctgctatgcctaatgaacttgaagtagtaaagggagcagcaggggccagccattcatattatgcaagataactggagaacgagcagactatgattagagctttagactagtgggttctaacctctttataagagcaaattcattatttatatgtgcatatgtgttaccttttcctttttcctctggatttataggtatttgagtttcaagaattttcttgagattatattatagaagtcattaagatggggaatcaatctctaggtatcagtggggcggggaatgtcactctcctggtgattcttgtacatgtttcttcttcccatttccggccatttttcccacctgacattttctccctgctccttatattacatagttctttatgatctttctcctgtgttttgtattccttctctgagagagaggggctccatctttgttggggataatcatagattggcccttggaaagtggattggaaaatttgaaggtggtgctcatttgtgtttaaacaattatttgctatcatatttagcagtatgctttgctggtttttagattgaacctatgcagacagttagctggagcctctaaagaagaaactttttattcttaagtgactgactgcttagtaatctacataacaaatgaaccattttgcttcagagacgtgaaataggcatctataaatgaatagtttttgaaactaaagttgttaagacaaagttcatcttttcacagtagggtttctccagaaaaccctctttactctattgaaatgcagctagttgaactaggaaagcatattccaataataggcccatgcaattagcctttagtataatggaatgaatggtggaattttttgtgcattgtcatcatcagttggtgttagtcccaaaccacataatagctagaaaccttgattgggagacacaaaggtttcttattcatgggcatgctttaattcttgaaactagtaaaatgttagactcttaaatcttaacacttttttgataactgtctactgctggtaagattaagatatggtgcttcggaattatgtcattattttgagtgagaagaaatgtcgaggaactcttcatttagcaccatatccaagccaaacctcgtatagaaattacacagtggtgtgctggtgaatattgaacaaccaccctgggggggggataaagccctgatttgtaatgtttgctgatttctgaggtataaatactctatcatggctggtntcaggctactagtgttatgttgctgaagttgggaaaaaagtgtataatcagctggcttgaattaatctcagctatcaaatattcaggattttacagcctgactttttttccagcctgtattttaataatctgcttattcttgtctttatctttgtcctttgttttgaaaaaattggtcttcctgaggtataatttatatgcagtaaaattcagcaattttaagtgtatacatttgatgagttttgacacatgtatacctcgncacaatgatgatattccattaacctttctatacacagttgccagattaattttcctaaaattgtgctttgcatccgtcatctacctcggcataaanccttcactggctatgtactgttcataggataaagtacaaaatgctgtggtctggctctctaccgtcttgctttttgtctacttatctgcttttatctaccacaacccggctacatgaacctcttattgcaataaaactgatcaactggttctaggcacagttgctgcatctgtgcctttgctgtcagctgtaccctgcctatgatattccttggacatcatattccttcttgactgcttggcctttccttaaagtctggctcaagccccattttcttacacgatccaggctttactgattacttctgcatcccgacagctgtcataccgcttgttttggcacttaactatcgcaacttgtattgaaattccagaggtgttttttggagtcatttgatcttacccaacaaagttgtaaactatgatggggtaggaaacgtacaacggagtttntagcactttgctcaaaaaaaaacaagaacaccccctaataaatggcttttgatgatgataaacctttaagcagctcttccaactcagtgagtcgcaaattcagtaacactactggggagaatagtactctgttgtaccattgacgtagagactgaaggtttggtctgtcccagagcatagatgtgtagtaatgtctctcaaaactagtattagtcattaaagtgcacattggagattttatctctgccttgaaaattcatccaaaggtagttagcttcntggactttggacttttggcacggattaagcgtttaaagtaggtctccaaagaaacttctttgtttctctcaaccagctttattgcactttttgaagtactggtaagaggtcaggagggtgtatctcattggtttccttcctgtcccaggaagccatgttacggtattctgaaagaactttttctttttcagtaactttactataagcaaatttttttttctttttaaaacttgaattttctctgtaagacattgcatacttgttgaaagcagacattaaatgataacctaacaaatacttaacttaattctagatgcctatctgtttctcaggataccttgtaggttcctcttctcttaaatactggctttactcagggctgggcgcgtgactcacaactgtaatcccagcactttgggaggctgatgtgggtggatcacatgaggccaggagttcgagaccagcctggccaacatggtgaaaccctgcctctactaaaaa

SEQ ID NO: 85001 - DNA, 3011 bp, Homo sapiens
  misc_feature (1421)..(1421): n is a, c, g, or t
  misc_feature (1683)..(1683): n is a, c, g, or t
  misc_feature (1779)..(1779): n is a, c, g, or t
  misc_feature (2231)..(2231): n is a, c, g, or t
  misc_feature (2510)..(2510): n is a, c, g, or t
tccggggagctgtctgtggtgttaggtgtcactaaaactcactggaatgagtgccacactgggtatccaaatgctgttggtcatcacaggcaggtgagagctcactgcaacctcagcctcccaaagtgctaagattacaggcgtgagccaccactcccggcccatttttctctttttgaagggttcttatttctactcttccagggcaattagaagcaaaaggaaaagacccttggactggagtctggtagaaagaatgctcagtgagcaaacctggggctctgaaccgtccccttgtatgtttttcatggccttgcagctcactccttggagctgtggttctttgaggtgtaggtcagaaattcacggggtgcttcatcaaagtgtgcatgtctgatgaatacctaccccctgcctgcccctctctaggtatcagtggggcggggaatgtcactctcctggtgattcttgtacatgtttcttcttcccatttccggccatttttcccacctgacattttctccctgctccttatattacatagttctttatgatctttctcctgtgttttgtattccttctctgagagagaggggctccatctttgttggggataatcatagattggcccttggaaagtggattggaaaatttgaaggtggtgctcatttgtgtttaaacaattatttgctatcatatttagcagtatgctttgctggtttttagattgaacctatgcagacagttagctggagcctctaaagaagaaactttttattcttaagtgactgactgcttagtaatctacataacaaatgaaccattttgcttcagagacgtgaaataggcatctataaatgaatagtttttgaaactaaagttgttaagacaaagttcatcttttcacagtagggtttctccagaaaaccctctttactctattgaaatgcagctagttgaactaggaaagcatattccaataataggcccatgcaattagcctttagtataatggaatgaatggtggaattttttgtgcattgtcatcatcagttggtgttagtcccaaaccacataatagctagaaaccttgattgggagacacaaaggtttcttattcatgggcatgctttaattcttgaaactagtaaaatgttagactcttaaatcttaacacttttttgataactgtctactgctggtaagattaagatatggtgcttcggaattatgtcattattttgagtgagaagaaatgtcgaggaactcttcatttagcaccatatccaagccaaacctcgtatagaaattacacagtggtgtgctggtgaatattgaacaaccaccctgggggggggataaagccctgatttgtaatgtttgctgatttctgaggtataaatactctatcatggctggtntcaggctactagtgttatgttgctgaagttgggaaaaaagtgtataatcagctggcttgaattaatctcagctatcaaatattcaggattttacagcctgactttttttccagcctgtattttaataatctgcttattcttgtctttatctttgtcctttgttttgaaaaaattggtcttcctgaggtataatttatatgcagtaaaattcagcaattttaagtgtatacatttgatgagttttgacacatgtatacctcgncacaatgatgatattccattaacctttctatacacagttgccagattaattttcctaaaattgtgctttgcatccgtcatctacctcggcataaanccttcactggctatgtactgttcataggataaagtacaaaatgctgtggtctggctctctaccgtcttgctttttgtctacttatctgcttttatctaccacaacccggctacatgaacctcttattgcaataaaactgatcaactggttctaggcacagttgctgcatctgtgcctttgctgtcagctgtaccctgcctatgatattccttggacatcatattccttcttgactgcttggcctttccttaaagtctggctcaagccccattttcttacacgatccaggctttactgattacttctgcatcccgacagctgtcataccgcttgttttggcacttaactatcgcaacttgtattgaaattccagaggtgttttttggagtcatttgatcttacccaacaaagttgtaaactatgatggggtaggaaacgtacaacggagtttntagcactttgctcaaaaaaaaacaagaacaccccctaataaatggcttttgatgatgataaacctttaagcagctcttccaactcagtgagtcgcaaattcagtaacactactggggagaatagtactctgttgtaccattgacgtagagactgaaggtttggtctgtcccagagcatagatgtgtagtaatgtctctcaaaactagtattagtcattaaagtgcacattggagattttatctctgccttgaaaattcatccaaaggtagttagcttcntggactttggacttttggcacggattaagcgtttaaagtaggtctccaaagaaacttctttgtttctctcaaccagctttattgcactttttgaagtactggtaagaggtcaggagggtgtatctcattggtttccttcctgtcccaggaagccatgttacggtattctgaaagaactttttctttttcagtaactttactataagcaaatttttttttctttttaaaacttgaattttctctgtaagacattgcatacttgttgaaagcagacattaaatgataacctaacaaatacttaacttaattctagatgcctatctgtttctcaggataccttgtaggttcctcttctcttaaatactggctttactcagggctgggcgcgtgactcacaactgtaatcccagcactttgggaggctgatgtgggtggatcacatgaggccaggagttcgagaccagcctggccaacatggtgaaaccctgcctctactaaaaa

SEQ ID NO: 85002 - DNA, 211 bp, Homo sapiens
tgtatgtgtgaacagctgccaccccccacacacacaccgacacagttttccgcctacccttccctattccccacaaaaatcttgcaggtagaattagactgcttttggtgaacagttaagttccttttctactcttgaacaatcgcagatcttactgtgcagtctgttttgctgaaagtggaaagtccccgtttgtggacagctcagttca

SEQ ID NO: 85003 - DNA, 650 bp, Homo sapiens
ttgaggaagttctgttgctggtgaggaaattctgttgagttctgtaggaatttttatagcttgttttgcattcagttctatcaacaagccagcagcaactcaaagggaagcctccttctggcatatcaatcacacaggcacataggatcatatagcatataggatcagtcccaagaagaactatggggtgggggagaggtttttcttccacttcttggattcagtgactttgagatggacctcttttttcctgtggacaaaatgtcatcacaccaacatcttattgcccatgctcttcaccttgtctatgttttggaatgggaccatgcttaaataaaattgcttctttccatgataatgcattttggggctgaggaaactatatgccttttaagtaatccttgctttgccctagcctgctctgcccctccaaagtccggcctcagctcatagtttagaaggcattagttttaagctgaggagtattagaaagtaatctttatggtaaatggtttttccctaaaggaggtggcctactgataagtgagagaataatatccattgggccatcttgccacctaggggaacccatttgctttgaaaataagaaacatctctttcagcaggcggtgattttcttcaaggatttt

SEQ ID NO: 85004 - DNA, 430 bp, Homo sapiens
acaattcaattgttttagtatattcatagagttgttcagcaatcaccatagcgtgtctagtatatggattgtttttagagccaggaagctggaagagatcaactagagagagagtgtagatagggaagtaagtctagtaagatagagcagcaagtacagatatagaagaggtccagagagaaggctatggtattatgaaatctctatttggtctctgtcccatttcctggcatactacttcaaaaatccttgggtcttcaaggtgataagtgtcattttgtatgctaatgagttgactgatggttggcatcccctgggtagcctaaggatgggggctggtcactggaaagaataaggcaggactagaggttgtgactttccgccctaccatctaacctctggggaagggagaagagctgaaggggtaaac

SEQ ID NO: 85005 - DNA, 416 bp, Homo sapiens
gtttcaaccttcttttgtatctcaatgaccttccttgccatccagattctgaattctatgtctgacgtttcagccatttcaatctggttagattccattgcgggggcactaatgtgattgtttggaggtaagaagacactctggctttcagtgtggccagagttcttgcactgggtctttctcatcttcaaggggtgatgatcctttatctatttggaattgctatcttttaaatggagattttagtttgtattgtcattattgcccttgaggatttggctgtggcacaacatgggtatagctgaaagactatatttctggatgcttttactgggcaaggttcagtttcacactcctggactgtgttctctaaccctggagtactggttctgggtcagtggtttcatccccttctt

SEQ ID NO: 85006 - DNA, 414 bp, Homo sapiens
tttttaagtgactctggcatcctgagccctaagaaacctttgcacacactcaggtcatgaagatattcttctcatcttcttccagaagcctcacggttttctaattttgaaaataggtctgggcggggcccgctgggtgcagttgctcacacctgtaatcccagcactttgggaggctgaggcaggcggattgcatgaggtgaggagttcaagaccagcctggccaacatcatgaaactccatctctacaaaaaatacaaaaattagctgggcctggtggaatgttcccgtagtcctagctactcagggggctgaggtggaaggcttgcttcagcctggaaggtagaggctgcagtgagaagagatcaccccactgcactccagcctgggtgacagaacgagactgtctcaaaa

SEQ ID NO: 85007 - DNA, 1268 bp, Homo sapiens
atttcctttctttttaaaccataaattagtttaaactgaaagtacgaggctggaagaaatattagtaaattatttggaatatagaatgtttactctttctttttatgttgtcttaatgattctgtgagattgttccggctcaaacagaagcttttctttggggaaggtgatttgtgggagactctagtgtattttaaattagcattttaatccattcttgacattcagttagtccagatctgccccataatttgctttagtaaagtcactttatggatttttggctatgttttagtttgtgtgtataaaagttctaagaaaacatttttgctattttaagtatgtaagggaagagaggagtgtttttaactttttatagttgatgactttagggtagcacaaacaaaactcctttgtatctaacttttctcaatcctctcttgaggtgctttactaatgggaatgatttctgtatgttcccttggtaccaagaggtactatgcaaagtaacctattacaccaagttacttgctttgctttcctctctatgatgtgataatacagtaaaagctttcttacccagcatagtgggagagtggagattaattaaaattgttaattaagagttaattcctattgacccaggtgatatttctcttctgatttccctccccttcccttctcttatcttaccactgtgaaaacagcatattgttaatctcgttgtcgtccagtattctgctttgtgattaggtcttttgatgtacagtggtctagtggagtcaagattcgcattgggttttctaaaattccagttgataaaagttccagataacacagctttcctgtatatagatcactattgggcaggtcagcaaagatctcttacagtgtaataataatctatgatgcttcatttagcagaaactctgcttaaaagaatcttcataatagtaagtttaggttttaaaaacttgtttcataaatatacatatatcctctctagtagtctggccaaaagaacagattttgttattgataatttgtagctggtaattttccacattttctatccactgtaatttttatgttgtcactgaagtgcctgcccagtactgtatattacagtctctcacaaacactgggaaaagggactgtcatcatcttgagtactctgtgtgtatatatatatatatagatagatagatttttttttttttttgagacagagtctctaatgtcacccaggctggagtacagtggcacaa

SEQ ID NO: 85008 - DNA, 716 bp, Homo sapiens
atttcctttctttttaaaccataaattagtttaaactgaaagtacgaggctggaagaaatattagtaaattatttggaatatagaatgtttactctttctttttatgttgtcttaatgattctgtgagattgttccggctcaaacagaagcttttctttggggaaggtgatttgtgggagactctagtgtattttaaattagcattttaatccattcttgacattcagttagtccagatctgccccataatttgctttagtaaagtcactttatggatttttggctatgttttagtttgtgtgtataaaagttctaagaaaacatttttgctattttaagtatgtaagggaagagaggagtgtttttaactttttatagttgatgactttagggtagcacaaacaaaactcctttgtatctaacttttctcaatcctctcttgaggtgctttactaatgggaatgatttctgtatgttcccttggtaccaagaggtactatgcaaagtaacctattacaccaagttacttgctttgctttcctctctatgatgtgataatacagtaaaagccaaacgttgtatttgttcttttcagagttgtccagcccttttttcctttgtccaaaatgattctaaatagaatctaataaaccaatgtagcattatttttttctaaatgaagccccaaaaaagaaaagtgccttgcatcatttaa

SEQ ID NO: 85009 - DNA, 382 bp, Homo sapiens
gttgcagtttgtcaatacggactcaaatatagaagtacggagtccttcttaaggccatatttagtttgcattaacactatgaactaaggaaggaaaggaaattgggggaatgaatatatagcatatataaaagcccgaaagtaggacaaaaaggacaaaatgaagctttttgaacaaactaattcggtatggctgaaggatagactgagaggcagggagttaaaagagatgaaacagaagcaggaaatgggcccaaagaatgcatttggaccattatgtaagacctgtggggaacaattgaaagattttaagaagaggcatgaattgatctgattttatatcaaaagatcactgtaatgtagagaatagattgcggtgtttg

SEQ ID NO: 85010 - DNA, 418 bp, Homo sapiens
tttagtagagatggctttcaccatgttggccaggctgctcttgaactcctgagctcaagtgatccacccgctttggcctcccaaagtactgggattacgggcgtgagccactgtgcccagctatgttttctgagctgtacttataattggttatccaactctccagataactttctgtctgatgttcacccttgtgatttaaaaaattttagctatgtaaaaatagagtttatcattcttgtattttgagtagagcctgcctgcaggatattctatacctgctgaattctttggtgtcagatttcttcaagtcatctgttagtgaatcttttcacaattctctcttacatctccattagtattgtgagaagaaactaaaaactcgagaccccaattcactatgccaaaggaaaaatat

SEQ ID NO: 85011 - DNA, 331 bp, Homo sapiens
tatctgacttggatactcccgagccatgaagggaataaggatacttccaattcccgaacttgagagaacaagacagctcccacgcaccgttcacagggccatatacctttattctaaacaaactaatacactgtcaaaaacctgccggattaagcttttcaactctcctccctactgtggtctgagtgttccaagtctttttctaaacctcactcctaggcttgaagatagattagctataaaggacgatcagccaacaggtagaaaacagaagtgagtatgatgtggtctatgtgaattatgtcctcataaaagcccttaaagaccaact

SEQ ID NO: 85012 - DNA, 838 bp, Homo sapiens
ccgcagtgctgggatgacaggcatgagccattgctctggcccgtgctgtgcgtttgttttcattcttctcaaattagttttcagtttccctgatggtctcttctttcactcactggttgtttaggagtgtgtcatttccacatatttttgactttcccaaatttccttcactgttgatgtccagtttcacgccagtacaactgaagaacactcctgctttggtctcagtccttttccattcactgaggctcattgtggggcctggcacgtggcctgtcttggggaatgtcccatgggcgcttgagaggactgtgtattctgccgttgttgggtggcgtgtgtgatagatgtccactcggcgtacctggtttctggtgttcatctccggaatgttgctgacactagaaaatcagcagctttccaccgttcccagcgccttggctttgggagaggcccgtgagcctgtgggtttggagcctggctgcacgggaggagcacgtgtgggaacgccaggggccggctttgagccccattcccccaacatgatgccgtgtgtggcagacgtgacatttggttttgctcccccagggttccatctgcgacaggggctacttgtgtccctggcctcgtcagctcgggctgaaggcggccctggtcctggccagaggggctttgtgaagcagaaatagatggcctggtgcaggggccaagctcggctagggcctcagccctgggagttgtaaagaaggccggcctctaccatgggcatctgcaccaagctgtgcccatgtcacggtgtgctcagcggttccccgcctgtggggcccaggctcacaga

SEQ ID NO: 85013 - DNA, 379 bp, Homo sapiens
tcacccaggtatctcctaccaactatgatttgtcttcagtaaaccatagtcagttggtaggctcttgatattacatggtatccactaaaacatgttcagttttgtatggctttttttgaatatttcttcaacttgccacaatagttctattatttctgtttgcttagggtggatcattactttctctaagcttcacagggatttgctagcagcataatgatgctatcttctggcatccttatcaggatgtttattttcttatcacaggagatttcttccatgtttataaaattcaccaaattttatgttctgcccttcttgttctagctcttaccagatccattctctcccagctcatacaagtgcatgtggacttact

SEQ ID NO: 85014 - DNA, 259 bp, Homo sapiens
gagagagtgagagcctctgcttaaaaggaatatgatgttgaaaaaaactgacaggcagaaaacaagcctaagtgctgttgctatggaaacattgtaccatctgtgttcttgcctaccctacaccaaagggttatataacctagtaaccagctaaaagttaaaatggaccttacagtgaaaccagttatttttattattttttaaaagggtgactctaagtaaaaataaaacactgcactactgttctttctgtctacct

SEQ ID NO: 85015 - DNA, 369 bp, Homo sapiens
aattacttaggagatcacggaatgtggttctggagttcagaagaagtgccaggctggagtagatttagcatagacgagccgattgaagccatgggagtagatgaggttgcccaagaagaagggcaggtgagagacctggggaaccttactactgaagggctggagaaggaggaagagcagagaagtaggcggaaaaccaggataagtggaaatctctgaagccatggagtattctaagagaagggaagtagagattgctggtgagaatgttgttgagaagtcaggcagttccctgagtaccaaccattgccctttggatttgacaacagggaggtgacctgagcaaaagcagattggagaagggtggga

SEQ ID NO: 85016 - DNA, 270 bp, Homo sapiens
gaggcacagtttcgctctgtcacccaggctggagtgctgtggcacgatcttggctcactgcaacctctacctcctgggttcaagtgattctcctgcctcagcctccaaagtagctaggattacaggcatgagccactgtgcccggcctaatactgggtttttaaatcaggtttttaaccatgaggatttggaacacccaagtttcttcaaataatgaaatccaaacatgttttcagagtaaaccaaatctttccttaatatcagatatta

SEQ ID NO: 85017 - DNA, 273 bp, Homo sapiens
cagcctcctgaataactgggattacaggcatgcgccaccacgcctggctaattttgtatttttagtagagacggagtttctccatgttggtcaggctggtctgaaaacccccgtcttcaggtgatccacccgcttcggcctcccaaagtgctgggattacagacatgagccaccgccgctggcctagagttgttggtaaagtagcgctttagttgctgacattaatggattttaaggaagtattaataacaagatgttcagatggggtgtttt

SEQ ID NO: 85018 - DNA, 965 bp, Homo sapiens
ggcgtcgttactgtggggaggcgacgcagggcggcggagagcgagcggctgaacaggccggttttcaaacctcagccaaccccggaagaacctttggggtattaagagtactgcagtccgaaacatagatggttctattaataacatcaatgaagatgatgaagaagatgtagtggatttggcagctaattcactcttaaacaagttaatccatcaatccttagtagaatccagtcaccgtgtggaagttttacagaaggatcccagctctccactttactcagtaaagacatttgaagagctgcggctaaaggaagagttactaaaaggaatctatgcaatgggatttaataggccatctaaaatccaagagatggctctccctatgatgctggcacatccaccccagaacctcatagcacagagccagtctggaacaggaaagacagcggcatttgtgttggcaatgttaagcagagttaatgccttggaattgttcccacagtgcctctgcctagctcctacttatgaattggctctgcaaactggccgtgtggttgagcagatgggaaaattctgtgtggatgttcaagtgatgtatgccattcgagggaatcgaattcccagaggcaccgacatcactaaacagattataattggcactcctgggactgtcctagattggtgttttaaactaaaattgattgatttgactaagattcgtgtgtttgtcctggatgaagcagatgtgatgattgacactcaaggattctcagatcatagtattcgtattcaaagagctctaccctccgaatggccaaatgctcctcttttcagcaaccttgaggactcctgggtggcaccttggctgagcaaataatccctgaccctaggttatcagtttaggcagagaggtcaccgaaaaattcggaaattagcgctggtgagccggaagaaatatacaa

SEQ ID NO: 85019 - DNA, 526 bp, Homo sapiens
gcgcctgacacggtcagctcgcgggtggaggcccggagcagaacgccctcgggcgcccgctcttgcagccgcactggagaccgggaatggctccggccacgcctctgccgactgcggcaacgcgagggacagctggtctccggggttgcagcgtaacgccctccttcccggcctcagctttcctgactgcataacgggcatacagtgggttccatggcgcaagggagctgaagaagccgcccgcccccagctcgcccgggatcctcacgcccctataacgccccgaggggccacgatgctgcccacagcccagatcgcgagtgcggaccctgcgggagggtctggcctagatgcgagtttcccgccgcagaccaggcgaggccacgcgacatatcccctacccgcttactgcaggccgcagacggagacagtgcagccctgcgcactgctgaggttgcccgaggtctcagcctcggcgggtcgggaacacgcggcgcgcgcccgcgccccaaccggaagtccgcca

SEQ ID NO: 85020 - DNA, 815 bp, Homo sapiens
gaagctggtccttagcctgcgctgcggagcaacctttcagtggccagctggagcctgggcaccgttcttcaaataatggcttttaattctcagacgagaacgtttaggattacaaaagaaaccggttctcttcacatccttatccttgtcatgtagcattccgcttgaaattggaagccgttcaatgtcagagagaaaccatatttatgaaatgaaagaggcttctcagatgactgcaaaccagccttccttactggttttatcactggtaatgttataaagacagttgtccagtttcatgaatcttgtaggtttttgtttgtttatttgtttgcttttgatgttgttgttgttgctgttgttttccaaattcagtattgtagaaaaatatgctgccccagaagagatgattggacactctccagcgtggtgttggactttgtcatctcttgcacagccatctccagaccttagtgtttacctcacgttagttttttatattctgcaaagacaaaaccaaaataatccaaatttgacacaaatacctgggatacatcttatttgagatgtttaacaaatgtctggatcatcttttcttacattggattataacgcaggaaacactgtgaaggcccgcccggcaggacgactgagcaggccttggaagaccggagagattggagcggtaagtcgcgctggtcacgttggacacctgcgcgttgggagattctggagccagaaggatagccgaatggccttcgcccgccctgcccctcgcctgcttcagaaacccccggaaacgccccggttgagac

SEQ ID NO: 85021 - DNA, 467 bp, Homo sapiens
atttataaataaaatgtaacatattcacgttctattttgatatgaattaccgtaatattctattaggatatgaattgttataatggccattagaaggaatggattgttcccatatataacataatatatccatgtataaagtatctatataataccaacacgtaacataatgtaaagaaaagagattcatggaataaaatgtgcatgtcattgatataaattttaaaaacacagaaataatacattatattaagactatatatgtatgtaaaattattaccagtggactgatttggatatacactaaattcatgctacttgcttctggaggttgcagtaaagaactggaactgtgtctggggatgtcacttttatctgttttatttagttcattttttataaacaatccttgaggcaaatatgagctgttaataaatgccaattagtctttttgcatattggttgca

SEQ ID NO: 85022 - DNA, 503 bp, Homo sapiens
  misc_feature (468)..(468): n is a, c, g, or t
ggaaagggacttgcagagagacttggctgaataagacattagggatggaacaggatattggaaaaggtactgtaaatgagtttagatagaagattagtttaggaagagaggaagggaccttctttcttagaaacaggaacaagaaatgggaaggacaatgaatcagagattctgaaatattaaagaggaaatcttaaggaattcatattagatggtcctgatctgctcaagaccagataaagagcagagacatagctggatgtttacaactgatgtaaaattttgcaacagctgccacgagaaattaagaaatgatgaaagaattgtatattttataattagaataatttgaggtggacttcatcaatgtagtttcatgacttgactttttttttttcttttgagacagagtctcactctggtgtgcagtggtgcaatcttggtttactgccatctctacatcccagngttcaagcgattctcctgcctcagcctcccaagta

SEQ ID NO: 85023 - DNA, 626 bp, Homo sapiens
ggttcaagtgattgtcctgcctcagcctcccgagtagctggggttacaggcatgtgccaccacacccggctaattttgtatttttagtagagacagggtttctccttgttggtcaggctggtctcgaactcctgacctcaggtgatctgcccaccttggcctcccaaagtgctgggattacaggtgtgaaccaccgcacttggcctaatttttgtgtttttagtagagatagggtttcaccgtgttggccaggctggtcttgaacttctgaactccagtgatctgcctgcctcagcttcccaaagtcctggtattacaggcatgagctactacacctggcctgtattgcctttttatagtatacgtatcttgtctcttttgttttcgtgtgttagagcctcttaaagcaggggatagatattcatgtttcactgaatctaaggtgctgtcagtccaggcttacattattttacgtcaccaagaaagaagaaaacactgctaattatactgtggcactgtgccttcttgtcacttagtgatcctattctgcaggttttgatgctgacgctttctccatctcttgtgtttgtcactggaatttaagcaccttctgccagagtcagaag

SEQ ID NO: 85024 - DNA, 394 bp, Homo sapiens
gattcccttttcatttcacatctcagactcaagccaaatgctgcctcctttgaaaccctccttaacagaaacatgaggaccatttataaaaggtgaccgtagtgtgagataaggggtggaaagtactgggatagcacgtggaccttgatttgatcaaatggaccaagtctcataaaatggctgctgagtgcttttctatttagaaagagaatttcccccaatacggtttcatttgaatctcacacaatccaaaaacagagatagtattagtctcagtttgtaactgggaagatgagctcagagtaaagttccatagctgagaggagcttggactctaaccaagacgttgtatgtgctgtgctgtcttctgtttcccccatgctttctatagttt

SEQ ID NO: 85025 - DNA, 815 bp, Homo sapiens
ccgatttagctgaggacaatgttgcagagaaagggcagctgagggccaccagcagctgacattcacaacaagtggggcaaacaggtacacgggcctcgtgaagggaatgtcagccaggactcaaccccaaccactaaaaggacaatgatgaaatgctcaaactgactgtctaatggacggagtctcactctgttgccacgctggaatgcagtggcacgatctcggctcactgcaacctccgactctctggttcaagcgattctcctgcctcagcctcctgaatagctaggattacaggcatgcgccaccacgcccagctaatttttctagttttagtagagacggggtttcaccatgttggccaggatggtctcgatctcctgacctcgtgatccgtccgccttggcctccccaagtgctgagattacaggcgtgagccaccgcacccggccttttattgtactttcttcctcctctctctcttttacagctttgttatgagttttccccacaagcccatgtatttctttgctcctgtgggcagcgaaaacttttggccttgcctctggacaaatctatcagggctgatagattttgtcattggtacaggccctcgcttctcatccacctccactgcctctctttttgctgatccaaggtccccaacattctccctagctggcagagatcatccctgtttccccattattcagagaaatttagcttagttttgctttaacttccataccatcaaaagtcctaggcccatctctccctaatcaaaggctccatacaaaagagacatctgccctgag

SEQ ID NO: 85026 - DNA, 819 bp, Homo sapiens
gccggggctggatgagtatccccactcccctaaccccactccaacattctatgtgctaccacgctcccctatttcaacccaactggttgaacaggaaacattcctaagatgagcaggtagccggtggagctgaacccaagtctccccagcccatgtccactgacaccctgcatgatcagaaggctttaaagaaccctcactcagaaacctcatattatttttggatgcctccggtgtaaaagcaccccctgcgttccgaataattcatttcaagaaacatggtattaagtgtttagtatgtaccaggcgcctgaataggtgcaggggtaaaaatgtcttgacaccaaggaacctccggcatttgtgaatctgctgaacatcgccattgatggactggatgctgccgcctttgcccctccccctcctgccacgtgtcatcgcgcctacttagcgacacctagtggtcagtaaagagaactatctgaatcaatgacgcctttcaggacttctctcaacagagtttgaccaagttttcttctgctgtgtcagatccctctcccagatcagatcattagaacctcctccagtatcttatgtatatgtgtctagaatgacttttttttgagacagagtcttgctctgtcgcccaggctggagtgcaatggcctgatcttggctcactgcaacctccacctcccaggttcaagtgatcctcccacctcagcctcccaagtagctgggattacagggacacgccaccacgcccggctatttttgtatttttagtagagacaaggtttcaccatgctggccaggctg

SEQ ID NO: 85027 - DNA, 396 bp, Homo sapiens
cctggtcgatgatccttgaaacatacacccggcggcagttcctgcaggaaggaggctgagctaccacgcctgcgggtgacccggcctctggtgccagagcctgccatgcttcctgtttgtgctgccaggctggcagggtcccttgccaccgacctcagccgcagccacagcctgctccctccctgggtggatttgaaggagcctcccccaccctccgcccctagcttgctccttgaggaccctgggcagggtggctgccatggggcccaatcgtgcgtgggaacctgcgagctggcaaacggggctcgggggttttgcccagaaatgggtcagaacgaaagcctctcagaggaaagaaaagggcatgagtcaaagagaaagtcggggggcaggggc

SEQ ID NO: 85028 - DNA, 505 bp, Homo sapiens
gccgacaaaaatgttgtttcctcctacagaatactggttaatttaattgtaatttatttcacaatagacttaaagaaaaaagtataccagaactaaaaaaggtgttccctagacagaatggttattattaaaaagtcaaaatataacagatgctggcaaagctgcagaaaaaagaatgcttatacactgctaatgggaatgttaattagttcagccactgtggaaaacagtttggagatttctcaaaagaactcacaactaccattcaacccagcaatcccatttctagatataactcaaaggaatataaatcattctaccacacacgtgttatgttcatcacagtactattcacaataacaaagacatggaatcaacctagatgcccatcaacagtggactggataaagaaaatgtggtgcatatacatcatggaacactatgtaaccataaaaaagaatgagatcatgtcctttgcagcaacacaggtggagctgggggccat

SEQ ID NO: 85029 - DNA, 369 bp, Homo sapiens
ctaatcaatggaattttattagtgctttttgaaaaatacattaacagcataaggaagttcttttaaatctttgtatagtgatgggatcagagatacaggattgaaatgaactaaacaattttaatatggttctttggagtttattgtcataaatttactttattagagtatcataatacagcatttataaaatgttgcatttattttatatcaaattctattgtgaatttttgagacagagcctcactctgtcgcccaggctggagggcagtggcacaatcttggctcactgcaagctccgcctcttaggttcataccattctcctgcctcagcctcccgagtagctgggactacaggtgcccgccacc

SEQ ID NO: 85030 - DNA, 340 bp, Homo sapiens
gggaaggaggaaggggggaccaagagttgaaaaactattgggtactatgctcactactttgatgatgggatagatcatatcccaaacctcagcattatgagatatacccatgtaacaaacctgcacatgtactgcctgtatctaaaaagtggaagttatgtattaaaaaaagtttggtttggaaaaccaaatacaaaatatttcaaatacaaatgtttagtataatgtggatattaaaagtgaaaggtgtcagaatgccttggggtcccatttgaccttggacaaattacttaattctcctgcctcagcctccggagtaactgggatttacaggcacctg

SEQ ID NO: 85031 - DNA, 427 bp, Homo sapiens
tgatagagattgccaaattgtactcctcaggagctgaactaatttgtactctcaccagcaatgttagggacatgcttgtttttccaccgcatcaccaacagagcatgttattaaacttttggatttgggccaatatgataggtaaaagaatgttttcttagtgtttaatttgcatttctcttattatgaatgagattaagtattctattatatatttaataggtgtttgtatttccttttctgtgaactacatgatcatatcctttgcccatttttctttgggtttttgtctttctaaaattgtttttggctggatgtggtggctcaggcctgtaatcccagcaattttggtggctgaggcaggcggactgcttaagctcaggagttcaagactatcctgggcaacatggtgaaactcccatctcta

SEQ ID NO: 85032 - DNA, 385 bp, Homo sapiens
attatgctggttcagatataatctgcatcctttctaaaactggagacactatataccatttactcatctctgcttgtgccttatttatatggctgtgatttcttatatctcataaaacaaaatattggcttaaagtgcacttctatagcctgggagaaggccttggatcttcaaaaatgcatacagtgcaaaagtggcaaagattatagcaaacaattgcttctatttaatgttttccacatgtcttaacttctgtctacctggagttaactgtctacagtggagctctgtcttgaggagatgtgtagatagctgtggaccctagcctcttgtttagcatcagctgcaaagtctctcctcatctaccaatacacatagaagcttg

SEQ ID NO: 85033 - DNA, 1635 bp, Homo sapiens
gttgctgaagcttcatcctttgctctcattctgtaagtcatagaaaagtttgaaacattctgtctgtggtagagctcgggccagctgtagttcattcgccagtgtgcttttcttaatatctaagatggtgcgtgagcagtacactacagccacagaaggcatctgcatagagaggccagagaatcagtatgtctacaaaattggcatttatggctggagaaagcgctgtctctacttgtttgttcttcttttactcatcatcctcgttgtgaatttagctcttacaatttggattcttaaagtgatgtggttttctccagcaggaatgggccacttgtgtgtaacaaaagatggactgcgcttggaaggggaatcagaatttttattcccattgtatgccaaagaaatacactccagagtggactcatctctgctgctacaatcaacccagaatgtgactgtaaatgcgcgcaactcagaaggggaggtcacaggcaggttaaaagtcggtcccaaaatggtagaagtccagaatcaacagtttcagatcaactccaacgacggcaagccactatttactgtagatgagaaggaagttgtggttggtacagataaacttcgagtaactgggcctgaaggggctctttttgaacattcagtggagacaccccttgtcagagccgacccgtttcaagaccttagattagaatcccccactcggagtctaagcatggatgccccaaggggtgtgcatattcaagctcacgctgggaaaattgaggcgctttctcaaatggatattctttttcatagtagtgatggaatgcttgtgcttgatgctgaaactgtgtgcttacccaagctggtgcaggggacgtggggtccctctggcagctcacagagcctctacgaaatctgtgtgtgtccagatgggaagctgtacctgtctgtggccggtgtgagcaccacgtgccaggagcacagccacatctgcctctgagctgcctgcgtcctctcggtgagctgtgcagtgccggccccagatcctcacacccagggagcagctgcacatcgtgaaagactgaggcagcgtggatgggaagtaaacgcttccagaggaactcagaaaaaattatgtgccagtgaaagtgtttggacaaaaactacatgatctcaaaatgcacgtggatgtgagacacaaaagttgacaaaatggaaaagcaatgtgtttttccactggattaattttcaccggaacaattgcgaattctctctgcctcgcctccccctatcttgtccgtgtgggcacacactgagtgttgagttgccgtgtggagttaatgtatgacgctccactgtggatatctaatgccctgttgagagtagccttgctcagtactaaaatgccccaaagttctatacagcatttcctttatagcattcaaacctcacatcctcccttcagtttaatgcaagtaagtcaggtttcacaagaaaattttcaagttttgaagggaatttgaggttgatctggttttcaagatgtagttaaaggaataaatcactcaaaattaaactttctgtatatagtcaataagcaataaaaacctcatttttcagagttaaaaaataaga

SEQ ID NO: 85034 - DNA, 772 bp, Homo sapiens
tttttttgagacagggtcttgctatcatccagactggagtgcagtgcagtggcaccatcctggctctctgcagcctcaacctccgagctcaagcgatcctcccacctcagcctgccgaggagctgggaccacaggcatgtgccatcatgcccagctaattttttttgtttgtttgtagaggtggggtctccctatgttacccaggctgatctcgcactcctgagctcaagagatccttctgcctcaggctcccaaactgttgggattacaggccttcattgcttcaatatctcttataaggaaagactgaaaacagcacaagtacagagaaccaagcatgtggttgattctacatccacccagtgtgacaccatgcagctgtcaaacatgaaggaggacagtatctaggtactaatgtggaatgatattgtcaaatgaaaaagctaaggtgcagagtggtgtaatatgaaagagaagaaaataaaattacatgttcccacactagtttttgcataaagaaaccttggagggaccaaggagaaatgaacacagatgatttcttgcaggggtagatgacagcacaaggtgaagaaggccgggggtgtttcgtattctatgcatttttaaatgttttcattttgggaacattttaatatagcaaaaaacaacaatctgcacaaaacacgagaagataacaaaatatttttctaactattgatatgggaaaataaagaagagatggttaagagtttgataccatggccaccactaa

SEQ ID NO: 85035 - DNA, 793 bp, Homo sapiens
gacggaagatggcgacgagcggcggcgaagaggcggcggcagcggctccggcgccggggaccccggcaacgggggcggacacgaccccgggctgggaggtggctgtgcggcccctgctgtccgcgtcctactccgccttcgagatgaaggagttgccgcagctggtggcctcagtcatcgagaggtaccgggcggcggctctggcgggcgacgctgttgtggggggaggggatttcgagccggatcgtctggacccgctttccgggccgccccctgcccccttgaggatccccgccacagccacggcttcggggtcccgggcccggggagactggcttgcctgggtttccctccgccaacgcatgtaaatcacctctacctcagtttcccctctcgagcaaaactttagcggcctccctgcgggagggcgtggccggacatggttgagagtgagatgcattcgccctcttaagggaatgttcacggggctgccccttgggtcaagtcacagatgagtttgcatttctcgcccgcactcatcctcctagcctgggccggagcggagccgtacggtataatttaataacggtctccccgcggtgctgtaatcagtgggggcacgtgctatttctgtgactgaagccactagctacattgatgacctctttttacgttgcactccttgtgcattcctactgtatcggtctttgattaaaaacatttcagtgtgtgtctgagagatcattttcccagaggatgtgtggtgtgtgtgttctcttgctgcctcccatcc

SEQ ID NO: 85036 - DNA, 723 bp, Homo sapiens
aagagtgtgtgattggtgcaaaagagatcaactaggatttagaaaactctgaacaaaagaagcttcaaatctctcagcctcaggtttctcctctggtaaatgaaaaggttgaaatagataatttataccggtattcctgctttatagttcataaaatattttcacgccttcttcttaattgctccctataatcaccccatgaggtaggaatttcataggtgaggaaatagactaagatgtcaagctactaaactggtttaatagttggtgggaccacaggcttgaactaggttagactctgtctccaaatctcctaccatgatgcaaaagacagttaccatcctacacaggtgcattccaacaccaacatcaccaacatcctataactccgtgtgttatgtgtacagtctttcctgcagttattgactataataaatgttaatcaggcaaaagcagctgccattcaaaaagaggtaactaatctgtagttgattacaaggaactaatctagacacatcctttcaaagtcacaatttcatgtggtcaaatgaaggctgtaacacatggctacaaagatgaggaacaatagacactgggcctacttgggggtggagggtgggaggagggtgaggatcggaaaaccaccttttgggtactaggctcactacctgggtgacaaaatcatttgtacatcaaaccccagtgacacacaatttacccaca

SEQ ID NO: 85037 - DNA, 754 bp, Homo sapiens
agcctagtgacatttatttatttttaagatttcttttaaaaaaatattgagtgattggtcaattgactgagacagggtctcactctgtcgcccaggctggagtgcagtggtgtaatcttggctcactgcaacctccgcctcccaggcccaagcaatcctcctgcctcagcctccggagtggctgggactacaggtgtacactatcacgctcagctaatttttgtatcttctgtagagacgggatctcaccatgttgcccaggctggtatgtcaagctactaaactggtttaatagttggtgggaccacaggcttgaactaggttagactctgtctccaaatctcctaccatgatgcaaaagacagttaccatcctacacaggtgcattccaacaccaacatcaccaacatcctataactccgtgtgttatgtgtacagtctttcctgcagttattgactataataaatgttaatcaggcaaaagcagctgccattcaaaaagaggtaactaatctgtagttgattacaaggaactaatctagacacatcctttcaaagtcacaatttcatgtggtcaaatgaaggctgtaacacatggctacaaagatgaggaacaatagacactgggcctacttgggggtggagggtgggaggagggtgaggatcggaaaaccaccttttgggtactaggctcactacctgggtgacaaaatcatttgtacatcaaaccccagtgacacacaatttacccaca

SEQ ID NO: 85038 - DNA, 1970 bp, Homo sapiens
agcggactttttagagatcaatgagatagtgcagatatacacagatctagagactccaggagacgatgcgacactcagcctgaaaagatttggaagacccaaaatgaaaactgattattgaatgaaattaaaacctaaggtaatttaagattagagaaccatgttaacactaccgtttgatgagtctgttgtaatgccagaatcccagatgtgcagaaagttttctagagaatgcgaggaccagaagcaaattaagaagccagaaagcttttccaaacagattgtccttcgaggaaagagcatcaaaagggcccctggagaagaaaccgagaaagaagaagaggaggaagacagggaagaggaagatgaaaatgggttgcctagaaggaggggtcttaggaaaaaaaagacaacaaagctgcgattggaaagggtcaagttcaggagacaggaagcgaacgcgcgcgagaggaacaggatgcacggcctcaacgacgctctggacaacttaagaaaagtggtcccctgttattctaaaacccagaaactgtccaaaatagagactttacgactggccaaaaactacatctgggcactttctgaaattctgagaatcggcaagagaccagatctgctcacattcgtccaaaacttatgcaaaggtctttcccagccaactacaaacttggtggcaggctgcttgcagctcaacgccaggagtttcctgatgggtcagggtggggaggctgcacaccacacaaggtcaccctactctaccttctacccaccctaccacagccctgagctcaccactcccccagggcatgggactcttgataattccaagtccatgaaaccctacaattattgcagtgcgtatgaatccttctatgaaagtacttcccctgagtgtgccagccctcagtttgaaggtcccttaagtcctcccccaattaactataatgggatattttccctgaagcaagaagaaaccttggactatggtaaaaattacaattacggcatgcattactgtgcagtgccacccaggggtccccttgggcagggtgccatgttcaggttgcccaccgacagccacttcccttacgacttacatctgcgcagccaatctctcacaatgcaagatgaattaaatgcagtttttcataattaatgaggaaaatgaaaataaacagtggtcattcacctcccctgtctaattaagacaaagcagatgcttgtgggctgagtaattggcacaactctatctaaggtgtttactagtttctgaagtgtgtttcaactattgtgagaattttctatgtaataataaatctcttttcgtatgagaacttcttttcctttccttttgtctgtgaagcactgtgattctgtttctactggaaagatttttttctttttaattttcttttaaacttatttaatttgtttgaacaaggtgtctaagaatatactgttgaataaagacatgcacacagcataattcaatgtctattttggttgtacagtaattataaaatgcatgttattaaaaccagatgagtaaaatgatgtgtttataattattaggaattatatattatgtatcttttaaaaattgaaattttaaaatatggagaatatcactaagctgacaatgatattgggagatgaatttgcaacaatataaaaagctatgcaattttctttttattaaggatgaatctaaatgcattcaattggtaactattcctcttcaagtatttgcagatggggcaacatgatatttgggtagctgatgtcataattcggggacaattatctcaatcatcaagaaaaaaatttcagcacttgttttgtattattcagaaattaactgtacaggtttgttatcacaatgtataattgtgtttttccaccccacatttttaaggcaattaaatatagatatttccactcgtaaaggacat

SEQ ID NO: 85039 - DNA, 1981 bp, Homo sapiens
  misc_feature (27)..(27): n is a, c, g, or t
agagagagagagagagagagagagagnagagagagagagagagagagagagacagatctagagactccaggagacgatgcgacactcagcctgaaaagatttggaagacccaaaatgaaaactgattattgaatgaaattaaaacctaaggtaatttaagattagagaaccatgttaacactaccgtttgatgagtctgttgtaatgccagaatcccagatgtgcagaaagttttctagagaatgcgaggaccagaagcaaattaagaagccagaaagcttttccaaacagattgtccttcgaggaaagagcatcaaaagggcccctggagaagaaaccgagaaagaagaagaggaggaagacagggaagaggaagatgaaaatgggttgcctagaaggaggggtcttaggaaaaaaaagacaacaaagctgcgattggaaagggtcaagttcaggagacaggaagcgaacgcgcgcgagaggaacaggatgcacggcctcaacgacgctctggacaacttaagaaaagtggtcccctgttattctaaaacccagaaactgtccaaaatagagactttacgactggccaaaaactacatctgggcactttctgaaattctgagaatcggcaagagaccagatctgctcacattcgtccaaaacttatgcaaaggtctttcccagccaactacaaacttggtggcaggctgcttgcagctcaacgccaggagtttcctgatgggtcagggtggggaggctgcacaccacacaaggtcaccctactctaccttctacccaccctaccacagccctgagctcaccactcccccagggcatgggactcttgataattccaagtccatgaaaccctacaattattgcagtgcgtatgaatccttctatgaaagtacttcccctgagtgtgccagccctcagtttgaaggtcccttaagtcctcccccaattaactataatgggatattttccctgaagcaagaagaaaccttggactatggtaaaaattacaattacggcatgcattactgtgcagtgccacccaggggtccccttgggcagggtgccatgttcaggttgcccaccgacagccacttcccttacgacttacatctgcgcagccaatctctcacaatgcaagatgaattaaatgcagtttttcataattaatgaggaaaatgaaaataaacagtggtcattcacctcccctgtctaattaagacaaagcagatgcttgtgggctgagtaattggcacaactctatctaaggtgtttactagtttctgaagtgtgtttcaactattgtgagaattttctatgtaataataaatctcttttcgtatgagaacttcttttcctttccttttgtctgtgaagcactgtgattctgtttctactggaaagatttttttctttttaattttcttttaaacttatttaatttgtttgaacaaggtgtctaagaatatactgttgaataaagacatgcacacagcataattcaatgtctattttggttgtacagtaattataaaatgcatgttattaaaaccagatgagtaaaatgatgtgtttataattattaggaattatatattatgtatcttttaaaaattgaaattttaaaatatggagaatatcactaagctgacaatgatattgggagatgaatttgcaacaatataaaaagctatgcaattttctttttattaaggatgaatctaaatgcattcaattggtaactattcctcttcaagtatttgcagatggggcaacatgatatttgggtagctgatgtcataattcggggacaattatctcaatcatcaagaaaaaaatttcagcacttgttttgtattattcagaaattaactgtacaggtttgttatcacaatgtataattgtgtttttccaccccacatttttaaggcaattaaatatagatatttccactcgtaaaggacat

SEQ ID NO: 85040 - DNA, 1664 bp, Homo sapiens
agcggactttttagagatcaatgagatagtgcagatatacacagatctagagactccaggagacgatgcgacactcagcctgaaaagatttggaagacccaaaatgaaaactgattattgaatgaaattaaaacctaaggtaatttaagattagagaaccatgttaacactaccgtttgatgagtctgttgtaatgccagaatcccagatgtgcagaaagttttctagagaatgcgaggaccagaagcaaattaagaagccagaaagcttttccaaacagattgtccttcgaggaaagagcatcaaaagggcccctggagaagaaaccgagaaagaagaagaggaggaagacagggaagaggaagatgaaaatgggttgcctagaaggaggggtcttaggaaaaaaaagacaacaaagctgcgattggaaagggtcaagttcaggagacaggaagcgaacgcgcgcgagaggaacaggatgcacggcctcaacgacgctctggacaacttaagaaaagtggtcccctgttattctaaaacccagaaactgtccaaaatagagactttacgactggccaaaaactacatctgggcactttctgaaattctgagaatcggcaagagaccagatctgctcacattcgtccaaaacttatgcaaaggtctttcccagccaactacaaacttggtggcaggctgcttgcagctcaacgccaggagtttcctgatgggtcagggtggggaggctgcacaccacacaaggtcaccctactctaccttctacccaccctaccacagccctgagctcaccactcccccagggcatgggactcttgataattccaagtccatgaaaccctacaattattgcagtgcgtatgaatccttctatgaaagtacttcccctgagtgtgccagccctcagtttgaaggtcccttaagtcctcccccaattaactataatgggatattttccctgaagcaagaagaaaccttggactatggtaaaaattacaattacggcatgcattactgtgcagtgccacccaggggtccccttgggcagggtgccatgttcaggttgcccaccgacagccacttcccttacgacttacatctgcgcagccaatctctcacaatgcaagatgaattaaatgcagtttttcataattaatgaggaaaatgaaaataaacagtggtcattcacctcccctgtctaattaagacaaagcagatgcttgtgggctgagtaattggcacaactctatctaaggtgtttactagtttctgaagtgtgtttcaactattgtgagaattttctatgtaataataaatctcttttcgtatgagaaaaaaaaacaaaaaaaaaaaaaacaaaacaaacacacaaaaaaaaagggggcgcgcgcgccccaaaagaatccccccggggggcgcccaatttcggcggtatccccggagttttctgtggcaaacaagggggggcccccatatataagggcacgccgcaattataataggccagggcactcgggcccgccgactttaaaagacgagtctgcggacagtgggagaacaacacggctaaagccggggggacactcgtgggaagagagaccctataccgacgggaggagcgaaccaaagtgcgcaccaccccccag

SEQ ID NO: 85041 - DNA, 616 bp, Homo sapiens
  misc_feature (545)..(545): n is a, c, g, or t
  misc_feature (549)..(549): n is a, c, g, or t
  misc_feature (566)..(566): n is a, c, g, or t
  misc_feature (576)..(576): n is a, c, g, or t
  misc_feature (588)..(588): n is a, c, g, or t
  misc_feature (608)..(608): n is a, c, g, or t
ggccctccacatcctcttggataatgtcaaagtattctctgttcaattttgaaacagtcatttcagtggtgtgaagatctttagtaactgcagcttcgaagactttgcacattttatttcaaagcagaagtcccagtgtcttcacaatcagcctcgcttagatccttttttcaaacagcaagcagtgtgtggtaatgcaaagctggaagcaggagaggagtgtgactgtgggactgaacaggattgtgcccttattggagaaacatgctgtgatattgccacatgtagatttaaagccggttcaaactgtgctgaaggaccatgctgcgaaaactgtctatttatgtcaaaagaaagaatgtgtaggccttcctttgaagaatgcgacctccctgaatattgcaatggatcatctgcatcatgcccagaaaaccactatgttcagactgggcatccgtgtggactgaatcaatggatctgtatagatggagtttgtatgagtggggataaacaatgtacagacacatttggcaaagaagtagagntggnccctccagaatgtaatnctccaccctnaaattcaaaagnctgaaggaacctgggaaccngtgggaaa

SEQ ID NO: 85042 - DNA, 2582 bp, Homo sapiens
catctcgcacttccaactgccctgtaaccaccaactgcccttattccggctgggacccaggacttcaagccatgtggcgcgtcttgtttctgctcagcgggctcggcgggctgcggatggacagtaattttgatagtttacctgtgcaaattacagttccggagaaaatacggtcaataataaaggaaggaattgaatcgcaggcatcctacaaaattgtaattgaagggaaaccatatactgtgaatttaatgcaaaaaaactttttaccccataattttagagtttacagttatagtggcacaggaattatgaaaccacttgaccaagattttcagaatttctgccactaccaagggtatattgaaggttatccaaaatctgtggtgatggttagcacatgtactggactcaggggcgtactacagtttgaaaatgttagttatggaatagaacccctggagtcttcagttggctttgaacatgtaatttaccaagtaaaacataagaaagcagatgtttccttatataatgagaaggatattgaatcaagagatctgtcctttaaattacaaagcgtagtataatcatatggggtctgatacaactgttgtcgctcaaaaagttttccagttgattggattgacgaatgctatttttgtttcatttaatattacaattattctgtcttcattggagctttggatagatgaaaataaaattgcaaccactggagaagctaatgagttattacacacatttttaagatggaaaacatcttatcttgttttacgtcctcatgatgtggcatttttacttgtttacagagaaaagtcaaattatgttggtgcaacctttcaagggaagatgtgtgatgcaaactatgcaggaggtgttgttctgcaccccagaaccataagtctggaatcacttgcagttattttagctcaattattgagccttagtatggggatcacttatgatgacattaacaaatgccagtgctcaggagctgtctgcattatgaatccagaagcaattcatttcagtggtgtgaagatctttagtaactgcagcttcgaagactttgcacattttatttcaaagcagaagtcccagtgtcttcacaatcagcctcgcttagatccttttttcaaacagcaagcagtgtgtggtaatgcaaagctggaagcaggagaggagtgtgactgtgggactgaacaggattgtgcccttattggagaaacatgctgtgatattgccacatgtagatttaaagccggttcaaactgtgctgaaggaccatgctgcgaaaactgtctatttatgtcaaaagaaagaatgtgtaggccttcctttgaagaatgcgacctccctgaatattgcaatggatcatctgcatcatgcccagaaaaccactatgttcagactgggcatccgtgtggactgaatcaatggatctgtatagatggagtttgtatgagtggggataaacaatgtacagacacatttggcaaagaagtagagtttggcccttcagaatgttattctcaccttaattcaaagactgatgtatctggaaactgtggtataagtgattcaggatacacacagtgtgaagctgacaatctgcagtgcggaaaattaatatgtaaatatgtaggtaaatttttattacaaattccaagagccactattatttatgccaacataagtggacatctctgcattgctgtggaatttgccagtgatcatgcagacagccaaaagatgtggataaaagatggaacttcttgtggttcaaataaggtttgcaggaatcaaagatgtgtgagttcttcatacttgggttatgattgtactactgacaaatgcaatgatagaggtgtatgcaataacaaaaagcactgtcactgtagtgcttcatatttacctccagattgctcagttcaatcagatctatggcctggtgggagtattgacagtggcaattttccacctgtagctataccagccagactccctgaaaggcgctacattgagaacatttaccattccaaaccaatgagatggccatttttcttattcattcctttctttattattttctgtgtactgattgctataatggtgaaagttaatttccaaaggaaaaaatggagaactgaggactattcaagcgatgagcaacctgaaagtgagagtgaacctaaagggtagtctggacaacagagatgccatgatatcacttcttctagagtaattatctgtgatggatggacacaaaaaaatggaaagaaaagaatgtacattacctggtttcctgggattcaaacctgcatattgtgattttaatttgaccagaaaatatgatatatatgtataatttcacagataatttacttatttaaaaatgcatgataatgagttttacattacaaatttctgtttttttaaagttatcttacgctatttctgttggttagtagacactaattctgtcagtaggggcatggtataaggaaatatcataatgtaatgaggtggtactatgattaaaagccactgttacatttcaaatt

SEQ ID NO: 85043 - DNA, 2641 bp, Homo sapiens
catctcgcacttccaactgccctgtaaccaccaactgcccttattccggctgggacccaggacttcaagccatgtggcgcgtcttgtttctgctcagcgggctcggcgggctgcggatggacagtaattttgatagtttacctgtgcaaattacagttccggagaaaatacggtcaataataaaggaaggaattgaatcgcaggcatcctacaaaattgtaattgaagggaaaccatatactgtgaatttaatgcaaaaaaactttttaccccataattttagagtttacagttatagtggcacaggaattatgaaaccacttgaccaagattttcagaatttctgccactaccaagggtatattgaaggttatccaaaatctgtggtgatggttagcacatgtactggactcaggggcgtactacagtttgaaaatgttagttatggaatagaacccctggagtcttcagttggctttgaacatgtaatttaccaagtaaaacataagaaagcagatgtttccttatataatgagaaggatattgaatcaagagatctgtcctttaaattacaaagcgtagagccacagcaagattttgcaaagtatatagaaatgcatgttatagttgaaaaacaattgtataatcatatggggtctgatacaactgttgtcgctcaaaaagttttccagttgattggattgacgaatgctatttttgtttcatttaatattacaattattctgtcttcattggagctttggatagatgaaaataaaattgcaaccactggagaagctaatgagttattacacacatttttaagatggaaaacatcttatcttgttttacgtcctcatgatgtggcatttttacttgtttacagagaaaagtcaaattatgttggtgcaacctttcaagggaagatgtgtgatgcaaactatgcaggaggtgttgttctgcaccccagaaccataagtctggaatcacttgcagttattttagctcaattattgagccttagtatggggatcacttatgatgacattaacaaatgccagtgctcaggagctgtctgcattatgaatccagaagcaattcatttcagtggtgtgaagatctttagtaactgcagcttcgaagactttgcacattttatttcaaagcagaagtcccagtgtcttcacaatcagcctcgcttagatccttttttcaaacagcaagcagtgtgtggtaatgcaaagctggaagcaggagaggagtgtgactgtgggactgaacaggattgtgcccttattggagaaacatgctgtgatattgccacatgtagatttaaagccggttcaaactgtgctgaaggaccatgctgcgaaaactgtctatttatgtcaaaagaaagaatgtgtaggccttcctttgaagaatgcgacctccctgaatattgcaatggatcatctgcatcatgcccagaaaaccactatgttcagactgggcatccgtgtggactgaatcaatggatctgtatagatggagtttgtatgagtggggataaacaatgtacagacacatttggcaaagaagtagagtttggcccttcagaatgttattctcaccttaattcaaagactgatgtatctggaaactgtggtataagtgattcaggatacacacagtgtgaagctgacaatctgcagtgcggaaaattaatatgtaaatatgtaggtaaatttttattacaaattccaagagccactattatttatgccaacataagtggacatctctgcattgctgtggaatttgccagtgatcatgcagacagccaaaagatgtggataaaagatggaacttcttgtggttcaaataaggtttgcaggaatcaaagatgtgtgagttcttcatacttgggttatgattgtactactgacaaatgcaatgatagaggtgtatgcaataacaaaaagcactgtcactgtagtgcttcatatttacctccagattgctcagttcaatcagatctatggcctggtgggagtattgacagtggcaattttccacctgtagctataccagccagactccctgaaaggcgctacattgagaacatttaccattccaaaccaatgagatggccatttttcttattcattcctttctttattattttctgtgtactgattgctataatggtgaaagttaatttccaaaggaaaaaatggagaactgaggactattcaagcgatgagcaacctgaaagtgagagtgaacctaaagggtagtctggacaacagagatgccatgatatcacttcttctagagtaattatctgtgatggatggacacaaaaaaatggaaagaaaagaatgtacattacctggtttcctgggattcaaacctgcatattgtgattttaatttgaccagaaaatatgatatatatgtataatttcacagataatttacttatttaaaaatgcatgataatgagttttacattacaaatttctgtttttttaaagttatcttacgctatttctgttggttagtagacactaattctgtcagtaggggcatggtataaggaaatatcataatgtaatgaggtggtactatgattaaaagccactgttacatttcaaatt

SEQ ID NO: 85044 - DNA, 2320 bp, Homo sapiens
catctcgcacttccaactgccctgtaaccaccaactgcccttattccggctgggacccaggacttcaagccatgtggcgcgtcttgtttctgctcagcgggctcggcgggctgcggatggacagtaattttgatagtttacctgtgcaaattacagttccggagaaaatacggtcaataataaaggaaggaattgaatcgcaggcatcctacaaaattgtaattgaagggaaaccatatactgtgaatttaatgcaaaaaaactttttaccccataattttagagtttacagttatagtggcacaggaattatgaaaccacttgaccaagattttcagaatttctgccactaccaagggtatattgaaggttatccaaaatctgtggtgatggttagcacatgtactggactcaggggcgtactacagtttgaaaatgttagttatggaatagaacccctggagtcttcagttggctttgaacatgtaatttaccaagtaaaacataagaaagcagatgtttccttatataatgagaaggatattgaatcaagagatctgtcctttaaattacaaagcgtagagccacagcaagattttgcaaagtatatagaaatgcatgttatagttgaaaaacaattgcaccccagaaccataagtctggaatcacttgcagttattttagctcaattattgagccttagtatggggatcacttatgatgacattaacaaatgccagtgctcaggagctgtctgcattatgaatccagaagcaattcatttcagtggtgtgaagatctttagtaactgcagcttcgaagactttgcacattttatttcaaagcagaagtcccagtgtcttcacaatcagcctcgcttagatccttttttcaaacagcaagcagtgtgtggtaatgcaaagctggaagcaggagaggagtgtgactgtgggactgaacaggattgtgcccttattggagaaacatgctgtgatattgccacatgtagatttaaagccggttcaaactgtgctgaaggaccatgctgcgaaaactgtctatttatgtcaaaagaaagaatgtgtaggccttcctttgaagaatgcgacctccctgaatattgcaatggatcatctgcatcatgcccagaaaaccactatgttcagactgggcatccgtgtggactgaatcaatggatctgtatagatggagtttgtatgagtggggataaacaatgtacagacacatttggcaaagaagtagagtttggcccttcagaatgttattctcaccttaattcaaagactgatgtatctggaaactgtggtataagtgattcaggatacacacagtgtgaagctgacaatctgcagtgcggaaaattaatatgtaaatatgtaggtaaatttttattacaaattccaagagccactattatttatgccaacataagtggacatctctgcattgctgtggaatttgccagtgatcatgcagacagccaaaagatgtggataaaagatggaacttcttgtggttcaaataaggtttgcaggaatcaaagatgtgtgagttcttcatacttgggttatgattgtactactgacaaatgcaatgatagaggtgtatgcaataacaaaaagcactgtcactgtagtgcttcatatttacctccagattgctcagttcaatcagatctatggcctggtgggagtattgacagtggcaattttccacctgtagctataccagccagactccctgaaaggcgctacattgagaacatttaccattccaaaccaatgagatggccatttttcttattcattcctttctttattattttctgtgtactgattgctataatggtgaaagttaatttccaaaggaaaaaatggagaactgaggactattcaagcgatgagcaacctgaaagtgagagtgaacctaaagggtagtctggacaacagagatgccatgatatcacttcttctagagtaattatctgtgatggatggacacaaaaaaatggaaagaaaagaatgtacattacctggtttcctgggattcaaacctgcatattgtgattttaatttgaccagaaaatatgatatatatgtataatttcacagataatttacttatttaaaaatgcatgataatgagttttacattacaaatttctgtttttttaaagttatcttacgctatttctgttggttagtagacactaattctgtcagtaggggcatggtataaggaaatatcataatgtaatgaggtggtactatgattaaaagccactgttacatttcaaatt

SEQ ID NO: 85045 - DNA, 445 bp, Homo sapiens
aaaaaaaggaaaaaatgcatacatagatatacatacatataatatacatcctataaaagccatttaaaacattaaaacaaaaataaaaggtaaaaactgaaattaaataggaaatttgggcaagcatgtgccatagaagaagcaagagactgataaaatatttaacaatcagtttggcatggaaacgaactaagccaagtgaatgctagctattaataaccagtaagcaatgcttttatataaaaaagagattggaaaggtgattttaaaagacaccagggcttgctttttgtccttacccttctaccccaggctcttctgccttccctcttctctttccctttttaccctccctcctttatgtgtctactctttcctctctccttgcccattttcccttctcttttccctctactcctatgccattgtgttgggggaagtcctc

SEQ ID NO: 85046 - DNA, 415 bp, Homo sapiens
atatggatatctggttatgtggcttatccacagagtccagcctaagatctgggtttaaattatactgctgtcatttttttccttttgagggagtggatatagtagaaagaattgggatttcaatattttctccagaacttactagctttgtgaccttggatagttaatttatgctccttcgcctcagtttgttcatctataacaagggtagttgtaaggattgaggacactgtcttgggaaaaatggcttgcatatattaagtactcaataaattataggtattagccccttttattaaaattattttttactgtttggggataatcttccttcaatctttttattttttgcactagtagcgcctgttctaaaaaaagtgtgtttatattctataggactggctgatagtctaag

SEQ ID NO: 85047 - DNA, 630 bp, Homo sapiens
ctggcctttgcttcccagattgaattagaggagggaagtcccaggtgctcctccctcaacagtggcagtgggcgtgggtctgctcttccagcccaggcaccctctccccactgggtggttctgtggtgccttttcatttccaggccatttccatctgggagtgagcgtggaacacgaccccgttctgagagagcccactgggaccgtggcacccccatctcaggagtctgagcccctagtgatgactggctcatgcttagggagcaaagcgcccataaatgtgagcagcactctagagaccccgagccaccctggcacccgggcacggacgcgttgctggagcgtccatggacacggtggggtgtctgccccctctctgctgcccaacccccgaggcatgcccgccggttccctgcctccacctgaatgtggcctttctgcagtgttgactccacagcaaacttccagccgttacctctgtggctatgactgatggcatcagttcttctgtggaaaagacccctgggcgtgggactcctgagcaaagatggacccgcctcccctgcccaaatcccaacctgcttcctggtgccctgtcccctaccccagtaaaatcaaatgtgcatccaa

SEQ ID NO: 85048 - DNA, 373 bp, Homo sapiens
gcaaagggcagaccaaactctgcagctgcttgaccaccacatcttagctctttcctcccccagccagagtcgcatctgggcaggagtgtccagggtgtctgccctctgcacctgtgcagtgtcccctgtcactgtggagtggccagcattggggtgagatggccctgactgcagttggaccaagaaactctatagaggcccctgcctcttccccaccctctgatgcggggatggtcggtggctcccagagttcaggcaggacatggagcccattgcagccggccgtgcttgatgtgtacacgggtgtgtgacatgcaggcattcacacttacatacatacacccttccctagctgtagcagccaggtgtggtt

SEQ ID NO: 85049 - DNA, 3131 bp, Homo sapiens
ggaagagtaggggcccggacgctgcagcaggcggggcacccggactggcggcttcgctggcgcaaggtcggtccggcggccaggacctggaaggctgcgaggccctgcgaggtcgaggttcggagtttgctggtcccaggcccggcccgaggtaagaaagagccgcctccccgcacggccggaggacccgggcgccccgagttcgacttctcagcctccgtccggacgggaaacggagcacggagatgttcctgaggtctctttcctgggaagcgcagccccgatttcccgcccctgtcccttagcaggtcggcgaccatccgagcgctgggcatcggcccacgcgtacagaaggcgctcaataaatgctcactagtgaatcagtaaaataaatcggcagcaaagagagacgagacgcatgctgatcttcaggtgttggggacatcagggacgcgaacatttattgagctcttattgtataccgcgtcggccagcatttgtgtccatttcacacatgaggaataagaggcccagagaggtgaagtgacttccttaaggccacacagatagtaagtggccgagacgaatttgaaaccaggggtgtcctgtttgaacttggtgccaaatagagtaactcggactccagttggaggggttcgggagaaccatagaagaggaagggccgtgtcttccgtggacaggccaccggagccgccagctgtttggaactgagctactgcagaaagggaagtggagagtaagggccaggccccgtgggggcagatggccggcagaaggctgaatctgcgctgggcactgagtgtgctttgtgtgctgctaatggcggagacagtgtctgggactaggggctcgtctacaggagctcacattagcccccagtttccagcttcaggtgtgaaccagacccccgtggtagactgccgcaaggtgtgtggcctgaatgtctctgaccgctgtgacttcatccggaccaaccctgactgccacagtgatggggggtacctggactacctggaaggcatcttctgccacttccctcccagcctcctccctctggctgtcactctctacgtttcctggctgctctacctgtttctgattctgggagtcaccgcagccaagtttttctgccccaacttgtcggccatttctaccacactgaagctctcccacaacgtggcaggcgtcaccttcctggcatttgggaatggtgcacctgacatcttcagtgccctggtggccttctctgacccgcacacagccggcctggcccttggggcactgtttggcgctggcgtgctggttaccacagtggtggccggaggcattaccatcctacaccccttcatggctgcctccaggcccttcttcagggacatcgttttctacatggtggctgtgttcctgaccttcctcatgctcttccgtggcagggtcaccctggcatgggctctgggttacctgggcttgtatgtgttctatgtggtcactgtgattctctgcacctggatctaccaacggcaacggagaggatctctgttctgccccatgccagttactccagagatcctctcagactccgaggaggaccgggtatcttctaataccaacagctatgactacggtgatgagtaccggccgctgttcttctaccaggagaccacggctcagatcctggtccgggccctcaatcccctggattacatgaagtggagaaggaaatcagcatactggaaagccctcaaggtgttcaagctgcctgtggagttcctgctgctcctcacagtccccgtcgtggacccggacaaggatgaccagaactggaaacggcccctcaactgtctgcatctggttatcagccccctggttgtggtcctgaccctgcagtcggggacctatggtgtctatgagataggcggcctcgttcccgtctgggtcgtggtggtgatcgcaggcacagccttggcttcagtgaccttttttgccacatctgacagccagccccccaggcttcactggctctttgctttcctgggctttctgaccagcgccctgtggatcaacgcggccgccacagaggtggtgaacatcttgcggtccctgggtgtggtcttccggctgagcaacactgtgctggggctcacgctgctggcctgggggaacagcattggagatgccttctcggatttcacactggctcgccagggctacccacggatggcgttctccgcctgctttggcggcatcatcttcaacatcctcgtgggtgtggggctgggctgcctgctccagatctcccgaagccacacagaagtgaagctggagccagacggactgctggtgtgggtcctggcaggcgccctggggctcagcctcgtcttctccctggtctcagtcccattgcagtgcttccagctcagcagagtctatggcttctgcctgctcctcttctacctgaacttccttgtcgtggccctcctcactgaatttggagtgattcacctgaaaagcatgtgactgaagccgcttagtgctgtggcctcactgcaggcaggagccccgcccctcctgccgggggaggcccagggaccggagcatttctgcaaggcccttgtgggcacgagagtgcggcccttgctgctggagatctgaggtcactgctgtgagctgggagaactgctgtgtacctcttgctgccagcacccaacagccttgccgtggggaccttggaaacctggctttgctctggacaaagggttccagagagaagctagaagtcccccttgaatgacccccagagcccctctgagaagggctggagtttgggggaaggggatggctggatgtgctccaggccatgctggaggtacccccgaggcacaggcactgcccgttccccttgcctgggcttcaggccttctggcaccttctcaggacacaagtggctgcccaaccctgactcagagaatgagggtggcttggacccctgggaatcaggccgccgagggctgagctccagagccgcaccatctgccacaaacagaattcgagacatacttaattttgaatttctccttgccacgttaataaagccaaaagcagcgggtgct

SEQ ID NO: 85050 - DNA, 3376 bp, Homo sapiens
ggaagagtaggggcccggacgctgcagcaggcggggcacccggactggcggcttcgctggcgcaaggtcggtccggcggccaggacctggaaggctgcgaggccctgcgaggtcgaggttcggagtttgctggtcccaggcccggcccgaggtaagaaagagccgcctccccgcacggccggaggacccgggcgccccgagttcgacttctcagcctccgtccggacgggaaacggagcacggagatgttcctgaggtctctttcctgggaagcgcagccccgatttcccgcccctgtcccttagcaggtcggcgaccatccgagcgctgggcatcggcccacgcgtacagaaggcgctcaataaatgctcactagtgaatcagtaaaataaatcggcagcaaagagagacgagacgcatgctgatcttcaggtgttggggacatcagggacgcgaacatttattgagctcttattgtataccgcgtcggccagcatttgtgtccatttcacacatgaggaataagaggcccagagaggtgaagtgacttccttaaggccacacagatagtaagtggccgagacgaatttgaaaccaggggtgtcctgtttgaacttggtgccaaatagagtaactcggactccagttggaggggttcgggagaaccatagaagaggaagggccgtgtcttccgtggacaggccaccggagccgccagctgtttggaactgagctactgcagaaagggaagtggagagtaagggccaggccccgtgggggcagatggccggcagaaggctgaatctgcgctgggcactgagtgtgctttgtgtgctgctaatggcggagacagtgtctgggactaggggctcgtctacaggagctcacattagcccccagtttccagcttcaggtgtgaaccagacccccgtggtagactgccgcaaggtgtgtggcctgaatgtctctgaccgctgtgacttcatccggaccaaccctgactgccacagtgatggggggtacctggactacctggaaggcatcttctgccacttccctcccagcctcctccctctggctgtcactctctacgtttcctggctgctctacctgtttctgattctgggagtcaccgcagccaagtttttctgccccaacttgtcggccatttctaccacactgaagctctcccacaacgtggcaggcgtcaccttcctggcatttgggaatggtgcacctgacatcttcagtgccctggtggccttctctgacccgcacacagccggcctggcccttggggcactgtttggttacctgggcttgtatgtgttctatgtggtcactgtgattctctgcacctggatctaccaacggcaacggagaggatctctgttctgccccatgccagttactccagagatcctctcagactccgaggaggaccgggtatcttctaataccaacagctatgactacggtgatgagtaccggccgctgttcttctaccaggagaccacggctcagatcctggtccgggccctcaatcccctggattacatgaagtggagaaggaaatcagcatactggaaagccctcaaggtgttcaagctgcctgtggagttcctgctgctcctcacagtccccgtcgtggacccggacaaggatgaccagaactggaaacggcccctcaactgtctgcatctggttatcagccccctggttgtggtcctgaccctgcagtcggggacctatggtgtctatgagataggcggcctcgttcccgtctgggtcgtggtggtgatcgcaggcacagccttggcttcagtgaccttttttgccacatctgacagccagccccccaggcttcactggctctttgctttcctgggctttctgaccagcgccctgtggatcaacgcggccgccacagaggtggtgaacatcttgcggtccctgggtgtggtcttccggctgagcaacactgtgctggggctcacgctgctggcctgggggaacagcattggagatgccttctcggatttcacactggctcgccagggctacccacggatggcgttctccgcctgctttggcggcatcatcttcaacatcctcgtgggtgtggggctgggctgcctgctccagatctcccgaagccacacagaagtgaagctggagccagacggactgctggtgtgggtcctggcaggcgccctggggctcagcctcgtcttctccctggtctcagtcccattgcagtgcttccagctcagcagagtctatggcttctgcctgctcctcttctacctgaacttccttgtcgtggccctcctcactgaatttggagtgattcacctgaaaagcatgtgactgaagccgcttagtgctgtggcctcactgcaggcaggagccccgcccctcctgccgggggaggcccagggaccggagcatttctgcaaggcccttgtgggcacgagagtgcggcccttgctgctggagatctgaggtcactgctgtgagctgggagaactgctgtgtacctcttgctgccagcacccaacagccttgccgtggggaccttggaaacctggctttgctctggacaaagggttccagagagaagctagaagtcccccttgaatgacccccagagcccctctgagaagggctggagtttgggggaaggggatggctggatgtgctccaggccatgctggaggtacccccgaggcacaggcactgcccgttccccttgcctgggcttcaggccttctggcaccttctcaggacacaagtggctgcccaaccctgactcagagaatgagggtggcttggacccctgggaatcaggccgccgagggctgagctccagagccgcaccatctgccacaaacagaattcgagacatacttaattttgaatttctccttgccacgttaataaagccaaaagcagcgggtgctattcgtggcaacacacttcactgaacccacttgcttccaaaacgatgccagcccgaggcactgctacgccagcagctgccacatgggatggtggctcaggcgctccctccaggattctgcccctgcctgtccacagactcctttgtgctggaacctgggctcctccagctgccaggcaggagtcggtaggactgtgcctgtgcctccctcagcggggccctgggcggggttccaaggcctgcgagctgggaaaggacagatgaggggacctcgtgccttcttgctgtcatgcaatgaccccgccttatgttgccgaaataagcaactcttaggtttgcctgactgccttatgctggtaaagaaaagggattcaactgtctcttttccaaataaaaaaaaagtcaaaatttcaa

SEQ ID NO: 85051 - DNA, 2555 bp, Homo sapiens
ggaagagtaggggcccggacgctgcagcaggcggggcacccggactggcggcttcgctggcgcaaggtcggtccggcggccaggacctggaaggctgcgaggccctgcgaggtcgaggttcggagtttgctggtcccaggcccggcccgaggccaccggagccgccagctgtttggaactgagctactgcagaaagggaagtggagagtaagggccaggccccgtgggggcagatggccggcagaaggctgaatctgcgctgggcactgagtgtgctttgtgtgctgctaatggcggagacagtgtctgggactaggggctcgtctacaggagctcacattagcccccagtttccagcttcagtgccgcaaggtgtgtggcctgaatgtctctgaccgctgtgacttcatccggaccaaccctgactgccacagtgatggggggtacctggactacctggaaggcatcttctgccacttccctcccagcctcctccctctggctgtcactctctacgtttcctggctgctctacctgtttctgattctgggagtcaccgcagccaagtttttctgccccaacttgtcggccatttctaccacactgaagctctcccacaacgtggcaggcgtcaccttcctggcatttgggaatggtgcacctgacatcttcagtgccctggtggccttctctgacccgcacacagccggcctggcccttggggcactgtttggcgctggcgtgctggttaccacagtggtggccggaggcattaccatcctacaccccttcatggctgcctccaggcccttcttcagggacatcgttttctacatggtggctgtgttcctgaccttcctcatgctcttccgtggcagggtcaccctggcatgggctctgggttacctgggcttgtatgtgttctatgtggtcactgtgattctctgcacctggatctaccaacggcaacggagaggatctctgttctgccccatgccagttactccagagatcctctcagactccgaggaggaccgggtatcttctaataccaacagctatgactacggtgatgagtaccggccgctgttcttctaccaggagaccacggctcagatcctggtccgggccctcaatcccctggattacatgaagtggagaaggaaatcagcatactggaaagccctcaaggtgttcaagctgcctgtggagttcctgctgctcctcacagtccccgtcgtggacccggacaaggatgaccagaactggaaacggcccctcaactgtctgcatctggttatcagccccctggttgtggtcctgaccctgcagtcggggacctatggtgtctatgagataggcggcctcgttcccgtctgggtcgtggtggtgatcgcaggcacagccttggcttcagtgaccttttttgccacatctgacagccagccccccaggcttcactggctctttgctttcctgggctttctgaccagcgccctgtggatcaacgcggccgccacagaggtggtgaacatcttgcggtccctgggtgtggtcttccggctgagcaacactgtgctggggctcacgctgctggcctgggggaacagcattggagatgccttctcggatttcacactggctcgccagggctacccacggatggcgttctccgcctgctttggcggcatcatcttcaacatcctcgtgggtgtggggctgggctgcctgctccagatctcccgaagccacacagaagtgaagctggagccagacggactgctggtgtgggtcctggcaggcgccctggggctcagcctcgtcttctccctggtctcagtcccattgcagtgcttccagctcagcagagtctatggcttctgcctgctcctcttctacctgaacttccttgtcgtggccctcctcactgaatttggagtgattcacctgaaaagcatgtgactgaagccgcttagtgctgtggcctcactgcaggcaggagccccgcccctcctgccgggggaggcccagggaccggagcatttctgcaaggcccttgtgggcacgagagtgcggcccttgctgctggagatctgaggtcactgctgtgagctgggagaactgctgtgtacctcttgctgccagcacccaacagccttgccgtggggaccttggaaacctggctttgctctggacaaagggttccagagagaagctagaagtcccccttgaatgacccccagagcccctctgagaagggctggagtttgggggaaggggatggctggatgtgctccaggccatgctggaggtacccccgaggcacaggcactgcccgttccccttgcctgggcttcaggccttctggcaccttctcaggacacaagtggctgcccaaccctgactcagagaatgagggtggcttggacccctgggaatcaggccgccgagggctgagctccagagccgcaccatctgccacaaacagaattcgagacatacttaattttgaatttctccttgccacgttaataaagccaaaagcagcgggtgct

SEQ ID NO: 85052 - DNA, 2943 bp, Homo sapiens
ggaagagtaggggcccggacgctgcagcaggcggggcacccggactggcggcttcgctggcgcaaggtcggtccggcggccaggacctggaaggctgcgaggccctgcgaggtcgaggttcggagtttgctggtcccaggcccggcccgaggtaagaaagagccgcctccccgcacggccggaggacccgggcgccccgagttcgacttctcagcctccgtccggacgggaaacggagcacggagatgttcctgaggtctctttcctgggaagcgcagccccgatttcccgcccctgtcccttagcaggtcggcgaccatccgagcgctgggcatcggcccacgcgtacagaaggcgctcaataaatgctcactagtgaatcagtaaaataaatcggcagcaaagagagacgagacgcatgctgatcttcaggtgttggggacatcagggacgcgaacatttattgagctcttattgtataccgcgtcggccagcatttgtgtccatttcacacatgaggaataagaggcccagagaggtgaagtgacttccttaaggccacacagatagtaagtggccgagacgaatttgaaaccaggggtgtcctgtttgaacttggtgccaaatagagtaactcggactccagttggaggggttcgggagaaccatagaagaggaagggccgtgtcttccgtggacaggccaccggagccgccagctgtttggaactgagctactgcagaaagggaagtggagagtaagggccaggccccgtgggggcagatggccggcagaaggctgaatctgcgctgggcactgagtgtgctttgtgtgctgctaatggcggagacagtgtctgggactaggggctcgtctacaggagctcacattagcccccagtttccagcttcaggtgtgaaccagacccccgtggtagactgccgcaaggtgtgtggcctgaatgtctctgaccgctgtgacttcatccggaccaaccctgactgccacagtgatggggggtacctggactacctggaaggcatcttctgccacttccctcccagcctcctccctctggctgtcactctctacgtttcctggctgctctacctgtttctgattctgggagtcaccgcagccaagtttttctgccccaacttgtcggccatttctaccacactgaagctctcccacaacgtggcaggcgtcaccttcctggcatttgggaatggtgcacctgacatcttcagtgccctggtggccttctctgacccgcacacagccggcctggcccttggggcactgtttggcgctggcgtgctggttaccacagtggtggccggaggcattaccatcctacaccccttcatggctgcctccaggcccttcttcagggacatcgttttctacatggtggctgtgttcctgaccttcctcatgctcttccgtggcagggtcaccctggcatgggctctgggttacctgggcttgtatgtgttctatgtggtcactgtgattctctgcacctggatctaccaacggcaacggagaggatctctgttctgccccatgccagttactccagagatcctctcagactccgaggaggaccgggtatcttctaataccaacagctatgactacggtgatgagtaccggccgctgttcttctaccaggagaccacggctcagatcctggtccgggccctcaatcccctggattacatgaagtggagaaggaaatcagcatactggaaagccctcaaggtgttcaagctgcctgtggagttcctgctgctcctcacagtccccgtcgtggacccggacaaggatgaccagaactggaaacggcccctcaactgtctgcatctggttatcagccccctggttgtggtcctgaccctgcagtcggggacctatggtgtctatgagataggcggcctcgttcccgtctgggtcgtggtggtgatcgcaggcacagccttggcttcagtgaccttttttgccacatctgacagccagccccccaggcttcactggctctttgctttcctgggctttctgaccagcgccctgtggatcaacgcggccgccacagaggtggtgaacatcttgcggtccctgggtgtggtcttccggctgagcaacactgtgctggggctcacgctgctggcctgggggaacagcattggagatgccttctcggatttcacactggctcgccagggctacccacggatggcgttctccgcctgctttggcggcatcatcttcaacatcctcgtgggtgtggggctgggctgcctgctccagatctcccgaagccacacagaagtgaagctggagccagacggactgctggtgtgggtcctggcaggcgccctggggctcagcctcgtcttctccctggtctcagtcccattgcagtgcttccagctcagcagagtctatggcttctgcctgctcctcttctacctgaacttccttgtcgtggccctcctcactgaatttggagtgattcacctgaaaagcatgtgactgaagccgcttagtgctgtggcctcactgcaggcaggagccccgcccctcctgccgggggaggcccagggaccggagcatttctgcaaggcccttgtgggcacgagagtgcggcccttgctgctggagatctgaggtcactgctgtgagctgggagaactgctgtgtacctcttgctgccagcacccaacagccttgccgtggggaccttggaaacctggctttgctctggacaaagggttccagagagaagctagaagtcccccttgaatgacccccagagcccctctgagaagggctggagtttgggggaaggggatggctggatgtgctccaggccatgctggaggtcctccggtgacacagaatttacgtttccacttactgggctttgggcctactggt

SEQ ID NO: 85053 - DNA, 1800 bp, Homo sapiens
ggcgtgggtgaatcggccgaggaggtgtcaagctgcctgtggagttcctgctgctcctcacagtccccgtcgtggacccggacaaggatgaccagaactggaaacggcccctcaactgtctgcatctggttatcagccccctggttgtggtcctgaccctgcagtcggggacctatggtgtctatgagataggcggcctcgttcccgtctgggtcgtggtggtgatcgcaggcacagccttggcttcagtgaccttttttgccacatctgacagccagccccccaggcttcactggctctttgctttcctgggctttctgaccagcgccctgtggatcaacgcggccgccacagaggtggtgaacatcttgcggtccctgggtgtggtcttccggctgagcaacactgtgctggggctcacgctgctggcctgggggaacagcattggagatgccttctcggatttcacactggctcgccagggctacccacggatggcgttctccgcctgctttggcggcatcatcttcaacatcctcgtgggtgtggggctgggctgcctgctccagatctcccgaagccacacagaagtgaagctggagccagacggactgctggtgtgggtcctggcaggcgccctggggctcagcctcgtcttctccctggtctcagtcccattgcagtgcttccagctcagcagagtctatggcttctgcctgctcctcttctacctgaacttccttgtcgtggccctcctcactgaatttggagtgattcacctgaaaagcatgtgactgaagccgcttagtgctgtggcctcactgcaggcaggagccccgcccctcctgccgggggaggcccagggaccggagcatttctgcaaggcccttgtgggcacgagagtgcggcccttgctgctggagatctgaggtcactgctgtgagctgggagaactgctgtgtacctcttgctgccagcacccaacagccttgccgtggggaccttggaaacctggctttgctctggacaaagggttccagagagaagctagaagtcccccttgaatgacccccagagcccctctgagaagggctggagtttgggggaaggggatggctggatgtgctccaggccatgctggaggtacccccgaggcacaggcactgcccgttccccttgcctgggcttcaggccttctggcaccttctcaggacacaagtggctgcccaaccctgactcagagaatgagggtggcttggacccctgggaatcaggccgccgagggctgagctccagagccgcaccatctgccacaaacagaattcgagacatacttaattttgaatttctccttgccacgttaataaagccaaaagcagcgggtgctattcgtggcaacacacttcactgaacccacttgcttccaaaacgatgccagcccgaggcactgctacgccagcagctgccacatgggatggtggctcaggcgctccctccaggattctgcccctgcctgtccacagactcctttgtgctggaacctgggctcctccagctgccaggcaggagtcggtaggactgtgcctgtgcctccctcagcggggccctgggcggggttccaaggcctgcgagctgggaaaggacagatgaggggacctcgtgccttcttgctgtcatgcaatgaccccgccttatgttgccgaaataagcaactcttaggtttgcctgactgccttatgctggtaaagaaaagggattcaactgtctcttttccaaataaaaaaaaagtcaaaatttcaa

SEQ ID NO: 85054 - DNA, 654 bp, Homo sapiens
gtgactcagcctctctcccctcattcttccacagctgggcttcaggccttctggcaccttctcaggacacaagtggctgcccaaccctgactcagagaatgagggtggcttggacccctgggaatcaggccgccgagggctgagctccagagccgcaccatctgccacaaacagaattcgagacatacttaattttgaatttctccttgccacgttaataaagccaaaagcagcgggtgctattcgtggcaacacacttcactgaacccacttgcttccaaaacgatgccagcccgaggcactgctacgccagcagctgccacatgggatggtggctcaggcgctccctccaggattctgcccctgcctgtccacagactcctttgtgctggaacctgggctcctccagctgccaggcaggagtcggtaggactgtgcctgtgcctccctcagcggggccctgggcggggttccaaggcctgcgagctgggaaaggacagatgaggggacctcgtgccttcttgctgtcatgcaatgaccccgccttatgttgccgaaataagcaactcttaggtttgcctgactgccttatgctggtaaagaaaagggattcaactgtctcttttccaaataaaaaaaaagtcaaaatttcaa

SEQ ID NO: 85055 - DNA, 293 bp, Homo sapiens
ctggctcgccagggctacccacggatggcgttctccgcctgctttggcggcatcatcttcagtatcctttgtggtctgttcttggccttagcactggtgtcacagccgtgggtggggtgtgctccatgccccaccctggggattggttctcggtgtaacacctggggcaggtaatgtggctgcctgagcctcaggctccaaggctttaaaatagggatttggggagtgctaacctccaagtggtgttgtaaggatccagtgaggtgaatgaaattcttggcccctggtaaggg

SEQ ID NO: 85056 - DNA, 3544 bp, Homo sapiens
ggaagagtaggggcccggacgctgcagcaggcggggcacccggactggcggcttcgctggcgcaaggtcggtccggcggccaggacctggaaggctgcgaggccctgcgaggtcgaggttcggagtttgctggtcccaggcccggcccgaggtaagaaagagccgcctccccgcacggccggaggacccgggcgccccgagttcgacttctcagcctccgtccggacgggaaacggagcacggagatgttcctgaggtctctttcctgggaagcgcagccccgatttcccgcccctgtcccttagcaggtcggcgaccatccgagcgctgggcatcggcccacgcgtacagaaggcgctcaataaatgctcactagtgaatcagtaaaataaatcggcagcaaagagagacgagacgcatgctgatcttcaggtgttggggacatcagggacgcgaacatttattgagctcttattgtataccgcgtcggccagcatttgtgtccatttcacacatgaggaataagaggcccagagaggtgaagtgacttccttaaggccacacagatagtaagtggccgagacgaatttgaaaccaggggtgtcctgtttgaacttggtgccaaatagagtaactcggactccagttggaggggttcgggagaaccatagaagaggaagggccgtgtcttccgtggacaggccaccggagccgccagctgtttggaactgagctactgcagaaagggaagtggagagtaagggccaggccccgtgggggcagatggccggcagaaggctgaatctgcgctgggcactgagtgtgctttgtgtgctgctaatggcggagacagtgtctgggactaggggctcgtctacaggagctcacattagcccccagtttccagcttcaggtgtgaaccagacccccgtggtagactgccgcaaggtgtgtggcctgaatgtctctgaccgctgtgacttcatccggaccaaccctgactgccacagtgatggggggtacctggactacctggaaggcatcttctgccacttccctcccagcctcctccctctggctgtcactctctacgtttcctggctgctctacctgtttctgattctgggagtcaccgcagccaagtttttctgccccaacttgtcggccatttctaccacactgaagctctcccacaacgtggcaggcgtcaccttcctggcatttgggaatggtgcacctgacatcttcagtgccctggtggccttctctgacccgcacacagccggcctggcccttggggcactgtttggcgctggcgtgctggttaccacagtggtggccggaggcattaccatcctacaccccttcatggctgcctccaggcccttcttcagggacatcgttttctacatggtggctgtgttcctgaccttcctcatgctcttccgtggcagggtcaccctggcatgggctctgggttacctgggcttgtatgtgttctatgtggtcactgtgattctctgcacctggatctaccaacggcaacggagaggatctctgttctgccccatgccagttactccagagatcctctcagactccgaggaggaccgggtatcttctaataccaacagctatgactacggtgatgagtaccggccgctgttcttctaccaggagaccacggctcagatcctggtccgggccctcaatcccctggattacatgaagtggagaaggaaatcagcatactggaaagccctcaaggtgttcaagctgcctgtggagttcctgctgctcctcacagtccccgtcgtggacccggacaaggatgaccagaactggaaacggcccctcaactgtctgcatctggttatcagccccctggttgtggtcctgaccctgcagtcggggacctatggtgtctatgagataggcggcctcgttcccgtctgggtcgtggtggtgatcgcaggcacagccttggcttcagtgaccttttttgccacatctgacagccagccccccaggcttcactggctctttgctttcctgggctttctgaccagcgccctgtggatcaacgcggccgccacagaggtggtgaacatcttgcggtccctgggtgtggtcttccggctgagcaacactgtgctggggctcacgctgctggcctgggggaacagcattggagatgccttctcggatttcacactggctcgccagggctacccacggatggcgttctccgcctgctttggcggcatcatcttcaacatcctcgtgggtgtggggctgggctgcctgctccagatctcccgaagccacacagaagtgaagctggagccagacggactgctggtgtgggtcctggcaggcgccctggggctcagcctcgtcttctccctggtctcagtcccattgcagtgcttccagctcagcagagtctatggcttctgcctgctcctcttctacctgaacttccttgtcgtggccctcctcactgaatttggagtgattcacctgaaaagcatgtgactgaagccgcttagtgctgtggcctcactgcaggcaggagccccgcccctcctgccgggggaggcccagggaccggagcatttctgcaaggcccttgtgggcacgagagtgcggcccttgctgctggagatctgaggtcactgctgtgagctgggagaactgctgtgtacctcttgctgccagcacccaacagccttgccgtggggaccttggaaacctggctttgctctggacaaagggttccagagagaagctagaagtcccccttgaatgacccccagagcccctctgagaagggctggagtttgggggaaggggatggctggatgtgctccaggccatgctggaggtacccccgaggcacaggcactgcccgttccccttgcctgggcttcaggccttctggcaccttctcaggacacaagtggctgcccaaccctgactcagagaatgagggtggcttggacccctgggaatcaggccgccgagggctgagctccagagccgcaccatctgccacaaacagaattcgagacatacttaattttgaatttctccttgccacgttaataaagccaaaagcagcgggtgctattcgtggcaacacacttcactgaacccacttgcttccaaaacgatgccagcccgaggcactgctacgccagcagctgccacatgggatggtggctcaggcgctccctccaggattctgcccctgcctgtccacagactcctttgtgctggaacctgggctcctccagctgccaggcaggagtcggtaggactgtgcctgtgcctccctcagcggggccctgggcggggttccaaggcctgcgagctgggaaaggacagatgaggggacctcgtgccttcttgctgtcatgcaatgaccccgccttatgttgccgaaataagcaactcttaggtttgcctgactgccttatgctggtaaagaaaagggattcaactgtctcttttccaaataaaaaaaaagtcaaaatttcaa

SEQ ID NO: 85057 - DNA, 3974 bp, Homo sapiens
ggaagagtaggggcccggacgctgcagcaggcggggcacccggactggcggcttcgctggcgcaaggtcggtccggcggccaggacctggaaggctgcgaggccctgcgaggtcgaggttcggagtttgctggtcccaggcccggcccgaggtaagaaagagccgcctccccgcacggccggaggacccgggcgccccgagttcgacttctcagcctccgtccggacgggaaacggagcacggagatgttcctgaggtctctttcctgggaagcgcagccccgatttcccgcccctgtcccttagcaggtcggcgaccatccgagcgctgggcatcggcccacgcgtacagaaggcgctcaataaatgctcactagtgaatcagtaaaataaatcggcagcaaagagagacgagacgcatgctgatcttcaggtgttggggacatcagggacgcgaacatttattgagctcttattgtataccgcgtcggccagcatttgtgtccatttcacacatgaggaataagaggcccagagaggtgaagtgacttccttaaggccacacagatagtaagtggccgagacgaatttgaaaccaggggtgtcctgtttgaacttggtgccaaatagagtaactcggactccagttggaggggttcgggagaaccatagaagaggaagggccgtgtcttccgtggacaggccaccggagccgccagctgtttggaactgagctactgcagaaagggaagtggagagtaagggccaggccccgtgggggcagatggccggcagaaggctgaatctgcgctgggcactgagtgtgctttgtgtgctgctaatggcggagacagtgtctgggactaggggctcgtctacaggagctcacattagcccccagtttccagcttcaggtgtgaaccagacccccgtggtagactgccgcaaggtgtgtggcctgaatgtctctgaccgctgtgacttcatccggaccaaccctgactgccacagtgatggggggtacctggactacctggaaggcatcttctgccacttccctcccagcctcctccctctggctgtcactctctacgtttcctggctgctctacctgtttctgattctgggagtcaccgcagccaagtttttctgccccaacttgtcggccatttctaccacactgaagctctcccacaacgtggcaggcgtcaccttcctggcatttgggaatggtgcacctgacatcttcagtgccctggtggccttctctgacccgcacacagccggcctggcccttggggcactgtttggcgctggcgtgctggttaccacagtggtggccggaggcattaccatcctacaccccttcatggctgcctccaggcccttcttcagggacatcgttttctacatggtggctgtgttcctgaccttcctcatgctcttccgtggcagggtcaccctggcatgggctctgggttacctgggcttgtatgtgttctatgtggtcactgtgattctctgcacctggatctaccaacggcaacggagaggatctctgttctgccccatgccagttactccagagatcctctcagactccgaggaggaccgggtatcttctaataccaacagctatgactacggtgatgagtaccggccgctgttcttctaccaggagaccacggctcagatcctggtccgggccctcaatcccctggattacatgaagtggagaaggaaatcagcatactggaaagccctcaaggtgttcaagctgcctgtggagttcctgctgctcctcacagtccccgtcgtggacccggacaaggatgaccagaactggaaacggcccctcaactgtctgcatctggttatcagccccctggttgtggtcctgaccctgcagtcggggacctatggtgtctatgagataggcggcctcgttcccgtctgggtcgtggtggtgatcgcaggcacagccttggcttcagtgaccttttttgccacatctgacagccagccccccaggcttcactggctctttgctttcctgggctttctgaccagcgccctgtggatcaacgcggccgccacagaggtggtgaacatcttgcggtccctgggtgtggtcttccggctgagcaacactgtgctggggctcacgctgctggcctgggggaacagcattggagatgccttctcggatttcacactggctcgccagggctacccacggatggcgttctccgcctgctttggcggcatcatcttcaacatcctcgtgggtgtggggctgggctgcctgctccagatctcccgaagccacacagaagtgaagctggagccagacggactgctggtgtgggtcctggcaggcgccctggggctcagcctcgtcttctccctggtctcagtcccattgcagtgcttccagctcagcagagtctatggcttctgcctgctcctcttctacctgaacttccttgtcgtggccctcctcactgaatttggagtgattcacctgaaaagcatgtgactgaagccgcttagtgctgtggcctcactgcaggcaggagccccgcccctcctgccgggggaggcccagggaccggagcatttctgcaaggcccttgtgggcacgagagtgcggcccttgctgctggagatctgaggtcactgctgtgagctgggagaactgctgtgtacctcttgctgccagcacccaacagccttgccgtggggaccttggaaacctggctttgctctggacaaagggttccagagagaagctagaagtcccccttgaatgacccccagagcccctctgagaagggctggagtttgggggaaggggatggctggatgtgctccaggccatgctggaggtacccccgaggcacaggcactgcccgttccccttgcctgggcttcaggccttctggcaccttctcaggacacaagtggctgcccaaccctgactcagagaatgagggtggcttggacccctgggaatcaggccgccgagggctgagctccagagccgcaccatctgccacaaacagaattcgagacatacttaattttgaatttctccttgccacgttaataaagccaaaagcagcgggtgctattcgtggcaacacacttcactgaacccacttgcttccaaaacgatgccagcccgaggcactgctacgccagcagctgccacatgggatggtggctcaggcgctccctccaggattctgcccctgcctgtccacagactcctttgtgctggaacctgggctcctccagctgccaggcaggagtcggtaggactgtgcctgtgcctccctcagcggggccctgggcggggttccaaggcctgcgagctgggaaaggacagatgaggggacctcgtgccttcttgctgtcatgcaatgaccccgccttatgttgccgaaataagcaactcttaggtttgcctgactgccttatgctggtaaagaaaagggattcaactgtctcttttccaaataaaaaaaaagtcaaaatttcaaaaaaaaaaaaaaaaaaaaaaaaaaaaaaaaaaaaaaaaaaaaaaaaaaaaaaaaaaaaaaaaaaaaaagccagcaacaaaaaacaaacacaacaccacagaggaccacaaaaagagaggggcggcggacagaacacactggcgcgcaagccgagacgccccacacactctagacagggggccccatcggcgcaccaccaaaacaccacacgcggcgacgcccacaaaaccgcaccagaagagaaagaaaacacacacacacgcgcaataggagacaccagcaccacacagcgggggggacagcaaataagaagcccaccaccacaaaacaagaggacaccccgcaggaaaacccaaacccccccgaaatcacggagcacaccacgcacaacagcgaggcaaagcgaccgcacgtacaatgataggaatac

SEQ ID NO: 85058 - DNA, 3443 bp, Homo sapiens
ggaagagtaggggcccggacgctgcagcaggcggggcacccggactggcggcttcgctggcgcaaggtcggtccggcggccaggacctggaaggctgcgaggccctgcgaggtcgaggttcggagtttgctggtcccaggcccggcccgaggtaagaaagagccgcctccccgcacggccggaggacccgggcgccccgagttcgacttctcagcctccgtccggacgggaaacggagcacggagatgttcctgaggtctctttcctgggaagcgcagccccgatttcccgcccctgtcccttagcaggtcggcgaccatccgagcgctgggcatcggcccacgcgtacagaaggcgctcaataaatgctcactagtgaatcagtaaaataaatcggcagcaaagagagacgagacgcatgctgatcttcaggtgttggggacatcagggacgcgaacatttattgagctcttattgtataccgcgtcggccagcatttgtgtccatttcacacatgaggaataagaggcccagagaggtgaagtgacttccttaaggccacacagatagtaagtggccgagacgaatttgaaaccaggggtgtcctgtttgaacttggtgccaaatagagtaactcggactccagttggaggggttcgggagaaccatagaagaggaagggccgtgtcttccgtggacaggccaccggagccgccagctgtttggaactgagctactgcagaaagggaagtggagagtaagggccaggccccgtgggggcagatggccggcagaaggctgaatctgcgctgggcactgagtgtgctttgtgtgctgctaatggcggagacagtgtctgggactaggggctcgtctacaggagctcacattagcccccagtttccagcttcaggtgtgaaccagacccccgtggtagactgccgcaaggtgtgtggcctgaatgtctctgaccgctgtgacttcatccggaccaaccctgactgccacagtgatggggggtacctggactacctggaaggcatcttctgccacttccctcccagcctcctccctctggctgtcactctctacgtttcctggctgctctacctgtttctgattctgggagtcaccgcagccaagtttttctgccccaacttgtcggccatttctaccacactgaagctctcccacaacgtggcaggcgtcaccttcctggcatttgggaatggtgcacctgacatcttcagtgccctggtggccttctctgacccgcacacagccggcctggcccttggggcactgtttggcgctggcgtgctggttaccacagtggtggccggaggcattaccatcctacaccccttcatggctgcctccaggcccttcttcagggacatcgttttctacatggtggctgtgttcctgaccttcctcatgctcttccgtggcagggtcaccctggcatgggctctgggttacctgggcttgtatgtgttctatgtggtcactgtgattctctgcacctggatctaccaacggcaacggagaggatctctgttctgccccatgccagttactccagagatcctctcagactccgaggaggaccgggtatcttctaataccaacagctatgactacggtgatgagtaccggccgctgttcttctaccaggagaccacggctcagatcctggtccgggccctcaatcccctggattacatgaagtggagaaggaaatcagcatactggaaagccctcaaggtgttcaagctgcctgtggagttcctgctgctcctcacagtccccgtcgtggacccggacaaggatgaccagaactggaaacggcccctcaactgtctgcatctggttatcagccccctggttgtggtcctgaccctgcagtcggggacctatggtgtctatgagataggcggcctcgttcccgtctgggtcgtggtggtgatcgcaggcacagccttggcttcagtgaccttttttgccacatctgacagccagccccccaggcttcactggctctttgctttcctgggctttctgaccagcgccctgtggatcaacgcggccgccacagaggtggtgaacatcttgcggtccctgggtgtggtcttccggctgagcaacactgtgctggggctcacgctgctggcctgggggaacagcattggagatgccttctcggatttcacactggctcgccagggctacccacggatggcgttctccgcctgctttggcggcatcatcttcaacatcctcgtgggtgtggggctgggctgcctgctccagattcccattgcagtgcttccagctcagcagagtctatggcttctgcctgctcctcttctacctgaacttccttgtcgtggccctcctcactgaatttggagtgattcacctgaaaagcatgtgactgaagccgcttagtgctgtggcctcactgcaggcaggagccccgcccctcctgccgggggaggcccagggaccggagcatttctgcaaggcccttgtgggcacgagagtgcggcccttgctgctggagatctgaggtcactgctgtgagctgggagaactgctgtgtacctcttgctgccagcacccaacagccttgccgtggggaccttggaaacctggctttgctctggacaaagggttccagagagaagctagaagtcccccttgaatgacccccagagcccctctgagaagggctggagtttgggggaaggggatggctggatgtgctccaggccatgctggaggtacccccgaggcacaggcactgcccgttccccttgcctgggcttcaggccttctggcaccttctcaggacacaagtggctgcccaaccctgactcagagaatgagggtggcttggacccctgggaatcaggccgccgagggctgagctccagagccgcaccatctgccacaaacagaattcgagacatacttaattttgaatttctccttgccacgttaataaagccaaaagcagcgggtgctattcgtggcaacacacttcactgaacccacttgcttccaaaacgatgccagcccgaggcactgctacgccagcagctgccacatgggatggtggctcaggcgctccctccaggattctgcccctgcctgtccacagactcctttgtgctggaacctgggctcctccagctgccaggcaggagtcggtaggactgtgcctgtgcctccctcagcggggccctgggcggggttccaaggcctgcgagctgggaaaggacagatgaggggacctcgtgccttcttgctgtcatgcaatgaccccgccttatgttgccgaaataagcaactcttaggtttgcctgactgccttatgctggtaaagaaaagggattcaactgtctcttttccaaataaaaaaaaagtcaaaatttcaa

SEQ ID NO: 85059 - DNA, 2572 bp, Homo sapiens
ggaagagtaggggcccggacgctgcagcaggcggggcacccggactggcggcttcgctggcgcaaggtcggtccggcggccaggacctggaaggctgcgaggccctgcgaggtcgaggttcggagtttgctggtcccaggcccggcccgaggtaagaaagagccgcctccccgcacggccggaggacccgggcgccccgagttcgacttctcagcctccgtccggacgggaaacggagcacggagatgttcctgaggtctctttcctgggaagcgcagccccgatttcccgcccctgtcccttagcaggtcggcgaccatccgagcgctgggcatcggcccacgcgtacagaaggcgctcaataaatgctcactagtgaatcagtaaaataaatcggcagcaaagagagacgagacgcatgctgatcttcaggtgttggggacatcagggacgcgaacatttattgagctcttattgtataccgcgtcggccagcatttgtgtccatttcacacatgaggaataagaggcccagagaggtgaagtgacttccttaaggccacacagatagtaagtggccgagacgaatttgaaaccaggggtgtcctgtttgaacttggtgccaaatagagtaactcggactccagttggaggggttcgggagaaccatagaagaggaagggccgtgtcttccgtggacaggccaccggagccgccagctgtttggaactgagctactgcagaaagggaagtggagagtaagggccaggccccgtgggggcagatggccggcagaaggctgaatctgcgctgggcactgagtgtgctttgtgtgctgctaatggcggagacagtgtctgggactaggggctcgtctacaggagctcacattagcccccagtttccagcttcaggtgtgaaccagacccccgtggtagactgccgcaaggtgtgtggcctgaatgtctctgaccgctgtgacttcatccggaccaaccctgactgccacagtgatggggggtacctggactacctggaaggcatcttctgccacttccctcccagcctcctccctctggctgtcactctctacgtttcctggctgctctacctgtttctgattctgggagtcaccgcagccaagtttttctgccccaacttgtcggccatttctaccacactgaagctctcccacaacgtggcaggcgtcaccttcctggcatttgggaatggtgcacctgacatcttcagtgccctggtggccttctctgacccgcacacagccggcctggcccttggggcactgtttggcgctggcgtgctggttaccacagtggtggccggaggcattaccatcctacaccccttcatggctgcctccaggcccttcttcagggacatcgttttctacatggtggctgtgttcctgaccttcctcatgctcttccgtggcagggtcaccctggcatgggctctgggttacctgggcttgtatgtgttctatgtggtcactgtgattctctgcacctggatctaccaacggcaacggagaggatctctgttctgccccatgccagttactccagagatcctctcagactccgaggaggaccgggtatcttctaataccaacagctatgactacggtgatgagtaccggccgctgttcttctaccaggagaccacggctcagatcctggtccgggccctcaatcccctggattacatgaagtggagaaggaaatcagcatactggaaagccctcaaggtgttcaagctgcctgtggagttcctgctgctcctcacagtccccgtcgtggacccggacaaggatgaccagaactggaaacggcccctcaactgtctgcatctggttatcagccccctggttgtggtcctgaccctgcagtcggggacctatggtgtctatgagataggcggcctcgttcccgtctgggtcgtggtggtgatcgcaggcacagccttggcttcagtgaccttttttgccacatctgacagccagccccccaggcttcactggctctttgctttcctgggctttctgaccagcgccctgtggatcaacgcggccgccacagaggtggtgaacatcttgcggtccctgggtgtggtcttccggctgagcaacactgtgctggggctcacgctgctggcctgggggaacagcattggaggtgactcagggctgggtggggttgagtgggggtgagtgcggccacatcttagctctttcctcccccagccagagtcgcatctgggcaggagtgtccagggtgtctgccctctgcacctgtgcagtgtcccctgtcactgtggagtggccagcattggggtgagatggccctgactgcagttggaccaagaaactctatagaggcccctgcctcttccccaccctctgatgcggggatggtcggtggctcccagagttcaggcaggacatggagcccattgcagccggccgtgcttgatgtgtacacgggtgtgtgacatgcaggcattcacacttacatacatacacccttccctagctgtagcagccaggtgtggtt

SEQ ID NO: 85060 - DNA, 1416 bp, Homo sapiens
gcgtggatgaccagggagggtgggggaagcgactcaccactgcaggcccctcttgttcctgtgcagatgccttctcggatttcacactggctcgccagggctacccacggatggcgttctccgcctgctttggcggcatcatcttcaacatcctcgtgggtgtggggctgggctgcctgctccagatctcccgaagccacacagaagtgaagctggagccagacggactgctggtgtgggtcctggcaggcgccctggggctcagcctcgtcttctccctggtctcagtcccattgcagtgcttccagctcagcagagtctatggcttctgcctgctcctcttctacctgaacttccttgtcgtggccctcctcactgaatttggagtgattcacctgaaaagcatgtgactgaagccgcttagtgctgtggcctcactgcaggcaggagccccgcccctcctgccgggggaggcccagggaccggagcatttctgcaaggcccttgtgggcacgagagtgcggcccttgctgctggagatctgaggtcactgctgtgagctgggagaactgctgtgtacctcttgctgccagcacccaacagccttgccgtggggaccttggaaacctggctttgctctggacaaagggttccagagagaagctagaagtcccccttgaatgacccccagagcccctctgagaagggctggagtttgggggaaggggatggctggatgtgctccaggccatgctggaggtacccccgaggcacaggcactgcccgttccccttgcctgggcttcaggccttctggcaccttctcaggacacaagtggctgcccaaccctgactcagagaatgagggtggcttggacccctgggaatcaggccgccgagggctgagctccagagccgcaccatctgccacaaacagaattcgagacatacttaattttgaatttctccttgccacgttaataaagccaaaagcagcgggtgctattcgtggcaacacacttcactgaacccacttgcttccaaaacgatgccagcccgaggcactgctacgccagcagctgccacatgggatggtggctcaggcgctccctccaggattctgcccctgcctgtccacagactcctttgtgctggaacctgggctcctccagctgccaggcaggagtcggtaggactgtgcctgtgcctccctcagcggggccctgggcggggttccaaggcctgcgagctgggaaaggacagatgaggggacctcgtgccttcttgctgtcatgcaatgaccccgccttatgttgccgaaataagcaactcttaggtttgcctgactgccttatgctggtaaagaaaagggattcaactgtctcttttccaaataaaaaaaaagtcaaaatttcaa

SEQ ID NO: 85061 - DNA, 399 bp, Homo sapiens
ctgttttctccttttgttttcctatttattctcccagtgctaacttgatatcttcttgtgtgtacacgtgtgtgtgtgtgcaaatatatttctaggaacaagagcaaacattctagtaactatcattctctgatgtggagaacttgggcagagatctgagttacagctttgtggatttattctctctgatgagagatcgccccttagaatgtcatggtcctaaccccgtcatggataccaggggtgaatggcagggttcttctcctgcccaggaggaagggtatggggagccggtgcatcttgactgtcaggtcacctgtcttaccacctttacagctaggctttctgaggtgccagcgtctcctggaattcaaactgtagtttagaggcagctggtga

SEQ ID NO: 85062 - DNA, 722 bp, Homo sapiens
ggagtctttgcatgactgaaaggtattggttttctggagcattcattatgaaaagagatgtgagcttgatttgtcaaatgatttaacatttcagtgacagagatgccccgtggataggccattttggtatgtgtactggtgctccctgcattggattttgaaattatgaatggcactgccatcattgtcccatcccttattttgaccatgacatgcaagaagcactaggcactgtgaacctctccgtacagtcacgcgtgctgctcccacgtggcatttctccagataacacagatggaaaaacgttttggtgtgagattgatgtgcctgccttgatcagccaaatcattcctgccaatgctcctagggcaagagtgcagtttcttctttttgtctgagggtgtgtcatgctgcatcccagatgcagtgttcttggtttttgggactgctgcttcaatagaagcttagaatttctgtacagtacagttgggcctcattcgaattagcttttggaataacctccaaatttgtgttctcgtgatttggttgaaccgctgaattgctatttccattgataataaggtatagtagttccaagaaccaggaatgtggctttgaaaatgcaattgttagaattttgtaagagattgcaggccaaattattttttcatttttaggagtgtgtgaaccagttttgggacatgctggatgaagtaggtgac

SEQ ID NO: 85063 - DNA, 136 bp, Homo sapiens
tcataatccatctgcctcggcctcccaaagtgctgggattataggcgtgagccaccacgcccagctgatagaaattttaaagttaaaagattataactgtcattctgttaccgaagtactatataaattaccttct

SEQ ID NO: 85064 - DNA, 224 bp, Homo sapiens
aaaaaagctaatagtttaagtattagtaatgtactaaaattaaaatgaccttaaaaagggattcaggtatttcatgctaaattttcctttgattttaagttaccaactgatagagtacaaaagtgataactttctgaatattgttgctgtaaacaagcatatattcagttcctcctgtgtgaaaagaagccaaatgtaatgattgtggtcttattcagcgacaa

SEQ ID NO: 85065 - DNA, 200 bp, Homo sapiens
aaaatttaaaacaatactagcaaagttgcaaagaaagcaactaatttagcaagttaactttatgatggagaaatgtgatagacaccaccttaaccaaacaatcaaacttcatcttcgacaatgggactcgttcctccagatatgatacacagatagacacaacgtcacttacataatattctcacaaaagaatgtttaac

SEQ ID NO: 85066 - DNA, 436 bp, Homo sapiens
tgggactacaggcgcccaccaccacgaccagctaattttttgtatttttagtagagatggggtttcactgtgttagccaggatggtgttgatcttcctgacctcgcgatccacctgcctcggcctcccaaagtgctgggattacaggcgtgagccacagcgcccggccgaaaattgaattctaaactttatgaatatgaacccacactgattagttcacttttctaaattaatgctgggtatgaattaaaagctacaaatattaatctgtattagtacagaaaaccaaatattacaaggttggaatgttagaattttacaaatatctaaggcatagttaccctaaaaataaaaatcatcctatcaagattccatctactttcagaaatacctactttgctgttttccacttgtgcaaataaagacctattttttat

SEQ ID NO: 85067 - DNA, 507 bp, Homo sapiens
tcgatctagaggatcctcaaacacgcaattctgcgagctgtagtttacattctggctggccgcagccgggtcctcaggacttgaggagagggtcctgtcagggccagcgttctggtggggttttcagccatgaaaatgtccagagaattttggtctgagctggagaggagacaacagcgtggatgtgacactggggagaaaaagcttgggccctgattcttgtctggccatcttggatcatagacgaattattcacaagagggtctctgcctaaaactcaccatggtggctttcttggtgtacttttcatgtctaaaatgtaagtaaagttcacactttaaggctgcagaaggaagtgaaggcttttgatgctgtttacaaatctctggtttctgactcaagaccatgacggtatgggggaacccaggcctgaccttctcccagttttgggggagctgcctcctgcgattctccctcggtggccctgttggggtggggcccatttcc

SEQ ID NO: 85068 - DNA, 351 bp, Homo sapiens
tttttttaagaaggtatatactgtggttgattgtcatgatgcctgcaattttaaaatgattcagagaaacagattacagatagcaaatagggtaaaatgttaattgaattcagatttagctgtattttgtgtctttgaacttttccatgataaaaacttggcgggagggaaacatacctctttaaagttaatataattttcacaacttgacttgtgttgtttcttaaattgcaagcagatacacaccttttcatagatttaatctgaaaacattctttctcttgacccttatgattgaagtgactttcatgtaatttatttattgagaagattttgaaaaaagaaaataag

SEQ ID NO: 85069 - DNA, 451 bp, Homo sapiens
tacgctgaagctacaccaaatttatcttaacagtttttcttcaataaaaaattataactttttaactttgtaaactttttaattttttaacttttaaaatacttagcttgaaacacaaatacattgtatagctatacaaaaatattttttctttgtatccttattctagaagcttttttctattttctattttaaatttttttttttacttgttagtcgtttttgttaaaaactaaaacacacacactttcacctaggcatagacaggattaggatcatcagtatcactcccttccacctcactgccttccacctccacatcttgtcccactggaaggtttttaggggcaataacacacatgtagctgtcacctatgataacagtgctttctgttgaatacctcctgaaggacttgcctgaggctgttttacatttaacttaaaaaaaaaa

SEQ ID NO: 85070 - DNA, 408 bp, Homo sapiens
cgtctaccttctgctctgattctgggccccctcggccttcttgccctggttctgagccccctctccctttttgccctgattctgggccccctctgcctttttgccctggttctgggccccttctacctttttggcctggttctgagccccctcggcctttctgccctggtgttggggccccctccacctttttcccctggttttggggttgtatctacctttttaccctgggaacaaggtgagagggggaggaaggagggagggaggagagggaaaaggcctgggcaggcaggtgggcaggagtgtaagacgctcagtgccatgcgttgcctgcaattgacagtaagcaatgctgctaaccttcatgactgtttaggacagtggatgggtcttttccagtgagcccat

SEQ ID NO: 85071 - DNA, 577 bp, Homo sapiens
tgatcttcatgtattagcatttgagttttaatctttctggggctcctggcagaaaatttctttaaatttattatataattctaaaatattggacatatttgtttcacgcatctgtcaatatccttattcttttcattaaactctccactgcccccattagtcatcaggtcctactgatttttaactcctaagtatttctcaaatctgtctcctcagtgtgtattgttggttatataactccatctccattgtcactgtgctgctttagagtatcttttcttgtctagatcagtgcctggcttatattatgagcttcgaaaagttggatcaatgaatgaatgattcataatctggacaagtgcactctaacacttgactgaaaaacaaaatcttagatctatcttccatgtaaaagcatctatctaaaatgcaaatcttactttgataatctccagcttaatagcttagatggctcccaggcatccccaaaaccatctctcaattcactgatcaaaaaaataaaacttaaaaattttaaaactaaaaaaaattgaacatttcattggtcaaaaaacaa

SEQ ID NO: 85072 - DNA, 382 bp, Homo sapiens
gtaattattaagcaattagaaatgtgaatagttattggaaatgtcatgatattaagtaattttaggtgtgctaatggtattgtggttacattttttaaagagcccttacagagacacatactaaaatatttgggaaagaaatgacatgatgtctgagatttatttcaaaatattatgggaagaagatgggcagaagttaataacagatgaaacctcaaccagctaccctttcttttctcttaagtgtgaatagaaaaccaagaatctgtagtatgtaaaaagaacctgcaatattaaagagaatgactggccaaaaatgtaagagacacttagagccaaaacatgaagtctaacatcagagtaaaaggagtcaaataaagag

SEQ ID NO: 85073 - DNA, 257 bp, Homo sapiens
gcttcccgggactaaacccgacaaaataatgtcaaagctggattctttgtgggcagactgcaacagctggttcatgttttccacagacccacggccctcattgccagttaaccttgaagctcatccaccagacctttcagagcctccactggggatgacttatcccagaccactgccacaaactggccagcagagatcccaaaatctgccattcttgcagtgcagtactgacagacctaaaaactgctagccaaaag

SEQ ID NO: 85074 - DNA, 671 bp, Homo sapiens
cgatcctcccacctcaacctccagagtatctgggactataggcacgtaccaccatacccagctaatattttttttaattttatattttttagagacagggtgtcactatgttacccaggtctcaatcactatgttactccttgcctcaagcaatcctctcaccttggcctcccaaagtgctgagcttacaggtgtcaaccactgtggccagccacgcattggttttaaggtccagaatttttctgtttggagccttcacaattagttttaggttgggagaccgtgaacccaccaagcagccctttagaggctggaaaaagagtttggaaaaagaactctgtggctttaggaatttctctcggaaatcctctagggcagagaaggaaaatttaccaaatgggagagtgtattagtctattcttacattgctataaggaaataccccagactgggtaatttataaaggaaagagttttaattgactcacagttccacatggctgggaaagcctcaggaaacttacaatcatagcagaaggcaaaggggaagaaaggcaccttcttcacagggcggcaggaaggagaagtgcagagcaaagtggggcaaagcctctataaagccatcagatctcatgagaactcactatcatgagaacagcaggggagaaccac

SEQ ID NO: 85075 - DNA, 419 bp, Homo sapiens
aggatgaaaccaacctgctgaggctgggagagtgggaatgaacgagactgcagatgcagaagtcggctggtgggaggggggatcctaacgggactccagacgcaggagttggctggtgggagtggacttgatgtgggatggacctttgcttttagtcgcaggactccaagcaccaaaggagaaaagtggttggtcctctccaggtagagtccctattgagcttagtctctcccacctatctttgattgtgacacttgaccccagttgtcatcatcagctctgattccaggcaagccccagataccaagtggacactcaggggccccacccctaggaagtcactgagccaaagagggctaggggatgacatgcacggacacgggcttagagcttctttgggactgtctccctaagaatac

SEQ ID NO: 85076 - DNA, 340 bp, Homo sapiens
cctgccgggcgacttttgaagatcccccatccgggtacaccatctcaaaaaaaaaaaaagaaaataatggatttgcagagacttgctatttagatttcagacatctgttaactaaaacacatgtgtaggcttttgttacttatttcagtaatctgtaaatatctttatatttgagaaaatttgtgagacatctttgtgtaaattataacttgaagaacctctcttacaagcaggcatattggtaagtagctgcgaggatataacttataaccagattgaagtgtataattataatatgttattattctggggttctataaaaaataaaatctttgaatct

SEQ ID NO: 85077 - DNA, 799 bp, Homo sapiens
ggccggtgctgctgcgccctgcggagctccgaacacgtgcgcagaggctggctgtggcagatgcaactgcaggatgacttgaaagtagggcatccttcacccatctgaagggaggaaatagtggcaggtgacagtctgcatgtgcagttttcagatgccttcacctgaatgacatctacctccatcaggaccccagatgtctgacagccctgtgtgacaccaagataagtaacaatctggctgctgactaccctattggacaactccaatattagagaacatttccaccaattcagaaagtttattatgcactgctgttctagagcagggatcagcaaacttgctgtaaagagccagagttgtctgctggttctcagcttgaagaagattctgcagtccttattgatcctttttcttggcgttaccattttttgaagcaaagttaacctagctttctagtttgagctttctttttggccgtctttaaaaaaaattttttttttaatctataaaatagacaagagctagttctacaatgtccaagtcattccagcagtcatctctcagtagggactcacagggtcatgggcgtgacctgtctgcggcaggaataggccttcttgctgctgctacccagtctttaagtatagactgcaaattatgggaagaagtactagcagaagacagtgcactatgagctccttgttgattcaatgaagaactcattccaagattcattaaactagcaaggcgtgcagtaccctggttcatccttccaagagatgctggcatacttaag

SEQ ID NO: 85078 - DNA, 691 bp, Homo sapiens
  misc_feature (689)..(689): n is a, c, g, or t
  misc_feature (691)..(691): n is a, c, g, or t
ggccggtgctgctgcgccctgcggagctccgaacacgtgcgcagaggctggctgtggcagatgcaactgcaggatgacttgaaagtagggcatccttcacccatctgaagggaggaaatagtggcaggtgacagtctgcatgtgcagttttcagatgccttcacctgaatgacatctacctccatcaggaccccagatgtctgacagccctgtgtgacaccaagataagtaacgtatgtagtcttcttgtcatgtaggtcccaattaaattactatagctcagatgggggtaggggacttaaaattatgatgtgaaaaattatgtagagtatcagactttttttggggggggacggagcttgctcagttgcccaggctagagtacagtggctcgatctcggctcactgcaacctctgcctcctgggttcaagcgattctcctgcctcagcctcccgagtagctgggactacaggcacctgccaccatgccaggctaatttttttattttaagtagagacgaggtttcaccatattggccaggctggtctgaaactcctgaccttgcgatttgcctgccttggcctcccaaaatgctgggattacaggtttttttgtttgttttttgagacggagtctcactgtctcccaggctggagtgcaatggcgcaatctcggctcactacaaccncn

SEQ ID NO: 85079 - DNA, 675 bp, Homo sapiens
ggccggtgctgctgcgccctgcggagctccgaacacgtgcgcagaggctggctgtggcagatgcaactgcaggatgacttgaaagtagggcatccttcacccatctgaagggaggaaatagtggcaggtgacagtctgcatgtgcagttttcagatgccttcacctgaatgacatctacctccatcaggaccccagatgtctgacagccctgtgtgacaccaagataagtaacgatcccgttgaagataccacattacacttaggctcctgttggccatgacagcttcttagacttgtttttaatgaccttgacagttttgtttttttgtttgtttgtttttgggacggagtctctgtcatccaggctggagtgcaatgtaatggctcaatctcagctcactgcaacctctgcctcccgggttcaggtgattctcctgcctcagcctccccagtagctgggattacaggcatgagccaccgtgcccggctgcctcctaaattctcaaaacattccatttttattctgtggtcttactttattctgtcatgtagagaatagtggttgagcctgttgtcttttgagagtggatgctgtagtccttacatggctgactttcagcccgtaagcttatagtagaggatccttcttgggccagggcgcctgcttctgccag

SEQ ID NO: 85080 - DNA, 782 bp, Homo sapiens
ggctttgataacagttaaaactttaaattttgtatgcccatagtccagtgaggtcaccttaattcagcatcttggaagctttgctgtccagttacgcgtacaatatttaatttaaaaatcactacagagagtatgttttgacactttgaagtagtttaaccgtttggttatggtcagaaagaacttacccagtgacgtttgatatgtagctttaaaattctctagaatgttatgagttgttttacttacactctcctggttaattatagattataaaaagtcctaatgcgtaattggtttcatattgctttaaagagacttaattgcttggtttttttcccctaatggataggaaactagcagagttgttcacatcatggattttcaacgagggaaaaacttgagataccagctattacagctggtagaaccatttggagtcatttcaaatcatctgattctaaataaaattaatgaggtatgaattgaaatattggtattattcatttattcatgccactaatatatgttctgcaagaattaaatgattttgtattagaaaaataaaactcaaggtaatcttaagtttatcaaatgcagaatgtagtagaggaaacaaaaaccaaaaaaaattttgggcgctcggccttgaagattttaaacatcttggggcgggcccaggtgtacatggctacgcgtccagaacccggcgcaggcggtttcccctaaaaccggggcgggtcgcaaccaggtcgggctaggttaaaggcggactaccccgg

SEQ ID NO: 85081 - DNA, 590 bp, Homo sapiens
ggagaaggaaaatctgtgctctgttcttgtttctatgtaacccacatttctaattctttgtgcggcacttcctccttacaatttaacaaatagaggaaaaacttaatttcaacattatctgcatttgcaagcaatacaaaacaagtttattctcgtggattattttgaagttctgaaatttttcttttgaaatatctattggaaatgctttaaaactatgtttctaacacttagactctcagataactttactaataaatgatctctattttagaggccaaacaaggctgttttgtgaaaaggacagttttattttaaagttaattttctggtctttttaaagctacccagaatggaatcctgacaatgatacaggacacacaatgtaagttaaattttttaagctaccatttgtaaaggagatcaatgtaaggaattcaggtttcactttcaacatttcataaacaaagtattttcagaatttctttactgaaaatgagactttgattcttttattgttaatgtagactttgacctagttacttcacagatactctgaaagattgaagtggttgtggtcatatattggg

SEQ ID NO: 85082 - DNA, 295 bp, Homo sapiens
tctctataaaaataaaacaattggtaaagactaggatgtttttaactgttaactaataattattgcacatttgtccttttgttgttgttatttattaaagaaacctgaaggaaagccagatcagaagtttgatcaaaagcaagagcttggacgtgtgatacatctcagcaatttgccgcattctggctattctgatagtgctgttctcaagcttgctgagccttatgggaaaataaagaattacatattactgagtaccgctatgcccacgattactgattcgatctccgtaccc

SEQ ID NO: 85083 - DNA, 525 bp, Homo sapiens
ttagagcatcatactcttcatcttttagggcactaaggtgactgcaagaaattaaccagtagtaaaaatagtctgttttttgtgtgtttgggatttgtttatgtgtttttttgcatgggttacttacagcagttctctccacttttaatgtgctccaaagggagaggtcttaagaaagaatagcagtctgcacttatcaaactcacctgggtgacagactgagacagtctcaaaaaaaaaaaaagaaaataatggatttgcagagacttgctatttagatttcagacatctgttaactaaaacacatgtgtaggcttttgttacttatttcagtaatctgtaaatatctttatatttgagaaaatttgtgagacatctttgtgtaaattataacttgaagaacctctcttacaagcaggcatattggtaagtagctgcgaggatataacttataaccagattgaagtgtataattataatatgttattattctggggttctataaaaaataaaatctttgaatct

SEQ ID NO: 85084 - DNA, 4778 bp, Homo sapiens
aggctagtagggccgtggtaaatcggccgaggtcggtccgctgagagaggtacctctccttttccctctccctttccctaagagttgtctgctggttctcagcttgaagaagattctgcagtccttattgatcctttttcttggcgttaccattttttgaagcaaagttaacctagctttctagtttgagctttctttttggccgtctttaaaaaaaattttttttttaatctataaaatagacaagagctagttctacaatgtccaagtcattccagcagtcatctctcagtagggactcacagggtcatgggcgtgacctgtctgcggcaggaataggccttcttgctgctgctacccagtctttaagtatgccagcatctcttggaaggatgaaccagggtactgcacgccttgctagtttaatgaatcttggaatgagttcttcattgaatcaacaaggagctcatagtgcactgtcttctgctagtacttcttcccataatttgcagtctatatttaacattggaagtagaggtccactccctttatcttctcaacaccgtggagatgcagaccaggccagtaacattttggccagctttggtctgtctgctagagacttagatgaactgagtcgttatccagaggacaagattactcctgagaatttgccccaaatccttctacagcttaaaaggaggagaactgaagaaggccctaccttgagttatggtagagatggcagatctgctacacgggagccaccatacagagtacctagggatgattgggaagaaaaaaggcactttagaagagatagttttgatgatcgtggtcctagtctcaacccagtgcttgattatgaccatggaagtcgttctcaagaatctggttattatgacagaatggattatgaagatgacagattaagagatggagaaaggtgtagggatgattctttttttggtgagacctcgcataactatcataaatttgacagtgagtatgagagaatgggacgtggtcctggccccttacaagagagatctctctttgagaaaaagagaggcgctcctccaagtagcaatattgaagacttccatggactcttaccgaagggttatccccatctgtgctctatatgtgatttgccagttcattctaataaggagtggagtcaacatatcaatggagcaagtcacagtcgtcgatgccagcttcttcttgaaatctacccagaatggaatcctgacaatgatacaggacacacaatgggtgatccattcatgttgcagcagtctacaaatccagcaccaggaattctgggacctccacctccctcatttcatcttgggggaccagcagttggaccaagaggaaatctgggtgctggaaatggaaacctgcaaggacctagacacatgcagaaaggcagagtggaaactagcagagttgttcacatcatggattttcaacgagggaaaaacttgagataccagctattacagctggtagaaccatttggagtcatttcaaatcatctgattctaaataaaattaatgaggcatttattgaaatggcaaccacagaggatgctcaggccgcagtggattattacacaaccacaccagcgttagtatttggcaagccagtgagagttcatttatcccagaagtataaaagaataaagaaacctgaaggaaagccagatcagaagtttgatcaaaagcaagagcttggacgtgtgatacatctcagcaatttgccgcattctggctattctgatagtgctgttctcaagcttgctgagccttatgggaaaataaagaattacatattgatgaggatgaaaagtcaggcttttattgagatggagacaagagaagatgcaatggcaatggttgaccattgtttgaaaaaagccctttggtttcaggggagatgtgtgaaggttgacctgtctgagaaatataaaaaactggttctgaggattccaaacagaggcattgatttactgaaaaaagataaatcccgaaaaagatcttactctccagatggcaaagaatctccaagtgataagaaatccaaaactgatggttcccagaagactgagagttcaaccgaaggtaaagaacaagaagagaagtccggtgaagatggtgagaaagacacaaaggatgaccagacagagcaggaacctaatatgcttcttgaatctgaagatgagctacttgtagatgaagaagaagcagcagcactgctagaaagtggcagttcagtgggagacgagaccgatcttgctaatttaggtgatgtggcttctgatgggaaaaaggaaccatcagataaagctgtgaaaaaagatggaagtgcttcagcagcagcaaagaaaaagcttaaaaaggtggacaagatcgaggaacttgatcaagaaaacgaagcagcgttggaaaatggaattaaaaatgaggaaaacacagaaccaggtgctgaatcttctgagaacgctgatgatcccaacaaagatacaagtgaaaacgcagatggtcaaagtgatgagaacaaggacgactatacaatcccagatgagtatagaattggaccatatcagcccaatgttcctgttggtatagactatgtgatacctaaaacagggttttactgtaagctgtgttcactcttttatacaaatgaagaagttgcaaagaatactcattgcagcagccttcctcattatcagaaattaaagaaatttctgaataaattggcagaagaacgcagacagaagaaggaaacttaagatgtgcaaggagatttaatgatttcaaagaaaataatggttctttgtttttaatgttaaccttttttaaatacaatactgatagttagaagaaaactattgtactcttttgttttagtggagaaataatagatgtctgttcatgtgttaagtgttatagcaaaaaaaatacacatatggttaagttaatgaatagtttttgttttatcagaatggcaacagacagaagtactttgtagagattgacttcctaagctacttaagacaacttgcaccactaagaaaaaaatgtagaaccatttggaaaaatgaaatttagtagttccaagtttcaaagaaatgtcaacattttattccattcaataaagaacaaaaccaatagtgtttttattactttcatctgaaacattccatgttttaatctgagccttgcagactttcatttggagtttgaacccgttttggttgcatttcatttttggagaacttaattaacgtgagattggcaattgaaatgcaggtgcagttttctgttaatgtcatgctgttgtttaggtaataagaaatattaagtaattggctttagattttgtaatttttttccctgagttcctgctagatttcgtattctagtagtcaatgtattttcagtgaaatgcaaaaatattcccattatctttgaccagtattaatttttgagatcttactgcttgtcacttgaatcccgtgattgtcatacatctctggtataagcaacatttgatttttgaagtgtgtagaccatctcttcatattttcaagatgtaattttacatttctgcatttttaaaacagtttggccataatcctagatgcacgcttctaattcatgtacctgcacatgtgacctttgtgaacagaaatttgcatgtataatttgtgtttacttgtaactttctggttatatactgcttatatctgtggattcaagttactgaagtgaataccaataaaaagaaaaccctaggccatgttaattggttatacatgtttggaatgttaaccaacaacgtatttgtcagttgtggtttttattcgctcttaaactttgtgcatgctttaacaatttattacttttaaatctagagtgaattctaaagactgccgctaaagatctgagttttaaaaatgttgttgctggtggatttcttgttcctgttacataactaaaagtgaggccatttgtggtttttaaaaaccttatgaattaaaaatgctacaggtgaacaaacagaagcttatgtttagagatattgatgacttaacagtacaattggaagtaatacggatgagcaagaattagttctgcagcttttcaaaataattacgtagagactcttggtatattggattatctgttgttaaacaatttttttttcttccctgacacagggtctcactctgtcacccagactggagtgcagtggcacagttctctgcaacctcagcctttgggctcaaatgaccctcctacctcagtctcctgagtagctgggactacaggctcatgccactatacctggctagtttttggtttttttgtatagatggggctttgccatgttgcccaggttgatcttgaattcctgggcccaagtgatctgctcgcttcagcctcccaaagtgctgggactgtaggcatgagccaccatccctggccaagaaacaaagttttaatttcaaaaaaatctacaaaaacaggataggcattgtctttcaaatgttcagaccccagtttattaaaggatacttcaaatagttggctaaattttatgatctctcccgttgaaaagtaggtgatgattttaatgtgacatgcacaaaaaatccttgccagtttacttctgcaatttaattttagcctttactaattacccacttctgtttaattccaatttttaacagcaggtacataaagcattatgtgcacaatgg

SEQ ID NO: 85085 - DNA, 5094 bp, Homo sapiens
aggctagtagggccgtggtaaatcggccgaggtcggtccgctgagagaggtacctctccttttccctctccctttccctaagagttgtctgctggttctcagcttgaagaagattctgcagtccttattgatcctttttcttggcgttaccattttttgaagcaaagttaacctagctttctagtttgagctttctttttggccgtctttaaaaaaaattttttttttaatctataaaatagacaagagctagttctacaatgtccaagtcattccagcagtcatctctcagtagggactcacagggtcatgggcgtgacctgtctgcggcaggaataggccttcttgctgctgctacccagtctttaagtatgccagcatctcttggaaggatgaaccagggtactgcacgccttgctagtttaatgaatcttggaatgagttcttcattgaatcaacaaggagctcatagtgcactgtcttctgctagtacttcttcccataatttgcagtctatatttaacattggaagtagaggtccactccctttatcttctcaacaccgtggagatgcagaccaggccagtaacattttggccagctttggtctgtctgctagagacttagatgaactgagtcgttatccagaggacaagattactcctgagaatttgccccaaatccttctacagcttaaaaggaggagaactgaagaaggccctaccttgagttatggtagagatggcagatctgctacacgggagccaccatacagagtacctagggatgattgggaagaaaaaaggcactttagaagagatagttttgatgatcgtggtcctagtctcaacccagtgcttgattatgaccatggaagtcgttctcaagaatctggttattatgacagaatggattatgaagatgacagattaagagatggagaaaggtgtagggatgattctttttttggtgagacctcgcataactatcataaatttgacagtgagtatgagagaatgggacgtggtcctggccccttacaagagagatctctctttgagaaaaagagaggcgctcctccaagtagcaatattgaagacttccatggactcttaccgaagggttatccccatctgtgctctatatgtgatttgccagttcattctaataaggagtggagtcaacatatcaatggagcaagtcacagtcgtcgatgccagcttcttcttgaaatctacccagaatggaatcctgacaatgatacaggacacacaatgggtgatccattcatgttgcagcagtctacaaatccagcaccaggaattctgggacctccacctccctcatttcatcttgggggaccagcagttggaccaagaggaaatctgggtgctggaaatggaaacctgcaaggacctagacacatgcagaaaggcagagtggaaactagcagagttgttcacatcatggattttcaacgagggaaaaacttgagataccagctattacagctggtagaaccatttggagtcatttcaaatcatctgattctaaataaaattaatgaggcatttattgaaatggcaaccacagaggatgctcaggccgcagtggattattacacaaccacaccagcgttagtatttggcaagccagtgagagttcatttatcccagaagtataaaagaataaagaaacctgaaggaaagccagatcagaagtttgatcaaaagcaagagcttggacgtgtgatacatctcagcaatttgccgcattctggctattctgatagtgctgttctcaagcttgctgagccttatgggaaaataaagaattacatattgatgaggatgaaaagtcaggcttttattgagatggagacaagagaagatgcaatggcaatggttgaccattgtttgaaaaaagccctttggtttcaggggagatgtgtgaaggttgacctgtctgagaaatataaaaaactggttctgaggattccaaacagaggcattgatttactgaaaaaagataaatcccgaaaaagatcttactctccagatggcaaagaatctccaagtgataagaaatccaaaactgatggttcccagaagactgagagttcaaccgaaggtaaagaacaagaagagaagtccggtgaagatggtgagaaagacacaaaggatgaccagacagagcaggaacctaatatgcttcttgaatctgaagatgagctacttgtagatgaagaagaagcagcagcactgctagaaagtggcagttcagtgggagacgagaccgatcttgctaatttaggtgatgtggcttctgatgggaaaaaggaaccatcagataaagctgtgaaaaaagatggaagtgcttcagcagcagcaaagaaaaagcttaaaaaggtggacaagatcgaggaacttgatcaagaaaacgaagcagcgttggaaaatggaattaaaaatgaggaaaacacagaaccaggtgctgaatcttctgagaacgctgatgatcccaacaaagatacaagtgaaaacgcagatggtcaaagtgatgagaacaaggacgactatacaatcccagatgagtatagaattggaccatatcagcccaatgttcctgttggtatagactatgtgatacctaaaacagggttttactgtaagctgtgttcactcttttatacaaatgaagaagttgcaaagaatactcattgcagcagccttcctcattatcagaaattaaagaaatttctgaataaattggcagaagaacgcagacagaagaaggaaacttaagatgtgcaaggagatttaatgatttcaaagaaaataatggttctttgtttttaatgttaaccttttttaaatacaatactgatagttagaagaaaactattgtactcttttgttttagtggagaaataatagatgtctgttcatgtgttaagtgttatagcaaaaaaaatacacatatggttaagttaatgaatagtttttgttttatcagaatggcaacagacagaagtactttgtagagattgacttcctaagctacttaagacaacttgcaccactaagaaaaaaatgtagaaccatttggaaaaatgaaatttagtagttccaagtttcaaagaaatgtcaacattttattccattcaataaagaacaaaaccaatagtgtttttattactttcatctgaaacattccatgttttaatctgagccttgcagactttcatttggagtttgaacccgttttggttgcatttcatttttggagaacttaattaacgtgagattggcaattgaaatgcaggtgcagttttctgttaatgtcatgctgttgtttaggtaataagaaatattaagtaattggctttagattttgtaatttttttccctgagttcctgctagatttcgtattctagtagtcaatgtattttcagtgaaatgcaaaaatattcccattatctttgaccagtattaatttttgagatcttactgcttgtcacttgaatcccgtgattgtcatacatctctggtataagcaacatttgatttttgaagtgtgtagaccatctcttcatattttcaagatgtaattttacatttctgcatttttaaaacagtttggccataatcctagatgcacgcttctaattcatgtacctgcacatgtgacctttgtgaacagaaatttgcatgtataatttgtgtttacttgtaactttctggttatatactgcttatatctgtggattcaagttactgaagtgaataccaataaaaagaaaaccctaggccatgttaattggttatacatgtttggaatgttaaccaacaacgtatttgtcagttgtggtttttattcgctcttaaactttgtgcatgctttaacaatttattacttttaaatctagagtgaattctaaagactgccgctaaagatctgagttttaaaaatgttgttgctggtggatttcttgttcctgttacataactaaaagtgaggccatttgtggtttttaaaaaccttatgaattaaaaatgctacaggtgaacaaacagaagcttatgtttagagatattgatgacttaacagtacaattggaagtaatacggatgagcaagaattagttctgcagcttttcaaaataattacgtagagactcttggtatattggattatctgttgttaaacaatttttttttcttccctgacacagggtctcactctgtcacccagactggagtgcagtggcacagttctctgcaacctcagcctttgggctcaaatgaccctcctacctcagtctcctgagtagctgggactacaggctcatgccactatacctggctagtttttggtttttttgtatagatggggctttgccatgttgcccaggttgatcttgaattcctgggcccaagtgatctgctcgcttcagcctcccaaagtgctgggactgtaggcatgagccaccatccctggccaagaaacaaagttttaatttcaaaaaaatctacaaaaacaggataggcattgtctttcaaatgttcagaccccagtttattaaaggatacttcaaatagttggctaaattttatgatctctcccgttgaaaagtaggtgatgattttaatgtgacatgcacaaaaaatccttgccagtttacttctgcaatttaattttagcctttactaattacccacttctgtttaattccaatttttaacagcaggtacataaagcattatgtgcacaatggagttcttcagtgtttcctttcagtgatggctttttcatagcttcaactttgttggatttagcaagttgaaggaaagaatgctatgtttttaatacctacatttgagagcatttagaaatcagaaattataataagctgttagtgataaatctgtaacagcccttcgattacgagaaaacctctttttagtaggaatgtttccactcatgtttgctgtaaagtttaagaacatttttcctacggctatgtcagcccttagtttaatcttacattatcctacaaaagtgaatgaaacttctagaagtaaaaaaaaaaa

SEQ ID NO: 85086 - DNA, 3913 bp, Homo sapiens
aggctagtagggccgtggtaaatcggccgaggtcggtccgctgagagaggtacctctccttttccctctccctttccctaagagttgtctgctggttctcagcttgaagaagattctgcagtccttattgatcctttttcttggcgttaccattttttgaagcaaagttaacctagctttctagtttgagctttctttttggccgtctttaaaaaaaattttttttttaatctataaaatagacaagagctagttctacaatgtccaagtcattccagcagtcatctctcagtagggactcacagggtcatgggcgtgacctgtctgcggcaggaataggccttcttgctgctgctacccagtctttaagtatgccagcatctcttggaaggatgaaccagggtactgcacgccttgctagtttaatgaatcttggaatgagttcttcattgaatcaacaaggagctcatagtgcactgtcttctgctagtacttcttcccataatttgcagtctatatttaacattggaagtagaggtccactccctttatcttctcaacaccgtggagatgcagaccaggccagtaacattttggccagctttggtctgtctgctagagacttagatgaactgagtcgttatccagaggacaagattactcctgagaatttgccccaaatccttctacagcttaaaaggaggagaactgaagaaggccctaccttgagttatggtagagatggcagatctgctacacgggagccaccatacagagtacctagggatgattgggaagaaaaaaggcactttagaagagatagttttgatgatcgtggtcctagtctcaacccagtgcttgattatgaccatggaagtcgttctcaagaatctggttattatgacagaatggattatgaagatgacagattaagagatggagaaaggtgtagggatgattctttttttggtgagacctcgcataactatcataaatttgacagtgagtatgagagaatgggacgtggtcctggccccttacaagagagatctctctttgagaaaaagagaggcgctcctccaagtagcaatattgaagacttccatggactcttaccgaagggttatccccatctgtgctctatatgtgatttgccagttcattctaataaggagtggagtcaacatatcaatggagcaagtcacagtcgtcgatgccagcttcttcttgaaatctacccagaatggaatcctgacaatgatacaggacacacaatgggtgatccattcatgttgcagcagtctacaaatccagcaccaggaattctgggacctccacctccctcatttcatcttgggggaccagcagttggaccaagaggaaatctgggtgctggaaatggaaacctgcaaggacctagacacatgcagaaaggcagagtggaaactagcagagttgttcacatcatggattttcaacgagggaaaaacttgagataccagctattacagctggtagaaccatttggagtcatttcaaatcatctgattctaaataaaattaatgaggcatttattgaaatggcaaccacagaggatgctcaggccgcagtggattattacacaaccacaccagcgttagtatttggcaagccagtgagagttcatttatcccagaagtataaaagaataaagaaacctgaaggaaagccagatcagaagtttgatcaaaagcaagagcttggacgtgtgatacatctcagcaatttgccgcattctggctattctgatagtgctgttctcaagcttgctgagccttatgggaaaataaagaattacatattgatgaggatgaaaagtcaggcttttattgagatggagacaagagaagatgcaatggcaatggttgaccattgtttgaaaaaagccctttggtttcaggggagatgtgtgaaggttgacctgtctgagaaatataaaaaactggttctgaggattccaaacagaggcattgatttactgaaaaaagataaatcccgaaaaagatcttactctccagatggcaaagaatctccaagtgataagaaatccaaaactgatggttcccagaagactgagagttcaaccgaaggtaaagaacaagaagagaagtccggtgaagatggtgagaaagacacaaaggatgaccagacagagcaggaacctaatatgcttcttgaatctgaagatgagctacttgtagatgaagaagaagcagcagcactgctagaaagtggcagttcagtgggagacgagaccgatcttgctaatttaggtgatgtggcttctgatgggaaaaaggaaccatcagataaagctgtgaaaaaagatggaagtgcttcagcagcagcaaagaaaaagcttaaaaaggtggacaagatcgaggaacttgatcaagaaaacgaagcagcgttggaaaatggaattaaaaatgaggaaaacacagaaccaggtgctgaatcttctgagaacgctgatgatcccaacaaagatacaagtgaaaacgcagatggtcaaagtgatgagaacaaggacgactatacaatcccagatgagtatagaattggaccatatcagcccaatgttcctgttggtatagactatgtgatacctaaaacagggttttactgtaagctgtgttcactcttttatacaaatgaagaagttgcaaagaatactcattgcagcagccttcctcattatcagaaattaaagaaatttctgaataaattggcagaagaacgcagacagaagaaggaaacttaagatgtgcaaggagatttaatgatttcaaagaaaataatggttctttgtttttaatgttaaccttttttaaatacaatactgatagttagaagaaaactattgtactcttttgttttagtggagaaataatagatgtctgttcatgtgttaagtgttatagcaaaaaaaatacacatatggttaagttaatgaatagtttttgttttatcagaatggcaacagacagaagtactttgtagagattgacttcctaagctacttaagacaacttgcaccactaagaaaaaaatgtagaaccatttggaaaaatgaaatttagtagttccaagtttcaaagaaatgtcaacattttattccattcaataaagaacaaaaccaatagtgtttttattactttcatctgaaacattccatgttttaatctgagccttgcagactttcatttggagtttgaacccgttttggttgcatttcatttttggagaacttaattaacgtgagattggcaattgaaatgcaggtgcagttttctgttaatgtcatgctgttgtttaggtaataagaaatattaagtaattggctttagattttgtaatttttttccctgagttcctgctagatttcgtattctagtagtcaatgtattttcagtgaaatgcaaaaatattcccattatctttgaccagtattaatttttgagatcttactgcttgtcacttgaatcccgtgattgtcatacatctctggtataagcaacatttgatttttgaagtgtgtagaccatctcttcatattttcaagatgtaattttacatttctgcatttttaaaacagtttggccataatcctagatgcacgcttctaattcatgtacctgcacatgtgacctttgtgaacagaaatttgcatgtataatttgtgtttacttgtaactttctggttatatactgcttatatctgtggattcaagttactgaagtgaataccaataaaaagaaaaccctaggccatgttaattggttatacatgtttggaatgttaaccaaaaaaaaaaaaaaggggggggccaaaaataccgaggggcccattacgccacttttttaaagggc

SEQ ID NO: 85087 - DNA, 4038 bp, Homo sapiens
  misc_feature (3852)..(3852): n is a, c, g, or t
  misc_feature (3855)..(3855): n is a, c, g, or t
  misc_feature (3860)..(3860): n is a, c, g, or t
aggctagtagggccgtggtaaatcggccgaggtcggtccgctgagagaggtacctctccttttccctctccctttccctaagagttgtctgctggttctcagcttgaagaagattctgcagtccttattgatcctttttcttggcgttaccattttttgaagcaaagttaacctagctttctagtttgagctttctttttggccgtctttaaaaaaaattttttttttaatctataaaatagacaagagctagttctacaatgtccaagtcattccagcagtcatctctcagtagggactcacagggtcatgggcgtgacctgtctgcggcaggaataggccttcttgctgctgctacccagtctttaagtatgccagcatctcttggaaggatgaaccagggtactgcacgccttgctagtttaatgaatcttggaatgagttcttcattgaatcaacaaggagctcatagtgcactgtcttctgctagtacttcttcccataatttgcagtctatatttaacattggaagtagaggtccactccctttatcttctcaacaccgtggagatgcagaccaggccagtaacattttggccagctttggtctgtctgctagagacttagatgaactgagtcgttatccagaggacaagattactcctgagaatttgccccaaatccttctacagcttaaaaggaggagaactgaagaaggccctaccttgagttatggtagagatggcagatctgctacacgggagccaccatacagagtacctagggatgattgggaagaaaaaaggcactttagaagagatagttttgatgatcgtggtcctagtctcaacccagtgcttgattatgaccatggaagtcgttctcaagaatctggttattatgacagaatggattatgaagatgacagattaagagatggagaaaggtgtagggatgattctttttttggtgagacctcgcataactatcataaatttgacagtgagtatgagagaatgggacgtggtcctggccccttacaagagagatctctctttgagaaaaagagaggcgctcctccaagtagcaatattgaagacttccatggactcttaccgaagggttatccccatctgtgctctatatgtgatttgccagttcattctaataaggagtggagtcaacatatcaatggagcaagtcacagtcgtcgatgccagcttcttcttgaaatctacccagaatggaatcctgacaatgatacaggacacacaatgggtgatccattcatgttgcagcagtctacaaatccagcaccaggaattctgggacctccacctccctcatttcatcttgggggaccagcagttggaccaagaggaaatctgggtgctggaaatggaaacctgcaaggacctagacacatgcagaaaggcagagtggaaactagcagagttgttcacatcatggattttcaacgagggaaaaacttgagataccagctattacagctggtagaaccatttggagtcatttcaaatcatctgattctaaataaaattaatgaggcatttattgaaatggcaaccacagaggatgctcaggccgcagtggattattacacaaccacaccagcgttagtatttggcaagccagtgagagttcatttatcccagaagtataaaagaataaagaaacctgaaggaaagccagatcagaagtttgatcaaaagcaagagcttggacgtgtgatacatctcagcaatttgccgcattctggctattctgatagtgctgttctcaagcttgctgagccttatgggaaaataaagaattacatattgatgaggatgaaaagtcaggcttttattgagatggagacaagagaagatgcaatggcaatggttgaccattgtttgaaaaaagccctttggtttcaggggagatgtgtgaaggttgacctgtctgagaaatataaaaaactggttctgaggattccaaacagaggcattgatttactgaaaaaagataaatcccgaaaaagatcttactctccagatggcaaagaatctccaagtgataagaaatccaaaactgatggttcccagaagactgagagttcaaccgaaggtaaagaacaagaagagaagtccggtgaagatggtgagaaagacacaaaggatgaccagacagagcaggaacctaatatgcttcttgaatctgaagatgagctacttgtagatgaagaagaagcagcagcactgctagaaagtggcagttcagtgggagacgagaccgatcttgctaatttaggtgatgtggcttctgatgggaaaaaggaaccatcagataaagctgtgaaaaaagatggaagtgcttcagcagcagcaaagaaaaagcttaaaaaggtggacaagatcgaggaacttgatcaagaaaacgaagcagcgttggaaaatggaattaaaaatgaggaaaacacagaaccaggtgctgaatcttctgagaacgctgatgatcccaacaaagatacaagtgaaaacgcagatggtcaaagtgatgagaacaaggacgactatacaatcccagatgagtatagaattggaccatatcagcccaatgttcctgttggtatagactatgtgatacctaaaacagggttttactgtaagctgtgttcactcttttatacaaatgaagaagttgcaaagaatactcattgcagcagccttcctcattatcagaaattaaagaaatttctgaataaattggcagaagaacgcagacagaagaaggaaacttaagatgtgcaaggagatttaatgatttcaaagaaaataatggttctttgtttttaatgttaaccttttttaaatacaatactgatagttagaagaaaactattgtactcttttgttttagtggagaaataatagatgtctgttcatgtgttaagtgttatagcaaaaaaaatacacatatggttaagttaatgaatagtttttgttttatcagaatggcaacagacagaagtactttgtagagattgacttcctaagctacttaagacaacttgcaccactaagaaaaaaatgtagaaccatttggaaaaatgaaatttagtagttccaagtttcaaagaaatgtcaacattttattccattcaataaagaacaaaaccaatagtgtttttattactttcatctgaaacattccatgttttaatctgagccttgcagactttcatttggagtttgaacccgttttggttgcatttcatttttggagaacttaattaacgtgagattggcaattgaaatgcaggtgcagttttctgttaatgtcatgctgttgtttaggtaataagaaatattaagtaattggctttagattttgtaatttttttccctgagttcctgctagatttcgtattctagtagtcaatgtattttcagtgaaatgcaaaaatattcccattatctttgaccagtattaatttttgagatcttactgcttgtcacttgaatcccgtgattgtcatacatctctggtataagcaacatttgatttttgaagtgtgtagaccatctcttcatattttcaagatgtaattttacatttctgcatttttaaaacagtttggccataatcctagatgcacgcttctaattcatgtacctgcacatgtgacctttgtgaacagaaatttgcatgtataatttgtgtttacttgtaactttctggttatatactgcttatatctgtggattcaagttactgaagtgaataccaataaaaagaaaaccctaggccatgttaattggttatacatgtttggaatgttaaccaacnccnacacnaaaaaaaaatttggggcggccgccccaaaaaagtttcaaacacatctcgtggccggcggcccaggtttgactcggccacgcgtgccaagggaacccggccagcctcggccgggtcccccaaaaaaccggggccgcgcgcttgacaccaggctcgggcccggctcaagggccgcgaacg

SEQ ID NO: 85088 - DNA, 3895 bp, Homo sapiens
aggctagtagggccgtggtaaatcggccgaggtcggtccgctgagagaggtacctctccttttccctctccctttccctaagagttgtctgctggttctcagcttgaagaagattctgcagtccttattgatcctttttcttggcgttaccattttttgaagcaaagttaacctagctttctagtttgagctttctttttggccgtctttaaaaaaaattttttttttaatctataaaatagacaagagctagttctacaatgtccaagtcattccagcagtcatctctcagtagggactcacagggtcatgggcgtgacctgtctgcggcaggaataggccttcttgctgctgctacccagtctttaagtatgccagcatctcttggaaggatgaaccagggtactgcacgccttgctagtttaatgaatcttggaatgagttcttcattgaatcaacaaggagctcatagtgcactgtcttctgctagtacttcttcccataatttgcagtctatatttaacattggaagtagaggtccactccctttatcttctcaacaccgtggagatgcagaccaggccagtaacattttggccagctttggtctgtctgctagagacttagatgaactgagtcgttatccagaggacaagattactcctgagaatttgccccaaatccttctacagcttaaaaggaggagaactgaagaaggccctaccttgagttatggtagagatggcagatctgctacacgggagccaccatacagagtacctagggatgattgggaagaaaaaaggcactttagaagagatagttttgatgatcgtggtcctagtctcaacccagtgcttgattatgaccatggaagtcgttctcaagaatctggttattatgacagaatggattatgaagatgacagattaagagatggagaaaggtgtagggatgattctttttttggtgagacctcgcataactatcataaatttgacagtgagtatgagagaatgggacgtggtcctggccccttacaagagagatctctctttgagaaaaagagaggcgctcctccaagtagcaatattgaagacttccatggactcttaccgaagggttatccccatctgtgctctatatgtgatttgccagttcattctaataaggagtggagtcaacatatcaatggagcaagtcacagtcgtcgatgccagcttcttcttgaaatctacccagaatggaatcctgacaatgatacaggacacacaatgggtgatccattcatgttgcagcagtctacaaatccagcaccaggaattctgggacctccacctccctcatttcatcttgggggaccagcagttggaccaagaggaaatctgggtgctggaaatggaaacctgcaaggacctagacacatgcagaaaggcagagtggaaactagcagagttgttcacatcatggattttcaacgagggaaaaacttgagataccagctattacagctggtagaaccatttggagtcatttcaaatcatctgattctaaataaaattaatgaggcatttattgaaatggcaaccacagaggatgctcaggccgcagtggattattacacaaccacaccagcgttagtatttggcaagccagtgagagttcatttatcccagaagtataaaagaataaagaaacctgaaggaaagccagatcagaagtttgatcaaaagcaagagcttggacgtgtgatacatctcagcaatttgccgcattctggctattctgatagtgctgttctcaagcttgctgagccttatgggaaaataaagaattacatattgatgaggatgaaaagtcaggcttttattgagatggagacaagagaagatgcaatggcaatggttgaccattgtttgaaaaaagccctttggtttcaggggagatgtgtgaaggttgacctgtctgagaaatataaaaaactggttctgaggattccaaacagaggcattgatttactgaaaaaagataaatcccgaaaaagatcttactctccagatggcaaagaatctccaagtgataagaaatccaaaactgatggttcccagaagactgagagttcaaccgaaggtaaagaacaagaagagaagtccggtgaagatggtgagaaagacacaaaggatgaccagacagagcaggaacctaatatgcttcttgaatctgaagatgagctacttgtagatgaagaagaagcagcagcactgctagaaagtggcagttcagtgggagacgagaccgatcttgctaatttaggtgatgtggcttctgatgggaaaaaggaaccatcagataaagctgtgaaaaaagatggaagtgcttcagcagcagcaaagaaaaagcttaaaaaggtggacaagatcgaggaacttgatcaagaaaacgaagcagcgttggaaaatggaattaaaaatgaggaaaacacagaaccaggtgctgaatcttctgagaacgctgatgatcccaacaaagatacaagtgaaaacgcagatggtcaaagtgatgagaacaaggacgactatacaatcccagatgagtatagaattggaccatatcagcccaatgttcctgttggtatagactatgtgatacctaaaacagggttttactgtaagctgtgttcactcttttatacaaatgaagaagttgcaaagaatactcattgcagcagccttcctcattatcagaaattaaagaaatttctgaataaattggcagaagaacgcagacagaagaaggaaacttaagatgtgcaaggagatttaatgatttcaaagaaaataatggttctttgtttttaatgttaaccttttttaaatacaatactgatagttagaagaaaactattgtactcttttgttttagtggagaaataatagatgtctgttcatgtgttaagtgttatagcaaaaaaaatacacatatggttaagttaatgaatagtttttgttttatcagaatggcaacagacagaagtactttgtagagattgacttcctaagctacttaagacaacttgcaccactaagaaaaaaatgtagaaccatttggaaaaatgaaatttagtagttccaagtttcaaagaaatgtcaacattttattccattcaataaagaacaaaaccaatagtgtttttattactttcatctgaaacattccatgttttaatctgagccttgcagactttcatttggagtttgaacccgttttggttgcatttcatttttggagaacttaattaacgtgagattggcaattgaaatgcaggtgcagttttctgttaatgtcatgctgttgtttaggtaataagaaatattaagtaattggctttagattttgtaatttttttccctgagttcctgctagatttcgtattctagtagtcaatgtattttcagtgaaatgcaaaaatattcccattatctttgaccagtattaatttttgagatcttactgcttgtcacttgaatcccgtgattgtcatacatctctggtataagcaacatttgatttttgaagtgtgtagaccatctcttcatattttcaagatgtaattttacatttctgcatttttaaaacagtttggccataatcctagatgcacgcttctaattcatgtacctgcacatgtgacctttgtgaacagaaatttgcatgtataatttgtgtttacttgtaactttctggttatatactgcttatatctgtggattcaagttactgaagtgaataccaataaaaagaaaaccctaggccatgttaattggttatacatgtttggaatgttaaccaaaaaaaaagtcgagcggccgcgaatttagtagtagtaggcggccgc

SEQ ID NO: 85089 - DNA, 5633 bp, Homo sapiens
aggctagtagggccgtggtaaatcggccgaggtcggtccgctgagagaggtacctctccttttccctctccctttccctaaggtaggcgtgaagcgggtaagagtcggggtcgggtggctgggggttctccgtgtccgccgggaggggacaacgacggcgacaggggctgcggggagccggcggcgcgcctttcttgctcgctcccgctctgcctccctccgcgttgcgtatgtgagccgcctgatcggcggccgccatgttaggagcgcagtggcggcgcaaccagccttctagggcggcggaggtgagcggtccgggagggaaacacgcggccggccaagggcccagggtgcggcgggagattttgggtgaagaggtgcgctgaccggccgagcttcctgcgcgtcctgggctcgttgtgggcgggggcgggacgactagcccgttacacgcgggccgcggcgctgagggggagggaggagctcgctcgaggcctgagggacagactgtacactgggggcttgccgtttgaggaggatggttaagatatctaagtccttgggtagcgccagtgccaaataacccgttcgcctttttttctctgaaaatgttccccgccccccatcgcgtaaaaatggccgaaaaatgaaacgttaacgcttgtttttcgtactgcgtcgtggaacaagccgcctgcagtacagtgcgaggcgggtgatttgcacttgtttagtcaagtcacctcacatcctttttctctttatcaaaatagtattagtccaggttcctccagagaggatcgtgtggtgtgggaccttccggtttccagacaaagggttttggagtaccgtggtgtagtcgccgcatcgttctttgcatttcgagctctgtgccatgttctgtgttcggcatttaccgtggatgaatatcccctagagttgtctgctggttctcagcttgaagaagattctgcagtccttattgatcctttttcttggcgttaccattttttgaagcaaagttaacctagctttctagtttgagctttctttttggccgtctttaaaaaaaattttttttttaatctataaaatagacaagagctagttctacaatgtccaagtcattccagcagtcatctctcagtagggactcacagggtcatgggcgtgacctgtctgcggcaggaataggccttcttgctgctgctacccagtctttaagtatgccagcatctcttggaaggatgaaccagggtactgcacgccttgctagtttaatgaatcttggaatgagttcttcattgaatcaacaaggagctcatagtgcactgtcttctgctagtacttcttcccataatttgcagtctatatttaacattggaagtagaggtccactccctttatcttctcaacaccgtggagatgcagaccaggccagtaacattttggccagctttggtctgtctgctagagacttagatgaactgagtcgttatccagaggacaagattactcctgagaatttgccccaaatccttctacagcttaaaaggaggagaactgaagaaggccctaccttgagttatggtagagatggcagatctgctacacgggagccaccatacagagtacctagggatgattgggaagaaaaaaggcactttagaagagatagttttgatgatcgtggtcctagtctcaacccagtgcttgattatgaccatggaagtcgttctcaagaatctggttattatgacagaatggattatgaagatgacagattaagagatggagaaaggtgtagggatgattctttttttggtgagacctcgcataactatcataaatttgacagtgagtatgagagaatgggacgtggtcctggccccttacaagagagatctctctttgagaaaaagagaggcgctcctccaagtagcaatattgaagacttccatggactcttaccgaagggttatccccatctgtgctctatatgtgatttgccagttcattctaataaggagtggagtcaacatatcaatggagcaagtcacagtcgtcgatgccagcttcttcttgaaatctacccagaatggaatcctgacaatgatacaggacacacaatgggtgatccattcatgttgcagcagtctacaaatccagcaccaggaattctgggacctccacctccctcatttcatcttgggggaccagcagttggaccaagaggaaatctgggtgctggaaatggaaacctgcaaggacctagacacatgcagaaaggcagagtggaaactagcagagttgttcacatcatggattttcaacgagggaaaaacttgagataccagctattacagctggtagaaccatttggagtcatttcaaatcatctgattctaaataaaattaatgaggcatttattgaaatggcaaccacagaggatgctcaggccgcagtggattattacacaaccacaccagcgttagtatttggcaagccagtgagagttcatttatcccagaagtataaaagaataaagaaacctgaaggaaagccagatcagaagtttgatcaaaagcaagagcttggacgtgtgatacatctcagcaatttgccgcattctggctattctgatagtgctgttctcaagcttgctgagccttatgggaaaataaagaattacatattgatgaggatgaaaagtcaggcttttattgagatggagacaagagaagatgcaatggcaatggttgaccattgtttgaaaaaagccctttggtttcaggggagatgtgtgaaggttgacctgtctgagaaatataaaaaactggttctgaggattccaaacagaggcattgatttactgaaaaaagataaatcccgaaaaagatcttactctccagatggcaaagaatctccaagtgataagaaatccaaaactgatggttcccagaagactgagagttcaaccgaaggtaaagaacaagaagagaagtccggtgaagatggtgagaaagacacaaaggatgaccagacagagcaggaacctaatatgcttcttgaatctgaagatgagctacttgtagatgaagaagaagcagcagcactgctagaaagtggcagttcagtgggagacgagaccgatcttgctaatttaggtgatgtggcttctgatgggaaaaaggaaccatcagataaagctgtgaaaaaagatggaagtgcttcagcagcagcaaagaaaaagcttaaaaaggtggacaagatcgaggaacttgatcaagaaaacgaagcagcgttggaaaatggaattaaaaatgaggaaaacacagaaccaggtgctgaatcttctgagaacgctgatgatcccaacaaagatacaagtgaaaacgcagatggtcaaagtgatgagaacaaggacgactatacaatcccagatgagtatagaattggaccatatcagcccaatgttcctgttggtatagactatgtgatacctaaaacagggttttactgtaagctgtgttcactcttttatacaaatgaagaagttgcaaagaatactcattgcagcagccttcctcattatcagaaattaaagaaatttctgaataaattggcagaagaacgcagacagaagaaggaaacttaagatgtgcaaggagatttaatgatttcaaagaaaataatggttctttgtttttaatgttaaccttttttaaatacaatactgatagttagaagaaaactattgtactcttttgttttagtggagaaataatagatgtctgttcatgtgttaagtgttatagcaaaaaaaatacacatatggttaagttaatgaatagtttttgttttatcagaatggcaacagacagaagtactttgtagagattgacttcctaagctacttaagacaacttgcaccactaagaaaaaaatgtagaaccatttggaaaaatgaaatttagtagttccaagtttcaaagaaatgtcaacattttattccattcaataaagaacaaaaccaatagtgtttttattactttcatctgaaacattccatgttttaatctgagccttgcagactttcatttggagtttgaacccgttttggttgcatttcatttttggagaacttaattaacgtgagattggcaattgaaatgcaggtgcagttttctgttaatgtcatgctgttgtttaggtaataagaaatattaagtaattggctttagattttgtaatttttttccctgagttcctgctagatttcgtattctagtagtcaatgtattttcagtgaaatgcaaaaatattcccattatctttgaccagtattaatttttgagatcttactgcttgtcacttgaatcccgtgattgtcatacatctctggtataagcaacatttgatttttgaagtgtgtagaccatctcttcatattttcaagatgtaattttacatttctgcatttttaaaacagtttggccataatcctagatgcacgcttctaattcatgtacctgcacatgtgacctttgtgaacagaaatttgcatgtataatttgtgtttacttgtaactttctggttatatactgcttatatctgtggattcaagttactgaagtgaataccaataaaaagaaaaccctaggccatgttaattggttatacatgtttggaatgttaaccaacaacgtatttgtcagttgtggtttttattcgctcttaaactttgtgcatgctttaacaatttattacttttaaatctagagtgaattctaaagactgccgctaaagatctgagttttaaaaatgttgttgctggtggatttcttgttcctgttacataactaaaagtgaggccatttgtggtttttaaaaaccttatgaattaaaaatgctacaggtgaacaaacagaagcttatgtttagagatattgatgacttaacagtacaattggaagtaatacggatgagcaagaattagttctgcagcttttcaaaataattacgtagagactcttggtatattggattatctgttgttaaacaatttttttttcttccctgacacagggtctcactctgtcacccagactggagtgcagtggcacagttctctgcaacctcagcctttgggctcaaatgaccctcctacctcagtctcctgagtagctgggactacaggctcatgccactatacctggctagtttttggtttttttgtatagatggggctttgccatgttgcccaggttgatcttgaattcctgggcccaagtgatctgctcgcttcagcctcccaaagtgctgggactgtaggcatgagccaccatccctggccaagaaacaaagttttaatttcaaaaaaatctacaaaaacaggataggcattgtctttcaaatgttcagaccccagtttattaaaggatacttcaaatagttggctaaattttatgatctctcccgttgaaaagtaggtgatgattttaatgtgacatgcacaaaaaatccttgccagtttacttctgcaatttaattttagcctttactaattacccacttctgtttaattccaatttttaacagcaggtacataaagcattatgtgcacaatgg

SEQ ID NO: 85090 - DNA, 3960 bp, Homo sapiens
aggctagtagggccgtggtaaatcggccgaggtcggtccgctgagagaggtacctctccttttccctctccctttccctaagagttgtctgctggttctcagcttgaagaagattctgcagtccttattgatcctttttcttggcgttaccattttttgaagcaaagttaacctagctttctagtttgagctttctttttggccgtctttaaaaaaaattttttttttaatctataaaatagacaagagctagttctacaatgtccaagtcattccagcagtcatctctcagtagggactcacagggtcatgggcgtgacctgtctgcggcaggaataggccttcttgctgctgctacccagtctttaagtatgccagcatctcttggaaggatgaaccagggtactgcacgccttgctagtttaatgaatcttggaatgagttcttcattgaatcaacaaggagctcatagtgcactgtcttctgctagtacttcttcccataatttgcagtctatatttaacattggaagtagaggtccactccctttatcttctcaacaccgtggagatgcagaccaggccagtaacattttggccagctttggtctgtctgctagagacttagatgaactgagtcgttatccagaggacaagattactcctgagaatttgccccaaatccttctacagcttaaaaggaggagaactgaagaaggccctaccttgagttatggtagagatggcagatctgctacacgggagccaccatacagagtacctagggatgattgggaagaaaaaaggcactttagaagagatagttttgatgatcgtggtcctagtctcaacccagtgcttgattatgaccatggaagtcgttctcaagaatctggttattatgacagaatggattatgaagatgacagattaagagatggagaaaggtgtagggatgattctttttttggtgagacctcgcataactatcataaatttgacagtgagtatgagagaatgggacgtggtcctggccccttacaagagagatctctctttgagaaaaagagaggcgctcctccaagtagcaatattgaagacttccatggactcttaccgaagggttatccccatctgtgctctatatgtgatttgccagttcattctaataaggagtggagtcaacatatcaatggagcaagtcacagtcgtcgatgccagcttcttcttgaaatctacccagaatggaatcctgacaatgatacaggacacacaatgggtgatccattcatgttgcagcagtctacaaatccagcaccaggaattctgggacctccacctccctcatttcatcttgggggaccagcagttggaccaagaggaaatctgggtgctggaaatggaaacctgcaaggacctagacacatgcagaaaggcagagtggaaactagcagagttgttcacatcatggattttcaacgagggaaaaacttgagataccagctattacagctggtagaaccatttggagtcatttcaaatcatctgattctaaataaaattaatgaggcatttattgaaatggcaaccacagaggatgctcaggccgcagtggattattacacaaccacaccagcgttagtatttggcaagccagtgagagttcatttatcccagaagtataaaagaataaagaaacctgaaggaaagccagatcagaagtttgatcaaaagcaagagcttggacgtgtgatacatctcagcaatttgccgcattctggctattctgatagtgctgttctcaagcttgctgagccttatgggaaaataaagaattacatattgatgaggatgaaaagtcaggcttttattgagatggagacaagagaagatgcaatggcaatggttgaccattgtttgaaaaaagccctttggtttcaggggagatgtgtgaaggttgacctgtctgagaaatataaaaaactggttctgaggattccaaacagaggcattgatttactgaaaaaagataaatcccgaaaaagatcttactctccagatggcaaagaatctccaagtgataagaaatccaaaactgatggttcccagaagactgagagttcaaccgaaggtaaagaacaagaagagaagtccggtgaagatggtgagaaagacacaaaggatgaccagacagagcaggaacctaatatgcttcttgaatctgaagatgagctacttgtagatgaagaagaagcagcagcactgctagaaagtggcagttcagtgggagacgagaccgatcttgctaatttaggtgatgtggcttctgatgggaaaaaggaaccatcagataaagctgtgaaaaaagatggaagtgcttcagcagcagcaaagaaaaagcttaaaaaggtggacaagatcgaggaacttgatcaagaaaacgaagcagcgttggaaaatggaattaaaaatgaggaaaacacagaaccaggtgctgaatcttctgagaacgctgatgatcccaacaaagatacaagtgaaaacgcagatggtcaaagtgatgagaacaaggacgactatacaatcccagatgagtatagaattggaccatatcagcccaatgttcctgttggtatagactatgtgatacctaaaacagggttttactgtaagctgtgttcactcttttatacaaatgaagaagttgcaaagaatactcattgcagcagccttcctcattatcagaaattaaagaaatttctgaataaattggcagaagaacgcagacagaagaaggaaacttaagatgtgcaaggagatttaatgatttcaaagaaaataatggttctttgtttttaatgttaaccttttttaaatacaatactgatagttagaagaaaactattgtactcttttgttttagtggagaaataatagatgtctgttcatgtgttaagtgttatagcaaaaaaaatacacatatggttaagttaatgaatagtttttgttttatcagaatggcaacagacagaagtactttgtagagattgacttcctaagctacttaagacaacttgcaccactaagaaaaaaatgtagaaccatttggaaaaatgaaatttagtagttccaagtttcaaagaaatgtcaacattttattccattcaataaagaacaaaaccaatagtgtttttattactttcatctgaaacattccatgttttaatctgagccttgcagactttcatttggagtttgaacccgttttggttgcatttcatttttggagaacttaattaacgtgagattggcaattgaaatgcaggtgcagttttctgttaatgtcatgctgttgtttaggtaataagaaatattaagtaattggctttagattttgtaatttttttccctgagttcctgctagatttcgtattctagtagtcaatgtattttcagtgaaatgcaaaaatattcccattatctttgaccagtattaatttttgagatcttactgcttgtcacttgaatcccgtgattgtcatacatctctggtataagcaacatttgatttttgaagtgtgtagaccatctcttcatattttcaagatgtaattttacatttctgcatttttaaaacagtttggccataatcctagatgcacgcttctaattcatgtacctgcacatgtgacctttgtgaacagaaatttgcatgtataatttgtgtttacttgtaactttctggttatatactgcttatatctgtggattcaagttactgaagtgaataccaataaaaagaaaaccctaggcaaaaaaaaaaaaaaaaaaaaaaattgtgggggccggccccggaaagttttcaaaaccatccgttggggcggggcccagagatgaacatggccacgggaccaggaccgggcagagaagggggtccccaaaaaagcgggggacgggttga

SEQ ID NO: 85091 - DNA, 4922 bp, Homo sapiens
aggctagtagggccgtggtaaatcggccgaggtcggtccgctgagagaggtacctctccttttccctctccctttccctaagagttgtctgctggttctcagcttgaagaagattctgcagtccttattgatcctttttcttggcgttaccattttttgaagcaaagttaacctagctttctagtttgagctttctttttggccgtctttaaaaaaaattttttttttaatctataaaatagacaagagctagttctacaatgtccaagtcattccagcagtcatctctcagtagggactcacagggtcatgggcgtgacctgtctgcggcaggaataggccttcttgctgctgctacccagtctttaagtatgccagcatctcttggaaggatgaaccagggtactgcacgccttgctagtttaatgaatcttggaatgagttcttcattgaatcaacaaggagctcatagtgcactgtcttctgctagtacttcttcccataatttgcagtctatatttaacattggaagtagaggtccactccctttatcttctcaacaccgtggagatgcagaccaggccagtaacattttggccagctttggtctgtctgctagagacttagatgaactgagtcgttatccagaggacaagattactcctgagaatttgccccaaatccttctacagcttaaaaggaggagaactgaagaaggccctaccttgagttatggtagagatggcagatctgctacacgggagccaccatacagagtacctagggatgattgggaagaaaaaaggcactttagaagagatagttttgatgatcgtggtcctagtctcaacccagtgcttgattatgaccatggaagtcgttctcaagaatctggttattatgacagaatggattatgaagatgacagattaagagatggagaaaggtgtagggatgattctttttttggtgagacctcgcataactatcataaatttgacagtgagtatgagagaatgggacgtggtcctggccccttacaagagagatctctctttgagaaaaagagaggcgctcctccaagtagcaatattgaagacttccatggactcttaccgaagggttatccccatctgtgctctatatgtgatttgccagttcattctaataaggagtggagtcaacatatcaatggagcaagtcacagtcgtcgatgccagcttcttcttgaaatctacccagaatggaatcctgacaatgatacaggacacacaatgggtgatccattcatgttgcagcagtctacaaatccagcaccaggaattctgggacctccacctccctcatttcatcttgggggaccagcagttggaccaagaggaaatctgggtgctggaaatggaaacctgcaaggacctagacacatgcagaaaggcagagtggaaactagcagagttgttcacatcatggattttcaacgagggaaaaacttgagataccagctattacagctggtagaaccatttggagtcatttcaaatcatctgattctaaataaaattaatgaggcatttattgaaatggcaaccacagaggatgctcaggccgcagtggattattacacaaccacaccagcgttagtatttggcaagccagtgagagttcatttatcccagaagtataaaagaataaagaaacctgaaggaaagccagatcagaagtttgatcaaaagcaagagcttggacgtgtgatacatctcagcaatttgccgcattctggctattctgatagtgctgttctcaagcttgctgagccttatgggaaaataaagaattacatattgatgaggatgaaaagtcaggcttttattgagatggagacaagagaagatgcaatggcaatggttgaccattgtttgaaaaaagccctttggtttcaggggagatgtgtgaaggttgacctgtctgagaaatataaaaaactggttctgaggattccaaacagaggcattgatttactgaaaaaagataaatcccgaaaaagatcttactctccagatggcaaagaatctccaagtgataagaaatccaaaactgatggttcccagaagactgagagttcaaccgaaggtaaagaacaagaagagaagtccggtgaagatggtgagaaagacacaaaggatgaccagacagagcaggaacctaatatgcttcttgaatctgaagatgagctacttgtagatgaagaagaagcagcagcactgctagaaagtggcagttcagtgggagacgagaccgatcttgctaatttaggtgatgtggcttctgatgggaaaaaggaaccatcagataaagctgtgaaaaaagatggaagtgcttcagcagcagcaaagaaaaagcttaaaaagcgtcgttttccagggagtatggaaggttttgtcactctagatgaggttggtgatgaggaagattcggaacttcagaaacttcgtaaatcgggcatggcatttaaatctggtgacaaaaatgatgatggtttggttgaaattaaggtggacaagatcgaggaacttgatcaagaaaacgaagcagcgttggaaaatggaattaaaaatgaggaaaacacagaaccaggtgctgaatcttctgagaacgctgatgatcccaacaaagatacaagtgaaaacgcagatggtcaaagtgatgagaacaaggacgactatacaatcccagatgagtatagaattggaccatatcagcccaatgttcctgttggtatagactatgtgatacctaaaacagggttttactgtaagctgtgttcactcttttatacaaatgaagaagttgcaaagaatactcattgcagcagccttcctcattatcagaaattaaagaaatttctgaataaattggcagaagaacgcagacagaagaaggaaacttaagatgtgcaaggagatttaatgatttcaaagaaaataatggttctttgtttttaatgttaaccttttttaaatacaatactgatagttagaagaaaactattgtactcttttgttttagtggagaaataatagatgtctgttcatgtgttaagtgttatagcaaaaaaaatacacatatggttaagttaatgaatagtttttgttttatcagaatggcaacagacagaagtactttgtagagattgacttcctaagctacttaagacaacttgcaccactaagaaaaaaatgtagaaccatttggaaaaatgaaatttagtagttccaagtttcaaagaaatgtcaacattttattccattcaataaagaacaaaaccaatagtgtttttattactttcatctgaaacattccatgttttaatctgagccttgcagactttcatttggagtttgaacccgttttggttgcatttcatttttggagaacttaattaacgtgagattggcaattgaaatgcaggtgcagttttctgttaatgtcatgctgttgtttaggtaataagaaatattaagtaattggctttagattttgtaatttttttccctgagttcctgctagatttcgtattctagtagtcaatgtattttcagtgaaatgcaaaaatattcccattatctttgaccagtattaatttttgagatcttactgcttgtcacttgaatcccgtgattgtcatacatctctggtataagcaacatttgatttttgaagtgtgtagaccatctcttcatattttcaagatgtaattttacatttctgcatttttaaaacagtttggccataatcctagatgcacgcttctaattcatgtacctgcacatgtgacctttgtgaacagaaatttgcatgtataatttgtgtttacttgtaactttctggttatatactgcttatatctgtggattcaagttactgaagtgaataccaataaaaagaaaaccctaggccatgttaattggttatacatgtttggaatgttaaccaacaacgtatttgtcagttgtggtttttattcgctcttaaactttgtgcatgctttaacaatttattacttttaaatctagagtgaattctaaagactgccgctaaagatctgagttttaaaaatgttgttgctggtggatttcttgttcctgttacataactaaaagtgaggccatttgtggtttttaaaaaccttatgaattaaaaatgctacaggtgaacaaacagaagcttatgtttagagatattgatgacttaacagtacaattggaagtaatacggatgagcaagaattagttctgcagcttttcaaaataattacgtagagactcttggtatattggattatctgttgttaaacaatttttttttcttccctgacacagggtctcactctgtcacccagactggagtgcagtggcacagttctctgcaacctcagcctttgggctcaaatgaccctcctacctcagtctcctgagtagctgggactacaggctcatgccactatacctggctagtttttggtttttttgtatagatggggctttgccatgttgcccaggttgatcttgaattcctgggcccaagtgatctgctcgcttcagcctcccaaagtgctgggactgtaggcatgagccaccatccctggccaagaaacaaagttttaatttcaaaaaaatctacaaaaacaggataggcattgtctttcaaatgttcagaccccagtttattaaaggatacttcaaatagttggctaaattttatgatctctcccgttgaaaagtaggtgatgattttaatgtgacatgcacaaaaaatccttgccagtttacttctgcaatttaattttagcctttactaattacccacttctgtttaattccaatttttaacagcaggtacataaagcattatgtgcacaatgg

SEQ ID NO: 85092 - DNA, 4834 bp, Homo sapiens
aggctagtagggccgtggtaaatcggccgaggtcggtccgctgagagaggtacctctccttttccctctccctttccctaagagttgtctgctggttctcagcttgaagaagattctgcagtccttattgatcctttttcttggcgttaccattttttgaagcaaagttaacctagctttctagtttgagctttctttttggccgtctttaaaaaaaattttttttttaatctataaaatagacaagagctagttctacaatgtccaagtcattccagcagtcatctctcagtagggactcacagggtcatgggcgtgacctgtctgcggcaggaataggccttcttgctgctgctacccagtctttaagtatgccagcatctcttggaaggatgaaccagggtactgcacgccttgctagtttaatgaatcttggaatgagttcttcattgaatcaacaaggagctcatagtgcactgtcttctgctagtacttcttcccataatttgcagtctatatttaacattggaagtagaggtccactccctttatcttctcaacaccgtggagatgcagaccaggccagtaacattttggccagctttggtctgtctgctagagacttagatgaactgagtcgttatccagaggacaagattactcctgagaatttgccccaaatccttctacagcttaaaaggaggagaactgaagaaggccctaccttgagttatggtagagatggcagatctgctacacgggagccaccatacagagtacctagggatgattgggaagaaaaaaggcactttagaagagatagttttgatgatcgtggtcctagtctcaacccagtgcttgattatgaccatggaagtcgttctcaagaatctggttattatgacagaatggattatgaagatgacagattaagagatggagaaaggtgtagggatgattctttttttggtgagacctcgcataactatcataaatttgacagtgagtatgagagaatgggacgtggtcctggccccttacaagagagatctctctttgagaaaaagagaggcgctcctccaagtagcaatattgaagacttccatggactcttaccgaagggttatccccatctgtgctctatatgtgatttgccagttcattctaataaggagtggagtcaacatatcaatggagcaagtcacagtcgtcgatgccagcttcttcttgaaatctacccagaatggaatcctgacaatgatacaggacacacaatgggtgatccattcatgttgcagcagtctacaaatccagcaccaggaattctgggacctccacctccctcatttcatcttgggggaccagcagttggaccaagaggaaatctgggtgctggaaatggaaacctgcaaggacctagacacatgcagaaaggcagagtggaaactagcagagttgttcacatcatggattttcaacgagggaaaaacttgagataccagctattacagctggtagaaccatttggagtcatttcaaatcatctgattctaaataaaattaatgaggcatttattgaaatggcaaccacagaggatgctcaggccgcagtggattattacacaaccacaccagcgttagtatttggcaagccagtgagagttcatttatcccagaagtataaaagaataaagaaacctgaaggaaagccagatcagaagtttgatcaaaagcaagagcttggacgtgtgatacatctcagcaatttgccgcattctggctattctgatagtgctgttctcaagcttgctgagccttatgggaaaataaagaattacatattgatgaggatgaaaagtcaggcttttattgagatggagacaagagaagatgcaatggcaatggttgaccattgtttgaaaaaagccctttggtttcaggggagatgtgtgaaggttgacctgtctgagaaatataaaaaactggttctgaggattccaaacagaggcattgatttactgaaaaaagataaatcccgacaaaagatcttcactctaccaggactgggcacaagaatctccaatgtgcactcaacgcaacacacctccccaaaaaaccaccccttggggaacctggcgatttccccagtactgatggttcccagaagactgagagttcaaccgaaggtaaagaacaagaagagaagtccggtgaagatggtgagaaagacacaaaggatgaccagacagagcaggaacctaatatgcttcttgaatctgaagatgagctacttgtagatgaagaagaagcagcagcactgctagaaagtggcagttcagtgggagacgagaccgatcttgctaatttaggtgatgtggcttctgatgggaaaaaggaaccatcagataaagctgtgaaaaaagatggaagtgcttcagcagcagcaaagaaaaagcttaaaaaggtggacaagatcgaggaacttgatcaagaaaacgaagcagcgttggaaaatggaattaaaaatgaggaaaacacagaaccaggtgctgaatcttctgagaacgctgatgatcccaacaaagatacaagtgaaaacgcagatggtcaaagtgatgagaacaaggacgactatacaatcccagatgagtatagaattggaccatatcagcccaatgttcctgttggtatagactatgtgatacctaaaacagggttttactgtaagctgtgttcactcttttatacaaatgaagaagttgcaaagaatactcattgcagcagccttcctcattatcagaaattaaagaaatttctgaataaattggcagaagaacgcagacagaagaaggaaacttaagatgtgcaaggagatttaatgatttcaaagaaaataatggttctttgtttttaatgttaaccttttttaaatacaatactgatagttagaagaaaactattgtactcttttgttttagtggagaaataatagatgtctgttcatgtgttaagtgttatagcaaaaaaaatacacatatggttaagttaatgaatagtttttgttttatcagaatggcaacagacagaagtactttgtagagattgacttcctaagctacttaagacaacttgcaccactaagaaaaaaatgtagaaccatttggaaaaatgaaatttagtagttccaagtttcaaagaaatgtcaacattttattccattcaataaagaacaaaaccaatagtgtttttattactttcatctgaaacattccatgttttaatctgagccttgcagactttcatttggagtttgaacccgttttggttgcatttcatttttggagaacttaattaacgtgagattggcaattgaaatgcaggtgcagttttctgttaatgtcatgctgttgtttaggtaataagaaatattaagtaattggctttagattttgtaatttttttccctgagttcctgctagatttcgtattctagtagtcaatgtattttcagtgaaatgcaaaaatattcccattatctttgaccagtattaatttttgagatcttactgcttgtcacttgaatcccgtgattgtcatacatctctggtataagcaacatttgatttttgaagtgtgtagaccatctcttcatattttcaagatgtaattttacatttctgcatttttaaaacagtttggccataatcctagatgcacgcttctaattcatgtacctgcacatgtgacctttgtgaacagaaatttgcatgtataatttgtgtttacttgtaactttctggttatatactgcttatatctgtggattcaagttactgaagtgaataccaataaaaagaaaaccctaggccatgttaattggttatacatgtttggaatgttaaccaacaacgtatttgtcagttgtggtttttattcgctcttaaactttgtgcatgctttaacaatttattacttttaaatctagagtgaattctaaagactgccgctaaagatctgagttttaaaaatgttgttgctggtggatttcttgttcctgttacataactaaaagtgaggccatttgtggtttttaaaaaccttatgaattaaaaatgctacaggtgaacaaacagaagcttatgtttagagatattgatgacttaacagtacaattggaagtaatacggatgagcaagaattagttctgcagcttttcaaaataattacgtagagactcttggtatattggattatctgttgttaaacaatttttttttcttccctgacacagggtctcactctgtcacccagactggagtgcagtggcacagttctctgcaacctcagcctttgggctcaaatgaccctcctacctcagtctcctgagtagctgggactacaggctcatgccactatacctggctagtttttggtttttttgtatagatggggctttgccatgttgcccaggttgatcttgaattcctgggcccaagtgatctgctcgcttcagcctcccaaagtgctgggactgtaggcatgagccaccatccctggccaagaaacaaagttttaatttcaaaaaaatctacaaaaacaggataggcattgtctttcaaatgttcagaccccagtttattaaaggatacttcaaatagttggctaaattttatgatctctcccgttgaaaagtaggtgatgattttaatgtgacatgcacaaaaaatccttgccagtttacttctgcaatttaattttagcctttactaattacccacttctgtttaattccaatttttaacagcaggtacataaagcattatgtgcacaatgg

SEQ ID NO: 85093 - DNA, 5279 bp, Homo sapiens
aggctagtagggccgtggtaaatcggccgaggtcggtccgctgagagaggtacctctccttttccctctccctttccctaagagttgtctgctggttctcagcttgaagaagattctgcagtccttattgatcctttttcttggcgttaccattttttgaagcaaagttaacctagctttctagtttgagctttctttttggccgtctttaaaaaaaattttttttttaatctataaaatagacaagagctagttctacaatgtccaagtcattccagcagtcatctctcagtagggactcacagggtcatgggcgtgacctgtctgcggcaggaataggccttcttgctgctgctacccagtctttaagtatgccagcatctcttggaaggatgaaccagggtactgcacgccttgctagtttaatgaatcttggaatgagttcttcattgaatcaacaaggagctcatagtgcactgtcttctgctagtacttcttcccataatttgcagtctatatttaacattggaagtagaggtccactccctttatcttctcaacaccgtggagatgcagaccaggccagtaacattttggccagctttggtctgtctgctagagacttagatgaactgagtcgttatccagaggacaagattactcctgagaatttgccccaaatccttctacagcttaaaaggaggagaactgaagaaggccctaccttgagttatggtagagatggcagatctgctacacgggagccaccatacagagtacctagggatgattgggaagaaaaaaggcactttagaagagatagttttgatgatcgtggtcctagtctcaacccagtgcttgattatgaccatggaagtcgttctcaagaatctggttattatgacagaatggattatgaagatgacagattaagagatggagaaaggtgtagggatgattctttttttggtgagacctcgcataactatcataaatttgacagtgagtatgagagaatgggacgtggtcctggccccttacaagagagatctctctttgagaaaaagagaggcgctcctccaagtagcaatattgaagacttccatggactcttaccgaagggttatccccatctgtgctctatatgtgatttgccagttcattctaataaggagtggagtcaacatatcaatggagcaagtcacagtcgtcgatgccagcttcttcttgaaatctacccagaatggaatcctgacaatgatacaggacacacaatgggtgatccattcatgttgcagcagtctacaaatccagcaccaggaattctgggacctccacctccctcatttcatcttgggggaccagcagttggaccaagaggaaatctgggtgctggaaatggaaacctgcaaggacctagacacatgcagaaaggcagagtggaaactagcagagttgttcacatcatggattttcaacgagggaaaaacttgagataccagctattacagctggtagaaccatttggagtcatttcaaatcatctgattctaaataaaattaatgaggcatttattgaaatggcaaccacagaggatgctcaggccgcagtggattattacacaaccacaccagcgttagtatttggcaagccagtgagagttcatttatcccagaagtataaaagaataaagaaacctgaaggaaagccagatcagaagtttgatcaaaagcaagagcttggacgtgtgatacatctcagcaatttgccgcattctggctattctgatagtgctgttctcaagcttgctgagccttatgggaaaataaagaattacatattgatgaggatgaaaagtcaggcttttattgagatggagacaagagaagatgcaatggcaatggttgaccattgtttgaaaaaagccctttggtttcaggggagatgtgtgaaggttgacctgtctgagaaatataaaaaactggttctgaggattccaaacagaggcattgatttactgaaaaaagataaatcccgaaaaagatcttactctccagatggcaaagaatctccaagtgataagaaatccaaaactgatggttcccagaagactgagagttcaaccgaaggtaaagaacaagaagagaagtccggtgaagatggtgagaaagacacaaaggatgaccagacagagcaggaacctaatatgcttcttgaatctgaagatgagctacttgtagatgaagaagaagcagcagcactgctagaaagtggcagttcagtgggagacgagaccgatcttgctaatttaggtgatgtggcttctgatgggaaaaaggaaccatcagataaagctgtgaaaaaagatggaagtgcttcagcagcagcaaagaaaaagcttaaaaaggtggacaagatcgaggaacttgatcaagaaaacgaagcagcgttggaaaatggaattaaaaatgaggaaaacacagaaccaggtgctgaatcttctgagaacgctgatgatcccaacaaagatacaagtgaaaacgcagatggtcaaagtgatgagaacaaggacgactatacaatcccagatgagtatagaattggaccatatcagcccaatgttcctgttggtgagatttaagtctttgttcttcaccttcctcactctcctcaaaacaaactcttaggttttaaaataagattttaaagttggtcttacataagctgtgatagcattttaaatttgctttgtttctatggggaacaatttataaatcttaattgatatattttcctctcatgcatgtctctgattttgtattattttctgttgttattccacaatgtgttccctttttttcgtaaaatttcttgcaagttacacgcttttgttttgcttttctgtgttgtttttctgtattatatttctttttttaagaatacagttaggtgagacctcaaacatcaattaggtaaaagcaaaatatggttcggtttttgttttttatcttaggctgtattggacttctcaaaaacatgttgtttcatttaaattatgttgacaggtgaaattgtgaatactaaataaaatcttcagtttaatttgtaagaatgtatgtttgtatttctaggtatagactatgtgatacctaaaacagggttttactgtaagctgtgttcactcttttatacaaatgaagaagttgcaaagaatactcattgcagcagccttcctcattatcagaaattaaagaaatttctgaataaattggcagaagaacgcagacagaagaaggaaacttaagatgtgcaaggagatttaatgatttcaaagaaaataatggttctttgtttttaatgttaaccttttttaaatacaatactgatagttagaagaaaactattgtactcttttgttttagtggagaaataatagatgtctgttcatgtgttaagtgttatagcaaaaaaaatacacatatggttaagttaatgaatagtttttgttttatcagaatggcaacagacagaagtactttgtagagattgacttcctaagctacttaagacaacttgcaccactaagaaaaaaatgtagaaccatttggaaaaatgaaatttagtagttccaagtttcaaagaaatgtcaacattttattccattcaataaagaacaaaaccaatagtgtttttattactttcatctgaaacattccatgttttaatctgagccttgcagactttcatttggagtttgaacccgttttggttgcatttcatttttggagaacttaattaacgtgagattggcaattgaaatgcaggtgcagttttctgttaatgtcatgctgttgtttaggtaataagaaatattaagtaattggctttagattttgtaatttttttccctgagttcctgctagatttcgtattctagtagtcaatgtattttcagtgaaatgcaaaaatattcccattatctttgaccagtattaatttttgagatcttactgcttgtcacttgaatcccgtgattgtcatacatctctggtataagcaacatttgatttttgaagtgtgtagaccatctcttcatattttcaagatgtaattttacatttctgcatttttaaaacagtttggccataatcctagatgcacgcttctaattcatgtacctgcacatgtgacctttgtgaacagaaatttgcatgtataatttgtgtttacttgtaactttctggttatatactgcttatatctgtggattcaagttactgaagtgaataccaataaaaagaaaaccctaggccatgttaattggttatacatgtttggaatgttaaccaacaacgtatttgtcagttgtggtttttattcgctcttaaactttgtgcatgctttaacaatttattacttttaaatctagagtgaattctaaagactgccgctaaagatctgagttttaaaaatgttgttgctggtggatttcttgttcctgttacataactaaaagtgaggccatttgtggtttttaaaaaccttatgaattaaaaatgctacaggtgaacaaacagaagcttatgtttagagatattgatgacttaacagtacaattggaagtaatacggatgagcaagaattagttctgcagcttttcaaaataattacgtagagactcttggtatattggattatctgttgttaaacaatttttttttcttccctgacacagggtctcactctgtcacccagactggagtgcagtggcacagttctctgcaacctcagcctttgggctcaaatgaccctcctacctcagtctcctgagtagctgggactacaggctcatgccactatacctggctagtttttggtttttttgtatagatggggctttgccatgttgcccaggttgatcttgaattcctgggcccaagtgatctgctcgcttcagcctcccaaagtgctgggactgtaggcatgagccaccatccctggccaagaaacaaagttttaatttcaaaaaaatctacaaaaacaggataggcattgtctttcaaatgttcagaccccagtttattaaaggatacttcaaatagttggctaaattttatgatctctcccgttgaaaagtaggtgatgattttaatgtgacatgcacaaaaaatccttgccagtttacttctgcaatttaattttagcctttactaattacccacttctgtttaattccaatttttaacagcaggtacataaagcattatgtgcacaatgg

SEQ ID NO: 85094 - DNA, 3992 bp, Homo sapiens
aggctagtagggccgtggtaaatcggccgaggtcggtccgctgagagaggtacctctccttttccctctccctttccctaaggtaggcgtgaagcgggtaagagtcggggtcgggtggctgggggttctccgtgtccgccgggaggggacaacgacggcgacaggggctgcggggagccggcggcgcgcctttcttgctcgctcccgctctgcctccctccgcgttgcgtatgtgagccgcctgatcggcggccgccatgttaggagcgcagtggcggcgcaaccagccttctagggcggcggaggtgagcggtccgggagggaaacacgcggccggccaagggcccagggtgcggcgggagattttgggtgaagaggtgcgctgaccggccgagcttcctgcgcgtcctgggctcgttgtgggcgggggcgggacgactagcccgttacacgcgggccgcggcgctgagggggagggaggagctcgctcgaggcctgagggacagactgtacactgggggcttgccgtttgaggaggatggttaagatatctaagtccttgggtagcgccagtgccaaataacccgttcgcctttttttctctgaaaatgttccccgccccccatcgcgtaaaaatggccgaaaaatgaaacgttaacgcttgtttttcgtactgcgtcgtggaacaagccgcctgcagtacagtgcgaggcgggtgatttgcacttgtttagtcaagtcacctcacatcctttttctctttatcaaaatagtattagtccaggttcctccagagaggatcgtgtggtgtgggaccttccggtttccagacaaagggttttggagtaccgtggtgtagtcgccgcatcgttctttgcatttcgagctctgtgccatgttctgtgttcggcatttaccgtggatgaatatcccctagagttgtctgctggttctcagcttgaagaagattctgcagtccttattgatcctttttcttggcgttaccattttttgaagcaaagttaacctagctttctagtttgagctttctttttggccgtctttaaaaaaaattttttttttaatctataaaatagacaagagctagttctacaatgtccaagtcattccagcagtcatctctcagtagggactcacagggtcatgggcgtgacctgtctgagaaatataaaaaactggttctgaggattccaaacagaggcattgatttactgaaaaaagataaatcccgaaaaagatcttactctccagatggcaaagaatctccaagtgataagaaatccaaaactgatggttcccagaagactgagagttcaaccgaaggtaaagaacaagaagagaagtccggtgaagatggtgagaaagacacaaaggatgaccagacagagcaggaacctaatatgcttcttgaatctgaagatgagctacttgtagatgaagaagaagcagcagcactgctagaaagtggcagttcagtgggagacgagaccgatcttgctaatttaggtgatgtggcttctgatgggaaaaaggaaccatcagataaagctgtgaaaaaagatggaagtgcttcagcagcagcaaagaaaaagcttaaaaaggtggacaagatcgaggaacttgatcaagaaaacgaagcagcgttggaaaatggaattaaaaatgaggaaaacacagaaccaggtgctgaatcttctgagaacgctgatgatcccaacaaagatacaagtgaaaacgcagatggtcaaagtgatgagaacaaggacgactatacaatcccagatgagtatagaattggaccatatcagcccaatgttcctgttggtatagactatgtgatacctaaaacagggttttactgtaagctgtgttcactcttttatacaaatgaagaagttgcaaagaatactcattgcagcagccttcctcattatcagaaattaaagaaatttctgaataaattggcagaagaacgcagacagaagaaggaaacttaagatgtgcaaggagatttaatgatttcaaagaaaataatggttctttgtttttaatgttaaccttttttaaatacaatactgatagttagaagaaaactattgtactcttttgttttagtggagaaataatagatgtctgttcatgtgttaagtgttatagcaaaaaaaatacacatatggttaagttaatgaatagtttttgttttatcagaatggcaacagacagaagtactttgtagagattgacttcctaagctacttaagacaacttgcaccactaagaaaaaaatgtagaaccatttggaaaaatgaaatttagtagttccaagtttcaaagaaatgtcaacattttattccattcaataaagaacaaaaccaatagtgtttttattactttcatctgaaacattccatgttttaatctgagccttgcagactttcatttggagtttgaacccgttttggttgcatttcatttttggagaacttaattaacgtgagattggcaattgaaatgcaggtgcagttttctgttaatgtcatgctgttgtttaggtaataagaaatattaagtaattggctttagattttgtaatttttttccctgagttcctgctagatttcgtattctagtagtcaatgtattttcagtgaaatgcaaaaatattcccattatctttgaccagtattaatttttgagatcttactgcttgtcacttgaatcccgtgattgtcatacatctctggtataagcaacatttgatttttgaagtgtgtagaccatctcttcatattttcaagatgtaattttacatttctgcatttttaaaacagtttggccataatcctagatgcacgcttctaattcatgtacctgcacatgtgacctttgtgaacagaaatttgcatgtataatttgtgtttacttgtaactttctggttatatactgcttatatctgtggattcaagttactgaagtgaataccaataaaaagaaaaccctaggccatgttaattggttatacatgtttggaatgttaaccaacaacgtatttgtcagttgtggtttttattcgctcttaaactttgtgcatgctttaacaatttattacttttaaatctagagtgaattctaaagactgccgctaaagatctgagttttaaaaatgttgttgctggtggatttcttgttcctgttacataactaaaagtgaggccatttgtggtttttaaaaaccttatgaattaaaaatgctacaggtgaacaaacagaagcttatgtttagagatattgatgacttaacagtacaattggaagtaatacggatgagcaagaattagttctgcagcttttcaaaataattacgtagagactcttggtatattggattatctgttgttaaacaatttttttttcttccctgacacagggtctcactctgtcacccagactggagtgcagtggcacagttctctgcaacctcagcctttgggctcaaatgaccctcctacctcagtctcctgagtagctgggactacaggctcatgccactatacctggctagtttttggtttttttgtatagatggggctttgccatgttgcccaggttgatcttgaattcctgggcccaagtgatctgctcgcttcagcctcccaaagtgctgggactgtaggcatgagccaccatccctggccaagaaacaaagttttaatttcaaaaaaatctacaaaaacaggataggcattgtctttcaaatgttcagaccccagtttattaaaggatacttcaaatagttggctaaattttatgatctctcccgttgaaaagtaggtgatgattttaatgtgacatgcacaaaaaatccttgccagtttacttctgcaatttaattttagcctttactaattacccacttctgtttaattccaatttttaacagcaggtacataaagcattatgtgcacaatgg

SEQ ID NO: 85095 - DNA, 4740 bp, Homo sapiens
aggctagtagggccgtggtaaatcggccgaggtcggtccgctgagagaggtacctctccttttccctctccctttccctaagagttgtctgctggttctcagcttgaagaagattctgcagtccttattgatcctttttcttggcgttaccattttttgaagcaaagttaacctagctttctagtttgagctttctttttggccgtctttaaaaaaaattttttttttaatctataaaatagacaagagctagttctacaatgtccaagtcattccagcagtcatctctcagtagggactcacagggtcatgggcgtgacctgtctgcggcaggaataggccttcttgctgctgctacccagtctttaagtatgccagcatctcttggaaggatgaaccagggtactgcacgccttgctagtttaatgaatcttggaatgagttcttcattgaatcaacaaggagctcatagtgcactgtcttctgctagtacttcttcccataatttgcagtctatatttaacattggaagtagaggtccactccctttatcttctcaacaccgtggagatgcagaccaggccagtaacattttggccagctttggtctgtctgctagagacttagatgaactgagtcgttatccagaggacaagattactcctgagaatttgccccaaatccttctacagcttaaaaggaggagaactgaagaaggccctaccttgagttatggtagagatggcagatctgctacacgggagccaccatacagagtacctagggatgattgggaagaaaaaaggcactttagaagagatagttttgatgatcgtggtcctagtctcaacccagtgcttgattatgaccatggaagtcgttctcaagaatctggttattatgacagaatggattatgaagatgacagattaagagatggagaaaggtgtagggatgattctttttttggtgagacctcgcataactatcataaatttgacagtgagtatgagagaatgggacgtggtcctggccccttacaagagagatctctctttgagaaaaagagaggcgctcctccaagtagcaatattgaagacttccatggactcttaccgaagggttatccccatctgtgctctatatgtgatttgccagttcattctaataaggagtggagtcaacatatcaatggagcaagtcacagtcgtcgatgccagcttcttcttgaaatctacccagaatggaatcctgacaatgatacaggacacacaatgggtgatccattcatgttgcagcagtctacaaatccagcaccaggaattctgggacctccacctccctcatttcatcttgggggaccagcagttggaccaagaggaaatctgggtgctggaaatggaaacctgcaaggacctagacacatgcagaaaggcagagtggaaactagcagagttgttcacatcatggattttcaacgagggaaaaacttgagataccagctattacagctggtagaaccatttggagtcatttcaaatcatctgattctaaataaaattaatgaggcatttattgaaatggcaaccacagaggatgctcaggccgcagtggattattacacaaccacaccagcgttagtatttggcaagccagtgagagttcatttatcccagaagtataaaagaataaagaaacctgaaggaaagccagatcagaagtttgatcaaaagcaagagcttggacgtgtgatacatctcagcaatttgccgcattctggctattctgatagtgctgttctcaagcttgctgagccttatgggaaaataaagaattacatattgatgaggatgaaaagtcaggcttttattgagatggagacaagagaagatgcaatggcaatggttgaccattgtttgaaaaaagccctttggtttcaggggagatgtgtgaaggttgacctgtctgagaaatataaaaaactggttctgaggattccaaacagaggcattgatttactgaaaaaagataaatcccgaaaaagatcttactctccagatggcaaagaatctccaagtgataagaaatccaaaactgatggttcccagaagactgagagttcaaccgaaggtaaagaacaagaagagaagtccggtgaagatggtgagaaagacacaaaggatgaccagacagagcaggaacctaatatgcttcttgaatctgaagatgagctacttgtagatgaagaagaagcagcagcactgctagaaagtggcagttcagtgggagacgagaccgatcttgctaatttaggtgatgtggcttctgatgggaaaaaggaaccatcagataaagctgtgaaaaaagatggaagtgcttcagcagcagcaaagaaaaagcttaaaaaggtggacaagatcgaggaacttgatcaagaaaacgaagcagcgttggaaaatggaattaaaaatgaggaaaacacagaaccaggtgctgaatcttctgagaacgctgatgatcccaacaaagatacaagtgaaaacgcagatggtcaaagtgatgagaacaaggacgactatacaatcccagatgagtatagaattggaccatatcagcccaatgttcctgttggtatagactatgtgatacctaaaacagggttttactgtaagctgtgttcactcttttatacaaatgaagaagttgcaaagaatactcattgcagcagccttcctcattatcagaaattaaagaaatttctgaataaattggcagaagaacgcagacagaagaaggaaacttaagatgtgcaaggagatttaatgatttcaaagaaaataatggttctttgtttttaatgttaaccttttttaaatacaatactgatagttagaagaaaactattgtactcttttgttttagtggagaaataatagatgtctgttcatgtgttaagtgttatagcaaaaaaaatacacatatggttaagttaatgaatagtttttgttttatcagaatggcaacagacagaagtactttgtagagattgacttcctaagctacttaagacaacttgcaccactaagaaaaaaatgtagaaccatttggaaaaatgaaatttagtagttccaagtttcaaagaaatgtcaacattttattccattcaataaagaacaacatgttttaatctgagccttgcagactttcatttggagtttgaacccgttttggttgcatttcatttttggagaacttaattaacgtgagattggcaattgaaatgcaggtgcagttttctgttaatgtcatgctgttgtttaggtaataagaaatattaagtaattggctttagattttgtaatttttttccctgagttcctgctagatttcgtattctagtagtcaatgtattttcagtgaaatgcaaaaatattcccattatctttgaccagtattaatttttgagatcttactgcttgtcacttgaatcccgtgattgtcatacatctctggtataagcaacatttgatttttgaagtgtgtagaccatctcttcatattttcaagatgtaattttacatttctgcatttttaaaacagtttggccataatcctagatgcacgcttctaattcatgtacctgcacatgtgacctttgtgaacagaaatttgcatgtataatttgtgtttacttgtaactttctggttatatactgcttatatctgtggattcaagttactgaagtgaataccaataaaaagaaaaccctaggccatgttaattggttatacatgtttggaatgttaaccaacaacgtatttgtcagttgtggtttttattcgctcttaaactttgtgcatgctttaacaatttattacttttaaatctagagtgaattctaaagactgccgctaaagatctgagttttaaaaatgttgttgctggtggatttcttgttcctgttacataactaaaagtgaggccatttgtggtttttaaaaaccttatgaattaaaaatgctacaggtgaacaaacagaagcttatgtttagagatattgatgacttaacagtacaattggaagtaatacggatgagcaagaattagttctgcagcttttcaaaataattacgtagagactcttggtatattggattatctgttgttaaacaatttttttttcttccctgacacagggtctcactctgtcacccagactggagtgcagtggcacagttctctgcaacctcagcctttgggctcaaatgaccctcctacctcagtctcctgagtagctgggactacaggctcatgccactatacctggctagtttttggtttttttgtatagatggggctttgccatgttgcccaggttgatcttgaattcctgggcccaagtgatctgctcgcttcagcctcccaaagtgctgggactgtaggcatgagccaccatccctggccaagaaacaaagttttaatttcaaaaaaatctacaaaaacaggataggcattgtctttcaaatgttcagaccccagtttattaaaggatacttcaaatagttggctaaattttatgatctctcccgttgaaaagtaggtgatgattttaatgtgacatgcacaaaaaatccttgccagtttacttctgcaatttaattttagcctttactaattacccacttctgtttaattccaatttttaacagcaggtacataaagcattatgtgcacaatgg

SEQ ID NO: 85096 - DNA, 3654 bp, Homo sapiens
aggctagtagggccgtggtaaatcggccgaggtcggtccgctgagagaggtacctctccttttccctctccctttccctaagagttgtctgctggttctcagcttgaagaagattctgcagtccttattgatcctttttcttggcgttaccattttttgaagcaaagttaacctagctttctagtttgagctttctttttggccgtctttaaaaaaaattttttttttaatctataaaatagacaagagctagttctacaatgtccaagtcattccagcagtcatctctcagtagggactcacagggtcatgggcgtgacctgtctgcggcaggaataggccttcttgctgctgctacccagtctttaagtatgccagcatctcttggaaggatgaaccagggtactgcacgccttgctagtttaatgaatcttggaatgagttcttcattgaatcaacaaggagctcatagtgcactgtcttctgctagtacttcttcccataatttgcagtctatatttaacattggaagtagaggtccactccctttatcttctcaacaccgtggagatgcagaccaggccagtaacattttggccagctttggtctgtctgctagagacttagatgaactgagtcgttatccagaggacaagattactcctgagaatttgccccaaatccttctacagcttaaaaggaggagaactgaagaaggccctaccttgagttatggtagagatggcagatctgctacacgggagccaccatacagagtacctagggatgattgggaagaaaaaaggcactttagaagagatagttttgatgatcgtggtcctagtctcaacccagtgcttgattatgaccatggaagtcgttctcaagaatctggttattatgacagaatggattatgaagatgacagattaagagatggagaaaggtgtagggatgattctttttttggtgagacctcgcataactatcataaatttgacagtgagtatgagagaatgggacgtggtcctggccccttacaagagagatctctctttgagaaaaagagaggcgctcctccaagtagcaatattgaagacttccatggactcttaccgaagggttatccccatctgtgctctatatgtgatttgccagttcattctaataaggagtggagtcaacatatcaatggagcaagtcacagtcgtcgatgccagcttcttcttgaaatctacccagaatggaatcctgacaatgatacaggacacacaatgggtgatccattcatgttgcagcagtctacaaatccagcaccaggaattctgggacctccacctccctcatttcatcttgggggaccagcagttggaccaagaggaaatctgggtgctggaaatggaaacctgcaaggacctagacacatgcagaaaggcagagtggaaactagcagagttgttcacatcatggattttcaacgagggaaaaacttgagataccagctattacagctggtagaaccatttggagtcatttcaaatcatctgattctaaataaaattaatgaggcatttattgaaatggcaaccacagaggatgctcaggccgcagtggattattacacaaccacaccagcgttagtatttggcaagccagtgagagttcatttatcccagaagtataaaagaataaagaaacctgaaggaaagccagatcagaagtttgatcaaaagcaagagcttggacgtgtgatacatctcagcaatttgccgcattctggctattctgatagtgctgttctcaagcttgctgagccttatgggaaaataaagaattacatattgatgaggatgaaaagtcaggcttttattgagatggagacaagagaagatgcaatggcaatggttgaccattgtttgaaaaaagccctttggtttcaggggagatgtgtgaaggttgacctgtctgagaaatataaaaaactggttctgaggattccaaacagaggcattgatttactgaaaaaagataaatcccgaaaaagatcttactctccagatggcaaagaatctccaagtgataagaaatccaaaactgatggttcccagaagactgagagttcaaccgaaggtaaagaacaagaagagaagtccggtgaagatggtgagaaagacacaaaggatgaccagacagagcaggaacctaatatgcttcttgaatctgaagatgagctacttgtagatgaagaagaagcagcagcactgctagaaagtggcagttcagtgggagacgagaccgatcttgctaatttaggtgatgtggcttctgatgggaaaaaggaaccatcagataaagctgtgaaaaaagatggaagtgcttcagcagcagcaaagaaaaagcttaaaaaggtggacaagatcgaggaacttgatcaagaaaacgaagcagcgttggaaaatggaattaaaaatgaggaaaacacagaaccaggtgctgaatcttctgagaacgctgatgatcccaacaaagatacaagtgaaaacgcagatggtcaaagtgatgagaacaaggacgactatacaatcccagatgagtatagaattggaccatatcagcccaatgttcctgttggtatagactatgtgatacctaaaacagggttttactgtaagctgtgttcactcttttatacaaatgaagaagttgcaaagaatactcattgcagcagccttcctcattatcagaaattaaagaaatttctgaataaattggcagaagaacgcagacagaagaaggaaacttaagatgtgcaaggagatttaatgatttcaaagaaaataatggttctttgtttttaatgttaaccttttttaaatacaatactgatagttagaagaaaactattgtactcttttgttttagtggagaaataatagatgtctgttcatgtgttaagtgttatagcaaaaaaaatacacatatggttaagttaatgaatagtttttgttttatcagaatggcaacagacagaagtactttgtagagattgacttcctaagctacttaagacaacttgcaccactaagaaaaaaatgtagaaccatttggaaaaatgaaatttagtagttccaagtttcaaagaaatgtcaacattttattccattcaataaagaacaaaaccaatagtgtttttattactttcatctgaaacattccatgttttaatctgagccttgcagactttcatttggagtttgaacccgttttggttgcatttcatttttggagaacttaattaacgtgagattggcaattgaaatgcaggtgcagttttctgttaatgtcatgctgttgtttaggtaataagaaatattaagtaattggctttagattttgtaatttttttccctgagttcctgctagatttcgtattctagtagtcaatgtattttcagtgaaatgcaaaaatattcccattatctttgaccagtattaatttttgagatcttactgcttgtcacttgaatcccgtgattgtcatacatctctggtataagcaacagtgcaggtatgaacaacagtgcaggtatgaacaacagtgcaggtatgtacaacagtgcaggtatgaacaacagtgcacggtatgactaccgg

SEQ ID NO: 85097 - DNA, 3224 bp, Homo sapiens
  misc_feature (3221)..(3221): n is a, c, g, or t
aggctagtagggccgtggtaaatcggccgaggtcggtccgctgagagaggtacctctccttttccctctccctttccctaagagttgtctgctggttctcagcttgaagaagattctgcagtccttattgatcctttttcttggcgttaccattttttgaagcaaagttaacctagctttctagtttgagctttctttttggccgtctttaaaaaaaattttttttttaatctataaaatagacaagagctagttctacaatgtccaagtcattccagcagtcatctctcagtagggactcacagggtcatgggcgtgacctgtctgcggcaggaataggccttcttgctgctgctacccagtctttaagtatgccagcatctcttggaaggatgaaccagggtactgcacgccttgctagtttaatgaatcttggaatgagttcttcattgaatcaacaaggagctcatagtgcactgtcttctgctagtacttcttcccataatttgcagtctatatttaacattggaagtagaggtccactccctttatcttctcaacaccgtggagatgcagaccaggccagtaacattttggccagctttggtctgtctgctagagacttagatgaactgagtcgttatccagaggacaagattactcctgagaatttgccccaaatccttctacagcttaaaaggaggagaactgaagaaggccctaccttgagttatggtagagatggcagatctgctacacgggagccaccatacagagtacctagggatgattgggaagaaaaaaggcactttagaagagatagttttgatgatcgtggtcctagtctcaacccagtgcttgattatgaccatggaagtcgttctcaagaatctggttattatgacagaatggattatgaagatgacagattaagagatggagaaaggtgtagggatgattctttttttggtgagacctcgcataactatcataaatttgacagtgagtatgagagaatgggacgtggtcctggccccttacaagagagatctctctttgagaaaaagagaggcgctcctccaagtagcaatattgaagacttccatggactcttaccgaagggttatccccatctgtgctctatatgtgatttgccagttcattctaataaggagtggagtcaacatatcaatggagcaagtcacagtcgtcgatgccagcttcttcttgaaatctacccagaatggaatcctgacaatgatacaggacacacaatgggtgatccattcatgttgcagcagtctacaaatccagcaccaggaattctgggacctccacctccctcatttcatcttgggggaccagcagttggaccaagaggaaatctgggtgctggaaatggaaacctgcaaggacctagacacatgcagaaaggcagagtggaaactagcagagttgttcacatcatggattttcaacgagggaaaaacttgagataccagctattacagctggtagaaccatttggagtcatttcaaatcatctgattctaaataaaattaatgaggcatttattgaaatggcaaccacagaggatgctcaggccgcagtggattattacacaaccacaccagcgttagtatttggcaagccagtgagagttcatttatcccagaagtataaaagaataaagaaacctgaaggaaagccagatcagaagtttgatcaaaagcaagagcttggacgtgtgatacatctcagcaatttgccgcattctggctattctgatagtgctgttctcaagcttgctgagccttatgggaaaataaagaattacatattgatgaggatgaaaagtcaggcttttattgagatggagacaagagaagatgcaatggcaatggttgaccattgtttgaaaaaagccctttggtttcaggggagatgtgtgaaggttgacctgtctgagaaatataaaaaactggttctgaggattccaaacagaggcattgatttactgaaaaaagataaatcccgaaaaagatcttactctccagatggcaaagaatctccaagtgataagaaatccaaaactgatggttcccagaagactgagagttcaaccgaaggtaaagaacaagaagagaagtccggtgaagatggtgagaaagacacaaaggatgaccagacagagcaggaacctaatatgcttcttgaatctgaagatgagctacttgtagatgaagaagaagcagcagcactgctagaaagtggcagttcagtgggagacgagaccgatcttgctaatttaggtgatgtggcttctgatgggaaaaaggaaccatcagataaagctgtgaaaaaagatggaagtgcttcagcagcagcaaagaaaaagcttaaaaaggtggacaagatcgaggaacttgatcaagaaaacgaagcagcgttggaaaatggaattaaaaatgaggaaaacacagaaccaggtgctgaatcttctgagaacgctgatgatcccaacaaagatacaagtgaaaacgcagatggtcaaagtgatgagaacaaggacgactatacaatcccagatgagtatagaattggaccatatcagcccaatgttcctgttggtatagactatgtgatacctaaaacagggttttactgtaagctgtgttcactcttttatacaaatgaagaagttgcaaagaatactcattgcagcagccttcctcattatcagaaattaaagaaatttctgaataaattggcagaagaacgcagacagaagaaggaaacttaagatgtgcaaggagatttaatgatttcaaagaaaataatggttctttgtttttaatgttaaccttttttaaatacaatactgatagttagaagaaaactattgtactcttttgttttagtggagaaataatagatgtctgttcatgtgttaagtgttatagcaaaaaaaatacacatatggttaagttaatgaatagtttttgttttatcagaatggcaacagacagaagtactttgtagagattgacttcctaagctacttaagacaacttgcaccactaagaaaaaaatgtagaaccatttggaaaaatgaaatttagtagttccaagtttcaaagaaatgtcaacattttatcatcataagacaaaccataggtttattcttcacgaacatcagttaactgacctcgctcattgngtt

SEQ ID NO: 85098 - DNA, 2878 bp, Homo sapiens
aggctagtagggccgtggtaaatcggccgaggtcggtccgctgagagaggtacctctccttttccctctccctttccctaagagttgtctgctggttctcagcttgaagaagattctgcagtccttattgatcctttttcttggcgttaccattttttgaagcaaagttaacctagctttctagtttgagctttctttttggccgtctttaaaaaaaattttttttttaatctataaaatagacaagagctagttctacaatgtccaagtcattccagcagtcatctctcagtagggactcacagggtcatgggcgtgacctgtctgcggcaggaataggccttcttgctgctgctacccagtctttaagtatgccagcatctcttggaaggatgaaccagggtactgcacgccttgctagtttaatgaatcttggaatgagttcttcattgaatcaacaaggagctcatagtgcactgtcttctgctagtacttcttcccataatttgcagtctatatttaacattggaagtagaggtccactccctttatcttctcaacaccgtggagatgcagaccaggccagtaacattttggccagctttggtctgtctgctagagacttagatgaactgagtcgttatccagaggacaagattactcctgagaatttgccccaaatccttctacagcttaaaaggaggagaactgaagaaggccctaccttgagttatggtagagatggcagatctgctacacgggagccaccatacagagtacctagggatgattgggaagaaaaaaggcactttagaagagatagttttgatgatcgtggtcctagtctcaacccagtgcttgattatgaccatggaagtcgttctcaagaatctggttattatgacagaatggattatgaagatgacagattaagagatggagaaaggtgtagggatgattctttttttggtgagacctcgcataactatcataaatttgacagtgagtatgagagaatgggacgtggtcctggccccttacaagagagatctctctttgagaaaaagagaggcgctcctccaagtagcaatattgaagacttccatggactcttaccgaagggttatccccatctgtgctctatatgtgatttgccagttcattctaataaggagtggagtcaacatatcaatggagcaagtcacagtcgtcgatgccagcttcttcttgaaatctacccagaatggaatcctgacaatgatacaggacacacaatgggtgatccattcatgttgcagcagtctacaaatccagcaccaggaattctgggacctccacctccctcatttcatcttgggggaccagcagttggaccaagaggaaatctgggtgctggaaatggaaacctgcaaggacctagacacatgcagaaaggcagagtggaaactagcagagttgttcacatcatggattttcaacgagggaaaaacttgagataccagctattacagctggtagaaccatttggagtcatttcaaatcatctgattctaaataaaattaatgaggcatttattgaaatggcaaccacagaggatgctcaggccgcagtggattattacacaaccacaccagcgttagtatttggcaagccagtgagagttcatttatcccagaagtataaaagaataaagaaacctgaaggaaagccagatcagaagtttgatcaaaagcaagagcttggacgtgtgatacatctcagcaatttgccgcattctggctattctgatagtgctgttctcaagcttgctgagccttatgggaaaataaagaattacatattgatgaggatgaaaagtcaggcttttattgagatggagacaagagaagatgcaatggcaatggttgaccattgtttgaaaaaagccctttggtttcaggggagatgtgtgaaggttgacctgtctgagaaatataaaaaactggttctgaggattccaaacagaggcattgatttactgaaaaaagataaatcccgaaaaagatcttactctccagatggcaaagaatctccaagtgataagaaatccaaaactgatggttcccagaagactgagagttcaaccgaaggtaaagaacaagaagagaagtccggtgaagatggtgagaaagacacaaaggatgaccagacagagcaggaacctaatatgcttcttgaatctgaagatgagctacttgtagatgaagaagaagcagcagcactgctagaaagtggcagttcagtgggagacgagaccgatcttgctaatttaggtgatgtggcttctgatgggaaaaaggaaccatcagataaagctgtgaaaaaagatggaagtgcttcagcagcagcaaagaaaaagcttaaaaaggtggacaagatcgaggaacttgatcaagaaaacgaagcagcgttggaaaatggaattaaaaatgaggaaaacacagaaccaggtgctgaatcttctgagaacgctgatgatcccaacaaagatacaagtgaaaacgcagatggtcaaagtgatgagaacaaggacgactatacaatcccagatgagtatagaattggaccatatcagcccaatgttcctgttggtatagactatgtgatacctaaaacagggttttactgtaagctgtgttcactcttttatacaaatgaagaagttgcaaagaatactcattgcagcagccttcctcattatcagaaattaaagaaatttctgaataaataggcaggcaacaccaggagcagaaatgaaagaggcaagaaagaagtgctatgtggcgagaaaaaaagttttaatgtattggagaagttttaaaaaacccagaaaaacgc

SEQ ID NO: 85099 - DNA, 2181 bp, Homo sapiens
aggctagtagggccgtggtaaatcggccgaggtcggtccgctgagagaggtacctctccttttccctctccctttccctaagagttgtctgctggttctcagcttgaagaagattctgcagtccttattgatcctttttcttggcgttaccattttttgaagcaaagttaacctagctttctagtttgagctttctttttggccgtctttaaaaaaaattttttttttaatctataaaatagacaagagctagttctacaatgtccaagtcattccagcagtcatctctcagtagggactcacagggtcatgggcgtgacctgtctgcggcaggaataggccttcttgctgctgctacccagtctttaagtatgccagcatctcttggaaggatgaaccagggtactgcacgccttgctagtttaatgaatcttggaatgagttcttcattgaatcaacaaggagctcatagtgcactgtcttctgctagtacttcttcccataatttgcagtctatatttaacattggaagtagaggtccactccctttatcttctcaacaccgtggagatgcagaccaggccagtaacattttggccagctttggtctgtctgctagagacttagatgaactgagtcgttatccagaggacaagattactcctgagaatttgccccaaatccttctacagcttaaaaggaggagaactgaagaaggccctaccttgagttatggtagagatggcagatctgctacacgggagccaccatacagagtacctagggatgattgggaagaaaaaaggcactttagaagagatagttttgatgatcgtggtcctagtctcaacccagtgcttgattatgaccatggaagtcgttctcaagaatctggttattatgacagaatggattatgaagatgacagattaagagatggagaaaggtgtagggatgattctttttttggtgagacctcgcataactatcataaatttgacagtgagtatgagagaatgggacgtggtcctggccccttacaagagagatctctctttgagaaaaagagaggcgctcctccaagtagcaatattgaagacttccatggactcttaccgaagggttatccccatctgtgctctatatgtgatttgccagttcattctaataaggagtggagtcaacatatcaatggagcaagtcacagtcgtcgatgccagcttcttcttgaaatctacccagaatggaatcctgacaatgatacaggacacacaatgggtgatccattcatgttgcagcagtctacaaatccagcaccaggaattctgggacctccacctccctcatttcatcttgggggaccagcagttggaccaagaggaaatctgggtgctggaaatggaaacctgcaaggacctagacacatgcagaaaggcagagtggaaactagcagagttgttcacatcatggattttcaacgagggaaaaacttgagataccagctattacagctggtagaaccatttggagtcatttcaaatcatctgattctaaataaaattaatgaggcatttattgaaatggcaaccacagaggatgctcaggccgcagtggattattacacaaccacaccagcgttagtatttggcaagccagtgagagttcatttatcccagaagtataaaagaataaagaaacctgaaggaaagccagatcagaagtttgatcaaaagcaagagcttggacgtgtgatacatctcagcaatttgccgcattctggctattctgatagtgctgttctcaagcttgctgagccttatgggaaaataaagaattacatattgatgaggatgaaaagtcaggcttttattgagatggagacaagagaagatgcaatggcaatggttgaccattgtttgaaaaaagccctttggtttcaggggagatgtgtgaaggttgacctgtctgagaaatataaaaaactggttctgaggattccaaacagaggcattgatttactgaaaaaagataaatcccgaaaaagatcttactctccagatggcaaagaatctccaagtgataagaaatccaaaagctcatcttcagattcaagaagcatattaggttcctgctctgtctggtcatcctttgtgtctttctcaccatcttcaccggacttct

SEQ ID NO: 85100 - DNA, 3009 bp, Homo sapiens
aggctagtagggccgtggtaaatcggccgaggtcggtccgctgagagaggtacctctccttttccctctccctttccctaaggtaggcgtgaagcgggtaagagtcggggtcgggtggctgggggttctccgtgtccgccgggaggggacaacgacggcgacaggggctgcggggagccggcggcgcgcctttcttgctcgctcccgctctgcctccctccgcgttgcgtatgtgagccgcctgatcggcggccgccatgttaggagcgcagtggcggcgcaaccagccttctagggcggcggaggtgagcggtccgggagggaaacacgcggccggccaagggcccagggtgcggcgggagattttgggtgaagaggtgcgctgaccggccgagcttcctgcgcgtcctgggctcgttgtgggcgggggcgggacgactagcccgttacacgcgggccgcggcgctgagggggagggaggagctcgctcgaggcctgagggacagactgtacactgggggcttgccgtttgaggaggatggttaagatatctaagtccttgggtagcgccagtgccaaataacccgttcgcctttttttctctgaaaatgttccccgccccccatcgcgtaaaaatggccgaaaaatgaaacgttaacgcttgtttttcgtactgcgtcgtggaacaagccgcctgcagtacagtgcgaggcgggtgatttgcacttgtttagtcaagtcacctcacatcctttttctctttatcaaaatagtattagtccaggttcctccagagaggatcgtgtggtgtgggaccttccggtttccagacaaagggttttggagtaccgtggtgtagtcgccgcatcgttctttgcatttcgagctctgtgccatgttctgtgttcggcatttaccgtggatgaatatcccctagagttgtctgctggttctcagcttgaagaagattctgcagtccttattgatcctttttcttggcgttaccattttttgaagcaaagttaacctagctttctagtttgagctttctttttggccgtctttaaaaaaaattttttttttaatctataaaatagacaagagctagttctacaatgtccaagtcattccagcagtcatctctcagtagggactcacagggtcatgggcgtgacctgtctgcggcaggaataggccttcttgctgctgctacccagtctttaagtatgccagcatctcttggaaggatgaaccagggtactgcacgccttgctagtttaatgaatcttggaatgagttcttcattgaatcaacaaggagctcatagtgcactgtcttctgctagtacttcttcccataatttgcagtctatatttaacattggaagtagaggtccactccctttatcttctcaacaccgtggagatgcagaccaggccagtaacattttggccagctttggtctgtctgctagagacttagatgaactgagtcgttatccagaggacaagattactcctgagaatttgccccaaatccttctacagcttaaaaggaggagaactgaagaaggccctaccttgagttatggtagagatggcagatctgctacacgggagccaccatacagagtacctagggatgattgggaagaaaaaaggcactttagaagagatagttttgatgatcgtggtcctagtctcaacccagtgcttgattatgaccatggaagtcgttctcaagaatctggttattatgacagaatggattatgaagatgacagattaagagatggagaaaggtgtagggatgattctttttttggtgagacctcgcataactatcataaatttgacagtgagtatgagagaatgggacgtggtcctggccccttacaagagagatctctctttgagaaaaagagaggcgctcctccaagtagcaatattgaagacttccatggactcttaccgaagggttatccccatctgtgctctatatgtgatttgccagttcattctaataaggagtggagtcaacatatcaatggagcaagtcacagtcgtcgatgccagcttcttcttgaaatctacccagaatggaatcctgacaatgatacaggacacacaatgggtgatccattcatgttgcagcagtctacaaatccagcaccaggaattctgggacctccacctccctcatttcatcttgggggaccagcagttggaccaagaggaaatctgggtgctggaaatggaaacctgcaaggacctagacacatgcagaaaggcagagtggaaactagcagagttgttcacatcatggattttcaacgagggaaaaacttgagataccagctattacagctggtagaaccatttggagtcatttcaaatcatctgattctaaataaaattaatgaggcatttattgaaatggcaaccacagaggatgctcaggccgcagtggattattacacaaccacaccagcgttagtatttggcaagccagtgagagttcatttatcccagaagtataaaagaataaagaaacctgaaggaaagccagatcagaagtttgatcaaaagcaagagcttggacgtgtgatacatctcagcaatttgccgcattctggctattctgatagtgctgttctcaagcttgctgagccttatgggaaaataaagaattacatattgatgaggatgaaaagtcagcttttattgaaatggtcgccaatccgcggattggcgaccatttcaaggggcttacctggaaatctacaagaaccccaagtataagaaactcatagatgccattgatagaaaagatcatcattgctgaagtcgtgtacaaaattaaccgtgctaatgggtaagagtacatctcggattttcctcttaacatacaataatctccttcttgctgaccataagtctggacatatcaagtcagaggttccactggtggatgtgatccataggtatcaatgagctcacagtatgatgg

SEQ ID NO: 85101 - DNA, 2380 bp, Homo sapiens
aggctagtagggccgtggtaaatcggccgaggtcggtccgctgagagaggtacctctccttttccctctccctttccctaaggtaggcgtgaagcgggtaagagtcggggtcgggtggctgggggttctccgtgtccgccgggaggggacaacgacggcgacaggggctgcggggagccggcggcgcgcctttcttgctcgctcccgctctgcctccctccgcgttgcgtatgtgagccgcctgatcggcggccgccatgttaggagcgcagtggcggcgcaaccagccttctagggcggcggaggtgagcggtccgggagggaaacacgcggccggccaagggcccagggtgcggcgggagattttgggtgaagaggtgcgctgaccggccgagcttcctgcgcgtcctgggctcgttgtgggcgggggcgggacgactagcccgttacacgcgggccgcggcgctgagggggagggaggagctcgctcgaggcctgagggacagactgtacactgggggcttgccgtttgaggaggatggttaagatatctaagtccttgggtagcgccagtgccaaataacccgttcgcctttttttctctgaaaatgttccccgccccccatcgcgtaaaaatggccgaaaaatgaaacgttaacgcttgtttttcgtactgcgtcgtggaacaagccgcctgcagtacagtgcgaggcgggtgatttgcacttgtttagtcaagtcacctcacatcctttttctctttatcaaaatagtattagtccaggttcctccagagaggatcgtgtggtgtgggaccttccggtttccagacaaagggttttggagtaccgtggtgtagtcgccgcatcgttctttgcatttcgagctctgtgccatgttctgtgttcggcatttaccgtggatgaatatcccctagagttgtctgctggttctcagcttgaagaagattctgcagtccttattgatcctttttcttggcgttaccattttttgaagcaaagttaacctagctttctagtttgagctttctttttggccgtctttaaaaaaaattttttttttaatctataaaatagacaagagctagttctacaatgtccaagtcattccagcagtcatctctcagtagggactcacagggtcatgggcgtgacctgtctgcggcaggaataggccttcttgctgctgctacccagtctttaagtatgccagcatctcttggaaggatgaaccagggtactgcacgccttgctagtttaatgaatcttggaatgagttcttcattgaatcaacaaggagctcatagtgcactgtcttctgctagtacttcttcccataatttgcagtctatatttaacattggaagtagaggtccactccctttatcttctcaacaccgtggagatgcagaccaggccagtaacattttggccagctttggtctgtctgctagagacttagatgaactgagtcgttatccagaggacaagattactcctgagaatttgccccaaatccttctacagcttaaaaggaggagaactgaagaaggccctaccttgagttatggtagagatggcagatctgctacacgggagccaccatacagagtacctagggatgattgggaagaaaaaaggcactttagaagagatagttttgatgatcgtggtcctagtctcaacccagtgcttgattatgaccatggaagtcgttctcaagaatctggttattatgacagaatggattatgaagatgacagattaagagatggagaaaggtgtagggatgattctttttttggtgagacctcgcataactatcataaatttgacagtgagtatgagagaatgggacgtggtcctggccccttacaagagagatctctctttgagaaaaagagaggcgctcctccaagtagcaatattgaagacttccatggactcttaccgaagggttatccccatctgtgctctatatgtgatttgccagttcattctaataaggagtggagtcaacatatcaatggagcaagtcacagtcgtcgatgccagcttcttcttgaaatctacccagaatggaatcctgacaatgatacaggacacacaatgggtgatccattcatgttgcagcagtctacaaatccagcaccaggaattctgggacctccacctccctcatttcatcttgggggaccagcagttggaccaagaggaaatctgggtgctggaaatggaaacctgcaaggacctagacacatgcagaaaggcagagtggaaactagcagagttgttcacatcatggatgtttcaaacgggggataaaccgcgaggggatcctcgcagagtcggactggaga

SEQ ID NO: 85102 - DNA, 748 bp, Homo sapiens
aggctagtagggccgtggtaaatcggccgaggtcggtccgctgagagaggtacctctccttttccctctccctttccctaaggtaggcgtgaagcgggtaagagtcggggtcgggtggctgggggttctccgtgtccgccgggaggggacaacgacggcgacaggggctgcggggagccggcggcgcgcctttcttgctcgctcccgctctgcctccctccgcgttgcgtatgtgagccgcctgatcggcggccgccatgttaggagcgcagtggcggcgcaaccagccttctagggcggcggaggtgagcggtccgggagggaaacacgcggccggccaagggcccagggtgcggcgggagattttgggtgaagaggtgcgctgaccggccgagcttcctgcgcgtcctgggctcgttgtgggcgggggcgggacgactagcccgttacacgcgggccgcggcgctgagggggagggaggagctcgctcgaggcctgagggacagactgtacactgggggcttgccgtttgaggaggatggttaagatatctaagtccttgggtagcgccagtgccaaataacccgttcgcctttttttctctgaaaatgttcccccaaaatggaggatttcgcagactctgaagagcctgcttgtttgagcagcgtttctttcttttcccggtgtctcggccttcacgccgctccttgcccatcgcctcagagcgccccctaagactcccggccca

SEQ ID NO: 85103 - DNA, 1640 bp, Homo sapiens
aggctagtagggccgtggtaaatcggccgaggtcggtccgctgagagaggtacctctccttttccctctccctttccctaaggtaggcgtgaagcgggtaagagtcggggtcgggtggctgggggttctccgtgtccgccgggaggggacaacgacggcgacaggggctgcggggagccggcggcgcgcctttcttgctcgctcccgctctgcctccctccgcgttgcgtatgtgagccgcctgatcggcggccgccatgttaggagcgcagtggcggcgcaaccagccttctagggcggcggaggtgagcggtccgggagggaaacacgcggccggccaagggcccagggtgcggcgggagattttgggtgaagaggtgcgctgaccggccgagcttcctgcgcgtcctgggctcgttgtgggcgggggcgggacgactagcccgttacacgcgggccgcggcgctgagggggagggaggagctcgctcgaggcctgagggacagactgtacactgggggcttgccgtttgaggaggatggttaagatatctaagtccttgggtagcgccagtgccaaataacccgttcgcctttttttctctgaaaatgttccccgccccccatcgcgtaaaaatggccgaaaaatgaaacgttaacgcttgtttttcgtactgcgtcgtggaacaagccgcctgcagtacagtgcgaggcgggtgatttgcacttgtttagtcaagtcacctcacatcctttttctctttatcaaaatagtattagtccaggttcctccagagaggatcgtgtggtgtgggaccttccggtttccagacaaagggttttggagtaccgtggtgtagtcgccgcatcgttctttgcatttcgagctctgtgccatgttctgtgttcggcatttaccgtggatgaatatcccctaggtgtttatcctgctctgtggccctgttctgtggaatattcctattggatcagttacagttttttagccagatatttctagaacggttatggtggttctgaaatggctagtctttcgggcgcgctggaataatgtgaagaatcgttgatttcgtaggtaggggtcacgagattttgtattggtactgcgttctgtgttttaaaccttggcttaagatttctgaatagtcggtaaaatacatttttctcccagggaaatctaaacagttgactatgcggacaaaaatgatgtttcaggctattttaataaatgtttaaaatttccctttaaaaacatttctttactaatggctcagtcatctacgcagtctatcgacgtttttcacagtattgttttaaaaatcaagaaaggcttgacattttcgttgcaaaaacgctctggatgatgccttttccacttaaatagaatgtttttgcaaactcgaaattaaacaacattaaaatactgcatgaagtttcttggttatgtaagatttggaaaagatcatttagccagatgtgtgttgaagtgctttaaatttgtatttcttcctttgcacttaacagtatatacttagaacattactttgtactttacccagagaagtttcgctttatcatctttatatatttttcagccgtgtacagcttttatatcacattttg

SEQ ID NO: 85104 - DNA, 381 bp, Homo sapiens
cagcagttctctccacttttaatgtgctccaaagggagaggtcttaagaaagaatagcagtctgcacttatcaaactcagccacaatctcagtctgagttggtaaaaccgaaatggctcctaaggaaagaggaaaattttatgtcatgaatagtcacagtactttaaatctgaggcctcaagttctaagcatacaggttgtcttcctgactacagtagcgctatccatgtgcagagacgttcctatattgctacttgaaaatagataattcattggtattcctgtattcaatatcccaaaaggcatcaatggtgtaatcatgtgcatttaaataatttgatgggatttcctacttgataaataaagttactcacctactta

SEQ ID NO: 85105 - DNA, 557 bp, Homo sapiens
ttctcatctctaaaaattagggttaattataacatttgaaatacccattttataccttttaccattttttccccgtgccttattgtaatgtcctgaaagtttttgtgtgctaatgaggattaactaattgttgaaaatattgacaaaattatagtttaagtccctaaacttggatataggatatttgattttggaattaatccattttgctgcatttctcttaggtgacttaatggctgtaattctctttctttatagaaatttctgaataaattggcagaagaacgcagacagaagaaggaaacttaagatgtgcaaggagatttaatgatttcaaagaaaataatggttctttgtttttaatgttaaccttttttaaatacaatactgatagttagaagaaaactattgtactcttttgttttagtggagaaataatagatgtctgttcatgtgttaagtgttatagcaaaaaaaatacacatatggttaagttaatgaatagtttttgttttatcagaatggcaacagacagaagtactttgtagagattgact

SEQ ID NO: 85106 - DNA, 590 bp, Homo sapiens
gtcacaactcaactgtgctcttggtattaatattggagaaggaaaatctgtgctctgttcttgtttctatgtaacccacatttctaattctttgtgcggcacttcctccttacaatttaacaaatagaggaaaaacttaatttcaacattatctgcatttgcaagcaatacaaaacaagtttattctcgtggattattttgaagttctgaaatttttcttttgaaatatctattggaaatgctttaaaactatgtttctaacacttagactctcagataactttactaataaatgatctctattttagaggccaaacaaggctgttttgtgaaaaggacagttttattttaaagttaattttctggtctttttaaagctacccagaatggaatcctgacaatgatacaggacacacaatgtaagttaaattttttaagctaccatttgtaaaggagatcaatgtaaggaattcaggtttcactttcaacatttcataaacaaagtattttcagaatttctttactgaaaatgagactttgataaaattcactttggttaacaatttttagaatatatattatgtagtaat

SEQ ID NO: 85107 - DNA, 426 bp, Homo sapiens
acacacaatgcattgctatttattatattctgtgtactagatcactaagtttgcttgtcttcctttttaggatgacttgaaagtagggcatccttcacccatctgaagggaggaaatagtggcaggtgacagtctgcatgtgcagttttcaggtaaatatccctattcattccaacattgactacctcctctgtgccaggcctgtgggctagttggtatctatcaggaaacaaatgggaggtaaattaacctgtatttgtaagatccatgaaggaaaggacaatatatcttgttttattcactgctagatcccaatcgcagtgcttggcacatggcaggacctccctgaatgttgcataaaacaactgaaaacacagaaggggattcctgttaaagggtttgacaacagggtctgcaattagtgct

SEQ ID NO: 85108 - DNA, 728 bp, Homo sapiens
  misc_feature (17)..(17): n is a, c, g, or t
cctagtcaggctcggtncctgatgaagatgacagattaagagatggagaaaggtgtagggatgattctttttttggtgagacctcgcataactatcataaatttgacagtgagtatgagagaatgggacgtggtcctggccccttacaagagagatctctctttgagaaaaagagaggcgctcctccaagtagcaatattgaagacttccatggactcttaccgaagggttatccccatctgtgctctatatgtgatttgccagttcattctaataaggagtggagtcaacatatcaatggagcaagtcacagtcgtcgatgccagcttcttcttgaaatgtaggagtttgaaatacctttaaaacatccttatcgtgaatcagaatcagccattattggtttttgggagttcatcatttacttgtaatatccacaatgttaatatcacatagtggtactgtatggacaatactatttacaagtaaaatgtttagatctggaaatttcatattgaatattagatgcagtaataatattttgttatttaacatttctaggatacatatatattggtcattatacaaattggtgatttttactagacatagtgaaagatagtatttgatatgtagagtggattaaacagtagcatttttaataatacatgctctaaaaatgtaaaagatacggaaaagagggtaggttattaaaagattctaattcattg

SEQ ID NO: 85109 - DNA, 5001 bp, Homo sapiens
aggctagtagggccgtggtaaatcggccgaggtcggtccgctgagagaggtacctctccttttccctctccctttccctaaggtaggcgtgaagcgggtaagagtcggggtcgggtggctgggggttctccgtgtccgccgggaggggacaacgacggcgacaggggctgcggggagccggcggcgcgcctttcttgctcgctcccgctctgcctccctccgcgttgcgtatgtgagccgcctgatcggcggccgccatgttaggagcgcagtggcggcgcaaccagccttctagggcggcggagagttgtctgctggttctcagcttgaagaagattctgcagtccttattgatcctttttcttggcgttaccattttttgaagcaaagttaacctagctttctagtttgagctttctttttggccgtctttaaaaaaaattttttttttaatctataaaatagacaagagctagttctacaatgtccaagtcattccagcagtcatctctcagtagggactcacagggtcatgggcgtgacctgtctgcggcaggaataggccttcttgctgctgctacccagtctttaagtatgccagcatctcttggaaggatgaaccagggtactgcacgccttgctagtttaatgaatcttggaatgagttcttcattgaatcaacaaggagctcatagtgcactgtcttctgctagtacttcttcccataatttgcagtctatatttaacattggaagtagaggtccactccctttatcttctcaacaccgtggagatgcagaccaggccagtaacattttggccagctttggtctgtctgctagagacttagatgaactgagtcgttatccagaggacaagattactcctgagaatttgccccaaatccttctacagcttaaaaggaggagaactgaagaaggccctaccttgagttatggtagagatggcagatctgctacacgggagccaccatacagagtacctagggatgattgggaagaaaaaaggcactttagaagagatagttttgatgatcgtggtcctagtctcaacccagtgcttgattatgaccatggaagtcgttctcaagaatctggttattatgacagaatggattatgaagatgacagattaagagatggagaaaggtgtagggatgattctttttttggtgagacctcgcataactatcataaatttgacagtgagtatgagagaatgggacgtggtcctggccccttacaagagagatctctctttgagaaaaagagaggcgctcctccaagtagcaatattgaagacttccatggactcttaccgaagggttatccccatctgtgctctatatgtgatttgccagttcattctaataaggagtggagtcaacatatcaatggagcaagtcacagtcgtcgatgccagcttcttcttgaaatctacccagaatggaatcctgacaatgatacaggacacacaatgggtgatccattcatgttgcagcagtctacaaatccagcaccaggaattctgggacctccacctccctcatttcatcttgggggaccagcagttggaccaagaggaaatctgggtgctggaaatggaaacctgcaaggacctagacacatgcagaaaggcagagtggaaactagcagagttgttcacatcatggattttcaacgagggaaaaacttgagataccagctattacagctggtagaaccatttggagtcatttcaaatcatctgattctaaataaaattaatgaggcatttattgaaatggcaaccacagaggatgctcaggccgcagtggattattacacaaccacaccagcgttagtatttggcaagccagtgagagttcatttatcccagaagtataaaagaataaagaaacctgaaggaaagccagatcagaagtttgatcaaaagcaagagcttggacgtgtgatacatctcagcaatttgccgcattctggctattctgatagtgctgttctcaagcttgctgagccttatgggaaaataaagaattacatattgatgaggatgaaaagtcaggcttttattgagatggagacaagagaagatgcaatggcaatggttgaccattgtttgaaaaaagccctttggtttcaggggagatgtgtgaaggttgacctgtctgagaaatataaaaaactggttctgaggattccaaacagaggcattgatttactgaaaaaagataaatcccgaaaaagatcttactctccagatggcaaagaatctccaagtgataagaaatccaaaactgatggttcccagaagactgagagttcaaccgaaggtaaagaacaagaagagaagtccggtgaagatggtgagaaagacacaaaggatgaccagacagagcaggaacctaatatgcttcttgaatctgaagatgagctacttgtagatgaagaagaagcagcagcactgctagaaagtggcagttcagtgggagacgagaccgatcttgctaatttaggtgatgtggcttctgatgggaaaaaggaaccatcagataaagctgtgaaaaaagatggaagtgcttcagcagcagcaaagaaaaagcttaaaaaggtggacaagatcgaggaacttgatcaagaaaacgaagcagcgttggaaaatggaattaaaaatgaggaaaacacagaaccaggtgctgaatcttctgagaacgctgatgatcccaacaaagatacaagtgaaaacgcagatggtcaaagtgatgagaacaaggacgactatacaatcccagatgagtatagaattggaccatatcagcccaatgttcctgttggtatagactatgtgatacctaaaacagggttttactgtaagctgtgttcactcttttatacaaatgaagaagttgcaaagaatactcattgcagcagccttcctcattatcagaaattaaagaaatttctgaataaattggcagaagaacgcagacagaagaaggaaacttaagatgtgcaaggagatttaatgatttcaaagaaaataatggttctttgtttttaatgttaaccttttttaaatacaatactgatagttagaagaaaactattgtactcttttgttttagtggagaaataatagatgtctgttcatgtgttaagtgttatagcaaaaaaaatacacatatggttaagttaatgaatagtttttgttttatcagaatggcaacagacagaagtactttgtagagattgacttcctaagctacttaagacaacttgcaccactaagaaaaaaatgtagaaccatttggaaaaatgaaatttagtagttccaagtttcaaagaaatgtcaacattttattccattcaataaagaacaaaaccaatagtgtttttattactttcatctgaaacattccatgttttaatctgagccttgcagactttcatttggagtttgaacccgttttggttgcatttcatttttggagaacttaattaacgtgagattggcaattgaaatgcaggtgcagttttctgttaatgtcatgctgttgtttaggtaataagaaatattaagtaattggctttagattttgtaatttttttccctgagttcctgctagatttcgtattctagtagtcaatgtattttcagtgaaatgcaaaaatattcccattatctttgaccagtattaatttttgagatcttactgcttgtcacttgaatcccgtgattgtcatacatctctggtataagcaacatttgatttttgaagtgtgtagaccatctcttcatattttcaagatgtaattttacatttctgcatttttaaaacagtttggccataatcctagatgcacgcttctaattcatgtacctgcacatgtgacctttgtgaacagaaatttgcatgtataatttgtgtttacttgtaactttctggttatatactgcttatatctgtggattcaagttactgaagtgaataccaataaaaagaaaaccctaggccatgttaattggttatacatgtttggaatgttaaccaacaacgtatttgtcagttgtggtttttattcgctcttaaactttgtgcatgctttaacaatttattacttttaaatctagagtgaattctaaagactgccgctaaagatctgagttttaaaaatgttgttgctggtggatttcttgttcctgttacataactaaaagtgaggccatttgtggtttttaaaaaccttatgaattaaaaatgctacaggtgaacaaacagaagcttatgtttagagatattgatgacttaacagtacaattggaagtaatacggatgagcaagaattagttctgcagcttttcaaaataattacgtagagactcttggtatattggattatctgttgttaaacaatttttttttcttccctgacacagggtctcactctgtcacccagactggagtgcagtggcacagttctctgcaacctcagcctttgggctcaaatgaccctcctacctcagtctcctgagtagctgggactacaggctcatgccactatacctggctagtttttggtttttttgtatagatggggctttgccatgttgcccaggttgatcttgaattcctgggcccaagtgatctgctcgcttcagcctcccaaagtgctgggactgtaggcatgagccaccatccctggccaagaaacaaagttttaatttcaaaaaaatctacaaaaacaggataggcattgtctttcaaatgttcagaccccagtttattaaaggatacttcaaatagttggctaaattttatgatctctcccgttgaaaagtaggtgatgattttaatgtgacatgcacaaaaaatccttgccagtttacttctgcaatttaattttagcctttactaattacccacttctgtttaattccaatttttaacagcaggtacataaagcattatgtgcacaatgg

SEQ ID NO: 85110 - DNA, 4892 bp, Homo sapiens
  misc_feature (4807)..(4807): n is a, c, g, or t
aggctagtagggccgtggtaaatcggccgaggtcggtccgctgagagaggtacctctccttttccctctccctttccctaagagttgtctgctggttctcagcttgaagaagattctgcagtccttattgatcctttttcttggcgttaccattttttgaagcaaagttaacctagctttctagtttgagctttctttttggccgtctttaaaaaaaattttttttttaatctataaaatagacaagagctagttctacaatgtccaagtcattccagcagtcatctctcagtagggactcacagggtcatgggcgtgacctgtctgcggcaggaataggccttcttgctgctgctacccagtctttaagtatgccagcatctcttggaaggatgaaccagggtactgcacgccttgctagtttaatgaatcttggaatgagttcttcattgaatcaacaaggagctcatagtgcactgtcttctgctagtacttcttcccataatttgcagtctatatttaacattggaagtagaggtccactccctttatcttctcaacaccgtggagatgcagaccaggccagtaacattttggccagctttggtctgtctgctagagacttagatgaactgagtcgttatccagaggacaagattactcctgagaatttgccccaaatccttctacagcttaaaaggaggagaactgaagaaggccctaccttgagttatggtagagatggcagatctgctacacgggagccaccatacagagtacctagggatgattgggaagaaaaaaggcactttagaagagatagttttgatgatcgtggtcctagtctcaacccagtgcttgattatgaccatggaagtcgttctcaagaatctggttattatgacagaatggattatgaagatgacagattaagagatggagaaaggtgtagggatgattctttttttggtgagacctcgcataactatcataaatttgacagtgagtatgagagaatgggacgtggtcctggccccttacaagagagatctctctttgagaaaaagagaggcgctcctccaagtagcaatattgaagacttccatggactcttaccgaagggttatccccatctgtgctctatatgtgatttgccagttcattctaataaggagtggagtcaacatatcaatggagcaagtcacagtcgtcgatgccagcttcttcttgaaatctacccagaatggaatcctgacaatgatacaggacacacaatgggtgatccattcatgttgcagcagtctacaaatccagcaccaggaattctgggacctccacctccctcatttcatcttgggggaccagcagttggaccaagaggaaatctgggtgctggaaatggaaacctgcaaggacctagacacatgcagaaaggcagagtggaaactagcagagttgttcacatcatggattttcaacgagggaaaaacttgagataccagctattacagctggtagaaccatttggagtcatttcaaatcatctgattctaaataaaattaatgaggcatttattgaaatggcaaccacagaggatgctcaggccgcagtggattattacacaaccacaccagcgttagtatttggcaagccagtgagagttcatttatcccagaagtataaaagaataaagaaacctgaaggaaagccagatcagaagtttgatcaaaagcaagagcttggacgtgtgatacatctcagcaatttgccgcattctggctattctgatagtgctgttctcaagcttgctgagccttatgggaaaataaagaattacatattgatgaggatgaaaagtcaggcttttattgagatggagacaagagaagatgcaatggcaatggttgaccattgtttgaaaaaagccctttggtttcaggggagatgtgtgaaggttgacctgtctgagaaatataaaaaactggttctgaggattccaaacagaggcattgatttactgaaaaaagataaatcccgaaaaagatcttactctccagatggcaaagaatctccaagtgataagaaatccaaaactgatggttcccagaagactgagagttcaaccgaaggtaaagaacaagaagagaagtccggtgaagatggtgagaaagacacaaaggatgaccagacagagcaggaacctaatatgcttcttgaatctgaagatgagctacttgtagatgaagaagaagcagcagcactgctagaaagtggcagttcagtgggagacgagaccgatcttgctaatttaggtgatgtggcttctgatgggaaaaaggaaccatcagataaagctgtgaaaaaagatggaagtgcttcagcagcagcaaagaaaaagcttaaaaaggtggacaagatcgaggaacttgatcaagaaaacgaagcagcgttggaaaatggaattaaaaatgaggaaaacacagaaccaggtgctgaatcttctgagaacgctgatgatcccaacaaagatacaagtgaaaacgcagatggtcaaagtgatgagaacaaggacgactatacaatcccagatgagtatagaattggaccatatcagcccaatgttcctgttggtatagactatgtgatacctaaaacagggttttactgtaagctgtgttcactcttttatacaaatgaagaagttgcaaagaatactcattgcagcagccttcctcattatcagaaattaaagaaatttctgaataaattggcagaagaacgcagacagaagaaggaaacttaagatgtgcaaggagatttaatgatttcaaagaaaataatggttctttgtttttaatgttaaccttttttaaatacaatactgatagttagaagaaaactattgtactcttttgttttagtggagaaataatagatgtctgttcatgtgttaagtgttatagcaaaaaaaatacacatatggttaagttaatgaatagtttttgttttatcagaatggcaacagacagaagtactttgtagagattgacttcctaagctacttaagacaacttgcaccactaagaaaaaaatgtagaaccatttggaaaaatgaaatttagtagttccaagtttcaaagaaatgtcaacattttattccattcaataaagaacaaaaccaatagtgtttttattactttcatctgaaacattccatgttttaatctgagccttgcagactttcatttggagtttgaacccgttttggttgcatttcatttttggagaacttaattaacgtgagattggcaattgaaatgcaggtgcagttttctgttaatgtcatgctgttgtttaggtaataagaaatattaagtaattggctttagattttgtaatttttttccctgagttcctgctagatttcgtattctagtagtcaatgtattttcagtgaaatgcaaaaatattcccattatctttgaccagtattaatttttgagatcttactgcttgtcacttgaatcccgtgattgtcatacatctctggtataagcaacatttgatttttgaagtgtgtagaccatctcttcatattttcaagatgtaattttacatttctgcatttttaaaacagtttggccataatcctagatgcacgcttctaattcatgtacctgcacatgtgacctttgtgaacagaaatttgcatgtataatttgtgtttacttgtaactttctggttatatactgcttatatctgtggattcaagttactgaagtgaataccaataaaaagaaaaccctaggccatgttaattggttatacatgtttggaatgttaaccaacaacgtatttgtcagttgtggtttttattcgctcttaaactttgtgcatgctttaacaatttattacttttaaatctagagtgaattctaaagactgccgctaaagatctgagttttaaaaatgttgttgctggtggatttcttgttcctgttacataactaaaagtgaggccatttgtggtttttaaaaaccttatgaattaaaaatgctacaggtgaacaaacagaagcttatgtttagagatattgatgacttaacagtacaattggaagtaatacggatgagcaagaattagttctgcagcttttcaaaataattacgtagagactcttggtatattggattatctgttgttaaacaatttttttttcttccctgacacagggtctcactctgtcacccagactggagtgcagtggcacagttctctgcaacctcagcctttgggctcaaatgaccctcctacctcagtctcctgagtagctgggactacaggctcatgccactatacctggctagtttttggtttttttgtatagatggggctttgccatgttgcccaggttgatcttgaattcctgggcccaagtgatctgctcgcttcagcctcccaaagtgctgggactgtaggcatgagccaccatccctggccaagaaacaaagttttaatttcaaaaaaatctacaaaaacaggataggcattgtctttcaaatgttcagaccccagtttattaaaggatacttcaaatagttggctaaattttatgatctctcccgttgaaaagtaggtgatgattttaatgtgacatgcacaaaaaatccttgccagtttacttctgcaatttaattttagcctttactaattacccacttctgtttaattccaatttttaacagcaggtacataaagcattatgtgcacaatggggaaaaaagaacacaacatatatgctctncgaaaaatacttcggggggggtcgggacccaattccgcctatgtggagtgtttacaattacatggccggggtttaacaactcggg

SEQ ID NO: 85111 - DNA, 3911 bp, Homo sapiens
aggctagtagggccgtggtaaatcggccgaggtcggtccgctgagagaggtacctctccttttccctctccctttccctaaggtaggcgtgaagcgggtaagagtcggggtcgggtggctgggggttctccgtgtccgccgggaggggacaacgacggcgacaggggctgcggggagccggcggcgcgcctttcttgctcgctcccgctctgcctccctccgcgttgcgtatgtgagccgcctgatcggcggccgccatgttaggagcgcagtggcggcgcaaccagccttctagggcggcggaggagtggagtcaacatatcaatggagcaagtcacagtcgtcgatgccagcttcttcttgaaatctacccagaatggaatcctgacaatgatacaggacacacaatgggtgatccattcatgttgcagcagtctacaaatccagcaccaggaattctgggacctccacctccctcatttcatcttgggggaccagcagttggaccaagaggaaatctgggtgctggaaatggaaacctgcaaggacctagacacatgcagaaaggcagagtggaaactagcagagttgttcacatcatggattttcaacgagggaaaaacttgagataccagctattacagctggtagaaccatttggagtcatttcaaatcatctgattctaaataaaattaatgaggcatttattgaaatggcaaccacagaggatgctcaggccgcagtggattattacacaaccacaccagcgttagtatttggcaagccagtgagagttcatttatcccagaagtataaaagaataaagaaacctgaaggaaagccagatcagaagtttgatcaaaagcaagagcttggacgtgtgatacatctcagcaatttgccgcattctggctattctgatagtgctgttctcaagcttgctgagccttatgggaaaataaagaattacatattgatgaggatgaaaagtcaggcttttattgagatggagacaagagaagatgcaatggcaatggttgaccattgtttgaaaaaagccctttggtttcaggggagatgtgtgaaggttgacctgtctgagaaatataaaaaactggttctgaggattccaaacagaggcattgatttactgaaaaaagataaatcccgaaaaagatcttactctccagatggcaaagaatctccaagtgataagaaatccaaaactgatggttcccagaagactgagagttcaaccgaaggtaaagaacaagaagagaagtccggtgaagatggtgagaaagacacaaaggatgaccagacagagcaggaacctaatatgcttcttgaatctgaagatgagctacttgtagatgaagaagaagcagcagcactgctagaaagtggcagttcagtgggagacgagaccgatcttgctaatttaggtgatgtggcttctgatgggaaaaaggaaccatcagataaagctgtgaaaaaagatggaagtgcttcagcagcagcaaagaaaaagcttaaaaaggtggacaagatcgaggaacttgatcaagaaaacgaagcagcgttggaaaatggaattaaaaatgaggaaaacacagaaccaggtgctgaatcttctgagaacgctgatgatcccaacaaagatacaagtgaaaacgcagatggtcaaagtgatgagaacaaggacgactatacaatcccagatgagtatagaattggaccatatcagcccaatgttcctgttggtatagactatgtgatacctaaaacagggttttactgtaagctgtgttcactcttttatacaaatgaagaagttgcaaagaatactcattgcagcagccttcctcattatcagaaattaaagaaatttctgaataaattggcagaagaacgcagacagaagaaggaaacttaagatgtgcaaggagatttaatgatttcaaagaaaataatggttctttgtttttaatgttaaccttttttaaatacaatactgatagttagaagaaaactattgtactcttttgttttagtggagaaataatagatgtctgttcatgtgttaagtgttatagcaaaaaaaatacacatatggttaagttaatgaatagtttttgttttatcagaatggcaacagacagaagtactttgtagagattgacttcctaagctacttaagacaacttgcaccactaagaaaaaaatgtagaaccatttggaaaaatgaaatttagtagttccaagtttcaaagaaatgtcaacattttattccattcaataaagaacaaaaccaatagtgtttttattactttcatctgaaacattccatgttttaatctgagccttgcagactttcatttggagtttgaacccgttttggttgcatttcatttttggagaacttaattaacgtgagattggcaattgaaatgcaggtgcagttttctgttaatgtcatgctgttgtttaggtaataagaaatattaagtaattggctttagattttgtaatttttttccctgagttcctgctagatttcgtattctagtagtcaatgtattttcagtgaaatgcaaaaatattcccattatctttgaccagtattaatttttgagatcttactgcttgtcacttgaatcccgtgattgtcatacatctctggtataagcaacatttgatttttgaagtgtgtagaccatctcttcatattttcaagatgtaattttacatttctgcatttttaaaacagtttggccataatcctagatgcacgcttctaattcatgtacctgcacatgtgacctttgtgaacagaaatttgcatgtataatttgtgtttacttgtaactttctggttatatactgcttatatctgtggattcaagttactgaagtgaataccaataaaaagaaaaccctaggccatgttaattggttatacatgtttggaatgttaaccaacaacgtatttgtcagttgtggtttttattcgctcttaaactttgtgcatgctttaacaatttattacttttaaatctagagtgaattctaaagactgccgctaaagatctgagttttaaaaatgttgttgctggtggatttcttgttcctgttacataactaaaagtgaggccatttgtggtttttaaaaaccttatgaattaaaaatgctacaggtgaacaaacagaagcttatgtttagagatattgatgacttaacagtacaattggaagtaatacggatgagcaagaattagttctgcagcttttcaaaataattacgtagagactcttggtatattggattatctgttgttaaacaatttttttttcttccctgacacagggtctcactctgtcacccagactggagtgcagtggcacagttctctgcaacctcagcctttgggctcaaatgaccctcctacctcagtctcctgagtagctgggactacaggctcatgccactatacctggctagtttttggtttttttgtatagatggggctttgccatgttgcccaggttgatcttgaattcctgggcccaagtgatctgctcgcttcagcctcccaaagtgctgggactgtaggcatgagccaccatccctggccaagaaacaaagttttaatttcaaaaaaatctacaaaaacaggataggcattgtctttcaaatgttcagaccccagtttattaaaggatacttcaaatagttggctaaattttatgatctctcccgttgaaaagtaggtgatgattttaatgtgacatgcacaaaaaatccttgccagtttacttctgcaatttaattttagcctttactaattacccacttctgtttaattccaatttttaacagcaggtacataaagcattatgtgcacaatgg

SEQ ID NO: 85112 - DNA, 5465 bp, Homo sapiens
aggctagtagggccgtggtaaatcggccgaggtcggtccgctgagagaggtacctctccttttccctctccctttccctaaggtaggcgtgaagcgggtaagagtcggggtcgggtggctgggggttctccgtgtccgccgggaggggacaacgacggcgacaggggctgcggggagccggcggcgcgcctttcttgctcgctcccgctctgcctccctccgcgttgcgtatgtgagccgcctgatcggcggccgccatgttaggagcgcagtggcggcgcaaccagccttctagggcggcggaggtgagcggtccgggagggaaacacgcggccggccaagggcccagggtgcggcgggagattttgggtgaagaggtgcgctgaccggccgagcttcctgcgcgtcctgggctcgttgtgggcgggggcgggacgactagcccgttacacgcgggccgcggcgctgagggggagggaggagctcgctcgaggcctgagggacagactgtacactgggggcttgccgtttgaggaggatggttaagatatctaagtccttgggtagcgccagtgccaaataacccgttcgcctttttttctctgaaaatgttccccgccccccatcgcgtaaaaatggccgaaaaatgaaacgttaacgcttgtttttcgtactgcgtcgtggaacaagccgcctgcagtacagtgcgaggcgggtgatttgcacttgtttagtcaagtcacctcacatcctttttctctttatcaaaatagtattagtccaggttcctccagagaggatcgtgtggtgtgggaccttccggtttccagacaaagggttttggagtaccgtggtgtagtcgccgcatcgttctttgcatttcgagctctgtgccatgttctgtgttcggcatttaccgtggatgaatatcccctagagttgtctgctggttctcagcttgaagaagattctgcagtccttattgatcctttttcttggcgttaccattttttgaagcaaagttaacctagctttctagtttgagctttctttttggccgtctttaaaaaaaattttttttttaatctataaaatagacaagagctagttctacaatgtccaagtcattccagcagtcatctctcagtagggactcacagggtcatgggcgtgacctgtctgcggcaggaataggccttcttgctgctgctacccagtctttaagtatgccagcatctcttggaaggatgaaccagggtactgcacgccttgctagtttaatgaatcttggaatgagttcttcattgaatcaacaaggagctcatagtgcactgtcttctgctagtacttcttcccataatttgcagtctatatttaacattggaagtagaggtccactccctttatcttctcaacaccgtggagatgcagaccaggccagtaacattttggccagctttggtctgtctgctagagacttagatgaactgagtcgttatccagaggacaagattactcctgagaatttgccccaaatccttctacagcttaaaaggaggagaactgaagaaggccctaccttgagttatggtagagatggcagatctgctacacgggagccaccatacagagtacctagggatgattgggaagaaaaaaggcactttagaagagatagttttgatgatcgtggtcctagtctcaacccagtgcttgattatgaccatggaagtcgttctcaagaatctggttattatgacagaatggattatgaagatgacagattaagagatggagaaaggtgtagggatgattctttttttggtgagacctcgcataactatcataaatttgacagtgagtatgagagaatgggacgtggtcctggccccttacaagagagatctctctttgagaaaaagagaggcgctcctccaagtagcaatattgaagacttccatggactcttaccgaagggttatccccatctgtgctctatatgtgatttgccagttcattctaataaggagtggagtcaacatatcaatggagcaagtcacagtcgtcgatgccagcttcttcttgaaatctacccagaatggaatcctgacaatgatacaggacacacaatgggtgatccattcatgttgcagcagtctacaaatccagcaccaggaattctgggacctccacctccctcatttcatcttgggggaccagcagttggaccaagaggaaatctgggtgctggaaatggaaacctgcaaggacctagacacatgcagaaaggcagagtggaaactagcagagttgttcacatcatggattttcaacgagggaaaaacttgagataccagctattacagctggtagaaccatttggagtcatttcaaatcatctgattctaaataaaattaatgaggcatttattgaaatggcaaccacagaggatgctcaggccgcagtggattattacacaaccacaccagcgttagtatttggcaagccagtgagagttcatttatcccagaagtataaaagaataaaggcttttattgagatggagacaagagaagatgcaatggcaatggttgaccattgtttgaaaaaagccctttggtttcaggggagatgtgtgaaggttgacctgtctgagaaatataaaaaactggttctgaggattccaaacagaggcattgatttactgaaaaaagataaatcccgaaaaagatcttactctccagatggcaaagaatctccaagtgataagaaatccaaaactgatggttcccagaagactgagagttcaaccgaaggtaaagaacaagaagagaagtccggtgaagatggtgagaaagacacaaaggatgaccagacagagcaggaacctaatatgcttcttgaatctgaagatgagctacttgtagatgaagaagaagcagcagcactgctagaaagtggcagttcagtgggagacgagaccgatcttgctaatttaggtgatgtggcttctgatgggaaaaaggaaccatcagataaagctgtgaaaaaagatggaagtgcttcagcagcagcaaagaaaaagcttaaaaaggtggacaagatcgaggaacttgatcaagaaaacgaagcagcgttggaaaatggaattaaaaatgaggaaaacacagaaccaggtgctgaatcttctgagaacgctgatgatcccaacaaagatacaagtgaaaacgcagatggtcaaagtgatgagaacaaggacgactatacaatcccagatgagtatagaattggaccatatcagcccaatgttcctgttggtatagactatgtgatacctaaaacagggttttactgtaagctgtgttcactcttttatacaaatgaagaagttgcaaagaatactcattgcagcagccttcctcattatcagaaattaaagaaatttctgaataaattggcagaagaacgcagacagaagaaggaaacttaagatgtgcaaggagatttaatgatttcaaagaaaataatggttctttgtttttaatgttaaccttttttaaatacaatactgatagttagaagaaaactattgtactcttttgttttagtggagaaataatagatgtctgttcatgtgttaagtgttatagcaaaaaaaatacacatatggttaagttaatgaatagtttttgttttatcagaatggcaacagacagaagtactttgtagagattgacttcctaagctacttaagacaacttgcaccactaagaaaaaaatgtagaaccatttggaaaaatgaaatttagtagttccaagtttcaaagaaatgtcaacattttattccattcaataaagaacaaaaccaatagtgtttttattactttcatctgaaacattccatgttttaatctgagccttgcagactttcatttggagtttgaacccgttttggttgcatttcatttttggagaacttaattaacgtgagattggcaattgaaatgcaggtgcagttttctgttaatgtcatgctgttgtttaggtaataagaaatattaagtaattggctttagattttgtaatttttttccctgagttcctgctagatttcgtattctagtagtcaatgtattttcagtgaaatgcaaaaatattcccattatctttgaccagtattaatttttgagatcttactgcttgtcacttgaatcccgtgattgtcatacatctctggtataagcaacatttgatttttgaagtgtgtagaccatctcttcatattttcaagatgtaattttacatttctgcatttttaaaacagtttggccataatcctagatgcacgcttctaattcatgtacctgcacatgtgacctttgtgaacagaaatttgcatgtataatttgtgtttacttgtaactttctggttatatactgcttatatctgtggattcaagttactgaagtgaataccaataaaaagaaaaccctaggccatgttaattggttatacatgtttggaatgttaaccaacaacgtatttgtcagttgtggtttttattcgctcttaaactttgtgcatgctttaacaatttattacttttaaatctagagtgaattctaaagactgccgctaaagatctgagttttaaaaatgttgttgctggtggatttcttgttcctgttacataactaaaagtgaggccatttgtggtttttaaaaaccttatgaattaaaaatgctacaggtgaacaaacagaagcttatgtttagagatattgatgacttaacagtacaattggaagtaatacggatgagcaagaattagttctgcagcttttcaaaataattacgtagagactcttggtatattggattatctgttgttaaacaatttttttttcttccctgacacagggtctcactctgtcacccagactggagtgcagtggcacagttctctgcaacctcagcctttgggctcaaatgaccctcctacctcagtctcctgagtagctgggactacaggctcatgccactatacctggctagtttttggtttttttgtatagatggggctttgccatgttgcccaggttgatcttgaattcctgggcccaagtgatctgctcgcttcagcctcccaaagtgctgggactgtaggcatgagccaccatccctggccaagaaacaaagttttaatttcaaaaaaatctacaaaaacaggataggcattgtctttcaaatgttcagaccccagtttattaaaggatacttcaaatagttggctaaattttatgatctctcccgttgaaaagtaggtgatgattttaatgtgacatgcacaaaaaatccttgccagtttacttctgcaatttaattttagcctttactaattacccacttctgtttaattccaatttttaacagcaggtacataaagcattatgtgcacaatgg

SEQ ID NO: 85113 - DNA, 4715 bp, Homo sapiens
aggctagtagggccgtggtaaatcggccgaggtcggtccgctgagagaggtacctctccttttccctctccctttccctaagagttgtctgctggttctcagcttgaagaagattctgcagtccttattgatcctttttcttggcgttaccattttttgaagcaaagttaacctagctttctagtttgagctttctttttggccgtctttaaaaaaaattttttttttaatctataaaatagacaagagctagttctacaatgtccaagtcattccagcagtcatctctcagtagggactcacagggtcatgggcgtgacctgtctgcggcaggaataggccttcttgctgctgctacccagtctttaagtatgccagcatctcttggaaggatgaaccagggtactgcacgccttgctagtttaatgaatcttggaatgagttcttcattgaatcaacaaggagctcatagtgcactgtcttctgctagtacttcttcccataatttgcagtctatatttaacattggaagtagaggtccactccctttatcttctcaacaccgtggagatgcagaccaggccagtaacattttggccagctttggtctgtctgctagagacttagatgaactgagtcgttatccagaggacaagattactcctgagaatttgccccaaatccttctacagcttaaaaggaggagaactgaagaaggccctaccttgagttatggtagagatggcagatctgctacacgggagccaccatacagagtacctagggatgattgggaagaaaaaaggcactttagaagagatagttttgatgatcgtggtcctagtctcaacccagtgcttgattatgaccatggaagtcgttctcaagaatctggttattatgacagaatggattatgaagatgacagattaagagatggagaaaggtgtagggatgattctttttttggtgagacctcgcataactatcataaatttgacagtgagtatgagagaatgggacgtggtcctggccccttacaagagagatctctctttgagaaaaagagaggcgctcctccaagtagcaatattgaagacttccatggactcttaccgaagggttatccccatctgtgctctatatgtgatttgccagttcattctaataaggagtggagtcaacatatcaatggagcaagtcacagtcgtcgatgccagcttcttcttgaaatctacccagaatggaatcctgacaatgatacaggacacacaatgggtgatccattcatgttgcagcagtctacaaatccagcaccaggaattctgggacctccacctccctcatttcatcttgggggaccagcagttggaccaagaggaaatctgggtgctggaaatggaaacctgcaaggacctagacacatgcagaaaggcagagtggaaactagcagagttgttcacatcatggattttcaacgagggaaaaacttgagataccagctattacagctggtagaaccatttggagtcatttcaaatcatctgattctaaataaaattaatgaggcatttattgaaatggcaaccacagaggatgctcaggccgcagtggattattacacaaccacaccagcgttagtatttggcaagccagtgagagttcatttatcccagaagtataaaagaataaagaaacctgaaggaaagccagatcagaagtttgatcaaaagcaagagcttggacgtgtgatacatctcagcaatttgccgcattctggctattctgatagtgctgttctcaagcttgctgagccttatgggaaaataaagaattacatattgatgaggatgaaaagtcaggcttttattgagatggagacaagagaagatgcaatggcaatggttgaccattgtttgaaaaaagccctttggtttcaggggagatgtgtgaaggttgacctgtctgagaaatataaaaaactggttctgaggattccaaacagaggcattgatttactgaaaaaagataaatcccgaaaaagatcttactctccagatggcaaagaatctccaagtgataagaaatccaaaactgatggttcccagaagactgagagttcaaccgaaggtaaagaacaagaagagaagtccggtgaagatggtgagaaagacacaaaggatgaccagacagagcaggaacctaatatgcttcttgaatctgaagatgagctacttgtagatgaagaagaagcagcagcactgctagaaagtggcagttcagtgggagacgagaccgatcttgctaatttaggtgatgtggcttctgatgggaaaaaggaaccatcagataaagctgtgaaaaaagatggaagtgcttcagcagcagcaaagaaaaagcttaaaaaggtggacaagatcgaggaacttgatcaagaaaacgaagcagcgttggaaaatggaattaaaaatgaggaaaacgcagatggtcaaagtgatgagaacaaggacgactatacaatcccagatgagtatagaattggaccatatcagcccaatgttcctgttggtatagactatgtgatacctaaaacagggttttactgtaagctgtgttcactcttttatacaaatgaagaagttgcaaagaatactcattgcagcagccttcctcattatcagaaattaaagaaatttctgaataaattggcagaagaacgcagacagaagaaggaaacttaagatgtgcaaggagatttaatgatttcaaagaaaataatggttctttgtttttaatgttaaccttttttaaatacaatactgatagttagaagaaaactattgtactcttttgttttagtggagaaataatagatgtctgttcatgtgttaagtgttatagcaaaaaaaatacacatatggttaagttaatgaatagtttttgttttatcagaatggcaacagacagaagtactttgtagagattgacttcctaagctacttaagacaacttgcaccactaagaaaaaaatgtagaaccatttggaaaaatgaaatttagtagttccaagtttcaaagaaatgtcaacattttattccattcaataaagaacaaaaccaatagtgtttttattactttcatctgaaacattccatgttttaatctgagccttgcagactttcatttggagtttgaacccgttttggttgcatttcatttttggagaacttaattaacgtgagattggcaattgaaatgcaggtgcagttttctgttaatgtcatgctgttgtttaggtaataagaaatattaagtaattggctttagattttgtaatttttttccctgagttcctgctagatttcgtattctagtagtcaatgtattttcagtgaaatgcaaaaatattcccattatctttgaccagtattaatttttgagatcttactgcttgtcacttgaatcccgtgattgtcatacatctctggtataagcaacatttgatttttgaagtgtgtagaccatctcttcatattttcaagatgtaattttacatttctgcatttttaaaacagtttggccataatcctagatgcacgcttctaattcatgtacctgcacatgtgacctttgtgaacagaaatttgcatgtataatttgtgtttacttgtaactttctggttatatactgcttatatctgtggattcaagttactgaagtgaataccaataaaaagaaaaccctaggccatgttaattggttatacatgtttggaatgttaaccaacaacgtatttgtcagttgtggtttttattcgctcttaaactttgtgcatgctttaacaatttattacttttaaatctagagtgaattctaaagactgccgctaaagatctgagttttaaaaatgttgttgctggtggatttcttgttcctgttacataactaaaagtgaggccatttgtggtttttaaaaaccttatgaattaaaaatgctacaggtgaacaaacagaagcttatgtttagagatattgatgacttaacagtacaattggaagtaatacggatgagcaagaattagttctgcagcttttcaaaataattacgtagagactcttggtatattggattatctgttgttaaacaatttttttttcttccctgacacagggtctcactctgtcacccagactggagtgcagtggcacagttctctgcaacctcagcctttgggctcaaatgaccctcctacctcagtctcctgagtagctgggactacaggctcatgccactatacctggctagtttttggtttttttgtatagatggggctttgccatgttgcccaggttgatcttgaattcctgggcccaagtgatctgctcgcttcagcctcccaaagtgctgggactgtaggcatgagccaccatccctggccaagaaacaaagttttaatttcaaaaaaatctacaaaaacaggataggcattgtctttcaaatgttcagaccccagtttattaaaggatacttcaaatagttggctaaattttatgatctctcccgttgaaaagtaggtgatgattttaatgtgacatgcacaaaaaatccttgccagtttacttctgcaatttaattttagcctttactaattacccacttctgtttaattccaatttttaacagcaggtacataaagcattatgtgcacaatgg

SEQ ID NO: 85114 - DNA, 3705 bp, Homo sapiens
aggctagtagggccgtggtaaatcggccgaggtcggtccgctgagagaggtacctctccttttccctctccctttccctaagagttgtctgctggttctcagcttgaagaagattctgcagtccttattgatcctttttcttggcgttaccattttttgaagcaaagttaacctagctttctagtttgagctttctttttggccgtctttaaaaaaaattttttttttaatctataaaatagacaagagctagttctacaatgtccaagtcattccagcagtcatctctcagtagggactcacagggtcatgggcgtgacctgtctgcggcaggaataggccttcttgctgctgctacccagtctttaagtatgccagcatctcttggaaggatgaaccagggtactgcacgccttgctagtttaatgaatcttggaatgagttcttcattgaatcaacaaggagctcatagtgcactgtcttctgctagtacttcttcccataatttgcagtctatatttaacattggaagtagaggtccactccctttatcttctcaacaccgtggagatgcagaccaggccagtaacattttggccagctttggtctgtctgctagagacttagatgaactgagtcgttatccagaggacaagattactcctgagaatttgccccaaatccttctacagcttaaaaggaggagaactgaagaaggccctaccttgagttatggtagagatggcagatctgctacacgggagccaccatacagagtacctagggatgattgggaagaaaaaaggcactttagaagagatagttttgatgatcgtggtcctagtctcaacccagtgcttgattatgaccatggaagtcgttctcaagaatctggttattatgacagaatggattatgaagatgacagattaagagatggagaaaggtgtagggatgattctttttttggtgagacctcgcataactatcataaatttgacagtgagtatgagagaatgggacgtggtcctggccccttacaagagagatctctctttgagaaaaagagaggcgctcctccaagtagcaatattgaagacttccatggactcttaccgaagggttatccccatctgtgctctatatgtgatttgccagttcattctaataaggagtggagtcaacatatcaatggagcaagtcacagtcgtcgatgccagcttcttcttgaaatctacccagaatggaatcctgacaatgatacaggacacacaatgggtgatccattcatgttgcagcagtctacaaatccagcaccaggaattctgggacctccacctccctcatttcatcttgggggaccagcagttggaccaagaggaaatctgggtgctggaaatggaaacctgcaaggacctagacacatgcagaaaggcagagtggaaactagcagagttgttcacatcatggattttcaacgagggaaaaacttgagataccagctattacagctggtagaaccatttggagtcatttcaaatcatctgattctaaataaaattaatgaggcatttattgaaatggcaaccacagaggatgctcaggccgcagtggattattacacaaccacaccagcgttagtatttggcaagccagtgagagttcatttatcccagaagtataaaagaataaagaaacctgaaggaaagccagatcagaagtttgatcaaaagcaagagcttggacgtgtgatacatctcagcaatttgccgcattctggctattctgatagtgctgttctcaagcttgctgagccttatgggaaaataaagaattacatattgatgaggatgaaaagtcaggcttttattgagatggagacaagagaagatgcaatggcaatggttgaccattgtttgaaaaaagccctttggtttcaggggagatgtgtgaaggttgacctgtctgagaaatataaaaaactggttctgaggattccaaacagaggcattgatttactgaaaaaagataaatcccgaaaaagatcttactctccagatggcaaagaatctccaagtgataagaaatccaaaactgatggttcccagaagactgagagttcaaccgaaggtaaagaacaagaagagaagtccggtgaagatggtgagaaagacacaaaggatgaccagacagagcaggaacctaatatgcttcttgaatctgaagatgagctacttgtagatgaagaagaagcagcagcactgctagaaagtggcagttcagtgggagacgagaccgatcttgctaatttaggtgatgtggcttctgatgggaaaaaggaaccatcagataaagctgtgaaaaaagatggaagtgcttcagcagcagcaaagaaaaagcttaaaaaggtggacaagatcgaggaacttgatcaagaaaacgaagcagcgttggaaaatggaattaaaaatgaggaaaacacagaaccaggtgctgaatcttctgagaacgctgatgatcccaacaaagatacaagtgaaaacgcagatggtcaaagtgatgagaacaaggacgactatacaatcccagatgagtatagaattggaccatatcagcccaatgttcctgttggtatagactatgtgatacctaaaacagggttttactgtaagctgtgttcactcttttatacaaatgaagaagttgcaaagaatactcattgcagcagccttcctcattatcagaaattaaagaaatttctgaataaattggcagaagaacgcagacagaagaaggaaacttaagatgtgcaaggagatttaatgatttcaaagaaaataatggttctttgtttttaatgttaaccttttttaaatacaatactgatagttagaagaaaactattgtactcttttgttttagtggagaaataatagatgtctgttcatgtgttaagtgttatagcaaaaaaaatacacatatggttaagttaatgaatagtttttgttttatcagaatggcaacagacagaagtactttgtagagattgacttcctaagctacttaagacaacttgcaccactaagaaaaaaatgtagaaccatttggaaaaatgaaatttagtagttccaagtttcaaagaaatgtcaacattttattccattcaataaagaacaaaaccaatagtgtttttattactttcatctgaaacattccatgttttaatctgagccttgcagactttcatttggagtttgaacccgttttggttgcatttcatttttggagaacttaattaacgtgagattggcaattgaaatgcaggtgcagttttctgttaatgtcatgctgttgtttaggtaataagaaatattaagtaattggctttagattttgtaatttttttccctgagttcctgctagatttcgtattctagtagtcaatgtattttcagtgaaatgcaaaaatattcccattatctttgaccagtattaatttttgagatcttactgcttgtcacttgaatcccgtgattgtcatacatctctggtataagcaacatttgatttttgaagtgtgtagaccatctcttcatattttcaagatgtaattttacatttctgcatttttaaaacagtttggccataatcctagatgcacgcttctaattcatgtacctgcgaacctcgaggggatactctaga

SEQ ID NO: 85115 - DNA, 4605 bp, Homo sapiens
aggctagtagggccgtggtaaatcggccgaggtcggtccgctgagagaggtacctctccttttccctctccctttccctaagagttgtctgctggttctcagcttgaagaagattctgcagtccttattgatcctttttcttggcgttaccattttttgaagcaaagttaacctagctttctagtttgagctttctttttggccgtctttaaaaaaaattttttttttaatctataaaatagacaagagctagttctacaatgtccaagtcattccagcagtcatctctcagtagggactcacagggtcatgggcgtgacctgtctgcggcaggaataggccttcttgctgctgctacccagtctttaagtatgccagcatctcttggaaggatgaaccagggtactgcacgccttgctagtttaatgaatcttggaatgagttcttcattgaatcaacaaggagctcatagtgcactgtcttctgctagtacttcttcccataatttgcagtctatatttaacattggaagtagaggtccactccctttatcttctcaacaccgtggagatgcagaccaggccagtaacattttggccagctttggtctgtctgctagagacttagatgaactgagtcgttatccagaggacaagattactcctgagaatttgccccaaatccttctacagcttaaaaggaggagaactgaagaaggccctaccttgagttatggtagagatggcagatctgctacacgggagccaccatacagagtacctagggatgattgggaagaaaaaaggcactttagaagagatagttttgatgatcgtggtcctagtctcaacccagtgcttgattatgaccatggaagtcgttctcaagaatctggttattatgacagaatggattatgaagatgacagattaagagatggagaaaggtgtagggatgattctttttttggtgagacctcgcataactatcataaatttgacagtgagtatgagagaatgggacgtggtcctggccccttacaagagagatctctctttgagaaaaagagaggcgctcctccaagtagcaatattgaagacttccatggactcttaccgaagggttatccccatctgtgctctatatgtgatttgccagttcattctaataaggagtggagtcaacatatcaatggagcaagtcacagtcgtcgatgccagcttcttcttgaaatctacccagaatggaatcctgacaatgatacaggacacacaatgggtgatccattcatgttgcagcagtctacaaatccagcaccaggaattctgggacctccacctccctcatttcatcttgggggaccagcagttggaccaagaggaaatctgggtgctggaaatggaaacctgcaaggacctagacacatgcagaaaggcagagtggaaactagcagagttgttcacatcatggattttcaacgagggaaaaacttgagataccagctattacagctggtagaaccatttggagtcatttcaaatcatctgattctaaataaaattaatgaggcatttattgaaatggcaaccacagaggatgctcaggccgcagtggattattacacaaccacaccagcgttagtatttggcaagccagtgagagttcatttatcccagaagtataaaagaataaagaaacctgaaggaaagccagatcagaagtttgatcaaaagcaagagcttggacgtgtgatacatctcagcaatttgccgcattctggctattctgatagtgctgttctcaagcttgctgagccttatgggaaaataaagaattacatattgatgaggatgaaaagtcaggcttttattgagatggagacaagagaagatgcaatggcaatggttgaccattgtttgaaaaaagccctttggtttcaggggagatgtgtgaaggttgacctgtctgagaaatataaaaaactggttctgaggattccaaacagaggcattgatttactgaaaaaagataaatcccgaaaaagatcttactctccagatggcaaagaatctccaagtgataagaaatccaaaactgatggttcccagaagactgagagttcaaccgaaggtaaagaacaagaagagaagtccggtgaagatggtgagaaagacacaaaggatgaccagacagagcaggaacctaatatgcttcttgaatctgaagatgagctacttgtagatgaagaagaagcagcagcactgctagaaagtggcagttcagtgggagacgagaccgatcttgctaatttaggtgatgtggcttctgatgggaaaaaggaaccatcagataaagctgtgaaaaaagatggaagtgcttcagcagcagcaaagaaaaagcttaaaaaggtggacaagatcgaggaacttgatcaagaaaacgaagcagcgttggaaaatggaattaaaaatgaggaaaacacagaaccaggtgctgaatcttctgagaacgctgatgatcccaacaaagatacaagtgaaaacgcagatggtcaaagtgatgagaacaaggacgactatacaatcccagatgagtatagaattggaccatatcagcccaatgttcctgttggtatagactatgtgatacctaaaacagggttttactgtaagctgtgttcactcttttataccttttttaaatacaatactgatagttagaagaaaactattgtactcttttgttttagtggagaaataatagatgtctgttcatgtgttaagtgttatagcaaaaaaaatacacatatggttaagttaatgaatagtttttgttttatcagaatggcaacagacagaagtactttgtagagattgacttcctaagctacttaagacaacttgcaccactaagaaaaaaatgtagaaccatttggaaaaatgaaatttagtagttccaagtttcaaagaaatgtcaacattttattccattcaataaagaacaaaaccaatagtgtttttattactttcatctgaaacattccatgttttaatctgagccttgcagactttcatttggagtttgaacccgttttggttgcatttcatttttggagaacttaattaacgtgagattggcaattgaaatgcaggtgcagttttctgttaatgtcatgctgttgtttaggtaataagaaatattaagtaattggctttagattttgtaatttttttccctgagttcctgctagatttcgtattctagtagtcaatgtattttcagtgaaatgcaaaaatattcccattatctttgaccagtattaatttttgagatcttactgcttgtcacttgaatcccgtgattgtcatacatctctggtataagcaacatttgatttttgaagtgtgtagaccatctcttcatattttcaagatgtaattttacatttctgcatttttaaaacagtttggccataatcctagatgcacgcttctaattcatgtacctgcacatgtgacctttgtgaacagaaatttgcatgtataatttgtgtttacttgtaactttctggttatatactgcttatatctgtggattcaagttactgaagtgaataccaataaaaagaaaaccctaggccatgttaattggttatacatgtttggaatgttaaccaacaacgtatttgtcagttgtggtttttattcgctcttaaactttgtgcatgctttaacaatttattacttttaaatctagagtgaattctaaagactgccgctaaagatctgagttttaaaaatgttgttgctggtggatttcttgttcctgttacataactaaaagtgaggccatttgtggtttttaaaaaccttatgaattaaaaatgctacaggtgaacaaacagaagcttatgtttagagatattgatgacttaacagtacaattggaagtaatacggatgagcaagaattagttctgcagcttttcaaaataattacgtagagactcttggtatattggattatctgttgttaaacaatttttttttcttccctgacacagggtctcactctgtcacccagactggagtgcagtggcacagttctctgcaacctcagcctttgggctcaaatgaccctcctacctcagtctcctgagtagctgggactacaggctcatgccactatacctggctagtttttggtttttttgtatagatggggctttgccatgttgcccaggttgatcttgaattcctgggcccaagtgatctgctcgcttcagcctcccaaagtgctgggactgtaggcatgagccaccatccctggccaagaaacaaagttttaatttcaaaaaaatctacaaaaacaggataggcattgtctttcaaatgttcagaccccagtttattaaaggatacttcaaatagttggctaaattttatgatctctcccgttgaaaagtaggtgatgattttaatgtgacatgcacaaaaaatccttgccagtttacttctgcaatttaattttagcctttactaattacccacttctgtttaattccaatttttaacagcaggtacataaagcattatgtgcacaatgg

SEQ ID NO: 85116 - DNA, 4158 bp, Homo sapiens
aggctagtagggccgtggtaaatcggccgaggtcggtccgctgagagaggtacctctccttttccctctccctttccctaaggtaggcgtgaagcgggtaagagtcggggtcgggtggctgggggttctccgtgtccgccgggaggggacaacgacggcgacaggggctgcggggagccggcggcgcgcctttcttgctcgctcccgctctgcctccctccgcgttgcgtatgtgagccgcctgatcggcggccgccatgttaggagcgcagtggcggcgcaaccagccttctagggcggcggaggtgagcggtccgggagggaaacacgcggccggccaagggcccagggtgcggcgggagattttgggtgaagaggtgcgctgaccggccgagcttcctgcgcgtcctgggctcgttgtgggcgggggcgggacgactagcccgttacacgcgggccgcggcgctgagggggagggaggagctcgctcgaggcctgagggacagactgtacactgggggcttgccgtttgaggaggatggttaagatatctaagtccttgggtagcgccagtgccaaataacccgttcgcctttttttctctgaaaatgttccccgccccccatcgcgtaaaaatggccgaaaaatgaaacgttaacgcttgtttttcgtactgcgtcgtggaacaagccgcctgcagtacagtgcgaggcgggtgatttgcacttgtttagtcaagtcacctcacatcctttttctctttatcaaaatagtattagtccaggttcctccagagaggatcgtgtggtgtgggaccttccggtttccagacaaagggttttggagtaccgtggtgtagtcgccgcatcgttctttgcatttcgagctctgtgccatgttctgtgttcggcatttaccgtggatgaatatcccctagagttgtctgctggttctcagcttgaagaagattctgcagtccttattgatcctttttcttggcgttaccattttttgaagcaaagttaacctagctttctagtttgagctttctttttggccgtctttaaaaaaaattttttttttaatctataaaatagacaagagctagttctacaatgtccaagtcattccagcagtcatctctcagtagggactcacagggtcatgggcgtgacctgtctgcggcaggaataggccttcttgctgctgctacccagtctttaagtatgccagcatctcttggaaggatgaaccagggtactgcacgccttgctagtttaatgaatcttggaatgagttcttcattgaatcaacaaggagctcatagtgcactgtcttctgctagtacttcttcccataatttgcagtctatatttaacattggaagtagaggtccactccctttatcttctcaacaccgtggagatgcagaccaggccagtaacattttggccagctttggtctgtctgctagagacttagatgaactgagtcgttatccagaggacaagattactcctgagaatttgccccaaatccttctacagcttaaaaggaggagaactgaagaaggccctaccttgagttatggtagagatggcagatctgctacacgggagccaccatacagagtacctagggatgattgggaagaaaaaaggcactttagaagagaccgatcttgctaatttaggtgatgtggcttctgatgggaaaaaggaaccatcagataaagctgtgaaaaaagatggaagtgcttcagcagcagcaaagaaaaagcttaaaaaggtggacaagatcgaggaacttgatcaagaaaacgaagcagcgttggaaaatggaattaaaaatgaggaaaacacagaaccaggtgctgaatcttctgagaacgctgatgatcccaacaaagatacaagtgaaaacgcagatggtcaaagtgatgagaacaaggacgactatacaatcccagatgagtatagaattggaccatatcagcccaatgttcctgttggtatagactatgtgatacctaaaacagggttttactgtaagctgtgttcactcttttatacaaatgaagaagttgcaaagaatactcattgcagcagccttcctcattatcagaaattaaagaaatttctgaataaattggcagaagaacgcagacagaagaaggaaacttaagatgtgcaaggagatttaatgatttcaaagaaaataatggttctttgtttttaatgttaaccttttttaaatacaatactgatagttagaagaaaactattgtactcttttgttttagtggagaaataatagatgtctgttcatgtgttaagtgttatagcaaaaaaaatacacatatggttaagttaatgaatagtttttgttttatcagaatggcaacagacagaagtactttgtagagattgacttcctaagctacttaagacaacttgcaccactaagaaaaaaatgtagaaccatttggaaaaatgaaatttagtagttccaagtttcaaagaaatgtcaacattttattccattcaataaagaacaaaaccaatagtgtttttattactttcatctgaaacattccatgttttaatctgagccttgcagactttcatttggagtttgaacccgttttggttgcatttcatttttggagaacttaattaacgtgagattggcaattgaaatgcaggtgcagttttctgttaatgtcatgctgttgtttaggtaataagaaatattaagtaattggctttagattttgtaatttttttccctgagttcctgctagatttcgtattctagtagtcaatgtattttcagtgaaatgcaaaaatattcccattatctttgaccagtattaatttttgagatcttactgcttgtcacttgaatcccgtgattgtcatacatctctggtataagcaacatttgatttttgaagtgtgtagaccatctcttcatattttcaagatgtaattttacatttctgcatttttaaaacagtttggccataatcctagatgcacgcttctaattcatgtacctgcacatgtgacctttgtgaacagaaatttgcatgtataatttgtgtttacttgtaactttctggttatatactgcttatatctgtggattcaagttactgaagtgaataccaataaaaagaaaaccctaggccatgttaattggttatacatgtttggaatgttaaccaacaacgtatttgtcagttgtggtttttattcgctcttaaactttgtgcatgctttaacaatttattacttttaaatctagagtgaattctaaagactgccgctaaagatctgagttttaaaaatgttgttgctggtggatttcttgttcctgttacataactaaaagtgaggccatttgtggtttttaaaaaccttatgaattaaaaatgctacaggtgaacaaacagaagcttatgtttagagatattgatgacttaacagtacaattggaagtaatacggatgagcaagaattagttctgcagcttttcaaaataattacgtagagactcttggtatattggattatctgttgttaaacaatttttttttcttccctgacacagggtctcactctgtcacccagactggagtgcagtggcacagttctctgcaacctcagcctttgggctcaaatgaccctcctacctcagtctcctgagtagctgggactacaggctcatgccactatacctggctagtttttggtttttttgtatagatggggctttgccatgttgcccaggttgatcttgaattcctgggcccaagtgatctgctcgcttcagcctcccaaagtgctgggactgtaggcatgagccaccatccctggccaagaaacaaagttttaatttcaaaaaaatctacaaaaacaggataggcattgtctttcaaatgttcagaccccagtttattaaaggatacttcaaatagttggctaaattttatgatctctcccgttgaaaagtaggtgatgattttaatgtgacatgcacaaaaaatccttgccagtttacttctgcaatttaattttagcctttactaattacccacttctgtttaattccaatttttaacagcaggtacataaagcattatgtgcacaatgg

SEQ ID NO: 85117 - DNA, 2416 bp, Homo sapiens
aggctagtagggccgtggtaaatcggccgaggtcggtccgctgagagaggtacctctccttttccctctccctttccctaagagttgtctgctggttctcagcttgaagaagattctgcagtccttattgatcctttttcttggcgttaccattttttgaagcaaagttaacctagctttctagtttgagctttctttttggccgtctttaaaaaaaattttttttttaatctataaaatagacaagagctagttctacaatgtccaagtcattccagcagtcatctctcagtagggactcacagggtcatgggcgtgacctgtctgcggcaggaataggccttcttgctgctgctacccagtctttaagtatgccagcatctcttggaaggatgaaccagggtactgcacgccttgctagtttaatgaatcttggaatgagttcttcattgaatcaacaaggagctcatagtgcactgtcttctgctagtacttcttcccataatttgcagtctatatttaacattggaagtagaggtccactccctttatcttctcaacaccgtggagatgcagaccaggccagtaacattttggccagctttggtctgtctgctagagacttagatgaactgagtcgttatccagaggacaagattactcctgagaatttgccccaaatccttctacagcttaaaaggaggagaactgaagaaggccctaccttgagttatggtagagatggcagatctgctacacgggagccaccatacagagtacctagggatgattgggaagaaaaaaggcactttagaagagatagttttgatgatcgtggtcctagtctcaacccagtgcttgattatgaccatggaagtcgttctcaagaatctggttattatgacagaatggattatgaagatgacagattaagagatggagaaaggtgtagggatgattctttttttggtgagacctcgcataactatcataaatttgacagtgagtatgagagaatgggacgtggtcctggccccttacaagagagatctctctttgagaaaaagagaggcgctcctccaagtagcaatattgaagacttccatggactcttaccgaagggttatccccatctgtgctctatatgtgatttgccagttcattctaataaggagtggagtcaacatatcaatggagcaagtcacagtcgtcgatgccagcttcttcttgaaatctacccagaatggaatcctgacaatgatacaggacacacaatgggtgatccattcatgttgcagcagtctacaaatccagcaccaggaattctgggacctccacctccctcatttcatcttgggggaccagcagttggaccaagaggaaatctgggtgctggaaatggaaacctgcaaggacctagacacatgcagaaaggcagagtggaaactagcagagttgttcacatcatggattttcaacgagggaaaaacttgagataccagctattacagctggtagaaccatttggagtcatttcaaatcatctgattctaaataaaattaatgaggcatttattgaaatggcaaccacagaggatgctcaggccgcagtggattattacacaaccacaccagcgttagtatttggcaagccagtgagagttcatttatcccagaagtataaaagaataaagaaacctgaaggaaagccagatcagaagtttgatcaaaagcaagagcttggacgtgtgatacatctcagcaatttgccgcattctggctattctgatagtgctgttctcaagcttgctgagccttatgggaaaataaagaattacatattgatgaggatgaaaagtcaggcttttattgagatggagacaagagaagatgcaatggcaatggttgaccattgtttgaaaaaagccctttggtttcaggggagatgtgtgaaggttgacctgtctgagaaatataaaaaactggttctgaggattccaaacagaggcattgatttactgaaaaaagataaatcccgaaaaagatcttactctccagatggcaaagaatctccaagtgataagaaatccaaaactgatggttcccagaagactgagagttcaaccgaaggtaaagaacaagaagagaagtccggtgaagatggtgagaaagacacaaaggatgaccagacagagcaggaacctaatatgcttcttgaatctgaagatgagctacttgtagatgaagaagaagcagcagcactgctagaaagtggcagttcagtgggagacgagaccgatcttgctaatttaggtgatgtggcttctgatgggaaaaaggcggtaccagctgatagatctttgatgtaaagagtgcgggccatgcatgagcatgacgctagataaagctctacgaa

SEQ ID NO: 85118 - DNA, 2963 bp, Homo sapiens
  misc_feature (2862)..(2862): n is a, c, g, or t
  misc_feature (2932)..(2932): n is a, c, g, or t
  misc_feature (2938)..(2938): n is a, c, g, or t
aggctagtagggccgtggtaaatcggccgaggtcggtccgctgagagaggtacctctccttttccctctccctttccctaaggtaggcgtgaagcgggtaagagtcggggtcgggtggctgggggttctccgtgtccgccgggaggggacaacgacggcgacaggggctgcggggagccggcggcgcgcctttcttgctcgctcccgctctgcctccctccgcgttgcgtatgtgagccgcctgatcggcggccgccatgttaggagcgcagtggcggcgcaaccagccttctagggcggcggaggtgagcggtccgggagggaaacacgcggccggccaagggcccagggtgcggcgggagattttgggtgaagaggtgcgctgaccggccgagcttcctgcgcgtcctgggctcgttgtgggcgggggcgggacgactagcccgttacacgcgggccgcggcgctgagggggagggaggagctcgctcgaggcctgagggacagactgtacactgggggcttgccgtttgaggaggatggttaagatatctaagtccttgggtagcgccagtgccaaataacccgttcgcctttttttctctgaaaatgttccccgccccccatcgcgtaaaaatggccgaaaaatgaaacgttaacgcttgtttttcgtactgcgtcgtggaacaagccgcctgcagtacagtgcgaggcgggtgatttgcacttgtttagtcaagtcacctcacatcctttttctctttatcaaaatagtattagtccaggttcctccagagaggatcgtgtggtgtgggaccttccggtttccagacaaagggttttggagtaccgtggtgtagtcgccgcatcgttctttgcatttcgagctctgtgccatgttctgtgttcggcatttaccgtggatgaatatcccctagagttgtctgctggttctcagcttgaagaagattctgcagtccttattgatcctttttcttggcgttaccattttttgaagcaaagttaacctagctttctagtttgagctttctttttggccgtctttaaaaaaaattttttttttaatctataaaatagacaagagctagttctacaatgtccaagtcattccagcagtcatctctcagtagggactcacagggtcatgggcgtgacctgtctgcggcaggaataggccttcttgctgctgctacccagtctttaagtatgccagcatctcttggaaggatgaaccagggtactgcacgccttgctagtttaatgaatcttggaatgagttcttcattgaatcaacaaggagctcatagtgcactgtcttctgctagtacttcttcccataatttgcagtctatatttaacattggaagtagaggtccactccctttatcttctcaacaccgtggagatgcagaccaggccagtaacattttggccagctttggtctgtctgctagagacttagatgaactgagtcgttatccagaggacaagattactcctgagaatttgccccaaatccttctacagcttaaaaggaggagaactgaagaaggccctaccttgagttatggtagagatggcagatctgctacacgggagccaccatacagagtacctagggatgattgggaagaaaaaaggcactttagaagagatagttttgatgatcgtggtcctagtctcaacccagtgcttgattatgaccatggaagtcgttctcaagaatctggttattatgacagaatggattatgaagatgacagattaagagatggagaaaggtgtagggatgattctttttttggtgagacctcgcataactatcataaatttgacagtgagtatgagagaatgggacgtggtcctggccccttacaagagagatctctctttgagaaaaagagaggcgctcctccaagtagcaatattgaagacttccatggactcttaccgaagggttatccccatctgtgctctatatgtgatttgccagttcattctaataaggagtggagtcaacatatcaatggagcaagtcacagtcgtcgatgccagcttcttcttgaaatctacccagaatggaatcctgacaatgatacaggacacacaatgggtgatccattcatgttgcagcagtctacaaatccagcaccaggaattctgggacctccacctccctcatttcatcttgggggaccagcagttggaccaagaggaaatctgggtgctggaaatggaaacctgcaaggacctagacacatgcagaaaggcagagtggaaactagcagagttgttcacatcatggattttcaacgagggaaaaacttgagataccagctattacagctggtagaaccatttggagtcatttcaaatcatctgattctaaataaaattaatgaggcatttattgaaatggcaaccacagaggatgctcaggccgcagtggattattacacaaccacaccagcgttagtatttggcaagccagtgagagttcatttatcccagaagtataaaagaataaagaaacctgaaggaaagccagatcagaagtttgatcaaaagcaagagcttggacgtgtgatacatctcagcaatttgccgcattctggctattctgatagtgctgttctcaagcttgctgagccttatgggaaaataaagaattacatattgatgaggatgaaaagtcaggcttttattgagatggagacaagagaagatgcaatggcaatggttgaccattgtttgaaaaaagccctttggtttcaggggagatgtgtgaaggttgacctgtctgagaaatataaaaaactggttctgagggatccaaacagangccatgattactgaaaaaagataattcccggatcttactctccagaggcaagaatctccagtggtaagtnccctgnggttcccgagactggggttcaccgg

SEQ ID NO: 85119 - DNA, 1622 bp, Homo sapiens
aggctagtagggccgtggtaaatcggccgaggtcggtccgctgagagaggtacctctccttttccctctccctttccctaagagttgtctgctggttctcagcttgaagaagattctgcagtccttattgatcctttttcttggcgttaccattttttgaagcaaagttaacctagctttctagtttgagctttctttttggccgtctttaaaaaaaattttttttttaatctataaaatagacaagagctagttctacaatgtccaagtcattccagcagtcatctctcagtagggactcacagggtcatgggcgtgacctgtctgcggcaggaataggccttcttgctgctgctacccagtctttaagtatgccagcatctcttggaaggatgaaccagggtactgcacgccttgctagtttaatgaatcttggaatgagttcttcattgaatcaacaaggagctcatagtgcactgtcttctgctagtacttcttcccataatttgcagtctatatttaacattggaagtagaggtccactccctttatcttctcaacaccgtggagatgcagaccaggccagtaacattttggccagctttggtctgtctgctagagacttagatgaactgagtcgttatccagaggacaagattactcctgagaatttgccccaaatccttctacagcttaaaaggaggagaactgaagaaggccctaccttgagttatggtagagatggcagatctgctacacgggagccaccatacagagtacctagggatgattgggaagaaaaaaggcactttagaagagatagttttgatgatcgtggtcctagtctcaacccagtgcttgattatgaccatggaagtcgttctcaagaatctggttattatgacagaatggattatgaagatgacagattaagagatggagaaaggtgtagggatgattctttttttggtgagacctcgcataactatcataaatttgacagtgagtatgagagaatgggacgtggtcctggccccttacaagagagatctctctttgagaaaaagagaggcgctcctccaagtagcaatattgaagacttccatggactcttaccgaagggttatccccatctgtgctctatatgtgatttgccagttcattctaataaggagtggagtcaacatatcaatggagcaagtcacagtcgtcgatgccagcttcttcttgaaatgtaggagtttgaaatacctttaaaacatccttatcgtgaatcagaatcagccattattggtttttgggagttcatcatttacttgtaatatccacaatgttaatatcacatagtggtactgtatggacaatactatttacaagtaaaatgtttagatctggaaatttcatattgaatattagatgcagtaataatattttgttatttaacatttctaggatacatatatattggtcattatacaaattggtgatttttactagacatagtgaaagatagtatttgatatgtagagtggattaaacagtagcatttttaataatacatgctctaaaaatgtaaaagatacggaaaagagggtaggttattaaaagattctaattcattg

SEQ ID NO: 85120 - DNA, 817 bp, Homo sapiens
ctcggcgggagtgattattttctcaggtgtttgcaacagtgttctaactattaacgctacgatgcctgaacctaccaagtctgctcctgccccaaagaagggctccaagaaggcggtgactaaggctcagaagaaggacgggaagaagcgcaagcgcagccgcaaggagagctattcagtgtatgtgtacaaggtgctgaagcaggtccatcccgacaccggcatctcttccaaggcaatggggatcatgaattccttcgtcaacgacatcttcgagcgcatcgcaggcgaggcttcccgcctggcgcattacaacaagcgctcgaccatcacctccagggagatccagacggccgtgcgcctgctgcttccgggggagctggccaagcacgccgtgtcggagggcaccaaggccgtcaccaagtacaccagttccaagtaactttgccaagggagagacatgaagacagaggagaaatgaatgcataaaataactgataatatgaatctatacatagaacttaggaagtctcatctgcctgaaaatgactgtgtggatcccacccaaatccaactcatcctggtttgctgcacactggttcatcaaaagaaggttaccgaggggaaggaactaaaggtgtttgcacttcatgttactttttgagtttataaacataaaaacagaatttacttctgttacagacctagttactgggaattcattacttgccatggactacctttgctaagaaaagtctgaatgagaagatggcaggacgtctgaaaaaaaaagttataattaataaaatctgcggag

SEQ ID NO: 85121 - DNA, 962 bp, Homo sapiens
ctcggcgggagtgattattttctcaggtgtttgcaacagtgttctaactattaacgctacgatgcctgaacctaccaagtctgctcctgccccaaagaagggctccaagaaggcggtgactaaggctcagaagaaggacgggaagaagcgcaagcgcagccgcaaggagagctattcagtgtatgtgtacaaggtgctgaagcaggtccatcccgacaccggcatctcttccaaggcaatggggatcatgaattccttcgtcaacgacatcttcgagcgcatcgcaggcgaggcttcccgcctggcgcattacaacaagcgctcgaccatcacctccagggagatccagacggccgtgcgcctgctgcttccgggggagctggccaagcacgccgtgtcggagggcaccaaggccgtcaccaagtacaccagttccaagtaactttgccaaatttccaagttgatcgtgatgttgatccgggactcggtgtggtgacggcccgccctgagcacgaaagtgcacgctcttgacaacttccttatgtttggagctttctccaccaccacccccgcccattttcttgtaaaatttttaccatgcagatatgtaataactgcaagtaaaggctgaagacaatgtgagctgaacacggaactattacaaaaaaaaaaaaaaaaaaaaaaaaaaaaaaaaaaaaaaaaaaaaaaaaaaaaaaaaaaaaaaaaaaaaaaaaaaaaaaaaaaaaaaaaaaaaaaaaaaaaaaaaaaaaaaaaaaaaaaacttaggggggggccccgaccccaaatcccccttatgggggggcattttaaaattaatggccctttttttaaaaacgctgggatgggaaaaccctgggggttccccattttaaacccttggaaaaaaattccctttttccccattggggttatttccaaagggcccctaacgttttgccttt

SEQ ID NO: 85122 - DNA, 408 bp, Homo sapiens
aatggcacctaataactaaacccttcttatttcttcaatcaggggagagacatgaagacagaggagaaatgaatgcataaaataactgataatatgaatctatacatagaacttaggaagtctcatctgcctgaaaatgactgtgtggatcccacccaaatccaactcatcctggtttgctgcacactggttcatcaaaagaaggttaccgaggggaaggaactaaaggtgtttgcacttcatgttactttttgagtttataaacataaaaacagaatttacttctgttacagacctagttactgggaattcattacttgccatggactacctttgctaagaaaagtctgaatgagaagatggcaggacgtctgaaaaaaaaagttataattaataaaatctgcggag

SEQ ID NO: 85123 - DNA, 1025 bp, Homo sapiens
ctcggcgggagtgattattttctcaggtgtttgcaacagtgttctaactattaacgctacgatgcctgaacctaccaagtctgctcctgccccaaagaagggctccaagaaggcggtgactaaggctcagaagaaggacgggaagaagcgcaagcgcagccgcaaggagagctattcagtgtatgtgtacaaggtgctgaagcaggtccatcccgacaccggcatctcttccaaggcaatggggatcatgaattccttcgtcaacgacatcttcgagcgcatcgcaggcgaggcttcccgcctggcgcattacaacaagcgctcgaccatcacctccagggagatccagacggccgtgcgcctgctgcttccgggggagctggccaagcacgccgtgtcggagggcaccaaggccgtcaccaagtacaccagttccaagtaactttgccaagtaagcatctttacacctaatcccaaaggctcttttaagagccacgcatgttttcaataaatgagttgtaatcattcattcaaaaggggggttattggacttagcaccacagtaccaatctttaatgttacgttagtactgcagaggaaataacttggaagttacagggaataacaataggtactagaaattgagtgctatgggtacgtattagatcgttagctcatttagtatcacataacactagcataaactgaaagtattgtaaatgtacagctctttggtttccgtgtgcagatttccaagttgatcgtgatgttgatccgggactcggtgtggtgacggcccgccctgagcacgaaagtgcacgctcttgacaacttccttatgtttggagctttctccaccaccacccccgcccattttcttgtaaaatttttaccatgcagatatgtaataactgcaagtaaaggctgaagacaatgtgagctgaacacggaactattacaaaggtttctgatttgttttgtaattgggccagtttctgtctgaagctcttaagcgagtggggcag

SEQ ID NO: 85124 - DNA, 526 bp, Homo sapiens
ctcggcgggagtgattattttctcaggtgtttgcaacagtgttctaactattaacgctacgatgcctgaacctaccaagtctgctcctgccccaaagaagggctccaagaaggcggtgactaaggctcagaagaaggacgggaagaagcgcaagcgcagccgcaaggagagctattcagtgtatgtgtacaaggtgctgaagcaggtccatcccgacaccggcatctcttccaaggcaatggggatcatgaattccttcgtcaacgacatcttcgagcgcatcgcaggcgaggcttcccgcctggcgcattacaacaagcgctcgaccatcacctccagggagatccagacggccgtgcgcctgctgcttccgggggagctggccaagcacgccgtgtcggagggcaccaaggccgtcaccaagtacaccagttccaagtaactttgccaagtaagcatctttacacctaatcccaaaggctcttttaagagccacgcatgttttcaataaatgagttgtaatcat

SEQ ID NO: 85125 - DNA, 541 bp, Homo sapiens
tagcattctgagggcacccaaactcaatgacacccctggccagggcaggacaatccattccttggaggtggcccttaacaacctgggattggagctggggcgtgagtgctccagtctcctgtcctataggtaagcatttctaggtgactttctatatgcttctcaaaaaagtcttagcaccgatccctctgacctcaaagacataccctccttttcttccttctttcttactttctggggcgctactcaaataaaccacctgcacctatgcatctatggtttcaggcgttgcaactgacaggtaccatttacccttgagtcattacatctcaggaaaaacaatggactgaaaagagcactttgggaagaagcagaatcaaaaagtccagatagtccaactgagacggaaagggagaattccagagggagaagatagagagagggcatattgatagcttgaagagacagcaaggaagagtcaaggacacggggtcctcctgggagctgactcatgtgtgcagggggaaggagatggaaccag

SEQ ID NO: 85126 - DNA, 389 bp, Homo sapiens
cagctgctgaggaggctgaggtagctggatctcttgagtccaggaagtcaaggctgcagtgagacttgcattctgcattctagcctgggtgacagagcaagaccctatctcaaaaaagaaaaaaaatggtccagtgtacctggtctcagaaatacctgcatatgtgccaaatgtaggttgtgaaaagcatgaaatgcatgaaggatgtgaaagaatttcttgtggggttattttagacactcctcctaatggttcttatctcagacatgtaagcaagaacccttctttgtgccttcccagctccaagtttctttgggtctgacaagagtgctttcatcctgttaggaccagctgcctgaccctccacagggtacccagagcctggacag

SEQ ID NO: 85127 - DNA, 283 bp, Homo sapiens
attgttcggaaggcatgattgtgttttgaaatgtgaggacatgagatttgggagggcccagggacagaatgatatggtttgactgtatccccacccaaatttcatcttgaattatagttcctataatccccacatgttatggagggacctagtgggagataagtgaatcatgggtacagtttccctgtgctgttctcatgattgtttctcacaagagctgatggttttataattgtctggcatttcccctgctggcactcattctctctcctgccacttcatg

SEQ ID NO: 85128 - DNA, 221 bp, Homo sapiens
ttgtcaaataaaaagagaaaatacatcaaatttctagtttcaacagaattcatctgaagaggcaaacaaggctgggtgtggtagctcaagtctataatctcaggcttttgggaggccaaggtgggaggagtgattgagcagaggagtttgagaccagcctgggcaacatagtgagagcgtgtgcctccaaaacaaattttaaaattagccaggcatggtgt

SEQ ID NO: 85129 - DNA, 399 bp, Homo sapiens
cagcctcagatagtatgtttatagcagtgtgagaatggactaatgcagatgcctattaatgccttgcttctcaaagtgtgatctatgactggcagcattgtcatgacatgggaatttattagaaatgcagaatctttgccctcatccagaactactgaatctgaatctatattttagctaacttccctaaggtattcctaggctcattaaagtttgagaactgaacaaacttataaaatgcttcagtagatcagcagttgcttttaatataggaggcaatctttataagggtttctaggatatgatccttagtgtgcagctgggtctgtaggaagatttatatctacaaattcctgagttgtacatcacattgctagggaaaaagtagagcttttattg

SEQ ID NO: 85130 - DNA, 255 bp, Homo sapiens
gagtgaaataagccaggcacttaagacaaatatatgatttcacgatatgaacaacctacaataggtagattcagagggacagaaagtagaaaagtagttactggggggccgggggaggggaaggagacgttgttacttaacaggtcagagtttcagttttgcaagatgaagagagttctggagacggatggtggtgatggctgcacaacagcgtgaatggacatgcagctgaactgtacacttaaaaatagttaa

SEQ ID NO: 85131 - DNA, 369 bp, Homo sapiens
taggtacatcataacatagaatctaatcccctattgataaaccgattcaactgttttttgttttgttctgtttttgagatggaagctcgctctgttgcccaggcggctgggtgcggtggctcacacctgtaatcccagcactttgggaggccaaggcaggcggatcatgaggtcaggagattgagcccatcctggccaacaccccatctctactaaaaataaaaaaaattagctggatgtggtggtgcgcacctgcaatcccagctactcgggagactgaggcaggagaatggcttgaacctgggaggcagagattgcagtgagccaagatcacaccattgcaccctagcctggtgacggggcgagact

SEQ ID NO: 85132 - DNA, 176 bp, Homo sapiens
taggtacatcataacatagaatctaatcccctattgataaaccgattcaactgttttttgttttgttctgtttttgagatggaagctcgctctgttgcccaggctggagtgcagtggcacaatctcagctcactgcaacctctgcctcctgggttcaagcaattctcctgcctcag

SEQ ID NO: 85133 - DNA, 218 bp, Homo sapiens
gatccccggccaagcccagtcacgagaatttcaggctcttctctccggctccagcctgtgcctgtgattgtccaggtgtggcctaggccgccaccttctgctgccccggagtcccctccctgggtgggatgctcactacagctctgatgtatatagcacacagccccctccgcccctccggtctgtcgccaataaagtgcactgtgtttcactccggg

SEQ ID NO: 85134 - DNA, 671 bp, Homo sapiens
cttaaagaaatggggcgttgctctgttgcccagactggagtgcagtggtggtgtagtcatactcactgcagcctcaaactcctgggctcaagcaatctttccatgtcagtttcccaagtagctgggactataggtacatgtcactgagcccagctaattggtttttttttttttttatagagatgggggtctcactgtgttgcccaggctggtctcaaactcctcgtctcaagtaacccgcctgcattggcctcccaaagtgctgggattacagacatgcgccaccatgcctgacccagtatcgtggttagttctgagtcttgggataaagtgctagcattctgggcacaggttgccattgctctgggcctatctagggactatttcattaattaaccaaagagagctcttctaccctcaaattgtttaacaaggcaactgagactaaataatctgtatttgcaagtaatataggttgtagtttagttatgatccagccaagaagtgtattctttcaacagtacttgtatcccctttaagttaagttctatgagttttctgtacactaatcggacctaagaaattcccctttctcatgtcagtctgcctttgactttgggtgcatctctgaaggttttatgtagaaatgattctttttagggagtctgctc

SEQ ID NO: 85135 - DNA, 371 bp, Homo sapiens
taaccactcaatgacagcagagctatctatcagttcctctgaacttgttctgaatgagcttttcttactgttcagtcttcactctcctattactgttttgcttcctcatagaattccagattagtgggcccctggaagttcagctggtagatgagaaaactgagcccattgaagttaaagtcacccagctagtcagggttgatcttcccaactcagagtcccctgcttacttaaacttttatatccaacaggtttacttcccctggaaacttatttggtattttttattttccatctccatgccctcgataggtttctttatgtctgtctggaagtgtaatgaaaaataacactagttattgaatagctac

SEQ ID NO: 85136 - DNA, 718 bp, Homo sapiens
tgagatggagtttcgatttgtcacccaggctggagtgcagtggcgcaatctctgctcacttgcaacctctgcctcccaggctagagtgatcctcccacttcagcctcccaagtagctatgaccacaaggcatgcaccactatgcctggctaatttttgtatcttttgtagagacagggtttcaccctgttgcccagactggtcttgaactcttgagtgcaaaggatctgcccacctcggcctcccagagtgctgggattacaggtgtgagccaccatgcttggccatctcagccatcttctttgcataagacattggtgccctttgcagacctgggtggtgagagggagtccatccttgttgagcttgaatctcacttgctgtcaagtgatgccctttgctggtgagatgtggtggtaccgggttcagatggaatacgtggactgggctctgccatacgcttccttatgccctccagattgatgccctgggccagtgaggaatcctctgagaacctgtttccagtaaaattgggacagtcatagttgccacctaatgggtttgttgtgaggaagtgaagttacctccataaagcatttgatgggggtgcgatgactcatgcctgtaatcccagcactttggggaagccaaggcaggaggatcactggagcccaggagttcaagaccaacctggccaacataggagactgtgtctacaa

SEQ ID NO: 85137 - DNA, 436 bp, Homo sapiens
ttttttttgagacggggtctcgctcttgttgcccaggctggagtgcagtggcatgatctcagctcactgcaaccttcgcctcccaggctcaagcgattctcctgccccagcctcctgagtagctgggaccacaggtgcacaccaccacacccagccaatttttgtatttttagtagagatggggtttcaccatgttggccaggctggtcttgaactcctgacctcaggtgatccacccaccttggcctcccaaagtgctggaattacaggcgtgagccaccgcgcccggccaacatctatctttttaaaccaacagaatgcctgctaatttaagaaacagaagttctggaattgagaataatctgacttaatttatactctgtgaaatcaatgaaaaatccaagaataaaaagtacatcttcttttttctaaaaac

SEQ ID NO: 85138 - DNA, 176 bp, Homo sapiens
tctaatacatactagacactggagcatggcgcaggattgggaaatttaccaaaagagctatctgagccacccccgtagccatcacaaagagcacgtcctaaagaacgtgctgtacacttaatctcgccccctgcctttcatttaaacttaagataaaaacgctggtgtctaaaacg

SEQ ID NO: 85139 - DNA, 585 bp, Homo sapiens
ccagtgtgtttagagcagagtgaactgatggagcatggtccattgtagaccagggagataggcaggggcaggggctagattgcataagaccttgtgaaccattgtaaggagtttgcaaaagcactaaacatgtttgcttcatactgtggctttgatttaatatttaatcattagctgtatcttagaatttctccacagcctaaaactgaaaacagtaggtgacaaagaaccccacactttaaaaaacaggctggacctgataggataccatcaggaaacagatatgtattcctcccatcccttctttcaaacctgttctgtcagatctgcatctctgaattgtatctcagggatctatcacagcttttgagtcttattttcagttattaaaaagttcagtctgatcttaatcaaaactcccatctcccattattcagttcagtgctcctacgcttccttcagctcagcactgcccttgtcttggaaattgcaacagggaagagctagctgtgtggtctttgtctcagctccctggcttttcctcctcctgtacagactgttggttcctcagggtctgggcagggg

SEQ ID NO: 85140 - DNA, 507 bp, Homo sapiens
tctacatgtgatattgtttggctctgtgtccccacccaaatctcatctcgaattgtaatccccacgtgtcaagagatggacaattcccacctgtcgagagagagaggtgactggatcatgaaggcaatttcccccttgctgtttcatgatagtgagttctcacgagttctgatggtttgataagcagttttccccactgttgcttgctctctcttgcctgccaccatgtaagatgtgcctgtttctccttctgccatgattgtaagtttcctgagacctccccaaccatgcagaactgtgagtcaattaaacctcttttctttaaaaattaccagtcttgggtatgtctttatagcagtgtgaaaacagactaatgtaacatgtaagcataatcatgtgacatttgtctttctgtgcctatcttatttaacttaacattatgtcttccaggtttatgttgttgtataataaatgacacgactttattctttttaaaggctgaatagt

SEQ ID NO: 85141 - DNA, 653 bp, Homo sapiens
tcggtcattaaacacatatttatcagtcacctacgtgtgccaggcagggatgtcatcaggcccattttacagatgaggagactcaggcctagagttcagaagtcccctgcacaaggacacacagtggctgcgtgtggcagggccaggatctgagctcaggaagccaagttctggggtctcagcctgtccctgccaggctcctgctgggtactgtcacaccacgtggcagacaagaggcaacagacaggagcacggccttggtggcctggcagccagactatttgggcttgaatcccagctcctctgcttacctgctgtgagaccttgggcaagtgacctaatcttttggtgccccagtttcctccaccatagattggggatagtaacagcacatcctttacaggctgtagtgaaaattaaatgcattaatacacataaagcctttaaataaagcccaatgtggtacctggcacaaaggaacggcttcctgagcacctgccaaagtcgccactccccagctgaggaaggtgaggctcaaagagaggtcacttgccctaagtctcattgccagcaagggatttaacccagggagccctgagttcctagatgctgcaacaatccgctgctccatccagctggacaggggcccccca

SEQ ID NO: 85142 - DNA, 236 bp, Homo sapiens
cctgtatcaaggaaacaactgaaaatatcctaacaaattttggaagggagggtttttaaatgatttgatttaaaatatgggctatgtaaaacatgaaatctacttggaggaagggggattcaagacatcttaaaggaatgggcattcttttccgaagttgataataggctctatgagatattactcgtattaaaagtgcgccgtcatgtgtaatgaagatgctttcagttgcaatt

SEQ ID NO: 85143 - DNA, 238 bp, Homo sapiens
gcctctggccgctccctctgccagtgctccagcctggccaggctttccgttgctggaatcttccacacgccccctgcctccaggcctgcatcctttctgccgacagcatgcctcttctccccctctgggtccccaactctgctaactaatttttctacagagattttattttagatgccctttcctccacgagatactcagatctgttttcacacagaaggcgtgcatttgtcctgct

SEQ ID NO: 85144 - DNA, 205 bp, Homo sapiens
tcgagtataaaatgacttagcgattcttctcctcaaaatgtgtcatttatgatccttttgtagttcatgagtgtgatgattgtgtgttcatacgcttgtgtgagatgtgccacccttgaaccttgttacgacattggcacattacccgtctgatctgaaaaaaaaagtatcatttatttacttacctaaaatctatggagtgctt

SEQ ID NO: 85145 - DNA, 661 bp, Homo sapiens
gagccgagagatttggggatctgcactgcacagtgccgagcacttcctttgctgcaggactccacagaggctttaatgcgctggcgtcactacaggcatgcggtgcagcctccccagttagccagggacagcaccctgtctccgtgaaccctggtcccacctcatgacacgttctggttcacacagctgggccactctgctctgcacggaagagccttcgcttccctgaagggctagcctgccccagcgcacgcctcttagcggccgggccagccccgaggccagagttgatgagagctggccggtgggtttcattctgctgcttgcctcggccgcctggcattctggcccagtctttctgacgtggggacactcttggcctaaatcctgtctttgcaaccaaaaagcagtgtgcccagcggtcacctcacttgcttccttctctcacccagggtcccagagctgggagggcaggggtgggatgaatgaagcgtggcctgccctgcggagagggatgagggtggggcggggaagttcctcagccccagtgcggcagctcgttccggggcgctgcctgtgtggtctacgccagcaggtaagtgagagggtgacagattcctgctccagaaggatctggggctgtgtaagaaccgtctcagca

SEQ ID NO: 85146 - DNA, 310 bp, Homo sapiens
ctagaattaggttgtttaggactctaattaaaaatcaagaataatctacattttcccactacttacctcgtcctacgccaagaactccagaccctaaaaagttatgttttgattgctgttttatattatccatacagttttattgaacaattaataatagttcatgaaaggtttggctctgttaatattttgcaatgcatattttaaaatacgtaaaaatgggaaccccctctattttcttgcttaatcctgtgtacaataatcttcagccagtcaatttgaggaatcttgtaaaacttaattgtaaggg

SEQ ID NO: 85147 - DNA, 634 bp, Homo sapiens
tcttaacgaagttacctaatcttggtgtcttggtttcttcacattgtggaagggacatgactcacttcctagggtgttaagattaaatgcaataaaacatgtaaagttttgcaatgttgtttggcacatagctattcaatagttgtagctatttaaaaaattatttagggtacttaattcatgtaataaccatttaagtattcagttcgctttctattatctttatattatttctcccaagcaaattttgctttttttttttccaagaggcaaggtctcactgtgttgcccaggctggcctctaactcctgcgctcaagtgatcttcctgcttcagccttccaagcaaactttgcttttaataacattaatatttactaatggcttattccatttatggcacctgctcaaacttaattgcttgctttatctgagccctttcctcagataaaggctcagaaagtaaaattgacttttactttttcagctacgtgtatatgtggcacttaattatataattagcacctgtggcccagagatgggtgctgggtattgggacactcatttatcaggttgtgtgtaattagcatctacactggaaagcaccttttgaacagctggcgctgagatacaga

SEQ ID NO: 85148 - DNA, 295 bp, Homo sapiens
cgtggacacccctgaaggatgggctgaggctttctgcagagccctggctcactttttccaaatcagagctgctcttgttcatttttagaaggtgccgcgactttggaggcggaggaggaggtgagaatgtctcaatcccacttctgtccttggggaactcaaaggcaaaagaggcggatttgctcatcccggtcccaactttgctgttctgcccagaggagccatctgtggggtggagacggtgccaggtcgtggagtttgaatggtccgtggggccatttttggtctctcttcc

SEQ ID NO: 85149 - DNA, 882 bp, Homo sapiens
ccctagtccatgagcactgaggaagggactttaaggaatccctctcattttgacaaggaaagcaaaagcccagagagatcacacaactatttagaaaggtaggaacagaaagagctgtcttcagacttcttctctgggaggttgatgggttttccccttggctttcgaagagggaggtctggcctcaataactggcagtgctgtcttcctgggactcgggctccaccccttcaccatgggcgtgcatgctcacagctggcactcattccctcacggaagccttccctgggctaaaggcatcatcaagaggtaagaagtacagcttcacaggtacccagagcctctcaaatataggcatgatggaatgaaacctccccaccccagtccccaaagttggtcatcagaagagggagtggccgcctgcctctaaacactaaaaatctaagttccctctagtcaccaacgcccacctggcacggaaaggccttgttttggtgcctttgaccccatttacactccagcaacctttacccccacctttctggccttcccctgcacaccagcccttcatttctgggggctgtggagagtcaggagacagcttggtggcctcctccactccctcccagacttcaggtcccaggagatcctccagtgacctattgtcctggcacctgaccttctccctaccccctaccttgcttccacaagctgggaaggggacaggaaatgcacaaataattatagcccaagagggaaggagggagggagggttccagcccactggctccaggcaatagctacagccagtgacccggagagcggagagccggagagccagaggggtagcggaggaggacccaggctcatgataaggaagac

SEQ ID NO: 85150 - DNA, 672 bp, Homo sapiens
cagagatgtgcttcttctggtgaatacattcctgactgatggatttacagaaatgaggggttaatattgactggttgggcttgcaaaagcatgttcactgagacacattacagttgatctatttaatgtgtttaaaattggtatggtggctacctgtcactatggctatacaaaaaccagaaattttatttttctaagaagcagacttaaaaatgactctcagtgatacctgctcctgttaggatgcccttggataattccttcccttgaataagggctgcattagtaacttgcttctagcaaataaatttggcagatgtgatgaaatatcacttccaagattgggttataaaaagactgtggcttctgccttcagggcttctttcacttgctcttgcttggatctttctctctgggggaagcaagttgccatgatataagcagctcaatggcaggaggccaaggcaaggaggggatgtggcaaggaactgatatctccagcccagtcagagaggacctgaagttcaccaaagtcatgtgagtgagtttggaactggatcctttcctagtcaagttctgagatgacggcagcttcagccaacaccttgacttcagctttatgagagaccttgagccagagacatccagataagctatgcctggattcctacc

SEQ ID NO: 85151 - DNA, 318 bp, Homo sapiens
gcccggcagccggcaaagcccccctcctcgtacatcgcgctcatcaccatggccatcctgcaaagcccgcacaagcgcctcacgctcagcggcatctgcgccttcattagtgaccgcttcccctactaccgccgcaagttccccgcctggcagaacagcatccgccacaacctctcgctgaacgactgcttcgtcaagatcccccgcgagccgggccgcccaggcaagggcaactactggagcctggaccccgcctcccaggacatgttcgacaatggcagctttctccggcgtaggaagcgtttccagcgccaccaa

SEQ ID NO: 85152 - DNA, 317 bp, Homo sapiens
tggggccatggtgatggcagggggaagtggaggaggtagactcacattacacaagcactaagactcaggaatagaaccagaaagctataagcttgaaccagtgaggacgctggagtgtgagcactgttctcaaagcagcagccctgtgagggcaggggctgcttcccagagaattcccagcacctggcacagagcctggcacaaagaaggtactctgcaaatatctgaatgaagaatggaagaaaaagccaattaacaaataaatggactgcaggaacccaggacacaccagagggtgctggaggcagaccagaccc

SEQ ID NO: 85153 - DNA, 436 bp, Homo sapiens
  misc_feature (5)..(5): n is a, c, g, or t
  misc_feature (16)..(16): n is a, c, g, or t
  misc_feature (37)..(37): n is a, c, g, or t
  misc_feature (44)..(44): n is a, c, g, or t
  misc_feature (95)..(95): n is a, c, g, or t
  misc_feature (112)..(112): n is a, c, g, or t
  misc_feature (114)..(114): n is a, c, g, or t
  misc_feature (126)..(126): n is a, c, g, or t
  misc_feature (151)..(151): n is a, c, g, or t
  misc_feature (271)..(271): n is a, c, g, or t
agctncaatgaaaccnaaacttgctccctggccttcntgtgctnaggcctctccccttttttgccagggcttccctggtgcctctccccatgaanagggaacttcccctccnantccccatggaanaccccaggtttgggctgttgcccanctttgaggccccctgtgggcttgcctgtcccaacccaagaggcagggctcaaagtgcccacccgggggttgcaaggacagcagaggaccacctgccctctgcaggaagctgtccaggaanccgtgtcctgggctgtggtccttgactcccatggggagagctgggtcacttggcctcttctaactggccccaagcacgccaattctggagcatggttactaagtggctctgaagcttcagggtcaccacaggcttgtcctgactgcaaactcatggagtggttgc

SEQ ID NO: 85154 - DNA, 475 bp, Homo sapiens
caacttaggtttatccagtatcctcattagtaactttaatccttaatgtcactcacctttgaaatgtgctcattggacgggtgccacacagagcaagctcgcaataaatgttgctgaatagaacttactgactgccactgacttaacttcgtttggatgttgtttatagtctctttatgcctctgccaccccagcagagtcataaagaaccagacagaagcaggacccaagaacatgaggcccaaaggagagctgtgggaagtgaaatactatattcagggagaccctcagctccttcccatctcagttccccaaatgagagcaagcaggctgatacttctcaggtggggtatggagatatcccacctgatccctcttgtcagttgataagctggactccacatagcttatagtcagctttttggtgcttcactcttaaatatgaatgactagacaaagatcaattgtcatttgt

SEQ ID NO: 85155 - DNA, 352 bp, Homo sapiens
ggtggtgttctaatgttttatgcatacatattttagtccttttaagaaaccctataggtattgttattttatgtacagtttggaggtttaataacttgcctaaaatcatacaaatgatgacagagccaggacacaaatcactggtgtctggctccagagctcatgctattaaccctgtgtgatcttggtcttcataacctctaaaaaaaagaagaagaaaataaggaagagagggagggagcaaaggaaggagacaaagagtttaacctatagttcaaggggcagaagggaattaattgctcatgatttatgctgtaggaaaacttaaaataaattcaattaaaaagtgctg

SEQ ID NO: 85156 - DNA, 419 bp, Homo sapiens
agagggcagtggtgccatctcagttcactgcaacctccacctcccaggttcaagcgattctcctgcctcagcctccaaagtagctggaattacaaacatgcaccactacacctggctaatttttgtatttttagtagagatggagtttcaccatgttgcccaggctggtctcaaactcctggcctcatgtgatccacctgccttggcttcccaaagtgctgggattataggtatgagccactgcacccagcctgagtaaagatgttttaagcaaatacacaataagaatgatgttcgcaattcagagctttttgtctgcctaaggggattctgttgttctagtcctgcaccctgacagatgtggtctctcgtctcagccagatgtggtagtaactacaggattaatttgcatgtgtaaa

SEQ ID NO: 85157 - DNA, 701 bp, Homo sapiens
gtctgggctcaggcccacggactctatcctggctgctcctgggggagaaggagagcagcacctcactccgctgcctgcaggagcctctggtagtgagggctgactgtccctcctctcctctgaagcctctgcccacaagctgaactacctcacagataggaaacaggaagctcagagagggcagtggacttgcccaaggttacccagcaaattagtggtagagctgaggcttgaatccaagactcttagagctagacaagttgaaaggtcaacatgattttaccaatgtcttaggaagcagtgggggatgcacagggggacagagtatgagtaacgattctgccggcttcaggcaggcctggggctgtgggctgaaattgacccagatgcgtcaggggcttggatcagatgagagaaggtttcccagaagaggtaaggccaaggtgatcttggagggtgaggatgagttagctcagggaaggcagggagaggcattccaggagggacaaaggcacagaagggtagaggggacttccagggaggatgtggtgtggtgggagcaaggggagagtgcaggaacctcctccaggactaacagctggatccttgagagtcctacggaaagaagctcctggggacgggtgacttagtcctctcaccggaaaagatgctggggccttgggagctggggtcctggggag

SEQ ID NO: 85158 - DNA, 347 bp, Homo sapiens
agggaaatgcacagaattctactaaaataacagcaaaataagagagcatgaattacatatcaaattatttaaagcaaataatttaacaaatttctggaacagacagaaagcagatgagtctaccaagaaggataataaacaatgacaccagagaaaaaccacaacctgaaaacttaagaaaactgcctaagaggtgtgagccagagctcccaggagccctacagtgctccaagctcagaactggcaagtatcaaagtcaagaatgctatggggtagctaggcctcttgactttctcttctctctccattcatagacaagaaagcatatctacctttagtgcctagaa

SEQ ID NO: 85159 - DNA, 259 bp, Homo sapiens
caaatgtcccgctgatccgacaggaggtgaagctcaggcggtaatggctggcctgttgctcacctcctgctgtgcggccaggctcgccacagacctataggatctgccgcccggggctggggacgcctgctctagagcactaggtatgatcgggctgaggctggacctcacctgaaactgcatttttatttgttttccccttttcttctgccactccactcactgtcttacaggtttctccagagaatactcccttaat

SEQ ID NO: 85160 - DNA, 689 bp, Homo sapiens
  misc_feature (2)..(2): n is a, c, g, or t
  misc_feature (13)..(13): n is a, c, g, or t
anttcggcacagntcgtcatgtcagccaggctgggcttgaactcctgacctcagatgacccacccaccttggccaatgcactgaaacgccatctctactaaaaacacaaaaattagccaggtgtggtggcatgtgcctgtaatcttagctactcaagaggctgaggcaggagaatggcttgaacccaggaggcaggggttgcagtcagctgagactgcgccagtgtactccagcctgagagacagagcgagactctgtctcaaagaaaaacaaaaacaaaaacaaacaaaaatctacttgaaccaataaaaattcccatccccacctagaattctaaatattttataaataaagtcttcagagcctagatattcactagaacccagtggtcacgtgttcctaatgggtggaatattattttgaatctttccatgatgagagttacattgatgggtgaaagctttttatgcaacatcatcattgttgaataaacagacgcttagcatatttaggttggaatgcaagggaactaaaggtaggggagattcttaaggaagtctactttctcttcaagaatgctatcaaattgaaaggtaattcctaaacaagagtcatttgtaaattagggaggaagagctaaaaaagattcctagcaagaaacatcataaaggggcttgataaagccaaaa

SEQ ID NO: 85161 - DNA, 286 bp, Homo sapiens
tgtggaggaggaagaaggtaaagacataagcctggaaggaagaactgacatgagttttagttgctgacttgatatccaagtcaagactgcagtggatcccaggacacctggaaaaagatagctgtctgggcattaggggattaggaatattagccaaagaatggtaggctctgtctaggtatttatggactgttctctctttctctctgcatgaaactaattcattctcattctcttattctctccttctctccctctctctctctctctctctctctctctctct

SEQ ID NO: 85162 - DNA, 170 bp, Homo sapiens
aactgcatttcaacccctttaattcctttccactctcatcgctggattccttaatatcagggcttcccttaggggatagtaggtggtaagttcacaggattatttttgtattcaagaggtagattgtcatataaatatatctgcagcattgaacatgaaaataaaaaagg

SEQ ID NO: 85163 - DNA, 773 bp, Homo sapiens
tgggctcattaattgtgtttccagcagttactccatttaaagcataaatagtgttaaccattaccagttatttcaaatactaacatgggtccatttaaaaaaaatatttattttggtacttgggtgtccatattataataatgttgtttttccagaaatatatttgatctttggactgagaatgtttggtaacatagtcaagcatttgttaagccaagtgtggaaatgttcactttttaactttacagtttttttaatgagcaattctacatttctaagaaaaaagatacttcatttttatataaggttacaactgctttataaaaatgtattcacaatgtcattaatctttgcgtttgtgctttatatcttctcagggcagaggttcttgaaatatgtactcaatcatttaacttttattttattttttcatttgtttttaatgaactacctcttgttgaaattttgctggcttcattctttcgggatacctgtgtcctctagtcctaccgctcttccatagcactctttccttaagcacagtatccataattggggcacttctaacttttaccttgtaatcgtttcaacagaggttttatcttcttttctggaatataagctctcgtagaacaaggcttgtctatttcttaactttgaaacctcccaggaggattgccaggaataggtatactattatttgccaattggatggatttactattttattaacattatctcttttttcagtaaacatgaactttacatttata

SEQ ID NO: 85164 - DNA, 355 bp, Homo sapiens
tcatttaattctcactactgccccgtgagattagtagtgttgttaccattttgtgcctagtgtcacaggactgccccttagcagagcagggatcagagcctgggctgtcaggcccgttaactggccatggtcaccaatatgtcgtgctacttctcatacagagacattaatgtttttctgcaaagaatcaaggcaaagaagattgagaagggttcaaaggattgagagtgttggattcaaggactctacttatgtttaaaatatccataaagaggtccgatgtggtggctcacgcctgtaatcccagcactttgggaggccaaggccggcacgaggccttgagatcacgaggtca

SEQ ID NO: 85165 - DNA, 338 bp, Homo sapiens
agttacaaaaatagtgcagcaaaatcctgtgtacccatcactcagcttcccactggtgatatataattatagtgtattatcaatactaaaaaattgattgtcacaatgtaatcaactagacagcagtacctgtttctttttaatgcctacaagacattccattctatgggtgttttatttaaccagtcctttattgctgggcattaaaattgtagtattgctggtatagggaaagataggagaaaataaagtctgtgtattcggggccactgctggcatttacattgcttttatgtgaattagaaaagagttccctctctgggtggatgtagtcccat

SEQ ID NO: 85166 - DNA, 120 bp, Homo sapiens
ggagttcgagagcagcttgggcaacatagggaaaccccatctctataaaaaaatttaaaacttagctgggtgtgtggtggtgtacctctgtagtctcagctactcaagaagcgcaggcaa

SEQ ID NO: 85167 - DNA, 814 bp, Homo sapiens
gggacaaacgcagccagacgccggacttgttgggtggcgttagaaaggctcccagaatggggaccagagatgggaagaacataggagacgttgtacacaagatctaagagaagagggagatgaagagactacaaatgatgttccccatatccagtgtggagatggctgtgacccccaaggactcagggacaacagtcagttctgcttgcaaaggatccaccagggtctgattttttatgagaagctgctaggatcggatattttcacaggggagccttctctgctccctgatagccctgtgggccagcttcatgcctccctactgggcctcagccaactcctgcagcctgagggtcaccactgggagactcagcagattccaagcctcagtcccagccagccatggcagcgtctccttctccgcttcaaaatccttcgcagcctccaggcctttgtggctgtagccgcccgggtctttgcccatggagcagcaaccctgagtccctaaaggcagcagctcaaggatggcactcagatctccatggcccagcaaggccaagataaatctaccaccccaggcacctgtgagccaacaggttaattagtccattaattttagtgggacctgcatatgttgaaaattaccaatactgactgacatgtgatgctgacctatgataaggttgagtatttattagatgggaagggaaatttggggattatttatcctcctggggacagtttggggaggattatttattgtatttatattgaattatgtacttttttcaataaagtcttatttttgtggcta

SEQ ID NO: 85168 - DNA, 810 bp, Homo sapiens
cttcggactgctcacttgccttgttcagccctgaatcatcagggctcccagaatggggaccagagatgggaagaacataggagacgttgtacacaagatctaagagaagagggagatgaagagactacaaatgatgttccccatatccagtgtggagatggctgtgacccccaaggactcagggacaacagtcagttctgcttgcaaaggatccaccagggtctgattttttatgagaagctgctaggatcggatattttcacaggggagccttctctgctccctgatagccctgtgggccagcttcatgcctccctactgggcctcagccaactcctgcagcctgagggtcaccactgggagactcagcagattccaagcctcagtcccagccagccatggcagcgtctccttctccgcttcaaaatccttcgcagcctccaggcctttgtggctgtagccgcccgggtctttgcccatggagcagcaaccctgagtccctaaaggcagcagctcaaggatggcactcagatctccatggcccagcaaggccaagataaatctaccaccccaggcacctgtgagccaacaggttaattagtccattaattttagtgggacctgcatatgttgaaaattaccaatactgactgacatgtgatgctgacctatgataaggttgagtatttattagatgggaagggaaatttggggattatttatcctcctggggacagtttggggaggattatttattgtatttatattgaattatgtacttttttcaataaagtcttatttttgtggcta

SEQ ID NO: 85169 - DNA, 855 bp, Homo sapiens
gggacaaacgcagccagacgccggacttgttgggtggcgttagaaagtaactctgtttttagtcttcttgaacaaaattacgtctagggctcccagaatggggaccagagatgggaagaacataggagacgttgtacacaagatctaagagaagagggagatgaagagactacaaatgatgttccccatatccagtgtggagatggctgtgacccccaaggactcagggacaacagtcagttctgcttgcaaaggatccaccagggtctgattttttatgagaagctgctaggatcggatattttcacaggggagccttctctgctccctgatagccctgtgggccagcttcatgcctccctactgggcctcagccaactcctgcagcctgagggtcaccactgggagactcagcagattccaagcctcagtcccagccagccatggcagcgtctccttctccgcttcaaaatccttcgcagcctccaggcctttgtggctgtagccgcccgggtctttgcccatggagcagcaaccctgagtccctaaaggcagcagctcaaggatggcactcagatctccatggcccagcaaggccaagataaatctaccaccccaggcacctgtgagccaacaggttaattagtccattaattttagtgggacctgcatatgttgaaaattaccaatactgactgacatgtgatgctgacctatgataaggttgagtatttattagatgggaagggaaatttggggattatttatcctcctggggacagtttggggaggattatttattgtatttatattgaattatgtacttttttcaataaagtcttatttttgtggcta

SEQ ID NO: 85170 - DNA, 1026 bp, Homo sapiens
ccgaattcggcacgagaacaactgagggaaccaaaccagagacgcgctgaacagagagaatcaggctcaaagcaagtggaagtgggcagagattccaccaggactggtgcaaggcgcagagccagccagatttgagaagaaggcaaaaagatgctggggagcagagctgtaatgctgctgttgctgctgccctggacagctcagggcagagctgtgcctgggggcagcagccctgcctggactcagtgccagcagctttcacagaagctctgcacactggcctggagtgcacatccactagtgggacacatggatctaagagaagagggagatgaagagactacaaatgatgttccccatatccagtgtggagatggctgtgacccccaaggactcagggacaacagtcagttctgcttgcaaaggatccaccagggtctgattttttatgagaagctgctaggatcggatattttcacaggggagccttctctgctccctgatagccctgtgggccagcttcatgcctccctactgggcctcagccaactcctgcagcctgagggtcaccactgggagactcagcagattccaagcctcagtcccagccagccatggcagcgtctccttctccgcttcaaaatccttcgcagcctccaggcctttgtggctgtagccgcccgggtctttgcccatggagcagcaaccctgagtccctaaaggcagcagctcaaggatggcactcagatctccatggcccagcaaggccaagataaatctaccaccccaggcacctgtgagccaacaggttaattagtccattaattttagtgggacctgcatatgttgaaaattaccaatactgactgacatgtgatgctgacctatgataaggttgagtatttattagatgggaagggaaatttggggattatttatcctcctggggacagtttggggaggattatttattgtatttatattgaattatgtacttttttcaataaagtcttatttttgtggcta

SEQ ID NO: 85171 - DNA, 513 bp, Homo sapiens
cgctgatctgtacaactccaaagcctgaatcacttccttatgccgtctcagccaggcggtcccaatgcccatggccggggaccacctctgcatcaagaatatgcttctcccgcccagggccctcgatttattttccattctcatctcagagatagggcctgagcctggaaagaggttaaggagacccagggcagtatcttggggtggaaagaggtgttaacaggtacaaactggagctctgtctctgagactggtggcggcctacagtatcatgctgaggatccagacccacactgtcccacaaggcagccgaaagccacatgtggctactgagcccctgaaacaggctggtctgaatggaaatatcccgtaggcattaaaatgctatcagatctcatagacttagtacaaaaaaaggtgaaatgtcttgatatttttgtatattgattattgaaataaccttttatgttgggctaaatacaaatatgttattaaaattaatttaacaacata

SEQ ID NO: 85172 - DNA, 724 bp, Homo sapiens
ctcaataacaagaaggcgtggggaagtaagggacctttgatgaggtggaaagatcagtcactgttgggaacctgtaagaataagaacatgcagctcagtcaggaaggaaaccccagggttcaagagatagagctctttttttttttttctttttttttgagacagggtcttgctctgtcgcctaggctggagtgcagtagcatgatctcggctcactgcaacctccacctcctgggttcaagcgagtctcctgcctcagccccccaagtagctgggactaaaggcatgtgccaacatgcccgactagtttttgtctttttagtagagacggggtttcgccatgttggccaggctgatcttgaactcctgacctcagatgagctgcctgcctcggccgcccaaagtgtgggggttacaactgtgagctaccaggcccggcccaagagatagagctctttaggaggagatactagtctcactagatccaacataaatggattgaaccagagctaaaaattccacctgcctctcacagaattaattttaaaagaaaataccatcatatggtattcctgttttcatttttaccagcagggtccttctgtttcattactccaatctttaattcttttctggagttctggagttgctgttagcattagaaaagttttgcatgtgatagctgtttccttaaatatcatgcaaatattcttgaaagcatcct

SEQ ID NO: 85173 - DNA, 159 bp, Homo sapiens
gtgcttttctgcctgtgtttttgatggatcttagtattgattaacatagatttcatttcaagccatctattttcattgaagatgcatgtttatgttaatccattttgatttcactcaagaagaggattggatgaactacatcaggtgacgggacatcat

SEQ ID NO: 85174 - DNA, 551 bp, Homo sapiens
cgccccctgggttcaagtgattctcccacctcagcctcccgagtagctgggactacaggtgcatgccaccacgcctggctaatttttgtattttttttggtagagatggggtttcaccatgttggccaggctggtcttgaactcctgacctcgggtgatccgcctgcttcagcctcccaaagtgctgggattagaggcgtgagccatcatgtccagccagcactgtgctgtttttgacatgcatgttctcattcactgccatgcggcagattctaggattattattattctcactttacagatgagggagtgagacttaaaggggttaggtaatttgcccacatcccccaactagcaaatggtagagccaggattggaatttgttcaggctcttaaccattgcactctttcaaaatgttaaaaataatgttgtgtctcattttaaaaaattaaataaaaactctttggaccaagcatcagttatgggaatgaatttcgttccttgtctcttttggcaccaaatatcaagacattctttcccagctaggcat

SEQ ID NO: 85175 - DNA, 336 bp, Homo sapiens
gttaaacaatttgttgacacatagttgtttagagtagactattattatcctttgtatttctatggtaccaattttaatatctccttttttgttctaattttatttacttgagatttcttttttcttggcctagtgagaggttggtcaatttttattatcttttcaaaaaatcaactcttcgtttcattcatcttttctattgtttttctagtctatttcatttatttctgctatgatctttgttatttccttctaattttgggcttgattattttttttctattttttgaggtttatttgggatcttttttttctttatttagcacttatctgtat

SEQ ID NO: 85176 - DNA, 249 bp, Homo sapiens
acactacccaacaaaatgtattagaacaaaatctctatgactctcttatttatgtcccaagaatgtgatctagcttcattacagcacaattaataggatgcctatctgttctacaaacatcaaatatgggtctatttccttttaaacgcagtcgtctaaagcttgctcagcagtagacaagctacactgctattacagatttctgttatcggccccattatttatctcttttggattaagtattagtac

SEQ ID NO: 85177 - DNA, 674 bp, Homo sapiens
agttatagggttttctctaccttgatagtcagtcaactagaaaacccttctgttgaatatctttctaaaaagtgccccttcttcctgtctcaggaagagttcattgcacatatttgactctttatttgataaatttagggtcttacaaaatgttagaatcccattttgacatccattctcattataggtggtttgaaaaatggtaactttctgtgagatgtgccattgcaaacaggaatgttttcatgcaggtcacacagtctatttatattgtacctttgaattagaaagaggcacactcagaacgtaagacttagaattaaaggcctcccccactggccatagcagcacccctagctcacaaccagttgaaggtggttttggtgtgaacactaagatgccccttcctggttgaatttgggctggttcagcccccacctccctcccggccaggtgccattttgctcgtaaccccctgtaacagccctgcaagacacagataacattttatttttttaaaaagttgttagtcccctaaaccaaagagcaacatatactgcagaaataaaaagttagtcatagcaaaggagaagtaacagtatctggttttaataatagctcatatattccattggtacatatttacaaagggccaaactcaactaatttattta

SEQ ID NO: 85178 - DNA, 114 bp, Homo sapiens
aactgggattgtttccaaggctgaagtgaaacactgtttaggtgacttgtttttgtcaccccatgacatgatctttaggaagatgttctagaagacagtggatgattttttttt

SEQ ID NO: 85179 - DNA, 280 bp, Homo sapiens
tgtcctgtatcaaatgttcgtgtccaactgtctccagctttttgctccaaaaggtttcaggctggcccgcctgtccagctggcgggttcatgcggggctggtcagccacagtgccgtcaggccccaccaaggggctctggtggagaggattatcccacaccccctctacagtgcccagaatcatgactacgacgtcgccctcctgaggctccagaccgctctcaacttctcaggctctgcagtgggggaagccaagcctgactggggaccaggaccatgt

SEQ ID NO: 85180 - DNA, 372 bp, Homo sapiens
aatttagggcatgatcatgaaaagcatcttcctctaaggttgggcaggggtgggggttggtagataatacattcggagtttacagggaatgtatgtattgatcttctcaaagaaatcttacaaaaaatcttgagcagcagatatttttagcctcatttgatagaagtgaaaatcaaggccctgcatggttaagtgatttactaaaataaaagtcgcttggctagtgtagagccatgctgtgaatcagttcctttcccttttggtctaggactccctcctctgagtcctgctgtttcctccagtctcactgcacaccactgcctcatgcttcctggggcctccagcagctccactaatggaggagaggcagta

SEQ ID NO: 85181 - DNA, 2241 bp, Homo sapiens
acgcgggatacagggaggggccatgtgcgaaccagggagacctcatcttccaaccaagcttgctgggcttgctttaatcaatgctggcctgagaacaggagcggaacattgcctagtagaccctgaggctttacaacagtgccactgacccctatgagcctgatgctggatgaccaaccccctatggaggcccagtatgcagaggagggcccaggacctgggatcttcagagcagagcctggagaccagcagcatcccatttctcaggcggtgtgctggcgttccatgcgacgtggctgtgcagtgctgggagccctggggctgctggccggtgcaggtgttggctcatggctcctagtgctgtatctgtgtcctgctgcctctcagcccatttccgggaccttgcaggatgaggagataactttgagctgctcagaggccagcgctgaggaagctctgctccctgcacttcccaaaacagtatctttcagaataaacagcgaagacttcttgctggaagcgcaagtgagggatcagccacgctggctcctggtctgccatgagggctggagccccgccctggggctgcagatctgctggagccttgggcatctcagactcactcaccacaagggagtaaacctcactgacatcaaactcaacagttcccaggagtttgctcagctctctcctagactgggaggcttcctggaggaggcgtggcagcccaggaacaactgcacttctggtcaagttgtttccctcagatgctctgagtgtggagcgaggcccctggcttcccggatagttggtgggcagtctgtggctcctgggcgctggccgtggcaggccagcgtggccctgggcttccggcacacgtgtgggggctctgtgctagcgccacgctgggtggtgactgctgcacattgtatgcacagtttcaggctggcccgcctgtccagctggcgggttcatgcggggctggtcagccacagtgccgtcaggccccaccaaggggctctggtggagaggattatcccacaccccctctacagtgcccagaatcatgactacgacgtcgccctcctgaggctccagaccgctctcaacttctcagacactgtgggcgctgtgtgcctgccggccaaggaacagcattttccgaagggctcgcggtgctgggtgtctggctggggccacacccaccctagccatacttacagctcggatatgctccaggacacggtggtgcccttgttcagcactcagctctgcaacagctcttgcgtgtacagcggagccctcaccccccgcatgctttgcgctggctacctggacggaagggctgatgcatgccagggagatagcgggggccccctagtgtgcccagatggggacacatggcgcctagtgggggtggtcagctgggggcgtggtgcgcagagcccaatcacccaggtgtctacgccaaggtagctgagtttctggactggatccatgacactgctcaggactccctcctctgagtcctgctgtttcctccagtctcactgcacaccactgcctcatgcttcctggggcctccagcagctccactaatggaggagaggcagtagcctccgacacagaacgcatggacctcctactactgtgtgtgaggaacagtcactacccactggccagccacccagccaacaggtctctcctcttgggccctgatttcagagtcctctttctcactagagactcaatgacagaagagaggctgggacttggttgggcatgctgtggttgctgagggatgagggggaggagagaggtaggagctggagatgaagaggctgctagaagcagcaggaagcctgcccttctgccctctcccctccctgcccctgtgtgagtcttttgggagggtgctgggaggtgccccccgtcccacctttttcctgtgctctaggtgggctaagtgcctccctagaggactccatggctgagaggctcctgggcagatggggtcaaggctgggccagcccagatgaagcctatgggagtcaggaccctctccactctccctctccactccccttcctgttctcacctggctgtggctggccctgtgtggggtgggtacactggaaaacaagaaggttggagttggtctaggacattggttttaaatgacagttctgtgaactggtccaaggagttctgttattaaagtgatatatggtcttggtccag

SEQ ID NO: 85182 - DNA, 2039 bp, Homo sapiens
acgcgggatacagggaggggccatgtgcgaaccagggagacctcatcttccaaccaagcttgctgggcttgctttaatcaatgctggcctgagaacaggagcggaacattgcctagtagaccctgaggctttacaacagtgccactgacccctatgtgctgtatctgtgtcctgctgcctctcagcccatttccgggaccttgcaggatgaggagataactttgagctgctcagaggccagcgctgaggaagctctgctccctgcacttcccaaaacagtatctttcagaataaacagcgaagacttcttgctggaagcgcaagtgagggatcagccacgctggctcctggtctgccatgagggctggagccccgccctggggctgcagatctgctggagccttgggcatctcagactcactcaccacaagggagtaaacctcactgacatcaaactcaacagttcccaggagtttgctcagctctctcctagactgggaggcttcctggaggaggcgtggcagcccaggaacaactgcacttctggtcaagttgtttccctcagatgctctgagtgtggagcgaggcccctggcttcccggatagttggtgggcagtctgtggctcctgggcgctggccgtggcaggccagcgtggccctgggcttccggcacacgtgtgggggctctgtgctagcgccacgctgggtggtgactgctgcacattgtatgcacagtttcaggctggcccgcctgtccagctggcgggttcatgcggggctggtcagccacagtgccgtcaggccccaccaaggggctctggtggagaggattatcccacaccccctctacagtgcccagaatcatgactacgacgtcgccctcctgaggctccagaccgctctcaacttctcagacactgtgggcgctgtgtgcctgccggccaaggaacagcattttccgaagggctcgcggtgctgggtgtctggctggggccacacccaccctagccatacttacagctcggatatgctccaggacacggtggtgcccttgttcagcactcagctctgcaacagctcttgcgtgtacagcggagccctcaccccccgcatgctttgcgctggctacctggacggaagggctgatgcatgccagggagatagcgggggccccctagtgtgcccagatggggacacatggcgcctagtgggggtggtcagctgggggcgtggtgcgcagagcccaatcacccaggtgtctacgccaaggtagctgagtttctggactggatccatgacactgctcaggactccctcctctgagtcctgctgtttcctccagtctcactgcacaccactgcctcatgcttcctggggcctccagcagctccactaatggaggagaggcagtagcctccgacacagaacgcatggacctcctactactgtgtgtgaggaacagtcactacccactggccagccacccagccaacaggtctctcctcttgggccctgatttcagagtcctctttctcactagagactcaatgacagaagagaggctgggacttggttgggcatgctgtggttgctgagggatgagggggaggagagaggtaggagctggagatgaagaggctgctagaagcagcaggaagcctgcccttctgccctctcccctccctgcccctgtgtgagtcttttgggagggtgctgggaggtgccccccgtcccacctttttcctgtgctctaggtgggctaagtgcctccctagaggactccatggctgagaggctcctgggcagatggggtcaaggctgggccagcccagatgaagcctatgggagtcaggaccctctccactctccctctccactccccttcctgttctcacctggctgtggctggccctgtgtggggtgggtacactggaaaacaagaaggttggagttggtctaggacattggttttaaatgacagttctgtgaactggtccaaggagttctgttattaaagtgatatatggtcttggtccag

SEQ ID NO: 85183 - DNA, 310 bp, Homo sapiens
gcctcagcccgtgggaatccagcctgcctccattactgccgtcaccggctccaccttcggagaacatctcaaggaggcccggggcggaggggggttcccgcgtgcacacgagtgcggctggacgtgccgacacgcggtgatgtacccatgctccgtgtgtctgtgtctgcatgtccacacgtctgatgcacctgtgtacgtgtgtcaagcctagccacctcagctgcagggaggcagaaggcaaggcaggccccacggacacacttgggctgctctgaaataaagctgttgactccacctgaaaaaaaaa

SEQ ID NO: 85184 - DNA, 2681 bp, Homo sapiens
agccacaatctctggcaagcacctaggaccttgtccccgcctgccaagtagccgcccgggccatgtgtgccctgtctcctcggcagcaagccccctgccgcgagcttggagaggcaccccagccccatctggcactcaaggaaatcagctcagagaggttgagtaactcgggaaggccacacagccagtgacgaagctgtgattcacacaggcctgggtgactccagcatggctttcctctccaggacgtcaccggtggcagctgcttccttccagagccggcaggcaggaggccagaggctccatcctgcttcagagctgccagctgcccccgcaatggctgagcaccgaagcatggacgggagaatggaagcagccacacgggggggctctcacctccaggctgcagcccagacgccccccaggccggggccaccatcagcaccaccaccaccacccaaggaggggcaccaggaggggctggtggagctgcccgcctcgttccgggagctgctcaccttcttctgcaccaatgccaccatccacggcgccatccgcctggtctgctcccgcgggaaccgcctcaagacgacgtcctgggggctgctgtccctgggagccctggtcgcgctctgctggcagctggggctcctctttgagcgtcactggcaccgcccggtcctcatggccgtctctgtgcactcggagcgcaagctgctcccgctggtcaccctgtgtgacgggaacccacgtcggccgagtccggtcctccgccatctggagctgctggacgagtttgccagggagaacattgactccctgtacaacgtcaacctcagcaaaggcagagccgccctctccgccactgtcccccgccacgagccccccttccacctggaccgggagatccgtctgcagaggctgagccactcgggcagccgggtcagagtggggttcagactgtgcaacagcacgggcggcgactgcttttaccgaggctacacgtcaggcgtggcggctgtccaggactggtaccacttccactatgtggatatcctggccctgctgcccgcggcatgggaggacagccacgggagccaggacggccacttcgtcctctcctgcagttacgatggcctggactgccaggcccgacagttccggaccttccaccaccccacctacggcagctgctacacggtcgatggcgtctggacagctcagcgccccggcatcacccacggagtcggcctggtcctcagggttgagcagcagcctcacctccctctgctgtccacgctggccggcatcagggtcatggttcacggccgtaaccacacgcccttcctggggcaccacagcttcagcgtccggccagggacggaggccaccatcagcatccgagaggacgaggtgcaccggctcgggagcccctacggccactgcaccgccggcggggaaggcgtggaggtggagctgctacacaacacctcctacaccaggcaggcctgcctggtgtcctgcttccagcagctgatggtggagacctgctcctgtggctactacctccaccctctgccggcgggggctgagtactgcagctctgcccggcaccctgcctggggacactgcttctaccgcctctaccaggacctggagacccaccggctcccctgtacctcccgctgccccaggccctgcagggagtctgcattcaagctctccactgggacctccaggtggccttccgccaagtcagctggatggactctggccacgctaggtgaacaggggctgccgcatcagagccacagacagaggagcagcctggccaaaatcaacatcgtctaccaggagctcaactaccgctcagtggaggaggcgcccgtgtactcggtgccgcagctgctctcggccatgggcagcctctgcagcctgtggtttggggcctccgtcctctccctcctggagctcctggagctgctgctcgatgcttctgccctcaccctggtgctaggcggccgccggctccgcagggcgtggttctcctggcccagagccagccctgcctcaggggcgtccagcatcaagccagaggccagtcagatgcccccgcctgcaggcggcacgtcagatgacccggagcccagcgggcctcatctcccacgggtgatgcttccaggggttctggcgggagtctcagccgaagagagctgggctgggccccagccccttgagactctggacacctgaaccagacctgccagggctgtgcgatctcttggcctggtccttgcagctgtggcagcagcaggctccccagcggcccagggtgggccagaccagcagcccaggaagcagcacacgcggccgtggggaggcaggcaccgggcatgtcggcgcctctggtcaaaccacctacactgcctggggtgggtctcaaggaggcccggggcggaggggggttcccgcgtgcacacgagtgcggctggacgtgccgacacgcggtgatgtacccatgctccgtgtgtctgtgtctgcatgtccacacgtctgatgcacctgtgtacgtgtgtcaagcctagccacctcagctgcagggaggcagaaggcaaggcaggccccacggacacacttgggctgctctgaaataaagctgttgactccacctgaaaaaaaaa

SEQ ID NO: 85185 - DNA, 2757 bp, Homo sapiens
agccacaatctctggcaagcacctaggaccttgtccccgcctgccaagtagccgcccgggccatgtgtgccctgtctcctcggcagcaagccccctgccgcgagcttggagaggcaccccagccccatctggcactcaaggaaatcagctcagagaggttgagtaactcgggaaggccacacagccagtgacgaagctgtgattcacacaggcctgggtgactccagcatggctttcctctccaggacgtcaccggtggcagctgcttccttccagagccggcaggcaggaggccagaggctccatcctgcttcagagctgccagctgcccccgcaatggctgagcaccgaagcatggacgggagaatggaagcagccacacgggggggctctcacctccaggctgcagcccagacgccccccaggccggggccaccatcagcaccaccaccaccacccaaggaggggcaccaggaggggctggtggagctgcccgcctcgttccgggagctgctcaccttcttctgcaccaatgccaccatccacggcgccatccgcctggtctgctcccgcgggaaccgcctcaagacgacgtcctgggggctgctgtccctgggagccctggtcgcgctctgctggcagctggggctcctctttgagcgtcactggcaccgcccggtcctcatggccgtctctgtgcactcggagcgcaagctgctcccgctggtcaccctgtgtgacgggaacccacgtcggccgagtccggtcctccgccatctggagctgctggacgagtttgccagggagaacattgactccctgtacaacgtcaacctcagcaaaggcagagccgccctctccgccactgtcccccgccacgagccccccttccacctggaccgggagatccgtctgcagaggctgagccactcgggcagccgggtcagagtggggttcagactgtgcaacagcacgggcggcgactgcttttaccgaggctacacgtcaggcgtggcggctgtccaggactggtaccacttccactatgtggatatcctggccctgctgcccgcggcatgggaggacagccacgggagccaggacggccacttcgtcctctcctgcagttacgatggcctggactgccaggcccgacagttccggaccttccaccaccccacctacggcagctgctacacggtcgatggcgtctggacagctcagcgccccggcatcacccacggtgggtgccagcccctggccggtgcgggggcaggggtgcaggtcaggtggcctcacaccagcccttggcctcccaggagtcggcctggtcctcagggttgagcagcagcctcacctccctctgctgtccacgctggccggcatcagggtcatggttcacggccgtaaccacacgcccttcctggggcaccacagcttcagcgtccggccagggacggaggccaccatcagcatccgagaggacgaggtgcaccggctcgggagcccctacggccactgcaccgccggcggggaaggcgtggaggtggagctgctacacaacacctcctacaccaggcaggcctgcctggtgtcctgcttccagcagctgatggtggagacctgctcctgtggctactacctccaccctctgccggcgggggctgagtactgcagctctgcccggcaccctgcctggggacactgcttctaccgcctctaccaggacctggagacccaccggctcccctgtacctcccgctgccccaggccctgcagggagtctgcattcaagctctccactgggacctccaggtggccttccgccaagtcagctggatggactctggccacgctaggtgaacaggggctgccgcatcagagccacagacagaggagcagcctggccaaaatcaacatcgtctaccaggagctcaactaccgctcagtggaggaggcgcccgtgtactcggtgccgcagctgctctcggccatgggcagcctctgcagcctgtggtttggggcctccgtcctctccctcctggagctcctggagctgctgctcgatgcttctgccctcaccctggtgctaggcggccgccggctccgcagggcgtggttctcctggcccagagccagccctgcctcaggggcgtccagcatcaagccagaggccagtcagatgcccccgcctgcaggcggcacgtcagatgacccggagcccagcgggcctcatctcccacgggtgatgcttccaggggttctggcgggagtctcagccgaagagagctgggctgggccccagccccttgagactctggacacctgaaccagacctgccagggctgtgcgatctcttggcctggtccttgcagctgtggcagcagcaggctccccagcggcccagggtgggccagaccagcagcccaggaagcagcacacgcggccgtggggaggcaggcaccgggcatgtcggcgcctctggtcaaaccacctacactgcctggggtgggtctcaaggaggcccggggcggaggggggttcccgcgtgcacacgagtgcggctggacgtgccgacacgcggtgatgtacccatgctccgtgtgtctgtgtctgcatgtccacacgtctgatgcacctgtgtacgtgtgtcaagcctagccacctcagctgcagggaggcagaaggcaaggcaggccccacggacacacttgggctgctctgaaataaagctgttgactccacctgaaaaaaaaa

SEQ ID NO: 85186 - DNA, 1931 bp, Homo sapiens
agccacaatctctggcaagcacctaggaccttgtccccgcctgccaagtagccgcccgggccatgtgtgccctgtctcctcggcagcaagccccctgccgcgagcttggagaggcaccccagccccatctggcactcaaggaaatcagctcagagaggttgagtaactcgggaaggccacacagccagtgacgaagctgtgattcacacaggcctgggtgactccagcatggctttcctctccaggacgtcaccggtggcagctgcttccttccagagccggcaggcaggaggccagaggctccatcctgcttcagagctgccagctgcccccgcaatggctgagcaccgaagcatggacgggagaatggaagcagccacacgggggggctctcacctccaggctgcagcccagacgccccccaggccggggccaccatcagcaccaccaccaccacccaaggaggggcaccaggaggggctggtggagctgcccgcctcgttccgggagctgctcaccttcttctgcaccaatgccaccatccacggcgccatccgcctggtctgctcccgcgggaaccgcctcaagacgacgtcctgggggctgctgtccctgggagccctggtcgcgctctgctggcagctggggctcctctttgagcgtcactggcaccgcccggtcctcatggccgtctctgtgcactcggagcgcaagctgctcccgctggtcaccctgtgtgacgggaacccacgtcggccgagtccggtcctccgccatctggagctgctggacgagtttgccagggagaacattgactccctgtacaacgtcaacctcagcaaaggcagagccgccctctccgccactgtcccccgccacgagccccccttccacctggaccgggagatccgtctgcagaggctgagccactcgggcagccgggtcagagtggggttcagactgtgcaacagcacgggcggcgactgcttttaccgaggctacacgtcaggcgtggcggctgtccaggactggtaccacttccactatgtggatatcctggccctgctgcccgcggcatgggaggacagccacgggagccaggacggccacttcgtcctctcctgcagttacgatggcctggactgccaggcccgacagttccggaccttccaccaccccacctacggcagctgctacacggtcgatggcgtctggacagctcagcgccccggcatcacccacggtgggtgccagcccctggccggtgcgggggcaggggtgcaggtcaggtggcctcacaccagcccttggcctcccaggagtcggcctggtcctcagggttgagcagcagcctcacctccctctgctgtccacgctggccggcatcagggtcatggttcacggccgtaaccacacgcccttcctggggcaccacagcttcagcgtccggccagggacggaggccaccatcagcatccgagaggacgaggtgcaccggctcgggagcccctacggccactgcaccgccggcggggaaggcgtggaggtggagctgctacacaacacctcctacaccaggcaggcctgcctggtgtcctgcttccagcagctgatggtggagacctgctcctgtggctactacctccaccctctgccggcgggggctgagtactgcagctctgcccggcaccctgcctggggacactggttctacagctctacaggactggagacccacgcgtccctgttacctccgttgcccaagggcctgcagggacgtcggattcaagctctcaatggggacctccaggttggcttccgcaagtcagctggatggactctggccagctggtgaccaggggtgcggatcaaagcccgacgaagacagctggccaatcaattcgttacggagctcaatacgtcatgagaag

SEQ ID NO: 85187 - DNA, 2620 bp, Homo sapiens
acctgtggggtctctgtgacatcagcaagccccctgccgcgagcttggagaggcaccccagccccatctggcactcaaggaaatcagctcagagaggttgagtaactcgggaaggccacacagccagtgacgaagctgtgattcacacaggcctgggtgactccagcatggctttcctctccaggacgtcaccggtggcagctgcttccttccagagccggcaggcaggaggccagaggctccatcctgcttcagagctgccagctgcccccgcaatggctgagcaccgaagcatggacgggagaatggaagcagccacacgggggggctctcacctccaggctgcagcccagacgccccccaggccggggccaccatcagcaccaccaccaccacccaaggaggggcaccaggaggggctggtggagctgcccgcctcgttccgggagctgctcaccttcttctgcaccaatgccaccatccacggcgccatccgcctggtctgctcccgcgggaaccgcctcaagacgacgtcctgggggctgctgtccctgggagccctggtcgcgctctgctggcagctggggctcctctttgagcgtcactggcaccgcccggtcctcatggccgtctctgtgcactcggagcgcaagctgctcccgctggtcaccctgtgtgacgggaacccacgtcggccgagtccggtcctccgccatctggagctgctggacgagtttgccagggagaacattgactccctgtacaacgtcaacctcagcaaaggcagagccgccctctccgccactgtcccccgccacgagccccccttccacctggaccgggagatccgtctgcagaggctgagccactcgggcagccgggtcagagtggggttcagactgtgcaacagcacgggcggcgactgcttttaccgaggctacacgtcaggcgtggcggctgtccaggactggtaccacttccactatgtggatatcctggccctgctgcccgcggcatgggaggacagccacgggagccaggacggccacttcgtcctctcctgcagttacgatggcctggactgccaggcccgacagttccggaccttccaccaccccacctacggcagctgctacacggtcgatggcgtctggacagctcagcgccccggcatcacccacggagtcggcctggtcctcagggttgagcagcagcctcacctccctctgctgtccacgctggccggcatcagggtcatggttcacggccgtaaccacacgcccttcctggggcaccacagcttcagcgtccggccagggacggaggccaccatcagcatccgagaggacgaggtgcaccggctcgggagcccctacggccactgcaccgccggcggggaaggcgtggaggtggagctgctacacaacacctcctacaccaggcaggcctgcctggtgtcctgcttccagcagctgatggtggagacctgctcctgtggctactacctccaccctctgccggcgggggctgagtactgcagctctgcccggcaccctgcctggggacactgcttctaccgcctctaccaggacctggagacccaccggctcccctgtacctcccgctgccccaggccctgcagggagtctgcattcaagctctccactgggacctccaggtggccttccgccaagtcagctggatggactctggccacgctaggtgaacaggggctgccgcatcagagccacagacagaggagcagcctggccaaaatcaacatcgtctaccaggagctcaactaccgctcagtggaggaggcgcccgtgtactcggtgccgcagctgctctcggccatgggcagcctctgcagcctgtggtttggggcctccgtcctctccctcctggagctcctggagctgctgctcgatgcttctgccctcaccctggtgctaggcggccgccggctccgcagggcgtggttctcctggcccagagccagccctgcctcaggggcgtccagcatcaagccagaggccagtcagatgcccccgcctgcaggcggcacgtcagatgacccggagcccagcgggcctcatctcccacgggtgatgcttccaggggttctggcgggagtctcagccgaagagagctgggctgggccccagccccttgagactctggacacctgaaccagacctgccagggctgtgcgatctcttggcctggtccttgcagctgtggcagcagcaggctccccagcggcccagggtgggccagaccagcagcccaggaagcagcacacgcggccgtggggaggcaggcaccgggcatgtcggcgcctctggtcaaaccacctacactgcctggggtgggtctcaaggaggcccggggcggaggggggttcccgcgtgcacacgagtgcggctggacgtgccgacacgcggtgatgtacccatgctccgtgtgtctgtgtctgcatgtccacacgtctgatgcacctgtgtacgtgtgtcaagcctagccacctcagctgcagggaggcagaaggcaaggcaggccccacggacacacttgggctgctctgaaataaagctgttgactccacctgaaaaaaaaa

SEQ ID NO: 85188 - DNA, 2393 bp, Homo sapiens
ctccttgcctcaaccttgtgctccgatggctgtgctgagctgggtgccccgtcgccctcccaggtccactaggctctgactcttccatgtcacccaaggaggggcaccaggaggggctggtggagctgcccgcctcgttccgggagctgctcaccttcttctgcaccaatgccaccatccacggcgccatccgcctggtctgctcccgcgggaaccgcctcaagacgacgtcctgggggctgctgtccctgggagccctggtcgcgctctgctggcagctggggctcctctttgagcgtcactggcaccgcccggtcctcatggccgtctctgtgcactcggagcgcaagctgctcccgctggtcaccctgtgtgacgggaacccacgtcggccgagtccggtcctccgccatctggagctgctggacgagtttgccagggagaacattgactccctgtacaacgtcaacctcagcaaaggcagagccgccctctccgccactgtcccccgccacgagccccccttccacctggaccgggagatccgtctgcagaggctgagccactcgggcagccgggtcagagtggggttcagactgtgcaacagcacgggcggcgactgcttttaccgaggctacacgtcaggcgtggcggctgtccaggactggtaccacttccactatgtggatatcctggccctgctgcccgcggcatgggaggacagccacgggagccaggacggccacttcgtcctctcctgcagttacgatggcctggactgccaggcccgacagttccggaccttccaccaccccacctacggcagctgctacacggtcgatggcgtctggacagctcagcgccccggcatcacccacggtgggtgccagcccctggccggtgcgggggcaggggtgcaggtcaggtggcctcacaccagcccttggcctcccaggagtcggcctggtcctcagggttgagcagcagcctcacctccctctgctgtccacgctggccggcatcagggtcatggttcacggccgtaaccacacgcccttcctggggcaccacagcttcagcgtccggccagggacggaggccaccatcagcatccgagaggacgaggtgcaccggctcgggagcccctacggccactgcaccgccggcggggaaggcgtggaggtggagctgctacacaacacctcctacaccaggcaggcctgcctggtgtcctgcttccagcagctgatggtggagacctgctcctgtggctactacctccaccctctgccggcgggggctgagtactgcagctctgcccggcaccctgcctggggacactgcttctaccgcctctaccaggacctggagacccaccggctcccctgtacctcccgctgccccaggccctgcagggagtctgcattcaagctctccactgggacctccaggtggccttccgccaagtcagctggatggactctggccacgctaggtgaacaggggctgccgcatcagagccacagacagaggagcagcctggccaaaatcaacatcgtctaccaggagctcaactaccgctcagtggaggaggcgcccgtgtactcggtgccgcagctgctctcggccatgggcagcctctgcagcctgtggtttggggcctccgtcctctccctcctggagctcctggagctgctgctcgatgcttctgccctcaccctggtgctaggcggccgccggctccgcagggcgtggttctcctggcccagagccagccctgcctcaggggcgtccagcatcaagccagaggccagtcagatgcccccgcctgcaggcggcacgtcagatgacccggagcccagcgggcctcatctcccacgggtgatgcttccaggggttctggcgggagtctcagccgaagagagctgggctgggccccagccccttgagactctggacacctgaaccagacctgccagggctgtgcgatctcttggcctggtccttgcagctgtggcagcagcaggctccccagcggcccagggtgggccagaccagcagcccaggaagcagcacacgcggccgtggggaggcaggcaccgggcatgtcggcgcctctggtcaaaccacctacactgcctggggtgggtctcaaggaggcccggggcggaggggggttcccgcgtgcacacgagtgcggctggacgtgccgacacgcggtgatgtacccatgctccgtgtgtctgtgtctgcatgtccacacgtctgatgcacctgtgtacgtgtgtcaagcctagccacctcagctgcagggaggcagaaggcaaggcaggccccacggacacacttgggctgctctgaaataaagctgttgactccacctgaaaaaaaaa

SEQ ID NO: 85189 - DNA, 850 bp, Homo sapiens
ggaggggcaccaggaggggctggtggagctgcccgcctcgttccgggagctgctcaccttcttctgcaccaatgccaccatccacggcgccatccgcctggtctgctcccgcgggaaccgcctcaagacgacgtcctgggggctgctgtccctgggagccctggtcgcgctctgctggcagctggggctcctctttgagcgtcactggcaccgcccggtcctcatggccgtctctgtgcactcggagcgcaagctgctcccgctggtcaccctgtgtgacgggaacccacgtcggtgagggccagggctgtcggcgggaggggtggccgccccagctccttgcccctgtgaccgtctctaaccgaagccccactggcccctgtagccgaggagggggctctgtgtggtcaatgccaccctcctggtcactgtgacctcccaaacctcggtgcccagcccggacctctcggactgccaaggagggggctcagtgtggtcactgccccctggagggacaccagggccctcgggagcctgggaggagaggtgggggtgggcgaggctttccagaaggagggaaggtgggaggggctgcgagcgggctgggctccggggccgacctcaccggcagccacggcctccaactccagctctgggtccagctcaccccactgggcgtcccgagtaggggaggcactgctgtcccgacagcacacactgggatgctggggccagtgtgaggccccgggccggcaactctgactccagggccctgcgtcccaggccgagtccggtcctccgccatctggagctgctggacgagtttgccagggagaacattgactccctg

SEQ ID NO: 85190 - DNA, 361 bp, Homo sapiens
agcaggatttgtactccaacccccgccagaacccccattgccaagtctgagaaactcaggattgggaatggctcccgtagggcatagatttcacttggccttttcctgcccaaacacatgcacctttgccaaatccttccctccagtggctcagatgctttttctatgtgcaaactgtctcagacagtcgtctccactggctaatgttggttcgttcaaagagcaaatgaggctggcaacccatcttggtgctcaccactcacagtgttctgtgggtagaccctgcaccccggacgtggcaagggccttctctccctctctcaaatcctggagggcccagcacaccctgactcatcctgga

SEQ ID NO: 85191 - DNA, 126 bp, Homo sapiens
tttctgaagtttatatttaatgcctgtcacataccctcattggggataattgaaaaagtcgaagtgcagggcttccaccctcccccgctgcaccatcctggtattcggtcataggggtggttttgc

SEQ ID NO: 85192 - DNA, 143 bp, Homo sapiens
gtgctggcatttcagccgtgagccatggcactctgcctctgtcttcttttctagactgtaagctccaaggcaggggctgggtctgcccttgtcattttttaaaaacgtattttattttttatttttgaaatggggtctttctc

SEQ ID NO: 85193 - DNA, 447 bp, Homo sapiens
cctggatcattacaaaagcctcctaattagttctcctgcttcagtggttctgctctcaacagtctaatctctgtgtagttgtttgtgtcctttgaagggttcggtcagattacagcaatccccagctcaacaccttctaatgatttcttgtctcactcagtagaagccaaagacttcacaattacctataaggtcctaaatgatatttttggttgcctctctgatcccatctcttagtactcacttctttactcccacatagtcatactggtcttgttaactgttgctgaaacatagttgaagcacaagcctgcttcaggtgtttaaacttggactgttctccccttagatatctgcatggcttgctccctaactttctaaggtttatgatcaaatgttaccttattagtgaggccttatctgactaccctatatttaatagccata

SEQ ID NO: 85194 - DNA, 416 bp, Homo sapiens
gtacacaggcaacaaatagcatgacgtatggaatggtacctcacacatctcaatactaacattgaatgtaaatggcctaaatgctccactttaaagaaacagaacagcagaatgggtaagaattcaccaaccaactatctgctgccttcaagagactcacctaacacataaagactcacataaacttaaagaagcagaaaaaggcatttcatgcaaatggacaccaaaagcgaggagtagctattcttacaaaagacaaaactttaaagcaacagcaattaaaaaaaagacaaagagggacattatataatggtaaaaggctttgtccaacaggaaaatatcacaatcctaaacatatttgggagctgcacacctaaaagaggagctcccaaatttataaaacaattactgctaga

SEQ ID NO: 85195 - DNA, 447 bp, Homo sapiens
actgaatatctgaatgaatgcttgggtttgctgtcatgcttctcttagcatttatttctccattggaagagcagccatgaggttgactgggactacccccactgccaggttcaggtatgtaccctcattggcttaaatcaatcagcaaaattccttcccttctgtcatggtgattgatgcagaggtaaatgtcaatggcttatgactttaggccattgcttgggaagcttgatttttctgaataatctggtatgggaatgtgaaccctaaactatagcttccattttgtcctcaagagggaagctagcctaaagttaaaggtggcacttaaaaaaggaagatccaagagaatataaaaaattggagccagagccctcatcaaactgtctcatgatttctgggctttcagttgtatcagccaataaattaaccttattgttaatgcca

SEQ ID NO: 85196 - DNA, 440 bp, Homo sapiens
ggtcaggggcacattctacaagggaaaaacagctgatacagaagcctgaaaggaaaagcgggcagagcacctgtacaggactcttacctgcggcatctaccatacaatgcgcctttccagaacacagcagtgcgcagccagcccctggggagagggatcactcaaacagcaccagaggctgcattccaacttttcttccatcaacgactccgttttcattgttagtttctccttcaacacaaacttgaaaccaattggctgaacacgcgggagcaaggaaaacctgactgaagaatgaggcgttaaaacttaagggccttgggtcctggcgcggtggctcacacctggaatcccagcactttgggaggcagaggtgggtcatttgaggtcaggagtttgagaccagcctggccaaacacggtgagaccccgtctctacta

SEQ ID NO: 85197 - DNA, 852 bp, Homo sapiens
  misc_feature (449)..(449): n is a, c, g, or t
  misc_feature (591)..(591): n is a, c, g, or t
ctttgaaaaagacttcttttgagctaactttcttatactggtacctttctaatctcactacaatatgtaacattggtgttcgatctcaagtatttctgaatatattcccctatccacagaaatatactctgggggaaaaaaaatagaacaaattcttgccgtcctgaccattgaacaagagactaattagacaatggggctagaaaaacctcaaagtaaactggaaggaggcatgcatccccagctgataccttcggttatgctgtagttttcatcttacttctcagtgtctgttttattgcaagttgttggtgactcatcacaacttttcacgctgtaagagaggcacaggagtgcacaagttagagcaccatgcaaagctcaaatgcatcaaagagaaatcagaactgaaaagtgctgaagggagcacctggaactgttgtcctatngactggagagccttccagtccaactgctattttcctcttactgacaacaagacgtgggctgagagtgaaaggaactgtcagggatgggggcccatctgatgaccatcagcacggaagctgagcagaactttattattcagtntctggatagacggctttcctatttccttggacttagagatgagaatgccaaaggtcagtggcgtgggtggaccagacgccatttaacccacgcagagtattctggcataagaatgaacccgacaactctcagggagaaaactgttgtagacttgttaataaacccaagataaatgggcctggcaatgatgtttcttgtaaactgtgaagccacgtaggattgtcaaaatacctggaaacaacatgaactagaacactctaa

SEQ ID NO: 85198 - DNA, 277 bp, Homo sapiens
gaactttcattatcatctccatggccctaattggttatgagcccattgctacaccccaatacttgtcatgaagagaatgatatatgatgacaggtctgacatgggtttttaatgagaagggtgccaagactaccagaattggctgagtgataatagattggcagacatttgcttgggataaatttattttgttttttaaagaaaagctagataatcctttcccttggtgagaggattcctgcaagtggtggcatgcataagccttttatactaagca

SEQ ID NO: 85199 - DNA, 387 bp, Homo sapiens
catagactatgacccaactctctttcgtaatcactgcattgatcctgagggagaaactggttgctaatgatttatcttagctccactgagacccatgctaatactgcctgctccagagctgcacatattaatattgtgttactactttacttggttttactggtccgtggatattgctaataaatcatgcaacccattttaattgaattgattttgataaaggtaggaaaagagtaggtgagctgctatccaaggttatgccctatctcgcattgctgagtgaccctattgcatcagctatttctgccagaaatctgcttttgtgaagggaccgttggctcactaaaacctccactcccaggaccaaagggagtgttctggtgaggc

SEQ ID NO: 85200 - DNA, 652 bp, Homo sapiens
aattttaaaactcaaaagagaaatagctaggcctcagtgttcctagccagccccatggaatcaagagagtgcagctgatcaatgtacatcaaaaagccaggccctacctgggactggcacagcatggggacagcatgcaggaggtgcatgggacaaatggcacctgggtttgggcttgagaggcatagtgaaaagacccactagcagtcactttccattttctgtttctgactccaagcaagcagagcagcagttcttcttcctgggtgggacaggttaagaagaccagtaaagggtctctccctcgccacttgtagctacactatctttcctgttcacattcaggtgtgtcttcctcatgaggactgagatgaagaggggtccagactaaagcactgtttgcacgggatttttttaaatagaatttgttatagcgatatcagtaaagcaagagttatgccaaatgctcatagtaggagtttacttcgacctctttttttttccccactcaatactgccaccagttaagacttagacttctcagggaaatccatttgctctgttaaggaaattaatagtaaatagaaatatgttagcttattttaatagatcaatgttagtgtcaaggtttgtctgcaagcagtgaatgaat

SEQ ID NO: 85201 - DNA, 376 bp, Homo sapiens
  misc_feature (5)..(5): n is a, c, g, or t
  misc_feature (11)..(11): n is a, c, g, or t
agatnttgaanaaaggaaaggtcttttcatcttgatggccccaaagcttgttggtcatggtctttatttctggccactatcttcttaaataatatatttttaagccctcatttatttttggttttgggtgaggaaagtcatgttttctaagtcctctcccctaataaaacctacccaacaatagtgctttgaaaagtggtagttatcttgaagatactcttgccaaatgcaaagataaacattcttttttttaaatgagtcatcttggggtttttataattcccttatgttcttgcccctctacacttgaaataacaaaatgccttaattttatggattagttctcttatagtagacaggcagctatatgcagcaa

SEQ ID NO: 85202 - DNA, 365 bp, Homo sapiens
ttttttaacaaatgtagatatcaataaaattgaaagttagattttccaaatagtaggcctagtgcaaaagacacccaacatgtataggaaatcaaacaaagctatgtgcacagaactgaaatgagttgggctgggaagccttctagaaaaagaagctttcacattattttattcctttctaaacatcaattggtcagtcaaagttttaaaagcaatagtaatttttccctttagagaacattaatgatgtttcagactaatactgacactaaataaaaatacaaattgtcaccaaagtatctgtttttcctccttccatttctcctgggaagctcttactcatccttcagccttcagcttgtact

SEQ ID NO: 85203 - DNA, 428 bp, Homo sapiens
tcttcttctgcaaagaactctcaacattttactcgtttaaaaagtttgattgcttgctctttgattactgagttgtaggaattctttatgtatatatatggttaggtatatgtattgtgaatatttttccccagtgtctggcttggccaattcattttttcatggtgccttttgaaaaacagacgttttcaattttgatgaagtactctggttctgcaagccagtaaaatgggtagtttctcaccagtttttctgtcctggggcctgcccttaggcaaaaaaccataaaaccggaatgtcacccagcacctctcccttctaagtattgaggtctaacatccacttggttttggtctctctccaggaccttcagggagttgtccagagcttatagttgttttcttctgcagttgatctaataggatctt

SEQ ID NO: 85204 - DNA, 250 bp, Homo sapiens
ggaacaaataaaacaggtatttcttcctttgtggccatccactggtttagaatggagttcaaaatctatgaggacttttctttgtggtatttttaataaaatcaaagaggtattcttaagtattgagagcacacctggacaatgacccagaagtacagcatgtactataaaaaattgatgacttagatttttttttactttagctttattctacagatatctcactatgaagacttttctatatgatata

SEQ ID NO: 85205 - DNA, 792 bp, Homo sapiens
tgtgtgtgtgtgtgtgtgtgtgtgtgtgtgtgtgtgtattttgttttttttacaagcccacaacatcatagctttgcagtttttaaccaggagctggtggagatctttgaaatcatttaggccaattcttttagttacatttatgatgaaactagggatctaccttaaagttttgggaagctctttcaaaacttcagacacctagaaatatatatagtgcagttcagttttagtttctgcagcatggtttggaaacaaaagatacataggatttaaactcgatttgttttcttcttacagtagaagtaaatgctcttgtggcttgaatcgcatctcccaagaaagatacgttcacgttcaaacccccagtactgtacatgtgaccttatttggaaatagggtctttttagatgcagtcaagatagaattagatcatactggattacagtgggccccaataactaggtttttttgttaaaaaaaaaaaaaaggaaatgtgaacagagagagaatgccgtgagatgatggagggatagattggaatgatgtctgcgagctaaggaatactgaggattgctgccaaccatccgaagctgggagaggagatggaacaactccctcggagcctccaagaggaaccaaccccactgatgctttgatttgggatttccggcctgaactgtaggaaaataaatttctgttcttttaagccatttttaccagtttgtggtaacttgttacagcagctgcaggaaattaataaatgccaatgttgaaaattaaaatctaaaa

SEQ ID NO: 85206 - DNA, 735 bp, Homo sapiens
attcaaaatggccaggttagggtcctcttcttaggatcagaaggcactactgaccaccagcattctttccaaccaggcagttccatccaggaacaggtatccttgttggtaactgcagccaagagtctgtgcattagaggttaagcgtcgtgttcaagatcacaaagccagtgaatggctgagctgggactccaactccaagtcttctgactcaaatccagtgacttactcaacacaaactttctgaatacaaatggttgtcctatgtatggcagtgtattaagaagggccaccagcccactgatttattcacttttcagtttatacttggacatggataaaatcctatggacttgctgaaccaaaagaaatgagcattttgaagcctttgaacattttgtcaaatgaccctccaagagaatgtaaactctcgctcagcgccaagcacagcatcatcagtgcctgtcaaagtgcctcgcatatagttcatcctcgataaatacatgttgaatagatgaatgcacaggaaaaaggaaataattttagtattgcgctaaccaagcataatactcaagctaaaactaatgtaaaacttaccaccagctgccttccggaaacaagtgaaaaaagacaagagacaccacaaacaatggtgagtcaagactggtcagtaactacagatcccaaagctccagctgaagatggctctcctacatcagactgatctaggagaac

SEQ ID NO: 85207 - DNA, 342 bp, Homo sapiens
ctttctctgcattttcccaaaattgccaccatgggtgcacatagcatatacggtgttatgaggatgttagactcaaggaaaccagctctgccacttgctagctgtctgaccttgggggaattacctaatttcttcatctgtaaagtgggaatagcgacagaacctttcttagaggtttgctccaaggattgtataaggtaacatatgtgaaatcctagcacggcatctggaatgtggcatgtgctcaggaaatgccagctagtataactggacaagcatttgtaactcgtgaaagcatgataccgtttttaaaaattaaaaccacaaatggcgactctccca

SEQ ID NO: 85208 - DNA, 214 bp, Homo sapiens
agagtagtggttgcctgggattgggctggggacaggagggaagtgggtgtggctgtgataggacacaggcagggtccttgtagtgatggaacgttctgtctggactgtgtcagtgtttgtacctgggtttgatattatactatctttttgcagggtgtttccatggatggaaactgtaaggggtacatgggatatctctgtattattgttttac

SEQ ID NO: 85209 - DNA, 343 bp, Homo sapiens
ccaggagtggtggctcacgcctgtaatcccagcacttgaggctgaagtggaaggatcgcttgaggctcaggagttcaagacaagcctagggaacatggctgtctctacaagcagcaaaacgttagtcgggcatggtggagcatgccggcagtcccagctactcaggaagctgtggtgggaggatcacttgagcgggggcgaggaaggggtcaaggctgcagtgagccatgatcataccactacactccagcctgggcaacagaggaagaccctgtctcaaaaaagaaagaaagaaattaaatatgtatctgtcatatgatcccaaaattctgataggtgtttt

SEQ ID NO: 85210 - DNA, 498 bp, Homo sapiens
tatttatttattttttaccagaaacacgtgcactttattgaatgccattgtagaaaagcgtgtgaggataaagggctgatacaggactcggctccgggggcagggcgaggaatggaagttggagtacgtgggatacaggtcatgggcagagctcctggcctcagtgatgcctcctgatctatccataggcctggaagatcagcactgggatgacgatgagcagaatggtcatgaggatgcccagaatcagggcccagatgttcaggcacttggcggtggaggcataggcctgggccccggtcacgtcgccaaccatcttcctgtccctagacttcacggagtaggcgaatgctatgaagcccaggcagcaggggttcatgaagagggtgttgaacagggaccagacgaacatggtcgggcacggaggtctcgctgcggatgtggatcacggtggacgtcggggaacagggtgttggggcggccccacaaagcaacttc

SEQ ID NO: 85211 - DNA, 417 bp, Homo sapiens
tcagaaagagcaagcagaatatttttggaaataatgaaaaatccactgatacatttagagctttcggtgggtctaagatttaagtggcgtaggagaaaagaaactgagatgtattacttgtacatttttcttctgacaccttgatattccagtttaaactacctcgaattatgccacaaatcagtgtctttaagtccacagattcttaggtctttgagatcaattcacccctagttatacagatagcaaactgttaagaaaccagtctaaagttttcttgcttctttgtgctaagttcaccagaattcaagcctctgacttttttaacgatggtgctcccttttcttataccacaacgtggatttgctcatggttatcttcctttaataaattcttgccacaagtgaatttaggctg

SEQ ID NO: 85212 - DNA, 383 bp, Homo sapiens
gacaattaattaagagtccagcagggttcccgctggcagaggcgcggtccgggagccgggaagccacagggcggtgctgaattgggacaggtaacagcagggagggaactgttttcacctgcagggctgaaggagcgcggccagagcggttacaggaagccagacaaagagagagagatacttaacaggagctgcgacctatggccaagggacacagccagcccttgatgacccagcagagagagccagggaagaggccaggcgcggtgactcgtgccagtaatcccagcactttgagaggctgaggcggacagatcgccggagctcaggagttcgagaccaccctgggcaagatggcaaaaccccatctctactaaaataca

SEQ ID NO: 85213 - DNA, 514 bp, Homo sapiens
  misc_feature (62)..(62): n is a, c, g, or t
  misc_feature (119)..(119): n is a, c, g, or t
agaggatcccggagctggttctcattaactttttatgggtctcaaaattctgtgacaatttntggtcagttgtttccattaaaaagtactgattttaaaaactaataacttaaaactgncacacgcaaaaaagaaaaccaaagtggtccacaaaacattctcctttccttctgaaggttttacgatgcattgttatcattaaccagtcttttactactaaacttaaatggccaattgaaacaaacagttctgagaccgttcttccaccactgattaagagtggggtggcaggtattagggataatattcatttagccttctgagctttctgggcagacttagtttagactctggactctctcagccttggtttcactagttagctctatcactaactacattgggcattgaaaattcctctgttgtcccacgtggtgcatggatgattgtagacgaggacactgagatcctgaaggcagaagtaatttctctaagcaacgttgttggttggtgg

SEQ ID NO: 85214 - DNA, 507 bp, Homo sapiens
gactgggtaggagaatggctagactgacagccctgtgatttggcccttttcctttggaggggtgtgaatctgatgctgtaacaatttctgccttctgttggtggtatggcttggccgtgtccccacccaaatctcattttgaattgtagctcccacagttcccatgtgtcgtgggaagaacccggtgtgagataattgaatcatgggggcagcttctcccatacagttctcctagtagtgaataggtctcacgagatctgatggtctgataaagggttaaccctttcacttgcctctccttctctcttgcctgctgccacgtaagccatgcctttcaccttccaccatgattgtgaggcctccccaaccacttggaagtatgagtccattaaacctttttttctttagaaattacccagtcttggtatgtctttatcagcagcgtgaaaacaaactaatacagccggttaatatccctgcagttccctccacccgcatctcttccct

SEQ ID NO: 85215 - DNA, 404 bp, Homo sapiens
atgtactgtgtgtttcatacacatgtttcctttagtcttaaaatctggctcatggggtaaacactattataatctccatcctccagatgaggaaagtgagacttagaggttaagtacattttaggataaagtagggtatttcgataaatgtttcaaatgtgtttctggtctctgaggactacactcccaggctgctggggatacaaaataccctttctttaccataggagcacttgggtagaatatttgcagaaacaataaactggctgatatttaaagttctcttcagctctgacattctataatttcattgaccctctttgcatttaattatgttgatttttctttctaccccttgcttagctaaaaatataccccttctttgtccatgcacaggagatgga

SEQ ID NO: 85216 - DNA, 2432 bp, Homo sapiens
  misc_feature (451)..(452): n is a, c, g, or t
  misc_feature (483)..(483): n is a, c, g, or t
ccctctgtgtcgtaccaacagccgcatcgttccgaggctgtggaggccgggcgcagcggcgtcaagatggcggctgcggcagtggcggcggcggcggcggcggccgcggctgcatctcttcaggtactggagatggagagcatggagacggccgccgccggctcggcaggactggccgccgaggtccgaggcagcggcacggtggacttcgggcctgggccggggatctctgcaatggaggcgagcgggggcgatccgggcccagaagccgaggatttcgagtgcagctctcactgctcagagctgtcctggcggcagaacgagcagcggcgccagggcctcttctgcgacattaccctgtgcttcggcggggctggaggccgcgagttccgggcccaccgctcggtactggctgccgccaccgagtacttcacgcccctggctccttcgnngggggggggcccccccaggggttttttttcnccggaaggttttcccccccccggggccccttttcggacgggtggagatgcgcaagtggagctccgagccggggcccgaacccgacacagtggaagccgtaatcgagtacatgtacaccgggcgcatccgcgtcagcacgggcagcgtgcacgaggtgctggagttggccgacaggttcctactcattcgtttaaaagaattttgtggagaatttctcaagaaaaaacttcatctctcaaattgtgtggcaattcatagcttagcacacatgtacaccctgagccaacttgctctgaaggctgctgatatgatacggagaaatttccacaaagtgattcaggatgaagaattttatacgttacctttccatctcattagagactggctttcagatttggaaattacagttgattctgaagaggttctctttgaaaccgttttgaaatgggttcagagaaatgctgaagagagagagagatactttgaagaactttttaaattgctcaggttgtcccagatgaaacctacctaccttactcgacatgtcaaaccagagaggctggtagccaataatgaagtttgtgtcaagttggtcgctgacgcagtggagagacatgctctgagagctgagaatatacaatctggcacatgccagcaccccacttctcatgtgtcactattgcctcgttatgggcaaaacatggatgtgatcatggttattggaggtgtgtcagaaggaggggactatttaagtgaatgtgtgggatattttgttgatgaggacagatgggtaaatctgccacatattcataatcacctcgatggacatgctgttgcagtaacagaatcctacgtgtatgttgctggatcaatggagccagggtttgctaaaactgtagaaaggtataacccaaatttgaatacatgggaacatgtttgtagtctgatgacaagaaagcattcttttggactaacagaagtcaaagggaagctctatagcattggaggacatggcaactttagtcctggttttaaagatgtgactgtttataatcctgagcttgataaatggcacaacttggaatcggcaccaaagattcttcgagatgtcaaagcactagccattgaagaccggtttgtatacattgccgcccgcactcctgtagaccgggacactgaagatggattaaaggctgtaattacttgctatgatacagagactcgacagtggcaagatgtggaatctttgccgcttattgacaattactgctttttccaaatgtctgtggtcaattcaaacttttatcagacagcatcatgttgtcccaagagttattgtttagaaaacgaagaggcagtaagaaaaattgccagccaagtgtctgatgagatccttgaaagcttgcctccagaagtcctaagcatcgaaggagcagccatttgctattacaaagatgatgtcttcattataggaggctggaaaaacagtgatgatattgataaacagtatcggaaagaagcctaccgatattgtgcggagaggaagaggtggatgcttcttcctcctatgccacaacctcgttgtagagccactgcttgtcacgtgaggatcccataccggtacttgcatggcacacagagataccctatgcctcaaaacctgatgtggcagaaggaccgcatcagacagatgcaagagatacatcgtcacgccctgaacatgaggcgagtgccaagctctcagattgaatgctaggttctctcaagcgtgccgattaaaactgttacacccgtttcgtgaagctgaagatacccaggctgttatttaaaaaagtatgtcgataacttattttctacatgaactgattattaccccatataaaggaaatagagttaaaaactaaagaatgggagactcagttcaatacatggtcattttgttagcttgc

SEQ ID NO: 85217 - DNA, 2386 bp, Homo sapiens
ccctctgtgtcgtaccaacagccgcatcgttccgaggctgtggaggccgggcgcagcggcgtcaagatggcggctgcggcagtggcggcggcggcggcggcggccgcggctgcatctcttcaggtactggagatggagagcatggagacggccgccgccggctcggcaggactggccgccgaggtccgaggcagcggcacggtggacttcgggcctgggccggggatctctgcaatggaggcgagcgggggcgatccgggcccagaagccgaggatttcgagtgcagctctcactgctcagagctgtcctggcggcagaacgagcagcggcgccagggcctcttctgcgacattaccctgtgcttcggcggggctggaggccgcgagttccgggcccaccgctcggtactggctgccgccaccgagtacttcacgcccctgctctcgggccagttttccgagtcccgctcgggacgggtggagatgcgcaagtggagctccgagccggggcccgaacccgacacagtggaagccgtaatcgagtacatgtacaccgggcgcatccgcgtcagcacgggcagcgtgcacgaggtgctggagttggccgacaggttcctactcattcgtttaaaagaattttgtggagaatttctcaagaaaaaacttcatctctcaaattgtgtggcaattcatagcttagcacacatgtacaccctgagccaacttgctctgaaggctgctgatatgatacggagaaatttccacaaagtgattcaggatgaagaattttatacgttacctttccatctcattagagactggctttcagatttggaaattacagttgattctgaagaggttctctttgaaaccgttttgaaatgggttcagagaaatgctgaagagagagagagatactttgaagaactttttaaattgctcaggttgtcccagatgaaacctacctaccttactcgacatgtcaaaccagagaggctggtagccaataatgaagtttgtgtcaagttggtcgctgacgcagtggagagacatgctctgagagctgagaatatacaatctggcacatgccagcaccccacttctcatgtgtcactattgcctcgttatgggcaaaacatggatgtgatcatggttattggaggtgtgtcagaaggaggggactatttaagtgaatgtgtgggatattttgttgatgaggacagatgggtaaatctgccacatattcataatcacctcgatggacatgctgttgcagtaacagaatcctacgtgtatgttgctggatcaatggagccagggtttgctaaaactgtagaaaggtataacccaaatttgaatacatgggaacatgtttgtagtctgatgacaagaaagcattcttttggactaacagaagtcaaagggaagctctatagcattggaggacatggcaactttagtcctggttttaaagatgtgactgtttataatcctgagcttgataaatggcacaacttggaatcggcaccaaagattcttcgagatgtcaaagcactagccattgaagaccggtttgtatacattgccgcccgcactcctgtagaccgggacactgaagatggattaaaggctgtaattacttgctatgatacagagactcgacagtggcaagatgtggaatctttgccgcttattgacaattactgctttttccaaatgtctgtggtcaattcaaacttttatcagacagcatcatgttgtcccaagagttattgtttagaaaacgaagaggcagtaagaaaaattgccagccaagtgtctgatgagatccttgaaagcttgcctccagaagtcctaagcatcgaaggagcagccatttgctattacaaagatgatgtcttcattataggaggctggaaaaacagtgatgatattgataaacagtatcggaaagaagcctaccgatattgtgcggagaggaagaggtggatgcttcttcctcctatgccacaacctcgttgtagagccactgcttgtcacgtgaggatcccataccggtacttgcatggcacacagagataccctatgcctcaaaacctgatgtggcagaaggaccgcatcagacagatgcaagagatacatcgtcacgccctgaacatgaggcgagtgccaagctctcagattgaatgctaggttctctcaagcgtgccgattaaaactgttacacccgtttcgtgaagctgaagatacccaggctgttatttaaaaaagtatgtcgataacttattttctacatgaactgattattaccccatataaaggaaatagagttaaaaactaaagaatgggagactcagttcaatacatggtcattttgttagcttgc

SEQ ID NO: 85218 - DNA, 320 bp, Homo sapiens
  misc_feature (48)..(48): n is a, c, g, or t
tatatctcttcttctccatcaaaaagaacccttagaggaaccgatcanactctgtaataaaccatacattcggggttcctcttccccaccgaagaaagcaaatcatatcatgcaacatttgccagttgagatttaattctgatgtctgtgtggcatgtcgtaaaaggaacatggcggccaaggtatttggagatatggactaatcactttgggtcataattaaacaattgcaggcttgaccatttaccagatgattattgtattagtcttctattgctgctaaaataaatcaccacaaactcagtggcctgaaacaacac

SEQ ID NO: 85219 - DNA, 2074 bp, Homo sapiens
aaagcttcccgagagccatggttggtccaggcaggcagtcggagcacctcgtggagcggctgctaacccagggtggggtggggtggggtggaggggtctgcttgtagtactctcagtcctgatgtcacaggcgcggcaaggacatcgcaaggaggagtcggattacagtaaggatgggcagtgcagcaggcagcccgagcgcactctccagccgccggggatcttagccctggaaaggcagcctgcaaggcgctcatcccgcggaggaggcacgctctcggcgctcactgctctccacgccggggacatttccaccgaatgtagcatgaaagggctctgctctacgtgccagccttgggtgagagctgatgctgaagacaccgcggtgggattccagctgtctgattaatgagaaacataatgtattttggtggtacatgccagagtcctgctctcccggcccttgtccgtccaccagcccctcctttgcaaccatcgctggatattaaaccatttcttccctttcctcttgacactgcagctgcagtcaacctcttccccaatttcaatgcgatggacccgattcagaaagctgtaataaaccatacattcggggttcctcttccccaccgaagaaagcaaatcatatcatgcaacatttgccagttgagatttaattctgatagccaggctgcggcccactacaaaggcacgaaacatgccaagaagctcaaagcactggaagccatgaaaaataagcagaaatctgtaactgccaaggacagcgcaaagactaccttcacctccatcactaccaataccatcaataccagctctgacaaaacagggggaaaaaaaggtgcaatgaagccctgtggtttattcttaccattctgcacaagagacggtactgcagggacaccagcaatatcaacgacgacaactgtggaaatccgcaaaagcagtgttatgacaactgagatcacctctaaagtggaaaaaagcccaacgacagccactggcaatagctcatgtccttctactgagaccgaggaagaaaaggcaaaacggcttctttactgttcgctatgcaaggttgctgtcaactctgcctcgcagctggaggcgcacaacagtggtactaagcacaaaaccatgttagaagcccggaatggaagtggcactatcaaagcctttcctagggcaggagtgaaaggcaaaggacctgttaataaaggaaacacaggcctccaaaataaaacatttcactgtgaaatctgtgatgtgcacgtcaactcggaaacgcaacttaaacagcacattagcagtagaaggcacaaagacagagctgctgggaagcccccgaaacctaaatacagtccttacaacaaactacagaagacagcacatccactgggggtaaaattagtattttcaaaagaaccttcaaagccattggctccacgaattctaccaaatcctctagcagctgcagcagccgcagcagcagtggcagtgagttcccccttcagtcttcgaactgctccagcagcaacactgttccagacttctgcgcttcctccggcactcctgcggccagctcccggacccattcggaccgcccacactcctgtgctgtttgctccttactaaattccaaataggagtaattgtactgcaataatttttcaaaaaacaaaaaacaaaacaaacaaaagagaactatgcagtgtttatttatagtttaaagtatatctgaagagccaggacttttgatagtgaattgaaaaggttataaaaaagtgggggaggtttgggggtgggagggagggagtggtattttctccacattaaagcattcctcttgaacgctgattgttttagaagtgatctccagcattgatttgtagtggtatctagaccttctgaagcctctgtgactgtgcttttgggcacctatttccctctgcattgtctgtcctgctttatgaaacaactatacattgtctaagggcattaactggttccaatgtatataaaataatttactctgtagattaaaatcgtacaaaaa

SEQ ID NO: 85220 - DNA, 1290 bp, Homo sapiens
aaagcttcccgagagccatggttggtccaggcaggcagtcggagcacctcgtggagcggctgctaacccagggtggggtggggtggggtggaggggtctgcttgtagtactctcagtcctgatgtcacaggcgcggcaaggacatcgcaaggaggagtcggattacagtaaggatgggcagtgcagcaggcagcccgagcgcactctccagccgccggggatcttagccctggaaaggcagcctgcaaggcgctcatcccgcggaggaggcacgctctcggcgctcactgctctccacgccggggacatttccaccgaatgtagcatgaaagggctctgctctacgtgccagccttgggtgagagctgatgctgaagacaccgcggtgggattccagctgtctgattaatgagaaacataatgtattttggtggtacatgccagagtcctgctctcccggcccttgtccgtccaccagcccctcctttgcaaccatcgctggatattaaaccatttcttccctttcctcttgacactgcagctgcagtcaacctcttccccaatttcaatgcgatggacccgattcagaaagctgtaataaaccatacattcggggttcctcttccccaccgaagaaagcaaatcatatcatgcaacatttgccagttgagatttaattctgatagccaggctgcggcccactacaaaggcacgaaacatgccaagaagctcaaagcactggaagccatgaaaaataagcagaaatctgtaactgccaaggacagcgcaaagactaccttcacctccatcactaccaataccatcaataccagctctgacaaaacagggggaaaaaaaggtgcaatgaagccctgtggtttattcttaccattctgcacaagagacggtactgcagggacaccagcaatatcaacgacgacaactgtggaaatccgcaaaagcagtgttatgacaactgagatcacctctaaagtggaaaaaagcccaacgacagccactggcaatagctcatgtccttctactgagaccgaggaagaaaaggcaaaacggcttctttactgttcgctatgcaaggttgctgtcaactctgcctcgcagctggaggcgcacaacagtggtgagatgcagcgatttcttttttgtttcaacagctctgcaattatcttcctctgaatagattagatcttttgcagcaggggacaaaggggtggaggaaaactggcaattattacatggaaatcattaaccattaaaaaataaaaatgacga
